United States Patent Application Publication US 2017/0114356 A1 - sequence listing, part 91

SEQ ID NO: 147922 - DNA, 849 bp, Zea Mays
gtacaaagcaccaatacatataagaacgttacatacatgtacacgatcaccatgtgatctagaggtgtaagctatgtatataaaaacttaaaaaggtttaaccttgattacgaattcccacacgcctcgccttattcaaaaatccaatcctctcgggaggctttttttttaactgactcaactagacactccactgtccttggatctttaaagttggtggcactggcgcctgtaacgtggtaccccaggacacaaacacggacaaagcagggagtgcagcaggagagcattctactacagcgcaggtgtgcagcataaagcggccggccggatgcgcgcgacgatgccgccgcggccacggcgccgcgccgcgctcgcggtgcttcttgtggccaccgtgttcctcgccgccgcgtcgtcggcaccggtgtaccacgacgacgacggcggcgagtgggctgcggacgcggactacggttactactacggcagcgtggcggcctgcgcgggcacagtggcgagggcggagtgcgaagtagtggcggccaggaccaggaggagggagctgggcggcgacggcaacatcggctacggcgcgctgcagaaggaccagacgccgtgctcgtaccgcggggcgtcctactacaactgccgccccggcggcagcgccaacccctacacccggggctgcaccgccatgacccagtgcagaggctagcttagccagcgagtgagcgagcgagctgtcagctggggacatggcgaggccatggcatggcatgggggagctccaccgcctgcttgtccagtcgttcttgcaccttgcattgtagttgtactgacaaagcc

SEQ ID NO: 147923 - DNA, 944 bp, Zea Mays
ggcagatcgagcaaccagcgcgccctctcgaccctccccatggccaagatccagcctctgcctgcagtctcgtcgccggcgccggcctccaacgcggacgagccgtcgcaggtgtacacggtgtggatgaagtcgctggtgttcaacggcaacggctgcacggtgtatggcgcggacggcggcgtggcgttccgcgtcgacaactacggctgcaggggcgggcgcgaggccttcctcatggaccgcgccggcaggacgctcgtcgggatccagaggaggagctgcttcgggatgttcaggagatgggaggcctaccggtactccgaatccgagtccgacggccgcgaggagacgaggacgccgtggttcgcggtgcgcaaggcgcggcggggcggtagagctgccgtgacggtgcatggcagcggcgggaggagcggggcgtacgcgatcgtcggcgggtactcgcgcaagccggactacagaatcatcggcagcactgacggtgctgccgtggcggcgatcgccaggaagcagacgccggccggggtggttctgggagacgacgtcctgatgctgacggtggcgccggggacggaccgtctcctcgtgttgggcttggtcgtcatctgtggcctcatgacccgtcgcttgtgatggccgatggcgatgacttcagcacggccaagcatgtgatttcttcatgcgtttttttcccactttttggtggatgtattttttctggattctacggacgtacaactgtatgctggccatatatattatctatgaaacagacttcttctttttttttcaattacagacattacttgacttttctctttgctagtttttctgaacatcctatcatttggttataataagtttagcatgaacaacctctttaatttcagcataattcttgtgtccctttgcatgtccggaac

SEQ ID NO: 147924 - DNA, 2057 bp, Zea Mays
ctttcttccttcttccccaagaccgcgagtaaaaatttcgcttaaaattcgattccacgaagcagcaatcgcaagctcgaagctctaaaataatctcttcccgacgcctctggaaggtcatcatctgaacccaggtagcctccagcgctggagacgtgccgtactcaaaccctagccaccaatggcagccggcggcggggctccgtgggcggagcgcgcgcgggtggtggggacgcagatccgcaacaggttccgcgtggcgcccgtggaccaccggtcgctgtggctgcgggcggacggtcgtgtcgccactgaggcggtccggcggtggtcggatcgcgttcgggccctgctgcagaggggccggagcgcggatcggaactccacatcgacggatacatcacctgaggcggtggcaaagccttcgtccagcgttttgagattctacagaaagagagtgggcaaagaagttaatgggattgaagactctgttattttccgttcgcttcaagcattggctgttcctcttattggcaatgcatgctatgtttttatgcatggtcttaactcagttcaggtttatggtgtagagaagcttcatcaggcattacatgggagacctaaaggcaaggctcttctaacggtcagcaatcatgtggcagcgatggatgaccctttcgtaattgcttcccttctcccaccatctgttatgctggaagcacaaaagctgagatggacactgtgtgccactgatcggtgctttacaaatccagttttgtctacattcttcaggtctgttaaggtgttacctgtttctcgtggtgatggcatctaccaaaagggaatggacatggcactttcaaagcttaacagtggtggatgggttcatatattccctgaaggaagccgttcaagggatggagggaaaaccattgctcctgccaagagaggtgttggaagattggtaatggatgctgacagccttccagttgtaataccctttgtccatactgggatgcaggatataatgcctgttggaaaacgaatccccagagcaggaaaaagggtgattgtggtcgtgggtgacccaatcaactttgatgacctgctcatcgacaactgtggtgacacccaagatatccctagagggatcttgtacgacaaagtgacacagagaattgggcagcgattgcaggaactcaaggtcgaagtcgacagactggctgcagagcaggaacctgaactccaaaaccacaacgtgggtgatgatggataccggctgtggcagcaggtcgattgggaaggatttgggatagggagttccatgttgccatcagaaccttcagctgctgcgcaagtgccatcaagggaagccgagcctgaaccgcacgtggaagtggagcaaagcgtgtctccagccccaagtgcagcgacctcatacaatgttgctgttccacactggttccagcgccatgcggacccttctgaactcatggggttcgcttcccgtggcctgatcaagcatggcaagttcttggaggaaggctacagggaattccaacagtcggctactactctgcacaccttttgggtttctcgtgctaacaatgctgcacaccgatggagcactgcttaggctgcccgcagcgcttcccgtggcgcgcccctccgtcggctttagtggctacagtagcgacaaaacggtgcatcagatcactctactagctcctatacacagaacaaggacaaagcagcgcactacgccagattgagggggcactgttctaccccttacctgcgcgctacagtgcgcgtatgagtttgatagttggaaaaaattgatattggataaaaaatagatatagaaaatgatattttatagttgtggggtatatgagaaactttagagggaacattttatctcatacttttttatcttccgcagcggtttccttatattcccccactataccccactacaactataaaatattattacctaacattattcatcttttattactatttttcaactattaaataagagagcattgtgt

SEQ ID NO: 147925 - DNA, 926 bp, Zea Mays
aagaccgcgagtaaaaatttcgcttaaaattcgattccacgaagcagcaatcgcaagctcgaagctctaaaataatctcttcccgacgcctctggaaggtcatcatctgaacccaggtagcctccagcgctggagacgtgccgtactcaaaccctagccaccaatggcagccggcggcggggctccgtgggcggagcgcgcgcgggtggtggggacgcagatccgcaacaggttccgcgtggcgcccgtggaccaccggtcgctgtggctgcgggcggacggtcgtgtcgccactgaggcggtccggcggtggtcggatcgcgttcgggccctgctgcagaggggccggagcgcggatcggaactccacatcgacggatacatcacctgaggcggtggcaaagccttcgtccagcgttttgagattctacagaaagagagtgggcaaagaagttaatgggattgaagactctgttattttccgttcgcttcaagcattggctgttcctcttattggcaatgcatgctatgtttttatgcatggtcttaactcagttcaggtttatggtgtagagaagcttcatcaggcattacatgggagacctaaaggcaaggctcttctaacggtcagcaatcatgtggcagcgatggatgaccctttcgtaattgcttcccttctcccaccatctgttatgctggaagcacaaaagctgagatggacactgtgtgccactgatcggtgctttacaaatccagttttgtctacattcttcaggtctgttaaggtgttacctgtttctcgtggtgatggcatctaccaaaaggtatccatcttatgaaaacatcagtatggcctaaattttttaatgttgatgaaccgatttatccacgcgattcatattgtgaaagcatcatgaataatggggg

SEQ ID NO: 147926 - DNA, 1484 bp, Zea Mays
tgaaacatttatagccgttagacacagccgcccattaattccccaccctcggcgtttaaaatttgcaactctgctgcatcttcttccattccccactctccagtctccactagcatcagtcgccgccgcctatcctcgagcgccatttccatcaacagcatccgcctctggcaagctagcgacagcaactcatggcactccgcgcgctcgacaatacgaagcccgccgccgtcgaggagcggcccaagaaggtggctaaggtgggcgtccccgccgccgccgccaaggccgccgcctcccccgggagtggcggcaagaagaagaaggggaacgacgagaactcggcgccaagggccacggccgcggcggcggagcaggccgtggagtacatctcgtcggaggagctggaggcggcggccagccccaaggccaaggccgcggggctggtcgcggacctggactccaaggactgggtcaggacctgcgaggcgctcaacgacgcgcgccgcctcgcgatccaccaccccgcgctgctgaacccgatcctggagaaggtggtgctggcggttgtgaagacgatgaagagcccccgcagcgcggtgctcaagacgtccatcatggcctgcgccgacatcttcagctccttcggcaacctgctcgcctccgtctccgacgacgccttcgacaagctgctgctccagctcctgctgaaggcgtcccaggacaagcggttcgtgtgcgaggaggccgagaaggcgacgcgcgcgatggcggcgtcgatgccgccgctgccgctgctgaagaagctcaaggcgtacgtccaccacgccaacctcagggtcagggctaaggccgccgtcgccatctcccactgcgccgcccggatggtacggcacgccacgccacgccacgcccaggaaggcaggaacagctgctcatcagtctgcccatttcagagactcagattctcctttgttgctggcgcgcaggacatcggcgcgatgaaggagttcgggatgtcggcgctgctgcagctggcggtggagctgctgaacgaccggctgccggaggcgagggaggccgcccgcggcgtggtggcgtcgacgcacgcggccttcgtcaaggaggccgccgcgagcggccaggaggacgacgctgccgcgtcctgggagagcctctgcgcgctgagcctcccgcccatctccgcgcaggccgtcgccaagatcgctgccgccgccgccgcctcctcgcagtagccacggcacgcgtgcggacgtgcgccgctggcgttgtttttgggggtcgtctggttcggttcagaagtagcgctcgtgagtcttcagacagagctcgtttgtcgccgccgccgagtctgtttgtttgttctttctactccatgctatctcgcatggttagtgttctgtttatggcttcgtcaagtaataacatatcaattaacatagtttactagtgtggtgggtgtg

SEQ ID NO: 147927 - DNA, 1492 bp, Zea Mays
tgaaacatttatagccgttagacacagccgcccattaattccccaccctcggcgtttaaaatttgcaactctgctgcatcttcttccattccccactctccagtctccactagcatcagtcgccgccgcctatcctcgagcgccatttccatcaacagcatccgcctctggcaagctagcgacagcaactcatggcactccgcgcgctcgacaatacgaagcccgccgccgtcgaggagcggcccaagaaggtggctaaggtgggcgtccccgccgccgccgccaaggccgccgcctcccccgggagtggcggcaagaagaagaaggggaacgacgagaactcggcgccaagggccacggccgcggcggcggagcaggccgtggagtacatctcgtcggaggagctggaggcggcggccagccccaaggccaaggccgcggggctggtcgcggacctggactccaaggactgggtcaggacctgcgaggcgctcaacgacgcgcgccgcctcgcgatccaccaccccgcgctgctgaacccgatcctggagaaggtggtgctggcggttgtgaagacgatgaagagcccccgcagcgcggtgctcaagacgtccatcatggcctgcgccgacatcttcagctccttcggcaacctgctcgcctccgtctccgacgacgccttcgacaagctgctgctccagctcctgctgaaggcgtcccaggacaagcggttcgtgtgcgaggaggccgagaaggcgacgcgcgcgatggcggcgtcgatgccgccgctgccgctgctgaagaagctcaaggcgtacgtccaccacgccaacctcagggtcagggctaaggccgccgtcgccatctcccactgcgccgcccggatggacatcggcgcgatgaaggagttcgggatgtcggcgctgctgcagctggcggtggagctgctgaacgaccggctgccggaggcgagggaggccgcccgcggcgtggtggcgtcgacgcacgcggccttcgtcaaggaggccgccgcgagcggccaggaggacgacgctgccgcgtcctgggagagcctctgcgcgctgagcctcccgcccatctccgcgcaggccgtcgccaagatcgctgccgccgccgccgcctcctcgcagtagccacggcacgcgtgcggacgtgcgccgctggcgttgtttttgggggtcgtctggttcggttcagaagtagcgctcgtgagtcttcagacagagctcgtttgtcgccgccgccgagtctgtttgtttgttctttctactccatgctatctcgcatggttagtgttctgtttatggcttcgtcaagtaataacatatcaattaacatagtttactagtgtggtgggtgtgaaaagcaaaatcttttaaaaaaaaagagagagagatagcctcgcatgtagcaccggtacacagatgaacaattgcgaaagggaaatttggatccataccattaaaagatc

SEQ ID NO: 147928 - DNA, 1671 bp, Zea Mays
ctcttatccaaacgcccccgtgccccgtctgcgtcgcgtagggttttggcaacttgcacgtacgagagcgtccatggacgacggcagcagcaacaaggtggttgaggacgtcgcggaggaggaccccggccgccgcggcggtccatggaggacggatgaggccgacgccaacgagaaggcgcctcgcccgagcaggcgggtcgcttccctcgacgtcttccgcggcctcaccgtcgcgctgatgatactggtggacggcgccggcggcgagtggccggtcatcgggcacgcgccgtggaacggctgcaacctcgcggacttcgtgatgcccttcttcctcttcatcgtcggcatggccgttcccctggccctcaagaggatcccggaccgtggccgagccgtgaggagagtggtcgtaaggacgctgaagctgctcttctggggcatcctgttgcaaggcggttactcccacgctccggacgaactggcgtatggagtcgacatgaggcacgtgaggtggggcggaatcctccagaggatcgctcttgcgtacctggtggttgcggttctagagatggtgacgaaagacggcgccaaggttcatcaggaccagccgccaggttcttcaggccgcttctcccgtgtattcagaatgtatctctcccagtggatcgtcgcgtgctgcattctggtggtctacctgtcccttgcctacggggtctacgttcctgactgggagttcagagtgcgaaacgctgacagcccagactacggcaaagttctaacggtgaggtgtggtacgaggggggcgttggaccctccctgcaacgccgtaggctacatcgaccgcagagtcctgggcatcaaccacatgtaccagaagccggcatggagaaggcacagggcctgcactgatgactccccacacgaggggcctttcagagaggatgccccagcgtggtgtgtcgcgccattcgagcctgaagggatactgagctcactgtctgctgtgctgagtacggtcgtcggtgttcactacgggcatgtgcttgtccacatgaagagccatacggacaggcttaggcagtgggttaccatgggcgtagctcttctcgttctcggaatcattctgcacttctcgcatgcgatcccgctcaacaagcagctctacacgttcagctacatctgcgtcactgccggcgccgctggggtcgtcttctcagcgctctacttcttggtcgacgtcgtgagcctgcgctacgccttcgcgccgctgcggtgggtcggcatgaacgcgatgctggtgtacgtgatggccgcggaaggcgtcttcgagggcttcctcaacgggtggtactacgagagcaccaacaacactctggtttactgggtgaggaagcacgtgttcgtcaaggtgtggcactccaccagggtgggcatcctcctctacgtcctcttcgcgcagatcctcttctgggcgctcgtctccggcgtcctccaccgcgctcgcctctactggaagctctagcgagcgaacggtggcatagcatgcttttgtcttttgaactgcacatgatacacacgacacctcaaactcgaaccccaagttagtttgaagaactcaaatcacgggcaaaatggaattcggcgagcggatcggattcattatta

SEQ ID NO: 147929 - DNA, 1287 bp, Zea Mays
agattaggcgtggaattgtggcggcggcggccgtatcctcccgagctgctccctagacggcggccggtcctctacaggcggctccccagcggctacccagtcggcggtcgggactcccaagacgccgctcgtcttcctccccaggcgccaggcggccgcggctcgtgttcgtccccaggcagccacgcctcctgttcctccccaggcgtcaggcggccgtgtcctccccagccgtcggttcttgacttcatagggtatttgacactggaccaagattgtttgaggacactattaatgagatatgcaaatgttacatatctcattaatatctgcaaaaaagagatagaagatgacaataagcccatgggagttttcactaggacaggttggaaaaatttggttacaaagtatgaagaaaaaacaggcctaaagctaacaaagaaacaattgaagaataagttggacaacatgaaaaaggagtatacatggttcatggagttcaagaatgcgaccactggtcttggatggaatgaggcaaaacaaactgttgactgctccaaagattggtgggatgaacacctagcaagatgtaacaatccggataaaggtatcaaatgcaaccatgttaggttcagaaaacaaggaccaaaacatcttgatgatctacatatgttgtttgataaaatacatgttagcgggacaagtgcatcatgtcctggagatatttcatctgatgactcaagtgatgatgtgctagagatagaaagaactccagaaaatgatgaagtcaaagtggttgtttcgaaaagatccaaaccagtgaaaaggaaacgcaaggcctcatgtactgctgctgaggagaaggaagagaagagtccattctttcgactatataagaacacatgtttgaagatagaaacaacagcagagaagatatccacaagtgttgaagcatcatcaacacatccaacaagccaagtgcctagcattgcagagactatgaagatggtgaaagattgtggggttaaagagaaaatagctctaatgcacacaactacatttttgattgtgaagcctgaatttagagaggtcttctgcatgctggaaacaaatgaaggaaggtttgacttacttgagagggagcatgcaaaggaaatgatgaggcacatgtagaagattttgaattatttatttatattaatgtgttgtgagaactatttgtttgcttgctatgtaagcaccatttggaatgatgatattgtgtccataatctttgttttctgtgca

SEQ ID NO: 147930 - DNA, 300 bp, Zea Mays
gtatacgaagagtacaccacgaacaacgacggcctgatgatcagcaacagcacgtgggactacaagatcccaagcgtggacatcatcccgaagcagttcaacgccgaggtgctgaacaccggataccacaagaaccacgtgctctcttcaaaagcttccggtgaacctgccttggtccttgcctcgtccgtccactgcgcgctgcaggaagctatccgagcggcgagggtggagtttgcggacagcagtcatctggacgctcgccgctggagttccagatggatgtccctgcaccgatga

SEQ ID NO: 147931 - DNA, 426 bp, Zea Mays
atgaccgccgtctccgggtgggacgacgagtctgtcctcctcgatgtgatggtcgctgaggccaccctcgcctgtgagtcccatcgcaagaggcaggcctccacctgctccaacgatgacggcaccggatccaacaccaaatacggagatacagttgacagttcaggttcagcgacacatgcatatgctactgtgattgatatgggaggtgcattttttttgcatatttgcctgtacatctgctttgagctgatcagccttgtggacacaggcactatgttcggggagcctattatatgcaaaaacattccaagacttgttctagtaacaggtgatggttgcatggtgcaacaagaacttgaaggactggaccaagacaagtgcaggatagatagtatacgagtttattctatgggccaatggtga

SEQ ID NO: 147932 - DNA, 1187 bp, Zea Mays
gaacatgtataggtatgtacacggtttccatctttatacgtgcagtattgtttgcaggaccgtacgttacatggcgcgcggtagcctagtcgctagctcgactgctacaagaacacgagcgctgaccgtccgaccgacctagttgtctttgatatgctatgctatatgctatgctatgctacgtggtggtgttcacaattagtacagcggacacgaacacgactcatcagacagataatctgtacacaaggttcttcctcctccctctttgatttcctgcccctccacaccatggagctcgaccgctagctcacgcgcgggcggcggacagaacgcggccgcccgcgccgccgccgccgctgtgggagctccggcacgcggcgacgtcgaacccctggatcctcacggcgggcgcgaacgacgacgggccaaaactactcttgctgctactgccgctgctgctggtgctggtatacgacgtcgtcggcgtcggccggtgaacgtagctgctggtgcggatcaggtggtcgaagaagccgagctccagcggcgggtccgccgcggggtggcgctggctcagcaggaagctggggtcgtgcaccagcgggttgcccgcgcgcgccggcggcgacccgccgccgaacgccgcccagctgcaccgaccctcctcgctgctctgcgagaaaagaacgtgtttgtgttgtgagcgggggagagcttggagacaagattgctttctcggttccaggcacaagggcggtggtggtgggtacctcgttgagaaggaagggcggcgggccgaggatgaggtcggcgccgcgggggtggacgtggaccagctgctgctgggccctgcgcggccgaggcgcgcagagcaccggctcggcctcccggcagccgccgccgccgctgcccgaggcggactcgacggacagccggctcatggacctggaaggcatcctccgcgcgcaggatctcggcctcgcctttggctgccagagagtggagaggaaaggagaggagaggagaggagaggagggagggggcggcttggccttggccttggcctgcgccttttcgtgaggcgagaggggctggtgagaagaaggcggtgctgacccgtccccggccaccgcaaatataccaacaacaaccgcccccagtaggcgcccggtgggcaggtggac

SEQ ID NO: 147933 - DNA, 870 bp, Zea Mays
tccgtcctgctccttgcggtcgcgtcggcgcgcgctgcgtgtatatatagttatatacagacccgcaaatagtccccaacccaacgacgcagctagcgcgcatctccgatctgcactgcaccttcgtctccgaacaacgtcggtcgtactcgtacaccatgaaggcagtcgtcgcggcgacgatgcttctgctggtgctggtggccgcggcgacggtggcgagcgcagaccaccgtgacgacggccaccaccaccagcgccaccgcggccagagctggcaccgccacagcggcggcggccgagatggccgccggtcgactcctctggccgggctgacgcagtgcgtgacaagctgcgggtccggggtcacctcctgcatgctggactgctaccagccgctggtcgacctggaccccgtggagctgcccgtctgcctcctcaagtgcaccaacgacgccatggtctgcgccaccggctgccccgtcaccgggaacgtctagctagcttgctatagctagcccatcattatatatatatacttactcatcttaattattaaccccgccatttatttatttaactagccaccgaaccaatccaacgtgttatataataaggatatgcatgatgactaaaggatgttgttgtaatacgtagtatgtaagtcgcgtgtccacattgctactacaccatgacaccaccaccatcataaatatactgttatttacaggccttgcctactagagcccatatgttacacacatgtttctgaatattcttacactcattgatctcactcgcacccgactgtgacaactctaggtaggcagctcttcagaacatcgaggtgaaacatcagtggtatgtcta

SEQ ID NO: 147934 - DNA, 638 bp, Zea Mays
aaacgggctatgcgggccggtaagcacgttttagtgtaaaaaagcgggcttaacgggcttagagttaaacgggccgtgccgggctagcccaccgtgcctagtttcttgtccgagcccggccctggcctgcatagaaccggggcgtgccgggctcggaccgggcccaaataacgggcttcgtgccgggctcacgggcctcatgtttattgaacatctataagtagattaggcttgttctctttcggggaaaaaaagaaaaaaaaaaggaacagctgtgaggcttacccttttttcccctcatctgatggttcattcctaagggctagtttatcaaccctttcatttttcctaagaaaaattacttcattttctcaagggaaaataagaatcctttagaaaaatggagttgtcaaactagccctaattgtcccatttcctgcacatatttttagggaaaataatgacatttacttattgttgaatacgcaaaagtactaccacccttttcctgatgggtgctggcaaaccagcgtctcttaatgttcagtgcatcagtctttgcttgtgttttgtcaaaatattggagaaaatatgaagaagaaaaaaatcatgcggcgagttgaagcaacagcgtgctc

SEQ ID NO: 147935 - DNA, 2603 bp, Zea Mays
atctccataagatttggctggttttttacgttggtttgccggacctaacacaaccctcctcctttaccgggcctgggaccggctatgttgaaacgactcaaggaagtcttccaatcaacataggcggagttttagctagtttatcaaaaatcatcatgtatataatactacagtatttaaaaatgctgcagtatttttctaaacttgtgaaaaaacttcactactaaacaactcctaaggagtaactgaatgccgatgccgtgctccgccggtgaggtcaccgcggcggcactggcacgggatccatcttcctccctcgtcgtccacgttcaaacccctgccccgattccaattccatcaattccatcgaggtggcagattcgaattgattaatccgttaacaagaaaatatactagtcaccacccctctctcctctttcgtcgccatcaacgaccgcttccactccgcctgccgctcccttcctcggcagcagcccgcccgccaccgcgtgaattcgcgggggctacaaatcccgccccgcccggccctgccaccgcggcatctcacctccatccaccaccgtcgtcggccaaggaaaaggaaaaggaaaagaaaggagcggggaagcggggcactggagcagtgaccatggtgaggctcccgtacgtgaccgcgctcaccacgctcttcagctacggcctcctcttcgccttcggccagctccgcgacttcttccgcaggatcctcgacgcccgcaagcccagcaacctcaagggctacgcgccgatctgcttgggactcgaggatttctacacgcgacgcctctacctccgcatccaggactgctttggccggccgattgctagtgcaccagatgcttggttcgatgtggttgagcgctactcaaatgactgcaacaagacactccatcgtaccacagcaacaaccaaatgccttaacttgggttcctataactaccttggttttgctgcggctgatgagtactgcacccctcgtgttattgagtcactgaagaaatattcggctagcacgtgcagtgttcgagttgatggaggcaatactaagttgcacacagagctcgaagagcttgttgcaagatttgttggtaagcctgcagctattctttttggcatgggctatgtgacaaactctgctatcattccagcgctggttgggaagggaagcctgattattagtgattcactgaaccataattctatagtcaacggagctaggggttcaggggccactgttcgggtttttcaacataacaatcctgctcacttggaagaggtattgagagagcagattgcaggaggccagcctcgcacacacaggccatggaagaagatcattgtaattgtcgagggaatttatagcatggagggggagctatgcaaactccctgaggttatttctgtctgcaagaaatacaaggcctacacatatctagacgaagcacacagtattggagctgttgggaaaacagggagaggtgtttgtgagctgctcggagtggatccagctgatgttgacattatgatgggtacattcacaaaatcatttggatcatgtggaggttacattgcagcatcaaatgtaagcgtgtatagtcacttagctgttgttgactgaatacattttgaagttgacaaatctgacccaccaaatgttcattttttaggagattattcaccatctaaagcatacatgcccagcccatatttatgcaacatccatgtcacctccagcagtccagcaggtcatttcagctataaaggtcatccttggggaagatggaactaacagaggggccaagaagctcgctcaaattcgagagaacagcaatttcttccgctcggagcttcagaaaatgggttttgaggttcttggagataatgattcacctgtcatgcctatcatgctttacaatcctgctaaaattcctgcattctcaagggagtgcctgaggcaagctgttgctgttgttactgttgcatttcctgccacgccacttctacttgcgagagctaggatatgtatctcagcttcccactccagggaagatctcataaaaggattggaggttatcagcaaagttggtgaccttgtgggtatcaaatacttcccggttgagcaagaaaagaccacggctgttgaaaatctgaagaaaattcaatgaacaatggcaagaactctgaagctgttgtagggtcatcttagtgtgcatcgcatgcctcagtttggcccttctgtgcacctctgggcccttttttgtccttctgtttgtggagaaatttagactttgtacagtatgtatcatccaccatagttgaaaatataacgggcagatagacattgtcatcgaattcggagaagtaatttttccggtcaccactttaaaccatttagactatgtgactgaaaccatgtagatattattatcgatcattctggttgttttgaattggacgtagataggtccatctttgtgaccgagtaataaatctggagtacagaaatggaaaaggcagcagagctgaatccgaatattttggtgagcagtgcttagtgttgattt

SEQ ID NO: 147936 - DNA, 2181 bp, Zea Mays
tccatcgaggtggcagattcgaattgattaatccgttaacaagaaaatatactagtcaccacccctctctcctctttcgtcgccatcaacgaccgcttccactccgcctgccgctcccttcctcggcagcagcccgcccgccaccgcgtgaattcgcgggggctacaaatcccgccccgcccggccctgccaccgcggcatctcacctccatccaccaccgtcgtcggccaaggaaaaggaaaaggaaaagaaaggagcggggaagcggggcactggagcagtgaccatggtgaggctcccgtacgtgaccgcgctcaccacgctcttcagctacggcctcctcttcgccttcggccagctccgcgacttcttccgcaggatcctcgacgcccgcaagcccagcaacctcaagggctacgcgccgatctgcttgggactcgaggatttctacacgcgacgcctctacctccgcatccaggactgctttggccggccgattgctagtgcaccagatgcttggttcgatgtggttgagcgctactcaaatgactgcaacaagacactccatcgtaccacagcaacaaccaaatgccttaacttgggttcctataactaccttggttttgctgcggctgatgagtactgcacccctcgtgttattgagtcactgaagaaatattcggctagcacgtgcagtgttcgagttgatggaggcaatactaagttgcacacagagctcgaagagcttgttgcaagatttgttggtaagcctgcagctattctttttggcatgggctatgtgacaaactctgctatcattccagcgctggttgggaagggaagcctgattattagtgattcactgaaccataattctatagtcaacggagctaggggttcaggggccactgttcgggtttttcaacataacaatcctgctcacttggaagaggtattgagagagcagattgcaggaggccagcctcgcacacacaggccatggaagaagatcattgtaattgtcgagggaatttatagcatggagggggagctatgcaaactccctgaggttatttctgtctgcaagaaatacaaggcctacacatatctagacgaagcacacagtattggagctgttgggaaaacagggagaggtgtttgtgagctgctcggagtggatccagctgatgttgacattatgatgggtacattcacaaaatcatttggatcatgtggaggttacattgcagcatcaaatgagattattcaccatctaaagcatacatgcccagcccatatttatgcaacatccatgtcacctccagcagtccagcaggtcatttcagctataaaggtcatccttggggaagatggaactaacagaggggccaagaagctcgctcaaattcgagagaacagcaatttcttccgctcggagcttcagaaaatgggttttgaggttcttggagataatgattcacctgtcatgcctatcatgctttacaatcctgctaaaattcctgcattctcaagggagtgcctgaggcaagctgttgctgttgttactgttgcatttcctgccacgccacttctacttgcgagagctaggatatgtatctcagcttcccactccagggaagatctcataaaaggattggaggttatcagcaaagttggtgaccttgtgggtatcaaatacttcccggttgagcaagaaaagaccacggctgttgaaaatctgaagaaaattcaatgaacaatggcaagaactctgaagctgttgtagggtcatcttagtgtgcatcgcatgcctcagtttggcccttctgtgcacctctgggcccttttttgtccttctgtttgtggagaaatttagactttgtacagtatgtatcatccaccatagttgaaaatataacgggcagatagacattgtcatcgaattcggagaagtaatttttccggtcaccactttaaaccatttagactatgtgactgaaaccatgtagatattattatcgatcattctggttgttttgaattggacgtagataggtccatctttgtgaccgagtaataaatctggagtacagaaatggaaaaggcagcagagctgaatccgaatattttggtgagcagtgcttagtgttgatttatttgactgagtgatcttaccagtc

SEQ ID NO: 147937 - DNA, 1822 bp, Zea Mays
agaaagtgaggccacaccatcatctctcccttggcttgctcccgaataggagaaaagcgaggactcagaatcctcttcttcctcctcccttccaagtcatttctcttcagctagttattcaccttctttccttctgactcccccagacccccacagacatatgcatgcatctccctgcttcttctccatccatccattcatccatacatgcagccatggtgcagtcggtgattgagatatgagatgcaccagcacgatcgatgaccatggtcccaacaactaggaacctgttgcaccatgacggcgtcaagagcagccgcggcaggtcgtgctaccaccccggccagtactacgtcggcatcgccgcccagttggaggaccagagcagcaatccgtcaacaagattccctcggccgctggcgactatggtagtagacgatgacgaggctgctgcggcggggacgaggagctcgagctccccgggcgccgccgccgccgcaggaaacgacgacgaagaaggagactgctggctccagctaggcctcgccgccgcgtcgtcgtcggcctcctcctcctcctccggcgacaacaacatcacggctccggatccgggtccggcgcccccgcctcctgtggaggaggggctgtaccttttggcgtacgacaacaagcggaacgcgagtgcgaggccgccgccgttgttcccgctgccgcttcggagctaccacgtcgaccagtcctacggcggcgaccgcggacggtatcgaccggcggcggaagctagcgggtcggccatgtcggcgccgctggcgcctcctcctccgttcatcaggtgctccggcggcgctgccataagagtcgttagcccgccgcggcgaacggaggcgcccggcgggctgtggctgacgcttcgagcagctcccaaccaaatcagagagcctgttttgccccagatagcaaagagctacctacgaatcaaggacagcaacgtgacggtggcggtggtgatgaagtacttggccgacaagctagggatcacgccgtctcatcaggtggagctgacatgcagagggcaggttcttcgtcccttgctgccgctgaaatacgtgagagagacaatctggtgctccacggcgccgcccagggaacgagaagagacaccaccagcagccgccctgctgacttcgcggcgctcatcggctgctactgaccatgtcatgacactctgctacagcacaagtaggaacagcaagctagcaccactaaatctgtaattaactgaccttattggccgacaggctctgtgtgcagtggctaactaatgcgatgcttggacgtcctgtgatactaataattaaccgaccaaaaaaaacctcgtttttaattcccttcttcgcttggacgtcccggtttcactctacagtcggcagaagacaatcactccagaacatgtctagcgtccaggatccacaacatgtctagcgtccaggatccacaacatgtctagcgtccaggagttcagacagcacagacaatttgaacgtgttcaagatgcaatctatcagacaccaaaggtccacccgagtgtccagactcaccgccctcctttctgcatcttgaaccttgacacgggccttgaagaagcacaagtaccaggctggcaaacattcaggaaaatagtaagagaagagatcgatgtggatttacactgcaccagtgtcaagtttacaagaaagagggggggagcatcatacttttgccaacgaactagccacagaaggttcaatggtggaaacattgtcgtcgtgctcaatgatagatc

SEQ ID NO: 147938 - DNA, 667 bp, Zea Mays
aataatggaactgctcttaaggagagtgatattaagagtctttcttataagagatcattaaagcaatctttgagtcagaggcttggtttatctaggacagagtcaaatccttctccagttaaggtagttagtgtgaacaatgacacagaaaattcagtgagacggtgtcttctaaactcttatttgcataaagtagtacaatctagtgaagttattggaaaatttgaacaagataaatttcctatcgtgtcgattcacaaggagattgttctgagttttgaaaggtcatcacagctaaagattaaagcagacaatgagaatttaatagtaactccaccaagtgtggcaaagttcagtccacatataaattcaccggtgaagcataatgatgagagttcagcagaaagaacagacgcttgttgtagtggcaagaattctctagtgctttatacagctagggctggcaatgaacatgagaattgtcatgacaatgattctgaggacaagtattacttcaaattcatgtgtcgacgatgatgatagagattaagtcttgcctgaagaatcgtccagctccaattgtgaggacaaaactgtctcgaaagaaatagtctggagcagatgtagatcgagttagacccttggagaaaactacggtacctaatga

SEQ ID NO: 147939 - DNA, 105 bp, Zea Mays
atgggatcagattatgatgaatcaaaagcttggctatggtcaaaactaacacctaatccaacaagtactaacagccgcgatatcaacatgatgaccctaaaaaaa

SEQ ID NO: 147940 - DNA, 648 bp, Zea Mays
atgacggctacgatgtggccggatgagacctgttcggtggtgctcgtgcccgccggagcgagattccgcgtcgggaccatgcatgaccaggccgcatgcagcgcccacgccagaggacgtcgggtcttgctcacgcatgaagtccaaagtcccacgcgtcggctaaggccgcccctgcgctgcgccgtgcgccatagccaggcagccgcgctcgcgcgtgccatggccgggcggccgcgcccgaattgcgccgtgcgcaggggccgggccgccacgcccgctcccgcaccggggtcggggctggatccgcagcaccaacgtcgtggctggggccatggccgccgcaccgccatgccgccctcggaggccgggcagccggcctgcaccgagccgccgtgcagccgcgcccacgccgtcagcgccggggccgcgctgccgcacccacgcaggggccgacggggcctggccgccgcgcctcgcgcccacgcgcgccgggggagccttgcctgcatcgggcaggcgtgccgccagggccgcgcgccctcgcactgccggggcctcgcgcctgtgcctggccgggggccgatgctctccagcgcccgcaccatgataggaccgccaggtgctggccgccgccgccgcctgtga

SEQ ID NO: 147941 - DNA, 817 bp, Zea Mays
tcaagttataccgtgtctgaaaatgttttgataaactttccattcaggattgttctggtgccacttagtgccccatgttcaatgcaaagttctgggaattccccttctgttgtagatagtagcgctgaagggccgggagacgatagaacctgctggagatgaggatgcccatgcatctttggcacatcaagtgggcacagcagtgtcagatgataaggcacagttatcaacagatcagccaactgatatggaggcctcagagccttctttggatgagcatcatgttcaagatgagaactcttcattaggtggcaaagacagtgatggtactacttcaaatgcttcaaaatctcctaaacctggaaaagcaccatcaccagaaaagatgaaatattggaaggaacatggctttagcagtttgattgttgctgcccctggccacgaagtagagtgtcttgttgctgatctgcttccacttttgtcttattcagctccatttgctatatatcatcagtatcctgagcctcttgcaaagtgcatgtacagcttacagctatcaaagagggccattggattgcagctctctgaaccctgcctacgtgaataccaggtccttgcatcgcgcacccatccacacatgcaaatggatgcgtttggcggttatatcttgagcggcataaggatacaaaatacaaattatatgatgtaaccgccatcaacaaggatacacaagtgagtcatcaatatggttcagtcttccgatcaaaggaggatagcacgccattgtactttaaaaggcggggaaattttttgtatt

SEQ ID NO: 147942 - DNA, 669 bp, Zea Mays
caagaagaaagagcccgcgccacgccacgccacgccgccgtggacatggaggtggagctggagcacggcggggatgaaggcggcgacagagggagcgagtcctcctcctcctcctccaagaggagcttcggcgcttcttcggacgcaaccgtcagcagcacaccaagcaagctgcaagccctgaggtttgcagaggacctctcgctgccgtcggtgcaggtggtggtgatgagcgccaacatggggtgttcgcactgccggcagcgggtcgccaacgtcgtctccaagatgaacgcaggcctgctggactacatggtggacttcgggaagaaggaggtgacggtgcgcgggaaggtggtgcataccaagaagaagaagaagaggcacatgagggcactgctgggtgcagcaggagcaggttgggacgacgcccgatcggcggcgtctttgcccggcggccatgccaggacgctgtcctggttttgggggtgctacagctcatgacggccatagctagtatagtctttatataatactaatatataccgcatatatatagagagactatcatacgtctgtatgttacatttatatgtaactagtaggagctgcgtatatatagttgttgtattaataatctgttagtagtaatatatttcttctcctggt

SEQ ID NO: 147943 - DNA, 2285 bp, Zea Mays
ctattttatactgttcgtagagtgaaatttggtaaaattagtacaggagaggagtgagggagaaaaagaaaagaaacctaacatctgatgtggagacaaacccctcgccaaacctccattcacggaccacattaacgttagttattattagcctattatagaggaggattacagctcatcattggtgagtggaaaaacgattaggaaagcaggagaaggggagtggcggagtgcatagcaattagcaacatcatccagcggacagcattcctaaccctcctttctatctcacccgtttcttctctgcaagtagtactatttctccgtcatactgaagctctgctgtgtgtgcgcgcgcgcgttggaggaaggaggaagtaagcctaggaaagccatcgcccaccttctcgctacccaccaaacgccgcttggtaggagaagaattgcccgaaaagcttcccgttggccgggatctcttcttctttaattacccctggggattgcctggctcattagaccagacagggggagagagggagcgagctggccggctaggccaggagaggagaggggagacacagacaacgagcgctcgctgggaagaggaagaggttcgtggggacgcagggatccagaggaagatgaggcggtgggtcttagccatcgccattcccattctcgccgctgcttcggcggcggcgctgttccttggggctgaggcccaggcggtccagcagggccaccagacagagaggatctcaggaagtgctggtgacgtgttggaagataaccctgttgggaggctcaaggtttacgtgtatgatctccccagtaaatacaacaagaagctggtgaagaaggatcctaggtgcctgaaccacatgtttgctgctgagatcttcatgcaccggttcctgttgtcaagtgctgtccgaacatttaatcctgaagaagcagattggttctacactcccgtatacgccacatgtgatctgactccttcgggtcttccccttcccttcaaatctccacgcatgatgcgcagcgcaattgagctgattgccacgaactggccttactggaacagatcagagggtgcagatcatttctttgtcacgccacatgactttggtgcttgcttccattatcaggaagagaaagcaatcgggcggggaatccttcccttgcttcagcgtgctacactggttcagacctttggacagaagaaccatgtctgcctgaagggcgggtccatcacaatcccaccatttgcacctccccagaaaatgcaggctcaccttatccccttggacacccctcggtctatcttcgtgtacttccgtggtctgttctacgacaccagcaacgatcctgagggtggttactatgcgagaggtgctcgtgcatcagtctgggagaacttcaagaacaacccgctcttcgacatctcgactgatcacccaccgacttactacgaagacatgcagcgttcagtgttctgcctgtgccccttgggctgggctccatggagccccaggctggtggaagctgtggttttcggctgcatcccggtgatcatcgccgacgacattgtcctgccctttgcggacgccatcccgtgggaggagattggtgtgtttgtcgccgaggaggatgtcccgaagctggacagcatcctgacgtccatcccaacagatgttatactgaggaagcagcgtctcctcgcgaacccggccatgaagcaggccatgctgttcccccagcctgctcaggcgggagatgcattccaccagatcctaaacgggctcgcgcgcaagctcccacatggtgacaacgtcttcttgaagcccggggagagggtcctgaactggaccgccggaccgccaggcgacctgaagccttggtagcatctgcctgcctagaacctttttgtgaaaaaaagcaagaacgagaacatggtgatatacatacatgcgcctttaagttaccatggttgtgtacttgtatagtgctgcattttggtatgttcttctttccctgtagttgttataccatatatcttcatttatccctctcttcttttctgccctttctcactagggtatgagaatgtcagccttgtcaatcatgcggataccatagtcgaaatctacaccattttactcactctgaatgttcactgccggacagccctcctgatcgagctgacaattgccatatatacagcacatggaccgccatctttcatcatctaatgcaaaggtgaaactacttctttttgaagc

SEQ ID NO: 147944 - DNA, 2097 bp, Zea Mays
aaagttaaaaataaaagaaaatccccgtccgcactgcgagcgcgcacccgctctcgtgccgctactggcgaccgccgccgccgccctaggccacgtgctcggcagctcatcgaagcttgttgcggcagtgaacccgtctcccccagacgcgcagcaccaaaaaccctaccaccaattctagaccctcccggctctagcttccccacactccgtcgcgggctcgtgggctccggcggtggctagattcagggtgcgggagtcggcgtcgtcgtccgagatgccatccttctctgccggcgcctcatcgcagaagcagcagttcgcgagagggaggcagctgattcgacaacagcgcaagtcgctccccattgcgtcagtggagaaaaggctagttgaggaggtgaggaataacgacacactgataattgttggtgagactgggagtggcaaaactactcagcttccacaatttttgtatgatggtgggctttgtcaggatggtaaagtcattggcatcactcagcctcggagagttgcagctgttacagtagcaaagcgtgtagcggaggaatgcaatgaccatattggcaaaaaggttggatactccatcagatttgatgattccacatccaatgcaacaaggattaaatacatgactgatggtttgcttctgagggaagcacttttggatccactcttatctaagtacagtgttatagttgttgatgaggctcatgaaagaactgttcatactgatgtcttgttgggtttgttgaaaaaagtgcaacattcccgagctaataccaataaaaatgggaagaccttgcttgggcattctcaaaatgtaactattaaggaatgccaaggaataagatgtgctccactaaagctgataattatgtctgctagtttggatgctaagtgtttttctgattattttggtggtgctaaagctgtacatattcaaggtcggcaatacccggttgacatactatatacttatcagcctgagtcggattatatggatgccacactagttactatctttcagatccatttggaggaagggcctggagacattctggcatttctaactggccaagaggagattgaatcactggagagacttattcatgagcgtgctcgtttatttccaccagaaagtagtaagatatgtgttacacctatctattcatctctcccgtcagaacagcaaatgaatgcttttaagcctgcaccagctggaactcgcaaggtaaacatcaatagggtactgatgggactggattcaccatgttttaataagatccttcttaaaagaattgcatacctcaatttctcttcttatatactacctcagattctaaatgtaggtcattttagccttctcaagtattctctaaaatctaaatacaagccatcgcagaaatagtttgcactttttaccctttacttgccttctttcccctccttaataaatgttgctacctctcacaaatgaataagccatcttcccaatgcagtataaatgaaggtcaccaaggttgtttgatcctcttccttaaatctttattcacaagtctaaaatgacctatatatggaattagagggagtatcatggattactcaatcattttttatgaaggaattgtgtaacataatttattgttacatgcttttggtgtggtttgtttttctgattgatgaaaccttcttgttacaaggagattaaggtcaattatttcacctttctgcagttaattagttgtcatctaatatgtgaaaaaccatgtctatttaattctttataatgaaacgggtgattagtaatgtccacatatattgatagtctatctaaaaatcctttgcaggatttaaaccaagctcataattccaaaaatgtctacaagttcctatagtgctaacacgatactactaaactagctacgtgaccttttgttaaataatgccattttttctcaaacactcatgagaacttcatatctttgtattaaaaaagaagaggaaggggtagaaccccgagtacagaattgatgttgctgttataaagtgaaatacagaattcatcttgctatt

SEQ ID NO: 147945 - DNA, 2613 bp, Zea Mays
aaagttaaaaataaaagaaaatccccgtccgcactgcgagcgcgcacccgctctcgtgccgctactggcgaccgccgccgccgccctaggccacgtgctcggcagctcatcgaagcttgttgcggcagtgaacccgtctcccccagacgcgcagcaccaaaaaccctaccaccaattctagaccctcccggctctagcttccccacactccgtcgcgggctcgtgggctccggcggtggctagattcagggtgcgggagtcggcgtcgtcgtccgagatgccatccttctctgccggcgcctcatcgcagaagcagcagttcgcgagagggaggcagctgattcgacaacagcgcaagtcgctccccattgcgtcagtggagaaaaggctagttgaggaggtgaggaataacgacacactgataattgttggtgagactgggagtggcaaaactactcagcttccacaatttttgtatgatggtgggctttgtcaggatggtaaagtcattggcatcactcagcctcggagagttgcagctgttacagtagcaaagcgtgtagcggaggaatgcaatgaccatattggcaaaaaggttggatactccatcagatttgatgattccacatccaatgcaacaaggattaaatacatgactgatggtttgcttctgagggaagcacttttggatccactcttatctaagtacagtgttatagttgttgatgaggctcatgaaagaactgttcatactgatgtcttgttgggtttgttgaaaaaagtgcaacattcccgagctaataccaataaaaatgggaagaccttgcttgggcattctcaaaatgtaactattaaggaatgccaaggaataagatgtgctccactaaagctgataattatgtctgctagtttggatgctaagtgtttttctgattattttggtggtgctaaagctgtacatattcaaggtcggcaatacccggttgacatactatatacttatcagcctgagtcggattatatggatgccacactagttactatctttcagatccatttggaggaagggcctggagacattctggcatttctaactggccaagaggagattgaatcactggagagacttattcatgagcgtgctcgtttatttccaccagaaagtagtaagatatgtgttacacctatctattcatctctcccgtcagaacagcaaatgaatgcttttaagcctgcaccagctggaactcgcaaggtagttctagctacaaatattgctgagacttcagtaacaatacctggcatcaaatatgttatagatcctgggatggtaaaagctcgtgcttacaatcctgtgactggaatggaatcactaatcattattccagtctctaaagcgcaggctcttcaaaggagtggtcgtgctggacgtgagggaccagggaagtgcttccgattgttccaagaaagtgagtttgataagctggtggattctactgtgcctgagattaagcggtgtaacctctcaaatgttgttctgcaactcaaggctcttggaattgatgacatcataggttttgattttatggagaaaccatcaaggactgctattttgaaatcactggagcagttaatcttactaggggctctgactgatgattataagctctcagatccagttggtcatcagatggctaggctacctttggatccaatgtactctaagtcattaatagtatcaagcaaattcaagtgcttggaagaaatgctcattgttgtatctatgctttcggtggaatcaattttcttctccgtgcgtgagaagttagaagaggcaagagctgccaggaagagattcgaaagctccgaaggagaccatatcacattggtgaatgtctatcgaggagctgcagaatgcttggagaagagcagaaatgcaaatgccaaagaaaaaacaatggaaaaggctctgaacaggtggtgcagagaaaacttcatcaactaccgctctctaagacatgctcgcgatgttcacagacaaattcagggccatgtccaacagatggggctgagcatgtcgtcatgtggagatgacatggttctgtttcggagatgccttacgtctgccttcttcttgaatgcagcgatgcgacagccagatggttcatacagggcccttgcaactggccagagcgtgcagatccacccttcatctgtgcttttcaggaccaaggtcgactgtgtcatcttcaacgagctagttcggacgacacagaactatatcaagaacctgacccgtattgaccccttgtggctggctgagctcgccccgcagtactacgctaccgaagagtaattgtgatcagtggacattgggcacaacagtaatactttatggtgatgacgaattatttatatttatgcaattcgttattatattaaagtatggtgctattgccgaggagtttctagggggtagatgaaaaaaatttaagagatgggctattcgtaaagagcccgtttttacgattccctatatttattgtgtcttgactgtatttatgatgtagagtctcgaggttgtttcatgcagtttcttagttgtctcgtcct

SEQ ID NO: 147946 - DNA, 1819 bp, Zea Mays
cttccgcccgctccttttccctttcttgctccctccgccgccctgctggctgccgtcagtgctgcgtctgcgtgcgagcggagcgcatcagcagcagctcccgaattctccgccattggctcgccaccgccgcgcccttgactagctcgcctcgtctcgtctcgtctcgtccctaatctctctctctcccgaggatcaggaccgtgcgtgccatcgggtcctgagtcctgacggcgacagcctaccgcacacgcagcgcagcggcagccgagaaacaaacaggggaggggaggaggagagcagaggacgggcgctcaagcaagcaaagcgagcgagtaaccagcagctcctcagtcagcggcaagagggatcagggcgcttcccctgccagctttggtcagctctcgggcgcctgcggcagcagcccaatgaggccgctcgtcgccgctgtcctgctcgtcaccatctgcgtcgtggcggcggcgccgctacagcggcatcacaagcccggcaggacctcagggaacgcggtgggcgtgctggacgacgaccccgtggggaagctgaaggtgttcgtgtacgagatgccgcgcaagtacaacaagatgctggtggacaaggacagccggtgccttcagcacatgttcgcggcggagatcttcatgcaccagttcctgctgtcgagcgcggtgcggacgctggacccggaggcggccgactggttctacacgcccgtgtacacgacgtgcgacctgacgccgcaggggttcccgctgccgttccgggcgccgcggatgatgcggagcgccatccggtacgtggcggcgacgtggccgttctggaaccggacggacggcgccgaccacttcttcctgaccccgcacgacttcggcgcgtgcttccactaccaggaggagcgcgccgtggagcggggcatcctgccgctgctccggcgcgcgacgctggtgcagacgttcgggcagcggaaccacgtgtgcctgcaggacgggtccatcaccgtcccgccctacgccagcccgcacaggttgcaggcgcacctcgtgggacccggcacgccgcgctccatcttcgtctacttccgcggcctcttctacgacatgggcaacgaccccgaaggcggctactacgcgaggggcgctcgcgcgtcggtgtgggagaacttcaaggacaacccgctgttcgacatctcgacggagcacccggcgacgtactacgaggacatgcagcgcgccatcttctgcctgtgcccgctggggtgggcgccgtggagcccgcggctggtggaggcggtggtgttcgggtgcatccccgtgatcatcgcggacgacatcgtgctgccgttcgcggacgccatcccctgggaggacatgagcgtgttcgtggcggagcgggacgtgccgcgcctcgactccatcctcacctccatcccgctgcccgacatcctgcggaggcagcgcctgctggcgagggactccgtcaagcgggcgctgctgttccaccagcccgccaggcccggggacgccttccaccaggtgctcaacgggctggcgcgcaagctgccgcaccgcgagggcgtgttcctgcagcccggggagaaggcgctcgactgggacgccggactcgagagcgacctcaagccgtggtagtgggccagtacctagcggttcacttcttcatgttccttctttcttttattctctgatttgattggcattggcatcgatggatgttggatcacacattagtttttgtatactacggcccgtttacatgcagcagcgctatactgtatactctg

SEQ ID NO: 147947 - DNA, 2056 bp, Zea Mays
cttccgcccgctccttttccctttcttgctccctccgccgccctgctggctgccgtcagtgctgcgtctgcgtgcgagcggagcgcatcagcagcagctcccgaattctccgccattggctcgccaccgccgcgcccttgactagctcgcctcgtctcgtctcgtctcgtccctaatctctctctctcccgaggatcaggaccgtgcgtgccatcgggtcctgagtcctgacggcgacagcctaccgcacacgcagcgcagcggcagccgagaaacaaacaggggaggggaggaggagagcagaggacgggcgctcaagcaagcaaagcgagcgagtaaccagcagctcctcagtcagcggcaagagggatcagggcgcttcccctgccagctttggtcagctctcgggcgcctgcggcagcagcccaatgaggccgctcgtcgccgctgtcctgctcgtcaccatctgcgtcgtggcggcggcgccgctacagcggcatcacaagcccggcaggacctcagcctgttcttctcttctgggatccatgatcaaccgtggctgtctctaacggtagccgtgtgcgcgcgtgcggctcgcgccctgtgacccaccttgtggccgctgcctggcggctgtactcctgcaaatcgtatagccagtagccgcaaggagtacacgtatgcttccgtccccgactgcatcaagcaatgaggcatgcttgttgctttgtactacaactacaagagatcggttgtttgggaacgcggtgggcgtgctggacgacgaccccgtggggaagctgaaggtgttcgtgtacgagatgccgcgcaagtacaacaagatgctggtggacaaggacagccggtgccttcagcacatgttcgcggcggagatcttcatgcaccagttcctgctgtcgagcgcggtgcggacgctggacccggaggcggccgactggttctacacgcccgtgtacacgacgtgcgacctgacgccgcaggggttcccgctgccgttccgggcgccgcggatgatgcggagcgccatccggtacgtggcggcgacgtggccgttctggaaccggacggacggcgccgaccacttcttcctgaccccgcacgacttcggcgcgtgcttccactaccaggaggagcgcgccgtggagcggggcatcctgccgctgctccggcgcgcgacgctggtgcagacgttcgggcagcggaaccacgtgtgcctgcaggacgggtccatcaccgtcccgccctacgccagcccgcacaggttgcaggcgcacctcgtgggacccggcacgccgcgctccatcttcgtctacttccgcggcctcttctacgacatgggcaacgaccccgaaggcggctactacgcgaggggcgctcgcgcgtcggtgtgggagaacttcaaggacaacccgctgttcgacatctcgacggagcacccggcgacgtactacgaggacatgcagcgcgccatcttctgcctgtgcccgctggggtgggcgccgtggagcccgcggctggtggaggcggtggtgttcgggtgcatccccgtgatcatcgcggacgacatcgtgctgccgttcgcggacgccatcccctgggaggacatgagcgtgttcgtggcggagcgggacgtgccgcgcctcgactccatcctcacctccatcccgctgcccgacatcctgcggaggcagcgcctgctggcgagggactccgtcaagcgggcgctgctgttccaccagcccgccaggcccggggacgccttccaccaggtgctcaacgggctggcgcgcaagctgccgcaccgcgagggcgtgttcctgcagcccggggagaaggcgctcgactgggacgccggactcgagagcgacctcaagccgtggtagtgggccagtacctagcggttcacttcttcatgttccttctttcttttattctctgatttgattggcattggcatcgatggatgttggatcacacattagtttttgtatactacggcccgtttacatgcagcagcgctatactgtatactctg

SEQ ID NO: 147948 - DNA, 1922 bp, Zea Mays
ggagatccggtctgctacttatggatgccgacgagcaacagaactagtacaggtcgcaacaaccccaacgagcaaaccccccatttgccaccaaccccgacgagcggcgatgaccggcacggtgtctaagctggcggcgccccgtccggcggcaccgccgctccggccggcgtccctccgcaccgccgccctcgccttcgccccctccgcgcgccgggtccgcgtctccgtcgccgggcgagccaggagccccatcattgcgatggcttcggccaaggaaggaaatggtgcaccgaccaagaggactgcgcttcatgatctctacgagctccagggcctgtccccgtggtacgacaacctatgccgccctgtcacagacttgctgcccattatcgccagcggcgtccgtggagtcaccagcaacccaacgattttccaaaaggccatttcatcgtccagcgcatatgatgatcagttcaagcagctcatttcggctggaaaggacgcggagagcgcttactgggaactcgttataaaggatatccaagatgcgtgcaaactttttgagcccatctacgatgagactgatggggctgatgggtatgtctccgtagaggtgtctcctaggttggcaaatgacactcaaggaactgttgaagcggcaaagtggttacacaaagtggtcaaccgccccaatgtctacataaagatcccagctactgcagaatgtgttccttccatccaggaagttatcgctaatggcattagcgtcaacgtcacgcttattttctcaattgcaagatatgaggctgtgattgatgcttacctcgatgggctagaggcttctggcttgagtgacttatcccgagttactagcgttgcatccttctttgtcagccgagtggacacccttattgacaaaatgcttgacaagattggaacacctgaggcccttgccttgagaggaaaggctgcagtagcacaggccaaactagcaaatcggctctaccagaagaaattctctggcccaaggtgggaggcgttggccaagaaaggtgccaagaaacaaaggttgttgtgggcatccaccggtgtcaagaacccagcttatcctgacactctttatgtggacagtctcatcggacctgacacggtcaacacgatgcccgaccaagctttgcaagcattcatagaccacggcaccgtttcaaggacagttgatgcgaacgtgtctgaggcggaaggtgtatacagtgccttggagaagcttggcatcgactgggaagaggttggaaagcagcttgagctggaaggcgtggactccttcaagaagagctttgacagcctactcgtgagcctgcaggagaagggcaacagcctcaagatggcgagtgtgtaaagctgagaagattgggtacctgcgagtgaacgattttactaaataaaatgctagcttgctggctctcctcttagtttttacgctgtacctttgctctcaattttctgagtcggctttgtatcccaggcttgccagaacgtcattgtgtagccactgttcatggcttgtaattgctacggggtatccgataacgtcattgtggatgaggcctgtttgccctgactcttgaactcaatgtcgccatggtttgctatgcatttacgtgtgctctgcaataatctgtcattggtggcttgcaataggatgttcatagcacttctgcggcacttaggttttgagattcatcatgacataggctacaaccaccaccagacaatcactattgatcaggttgatctgtgtttccatccatgagctaccatttgcaaatataataaagattgagcaagcacattctagcatgaattgtattaagaaactgatctcgataaagagatctatctggacatcgcataaggaataa

SEQ ID NO: 147949 - DNA, 1560 bp, Zea Mays
gacgagcaacagaactagtacaggtcgcaacaaccccaacgagcaaaccccccatttgccaccaaccccgacgagcggcgatgaccggcacggtgtctaagctggcggcgccccgtccggcggcaccgccgctccggccggcgtccctccgcaccgccgccctcgccttcgccccctccgcgcgccgggtccgcgtctccgtcgccgggcgagccaggagccccatcattgcgatggcttcggccaaggaaggaaatggtgcaccgaccaagaggactgcgcttcatgatctctacgagctccagggcctgtccccgtggtacgacaacctatgccgccctgtcacagacttgctgcccattatcgccagcggcgtccgtggagtcaccagcaacccaacgattttccaaaaggccatttcatcgtccagcgcatatgatgatcagttcaagcagctcatttcggctggaaaggacgcggagagcgcttactgggaactcgttataaaggatatccaagatgcgtgcaaactttttgagcccatctacgatgagactgatggggctgatgggtatgtctccgtagaggtgtctcctaggttggcaaatgacactcaaggaactgttgaagcggcaaatcggctctaccagaagaaattctctggcccaaggtgggaggcgttggccaagaaaggtgccaagaaacaaaggttgttgtgggcatccaccggtgtcaagaacccagcttatcctgacactctttatgtggacagtctcatcggacctgacacggtcaacacgatgcccgaccaagctttgcaagcattcatagaccacggcaccgtttcaaggacagttgatgcgaacgtgtctgaggcggaaggtgtatacagtgccttggagaagcttggcatcgactgggaagaggttggaaagcagcttgagctggaaggcgtggactccttcaagaagagctttgacagcctactcgtgagcctgcaggagaagggcaacagcctcaagatggcgagtgtgtaaagctgagaagattgggtacctgcgagtgaacgattttactaaataaaatgctagcttgctggctctcctcttagtttttacgctgtacctttgctctcaattttctgagtcggctttgtatcccaggcttgccagaacgtcattgtgtagccactgttcatggcttgtaattgctacggggtatccgataacgtcattgtggatgaggcctgtttgccctgactcttgaactcaatgtcgccatggtttgctatgcatttacgtgtgctctgcaataatctgtcattggtggcttgcaataggatgttcatagcacttctgcggcacttaggttttgagattcatcatgacataggctacaaccaccaccagacaatcactattgatcaggttgatctgtgtttccatccatgagctaccatttgcaaatataataaagattgagcaagcacattctagcatgaattgtattaagaaactgatctcgataaagagatctatctggacatcgcataaggaataa

SEQ ID NO: 147950 - DNA, 1176 bp, Zea Mays
actgtcttgagaatgccctataaggtcatcgcagaccggacccacgcgtcagtgagacggaagtaactgccgcatctcaagtctcaaccctcgcctccaatcgcaacgctcccgaggagagccaggaggaggtgacggcggcgccgcgaggaaggagggatcgatcgaggatggtggacgtctcgcgcgtgcagaaggagctcaccgagtgcaaccgcgaccgggaggtatcgggcgtctccatcgcgctccacgacggcgccaacatctcccacctcaccggcaccatcgccgggcccgccgacagcccctacgagggcggcacgttcgtcatcgatatccgcctgcccggtggatatccctttgagccgccgaagatgcagttcatcaccaaagtatggcaccctaacatcagcagccaaaatggagcaatttgcttggacattctgaaagatcagtggagcccagcccttaccttgaagactgcgctcctttcccttcaagctctgctttcttctcctgcacctgatgatcctcaggatgctgttgttgcacaacagtacctgcgtgactatccaacatttgccgctacggctcgctactggacagaggccttcgcgaagagtgcatcaacgggcatggaagagaaggtgcagaagctggttgagatgggcttcccagaggatcaggtgagaagtgccctgaagagcgtggatggcgacgagaacatggctctcgaaaagctctgctctggctctgggtgaaccattctcttggggccaatacatgagcagctgtacatttcacagtgcctgctaatgctcctgctcagccatttcatataggggccgtgccatggcccatgggactggagtgagactctcctaggacaacatgagagttcgttcgtttctttaaactattttgctgttgtgtctggtaggctgaatcgactctttgcccatggaaccctggtaatatctgatgcaaaggaaacatgaggttgacataaacccccctgcagctgcaacctgtatgtcaatgccacgcttcgcttcctttgtttttttttcttttttagattacgtgataaattacttccctgcgttatcatggaagtaggattagttgccaatgactgatccgagactgagttcagcatccgaggagcatcat

SEQ ID NO: 147951 - DNA, 1102 bp, Zea Mays
atggtggacgtctcgcgcgtgcagaaggagctcaccgagtgcaaccgcgaccgggaggtatcgggcgtctccatcgcgctccacgacggcgccaacatctcccacctcaccggcaccatcgccgggcccgccgacagcccctacgagggcggcacgttcgtcatcgatatccgcctgcccggtggatatccctttgagccgccgaagatgcagttcatcaccaaagtatggcaccctaacatcagcagccaaaatggagcaatttgcttggacattctgaaagatcagtggagcccagcccttaccttgaagactgcgctcctttcccttcaagctctgctttcttctcctgcacctgatgatcctcaggatgctgttgttgcacaacagatgctagatggcaagatagggtataaatataaccatgtaaggttattcaattcgcttctcaacaagatcttattcatttagtatggaaatctgggttacctgcgtgactatccaacatttgccgctacggctcgctactggacagaggccttcgcgaagagtgcatcaacgggcatggaagagaaggtgcagaagctggttgagatgggcttcccagaggatcaggtgagaagtgccctgaagagcgtggatggcgacgagaacatggctctcgaaaagctctgctctggctctgggtgaaccattctcttggggccaatacatgagcagctgtacatttcacagtgcctgctaatgctcctgctcagccatttcatataggggccgtgccatggcccatgggactggagtgagactctcctaggacaacatgagagttcgttcgtttctttaaactattttgctgttgtgtctggtaggctgaatcgactctttgcccatggaaccctggtaatatctgatgcaaaggaaacatgaggttgacataaacccccctgcagctgcaacctgtatgtcaatgccacgcttcgcttcctttgtttttttttcttttttagattacgtgataaattacttccctgcgttatcatggaagtaggattagttgccaatgactgatccgagactgagttcagcatccgaggagcatcat

SEQ ID NO: 147952 - DNA, 867 bp, Zea Mays
gatggttactttgctagccagactaggccgccccagagcaggcattatagactggagatgagctttggagataactaactgaaacgatattcactgcaatattgaatgtaggcataagatatgaaattacatgaacgatgaataggaacagcgtggtaatagagttctggatgaacttatatgatgcttagctgaatcactattgcaggctttgtcccaattagtttatatgtgtcaatctgtttctgcagtacctgcgtgactatccaacatttgccgctacggctcgctactggacagaggccttcgcgaagagtgcatcaacgggcatggaagagaaggtgcagaagctggttgagatgggcttcccagaggatcaggtgagaagtgccctgaagagcgtggatggcgacgagaacatggctctcgaaaagctctgctctggctctgggtgaaccattctcttggggccaatacatgagcagctgtacatttcacagtgcctgctaatgctcctgctcagccatttcatataggggccgtgccatggcccatgggactggagtgagactctcctaggacaacatgagagttcgttcgtttctttaaactattttgctgttgtgtctggtaggctgaatcgactctttgcccatggaaccctggtaatatctgatgcaaaggaaacatgaggttgacataaacccccctgcagctgcaacctgtatgtcaatgccacgcttcgcttcctttgtttttttttcttttttagattacgtgataaattacttccctgcgttatcatggaagtaggattagttgccaatgactgatccgagactgagttcagcatccgaggagcatcat

SEQ ID NO: 147953 - DNA, 264 bp, Zea Mays
atgggctgcatcatcggtaagctcgccaccaccgcgcccgggtcctccctcttcttccccgccgccgcgacctctgtgggaggaggcgacgacagggaggtgcagctgcaggcgccgcggccggagcacatcgcggcggtgaagaaggatgcgtccgggtggccgctctggctctccgaggccgccggcgacgcgctccgcggctgggcgccccgcggtgccgacgccttccagaagctcgagaaggagaagaaaaggaactag

SEQ ID NO: 147954 - DNA, 1377 bp, Zea Mays
gtggtggcgctgaagaaggtgcgggtggacggcgtcggcgaggccgagagcgcgcggttcatggcgcgggagatcgcgctgctccgccgcctcggcgaccaccccaacgtcgtccgcctcgacggcctcgtcacctcccgcctcaacacggcgccgtccctctacctcgtcttcgagtacatggagcacgacctgactggcctcaccgcctgcgcagctgcctccgcccgccgcttgtccttgcctcaggtgaagtgctacatgaaacagctactctccgggatcgaacactgtcacaacaacggcgttctgcaccgggacatcaagacgtcgaacttgcttgtcagcagcgacggaatcctcaagatagccgacttcgggctcgccacctcttacgaccctgaggacgcgcggcccatgacgagccaagtgatcacgctctggtaccgtccgcctgagctcttgctagggtccactcactacggcgtcggtgtggatctctggagcgtgggctgcgtactggcagagctgctcctcggcgagccagtgttccccggaagaacagaggtggaacagctgcacaaggttttcaagctgtgtgggactccgtcggaggattactgggagaagatgaagctcgctcatcctacgttcgggccgtacgaacggtgcctggctgagaaattcaaagatgtggcaccatctaccctgtcacttctcgagactctcctgtcgattgacccggacatgagaggcactgcgactgatgctctaaacagcgagttcttcaggacagaaccatatgcctgcgagccatctagccttccgcgctatccaccgtgcaaagaaagagacgtgaagctcaagtacgagaagcacaagaggaaatccagggttaatgggtcagtagaacgtcacagaaaccgacagcacgcatcacagaatcctgggcgcagggttttcactccggatgccaataacaagccgcaagcaaatccaaaggtaccaaggctggtgacaagcacgagcacgaccaagctcgagaggtttcctccgcctcacctggacgcgtcgatcggctacagtctagacgcatcggttgacgacggggccacggaagagttcttctcgtcgtcggccgctgagctgaagaaaatgccgagcctaatcttcggccacgtgaaatcttacctggcgagtagcccgaggaagggcgtgcacaaggcaaagccaagcctcaacatggcgatggcgcctcccacccttctcatcggtgcgttccggccttactcctttgggcggtcaatggaggtgaggaggaagaacagggagcagttcagaagcaaagggagaaacgcagtaggtgcagtcaagtga

SEQ ID NO: 147955 - DNA, 1836 bp, Zea Mays
ccatttggtctcatatcttcttctcgtccgtctcgcttctctctctctctcctgaggcgcagcggtggggtggggtggggtagggggcggcattgcgagctcacaccacctgcggcgcggcgatcccgggccaccggctatcgggctatgtgatgatccgggccgtgatctcgacggctattcgcggctgaacgggcggcggcgatgaacggagcgagcgccggcgccggcggggaggcgccgctggtgtacaaggcctggaaggggaacaatgtgtttctactgaaggggaggttcatatttggccctgatgcaagatccctgtttatcaccatgttccttattgtcgcgccggtatcaattttctgcgcgttcgttgccaaggaattgatggataagttctcttatggtctgggattgccggttatgattgcagcagttctattcacagcatatgatctgagtcttctgcttctaacttctgggagagatccagggatcatacctcgcaatgcacatcctccagaacccgaagggtttgatggcaatgcagaggttggggctaaccagactccacccgtgcgtttgccccgagtgaaggatgttgttgtcaacggaatcactgtgaagacaaaatactgtgacacttgcatgttgtacaggcctcctcgttgctcccattgctctatctgcaacaactgcgtagaacgttttgaccatcactgcccctgggttggacaatgcataggacttaggaattacaggttcttctatatgtttgtattctcaacaactttgctctgcctgtatgtctttgggttctgctgggtgttcattattaagatcagaaatgccgagcagataacaatttggaaggcaatgacaaagacccctgcatctattgccttaatcatctacacattcattgcagtttggtttgttggtggcctctctgtgttccatctgtatctcatgagcacaaatcagacaacatatgagaacttcaggtatcgctatgatcagcgagacaacccatacaacaagggagtcatggaaaacatcaaagagatcttctttacaacgatccctccttccaagaacaacttctgtggtagggtcgaacaggagcatggtctgaggccccgtccaacgaatggtttcatgagtccaaacatggggagagctgttggcgacattgagatgggtagaaaaccagtggcttgggatgagcctaggatggcggctgaaattggtgatttaggagcaggtctgagcaacctgttggaggacaaggatggcaggtttcgtaccacatctccagatctcagccgcgacgcccttgcggttggaggaggcttagaagagcacggatcctcggcgatgaaccctgggcgctcaagctggggagttgaagcaggtcgatgatggcaatggcattgaccatgtaaggcggatgtagtgagatgctcagggttgttagtgccagttcgtcgctaatttgttgttttgttggagatttgaggtcactaatgttattagactttgacctgtatggttgtttctgaactttcttttcttcttcctcttaatttggggcgtcttccatgtccattgtttgaagcagtcggtttgtgacgtctccagcttggtagtgtcaggttttgtctgtatataatcggagcagtaagcctaaaataggtttcggttgcttgggtttggatggtaatggttgtgaacaatgtcgaaccttcgctttggagtaaatgaacatcgtttgatcggagtgcttatgttgagattcatttcttccttatctataagtgtcagtttatcacc

SEQ ID NO: 147956 - DNA, 2975 bp, Zea Mays
ccgcattgacttttgagccaccaagtctcgagcgatgcgccacactgcccgctgccactgaccactgattagcttcgcctcgctatacctatacatatccggcgggcggcggctcgacaggagcacctagcagccagcagcggacgcgcggacaagggcagcggcatggcggagacggcgatcacgacggtgctggccaaagtggcggagctggtggcgtgggaggcggctgtgctgctggaggtgggcgacgacgtgcgcctcctccgggacaagctcgagtggctccacaccttcatccgcgacgccgaccgccgccgccgccgccgcgacgacgagttcgtcgccgtctgggtgcgccagacccgcgacgtcgccttcgaggccgaggacgcgctggacgacttcctacaccgcgctgggcggaggaaggccgcgctgggctcccggtgcgcgctcgggtgctggtggcccggcgggtgcgccggccaggtcgcgctccgccacgacctctcggggcgtatccgccagatcaggaagcggctcgataagatctccgagaaccgcgccgactacaacatcgagcacacgcccgcgccggcctgggccgcttgctcctcctccgccaccaccctcgctgcctgggacgatctagaggagtacacggtcggcctggacaagtacagcgacatgcttaaggagcagctcctcgacgactccgtccccgcgcgcgcgctcgtggccatcgccggcgagagcagcattggcaagacgacgctcgcgcggaaggtgtaccagagcctcgaggtccgcaaccacttcgagatccgcacgtggacggtgctcccgcacaagtgccgcgccgccgacgttctccgcgacatccacgagcagatgacctcccagctgcggcggaccccgtccgcgtccaactccaagcaggccgtggaagacgcctgcgatgacaaagccttcgggccgggaaaggacatcagcaaccagctgtacaggagcatgacggggaggcggtacctcgtggtcatcgacggcagcgttgccgtcacggactggaacagcctacgagcttccctccccgacgagggcaacggcagcagggtgcttctgatcacggacttggaaggcctggaggtggtcggccacgctcaggctggccacacgtacgacccgatcgagctgacccggctgagcccggagagcacgtacgaggtgttccgacgccgggtgttcggcgcccgcggcgactgccccggccggtacaagtcgaggtactaccaagacgtgttccggatcacgcgtggcctgccgctgtcgatcgtcgtcctcgccggtatcctgcggtccaaggagctgcccgcagagtgggacgaggtgatggcgcagctggccccgccggcgcgcgagcagcaaaggggcggcagcggcggcagcagcaacagctggccccggatcatgtcgcgggccttcgacgacctgccgcaccacctcaagtcgtgcttcctatacctggcggcgatgcgggagagcaccccggtggacgcgcagcgcctggtgcgcctgtgggtggccgaggggttcgtgcgcccgcgccgcgggagcaccatggaggaggtcgggcaggggtacctcaaggagctcatctcccggtgcatggtgcagctggtggacaaggacgacttcggcgccgtgctgacggtggtggtgcacgaccggctgcacgcattcgcgcaggacgaggcacaggaggccagcttcatcgagagccacgacagcacagacgtgctcgcgccggccaccgtgcggcgcctcgccgtcctcaactccaccacggacaggtacgtccagctcagcaacgcgctccccaagctgcgctccatcatctgcgacctggtggagggtcgccgagtcaggtccagcaacttcatccgcaccagcgacctgagcttcctccatgcttccaagttcctccgtgtcatcgacatccagggactcgagctcaagaggctcccaaacgagatcggctccatgatccatttgaggtactgatcgattccgaaacactgtagctgcagaggtgagaatagaggctagattaatgtctggtcatgcattttcgtatgagcaggtacctgggtctccgctgcggccacctagagaagctcccaagcaccattggcaaccttgtcaacctgcagtcgctcatcctcggcggccgccacgttctggaggtgcccgccgcgttctggaggatcgccacgctgcggcacgtcgtcgcgcggttcgctctgccgagcagggccctgggcaacctgcacagcctccagacgctacatggcgtgcagccccgcgggtggggcggcgactacaacccgctggggaaggccgccaacctccggtcgctggagctgggcgagctgacctccgagcacgccgatgcgctcgaggccgcgttggagaacctcgacctcctggagcacctggcgctgcggggcgacccgctgccgtcgagcgtgttcagcgtcccgagcctccgccggctgcagagcctgaggctgatgggcgccatggatgagccggaggggcccagctgcgcggaggacgtccggtacatccggccgaacctgaccaggctatcgatgtggaataccgaggtggggcagaagttcgtggacatgctggccgagctgccgagcctggccgagctgacgatgatgtacgactcatacgacggcgatcggctggcgttcgtggagactgggttcccgagcctgcagaagctaaagctcggtctaccggagctggaggagtggacggtggccccggggtccatgccggggctcggcacgctgacgctgtgccggtgcgccaggatgcagatgctcccggaggcgctcgccgggatgagggagctggaggaggtggtgctgtacagcatgcccgacatcgtgagcaggatc

SEQ ID NO: 147957 - DNA, 2991 bp, Zea Mays
ccgcattgacttttgagccaccaagtctcgagcgatgcgccacactgcccgctgccactgaccactgattagcttcgcctcgctatacctatacatatccggcgggcggcggctcgacaggagcacctagcagccagcagcggacgcgcggacaagggcagcggcatggcggagacggcgatcacgacggtgctggccaaagtggcggagctggtggcgtgggaggcggctgtgctgctggaggtgggcgacgacgtgcgcctcctccgggacaagctcgagtggctccacaccttcatccgcgacgccgaccgccgccgccgccgccgcgacgacgagttcgtcgccgtctgggtgcgccagacccgcgacgtcgccttcgaggccgaggacgcgctggacgacttcctacaccgcgctgggcggaggaaggccgcgctgggctcccggtgcgcgctcgggtgctggtggcccggcgggtgcgccggccaggtcgcgctccgccacgacctctcggggcgtatccgccagatcaggaagcggctcgataagatctccgagaaccgcgccgactacaacatcgagcacacgcccgcgccggcctgggccgcttgctcctcctccgccaccaccctcgctgcctgggacgatctagaggagtacacggtcggcctggacaagtacagcgacatgcttaaggagcagctcctcgacgactccgtccccgcgcgcgcgctcgtggccatcgccggcgagagcagcattggcaagacgacgctcgcgcggaaggtgtaccagagcctcgaggtccgcaaccacttcgagatccgcacgtggacggtgctcccgcacaagtgccgcgccgccgacgttctccgcgacatccacgagcagatgacctcccagctgcggcggaccccgtccgcgtccaactccaagcaggccgtggaagacgcctgcgatgacaaagccttcgggccgggaaaggacatcagcaaccagctgtacaggagcatgacggggaggcggtacctcgtggtcatcgacggcagcgttgccgtcacggactggaacagcctacgagcttccctccccgacgagggcaacggcagcagggtgcttctgatcacggacttggaaggcctggaggtggtcggccacgctcaggctggccacacgtacgacccgatcgagctgacccggctgagcccggagagcacgtacgaggtgttccgacgccgggtgttcggcgcccgcggcgactgccccggccggtacaagtcgaggtactaccaagacgtgttccggatcacgcgtggcctgccgctgtcgatcgtcgtcctcgccggtatcctgcggtccaaggagctgcccgcagagtgggacgaggtgatggcgcagctggccccgccggcgcgcgagcagcaaaggggcggcagcggcggcagcagcaacagctggccccggatcatgtcgcgggccttcgacgacctgccgcaccacctcaagtcgtgcttcctatacctggcggcgatgcgggagagcaccccggtggacgcgcagcgcctggtgcgcctgtgggtggccgaggggttcgtgcgcccgcgccgcgggagcaccatggaggaggtcgggcaggggtacctcaaggagctcatctcccggtgcatggtgcagctggtggacaaggacgacttcggcgccgtgctgacggtggtggtgcacgaccggctgcacgcattcgcgcaggacgaggcacaggaggccagcttcatcgagagccacgacagcacagacgtgctcgcgccggccaccgtgcggcgcctcgccgtcctcaactccaccacggacaggtacgtccagctcagcaacgcgctccccaagctgcgctccatcatctgcgacctggtggagggtcgccgagtcaggtccagcaacttcatccgcaccagcgacctgagcttcctccatgcttccaagttcctccgtgtcatcgacatccagggactcgagctcaagaggctcccaaacgagatcggctccatgatccatttgaggtacctgggtctccgctgcggccacctagagaagctcccaagcaccattggcaaccttgtcaacctgcagtcgctcatcctcggcggccgccacgttctggaggtgcccgccgcgttctggaggatcgccacgctgcggcacgtcgtcgcgcggttcgctctgccgagcagggccctgggcaacctgcacagcctccagacgctacatggcgtgcagccccgcgggtggggcggcgactacaacccgctggggaaggccgccaacctccggtcgctggagctgggcgagctgacctccgagcacgccgatgcgctcgaggccgcgttggagaacctcgacctcctggagcacctggcgctgcggggcgacccgctgccgtcgagcgtgttcagcgtcccgagcctccgccggctgcagagcctgaggctgatgggcgccatggatgagccggaggggcccagctgcgcggaggacgtccggtacatccggccgaacctgaccaggctatcgatgtggaataccgaggtggggcagaagttcgtggacatgctggccgagctgccgagcctggccgagctgacgatgatgtacgactcatacgacggcgatcggctggcgttcgtggagactgggttcccgagcctgcagaagctaaagctcggtctaccggagctggaggagtggacggtggccccggggtccatgccggggctcggcacgctgacgctgtgccggtgcgccaggatgcagatgctcccggaggcgctcgccgggatgagggagctggaggaggtggtgctgtacagcatgcccgacatcgtgagcaggatcaaggaggacgaaggccaggattaccacaaagtcaagcacgtacccgtcatccagactatatactgatcatccccatctggtgaatggtgattgacccgttgt

SEQ ID NO: 147958 - DNA, 1451 bp, Zea Mays
cgcggtctgctagatacagtgacagaaacgatccgcaacgcaggcaggcccgccgcgcagcccaggatccatccatccacctcacaccgcgtcgtcgtccagctcacactccccggccgcgcccccgctgctcctcgccgcggggtcacgcgcgcaggcaggcgagcgaccagtaactgacgtctctccttcctcccccccctgctccggcccctctacaaatccccgattaaaccctagacttccctccccacccaaatgcgcgccccctcctaggcggcgcccctcgaattcggcaccggctccgccgaagggtgcgtataatgagtgcgggtttcgacaagcagatattggctcagaagctttcgaagcttaatagctcacagcagaccatagagactttatcacattggtgtgtctttcatcatcgttgctgccaacaagttgtagaaacatgggattctgagttccatgcagctcctgtagagaggagggtatctttgctgtaccttgcgaatgatattatgcagaatagcagaaaagaaggtaatggatatatagctgaattcatgagggtcatccctgctgccttgaatggagtgttgactgtaagagatgattttgggcggaatgtcccaaaaagactggccgactacagtatcaagcatgcttgttgttttgcttcaaaccaacacagaagcatggaagctgaaaactcattgacaacgaatgtatgaggcacttagggagtcaggcatcttctgcagtggggtgtctgcgccgacggggctataggctaccgtcggcacacatcaagatcgtgaagcattccatgggggagatcgtggacaacaacaacaagatgatctcaagtgaggtacccttggtgttctccaaggcatcgtcgagtttatgtcgtcatagcagacaacactggtttagacatgctgtctagactgtgcacgacaccgacctcttcaacttactcatccatgtcgtcatagcggacaacgcgtgacaagctaagtgaggtgagaaaaacttcgatgttgatagtgtgcaaattgtcgtgaagtttgcaaagtaccagcggttccatgcgtatttgtcaccaatctctcaaggattctagcggcttgtgtggacagccgtggatgagcctgtcgacaatgcaattgttcggtgagatccaattgaggcatgttttcctatgtaatcctctatttttttgaacctcattgaggattgatcatcaaacgattgtccaaaaaaatcattcatgtgccatgcaacatgttacaaatagtagtttggatttccattttgaccttgtagatgtagcgacgtgtaataggtaagctctcatggactgctataattggatgccaagtggcacaacttgtctattcttcaaatgatttattgttttgcaaatcctttgaaggaatcat

SEQ ID NO: 147959 - DNA, 2083 bp, Zea Mays
atggcggcggccggtcactgctactaccatgacgactatggcgacgatgaccacaacccatggtcaccattcatgcaatccgaagctcaaatttccccgctacgacagcaagtccaatcccttgcattgattgacatatgggaagaccgtaaaatatttgatacccaggcacaaagcctgaaagatgattttttcaggaggttaaaggacattagaaaccagttgaaaaatacaggcagtgagcagctggagaaggttgtctctagctacaaacatgtcctgaatgctcctatggatgaggatactctgatgcgaaaatgccaagcagctcttatcaattttgatgaactcaataaaacatatggaaataactccattttaggtggatgtagctattgtgcaaatggtttgcatcatacctttgttgcaactgagatatccttgagcctagatggtttgtataaagagatgcactgtagtagcaatcgttcgggctttatgcaggagctgcaggaacaacatagcattctcagaaactccatcgaacaacttaaagtgtcagaatcactcagggccaccctgatttttcatttgaaggaagcgttgaatgagcaggagctcaaagtggaacacctcagaagccagcttcaggcagctcagccccgattcaagagagcttctgagctctgcgtggggcttggaagcaacatggaaaggcgtcagccatcaaatcaagggcttaagaggtccagtctctccgatccacttagcactgttgctccagaagctgtgaaatctcttcaaaagggacaatcaagtgcagtgctgtattcacaggagggaaatggtgttgagcacagcgtgacagagacaaagcttgctgcaggtgctgcttcagatgatatacgtggtggtgctttgtcttcacgagtcaatgggggcaacactatgctgaaaatagaagagcacacttctggtaacaagaggcagaagctagaggatgacgcacatatttctcagcctcggtcagagtcaccgccgccgccgccacccccattccctcatcctgatacatttcaaccgcctccgccaccacctgagtatcctcgatcgccagatcctagcccaccaccgccacggacttcactgccaccccatataatccccccaccgccgccgccaccacccgcaatgccactccatatgttctcacatctaccacctccagctggtacatttgtaccttttcctgctggaccacctggcccaatgtattgcacttatccatcttttactcctgttgtcaactttcccatgaccagcccacctggtttccgtaatctaaccccgcctccatcttttcgaggattagctggtacattctatggccctcggttccccaccgcgcccccaccagcagacaggaaataagagtagtaacttacctgcagacttacagtgccagcagctttggcaagtatcataccagtttttttctgtttcaacagaggatacaaactcgtggggatgcgtcaccatgtgttgtagagctcaggaaactgttctattgttgtacattcagccagtcagcgtgcaacagtcaattttctgaactagttctggtcttggtcccagagtagaaagtgtagagcctgtacatgtcggctgctagagggaatttggaattccgagagcccggacccggagcaaatggctgcgtcagtttaatgatcgactgatccagtagttcctggtctaggcggtggagtaaaaactgtagattccgacagcttagggagaagatatggaacccaatagccgaagacagatgttgtagcatgacatgttgtaactcatcacagttgtgctcttcgctagatcatccgagaacacgtagatgttcttgtgatgtcttgagcgtgtaatcctgctgtttggtgtaagatatggcttcagctgctgtcgatggtcgaatctcttgctctgtttttaattacccttttttgctctcggctattctagcgccaataccttttgcgtctactttcgcatgtgttcccaaggaatttagtggtctgtcttg

SEQ ID NO: 147960 - DNA, 5329 bp, Zea Mays
cgcccccatcgaaacacagccaaaaagccaccccgtgcaaaacacatagagctcccagtcccaacccggtcaccctccctctcctgctcctcgcatcgccggtgtcctcgacggctcgcgccgtcgcgctctcgcaaaaccctagctctgcttccctccgtcgtctcgcccgttcgattgaatcgcgccgcagaagctgttgcctctcatctctctccccgccctcctccggaaaccctagcccactccgcgaggccgcgatggcggagaggaagctggatcgaccctcggcgctcggcaaaggtgggctgtcgcttgggatcgaggaggacagggttgccgccgccatggggttcgtcgaccactcgaaagatcagcaccacctggataacagcattcccctctctcctcagtggctctacgccaaacctgctgatggaaagatctcgctgcctcatgggtcctcccttgaacttgctgaaaaggaagtgaggatgttggaaggaactgttgacaggaaagaacgaaggagaaatgcatttgatgctgacagtggtcttcgttggcttgaagaggagagggagacaagcctgcttgggagaagggagcgcaagaaggatgtggaccgggatgtggataatcgcaagattgatcgccgatctgacaatgtttctgcaagggatatcactgatccgcgtgcagctcctgcatctgaaaggtggcatgatggttccacccgtggcctggggaacgagggtcgccgggatggaaaatggtcatcaagatggggacccgatgacaaggagaaggactctaggtcagacaagaaggttgatgcagagaaggatgaaacccatgctgataaactgacattcacaggaaggctgctgtctgagtctgattcccgtgataaatggaggcctcgtcaccggcaggaaagtcattctgtcggaacagctacgcaccgtgctgctccaggctttggatccgagaaaggacgtgttaaggactcaacaaatgttggttttgccgctggaagaggaaggggaaacccgaactcagttgcatccttcaaccggccatcatctgcaggatcaatcggtgctccagctgtgcatgggaaatttgcaaaaactgctgttagtttctgctacccaagagggaagcttcttgatatatacaggcagaaaaatatgatgtcgtcgtttgatgatgtccacatgaaactggacgaaattccttctgtgacactctctactgctgcaaaacctctagcatttgttgcaccagatactgttgaagaggctctcctggaagatattagaaagggtaaagtcattagcagtgaaggaatcaatgggattggaaacaaaaaggagagggcaaaagagctcgaagaacctgcttctggcattgatgatgacatgggcaaagccagttttgcaattgctgggttgggtcaagaagggtcgtcaggtttaatctcagtgaatgatgcctcctatgttgaagggacacttcctagtggtgtcagtacatctctgctgaagataagtctggaggaaaatgccatcagcaatcaacatgggattactgacacccaggaaggtttgaaaactgctgaaatcaaggaaaatgctgatcatgctcttggcactaagttacctgatgattcgaacaccctgtttgaggtaccatcctttgagcatcttcaagaacccactaggccataccaaagcaacaacatggatataaaagtgggtggccatgctaattatccagaagagttgacattatattatctggatccccaaggaggtgtgcagggtccatttctgggtgctgacataatctcttggtatgaagatggatacttcggtttggagttaccagtacgtctgtctcagtttccagatgatgttcctttccgtccacttgtcgaagtcatgccccaccttgcgcaaaagacgcaatcgcgtatacctctgccttgtgatggaaattctgagtctctggaatcatctcaaagtaaatttgaatccagtgtcccttctacttcctctgggaggactgaccaattttctatttgggattctgaaagcaatgctgttgatcctaaaagaggtgatcatgaagcatcaataccttctcgtagtggttggctgtcttcaccggaaacaggaaaggatatatcaaatactagtaatcgccagcaacacattcctgaatcagtgaatcaggatgctgaagaagtgttgtacactggtaggcctaacagcagcatgggtcaatccctacgagaccttgagaatgaccgtgcagatttccaatcgacaccacatgaccctcattctgtggctggagaagctaatttgctgcaacataatgtcccaagggacagtgatctgagtcctcttggcttactttggtctgagctggaaggacgtccaaaacaacctctctcatctaatgtacttagtgtaaatgaacgtagaaatcccaagcctacaacacccaaggacattccacctgtaaacatgagacaagggccacttagcagaatgaatgaagtttctagtgtgcgcgatgagtggcctgcaaactttggtcggctggacaacatgaatgatgcaaacatttctggcagaatccatcaggttgaagcggagcatcatttgaattttgatgggcacctgctgcttcaacagatccgacgggagcaacagcaacagcggcaggagcaattgatggcccataataatttagagttttctggtgcatttcccgggcaggtgtttgatcctttgaaccaacaccgacagcctatgaatcaacagattcctgatgtggagcatcttttgagaatccagtttgaacttgagcaacagcagcaacgccaactccaacaagagcagcaccaacggcagctacagcagcaacggcaagcccagcttttgcaacggcagcagcagcagcagcagcaacagcaacaacaaatgatccttgagcaattgttgcagcaacagctgcagggttcaaattttggcccaacaagtatggttgatcaagtcttacttcgtgaacatgtattaaatgaactgcaccagcagcctcaccatttgcaaaggcagcatgatgcagctattgaacagctcattcaagcaaaatttggtcatgggcttcatagggagcaccataatgatatgttggatgttctctcgcgttcaaatcagagacagatgcttcctttagagcagcaacttcttttaggccttcaacacgagcagcaacttaagtctcaacaattggcaaatgctctgcggcaacattcaggccaggaagaagaaaggcacttaagtggggtctggccaatggatgctgctgcccagtttatccgctcaggaaccagtccaaatcagatacacagtcgtttcgatctccttgagaaccttcagagatcgtcatcgtttgatcatcatgaacatctagaccgcagcttatccttacacgaacagttgcatatgggaggtcaaggtattcgctccctagagcggactggttctttgcctggtggtggtcctggaccaaacccagatgtcataaatgccctaacacgtcatcatggacttagtcagttggaaacacatggtgatgtataccctttagttcaaatgcctatgcttccttcaggtgttcatccccagcaacttaggcatcaggatcagcttcctggttctcacataggaaggcttgaaaggcactggtcggatgccaatggacagttacaaaacagtctaatggaatcttcacacatcaaccagttgcagattgaagcggagaaggagaggaggaatgtggaaatgaacctttctgttgacaatccacatgcatggggagcccttatgaataaagataggaatacagagcaagatttgactgatatgattcataaaaaacttgtccttcaatcacagcagtcccggggttttcctgatgtttctgttccggcatcatttcgacgtaaagatcactttgtgcaacctgttgtggagagccctctgagatcagtggacatgtcgtttgaggagtctctttctgaaaggtcactttatgcaaaatcagggcagttggcacaagaaggatcatctaatcttggtactttacccaacagtattgagaacactggaaaatttaaccttagatcaggatctggatcaatgcttgagcagaagcattttcttggaattgacgatgttcaaagtgactttctagagaccacaggtggtagaacatcagctaatcaactggttgggagtgtcaatgaattaacaaggggtaaaaggcagggttctagtgcgagtttggctggggatgatcctaatttggctgatgaaggtgttagtaaatggtctgattctggcatgtccaaaggaagctctcactccttactaaagcgctctacaaaccaacatactactacatctcagtctgttcccacagatctgtcagcaatcaggctgaagaaagcaggacttgcgtcctctgatgagaataagatggaagcaggatttgcctcagtagcccagggtatggaaggctgcgttcctagcaacaaagagacgggggcgtatggcatgccatcagccaccaacaatccagatgcctctggtcagtccttcagcgaagcgttgaagagctcgaggaagcctccgttgcagtacgatgcctccgaatctgcagactgtggcccaggtggtaagggcgcgaaaaagaaaacgaagaaaggaaagcagattgacccttctcttcttgggttcaaggtccacagtaaccggatcatgatgggcgagattgttcgagatgattagagtgtacatacgcggtaggaggtggccttagaagaatcaagattggctccaagccaaaccctaacctctgtacatgcccagccctggtgcccgctcacctcggcagaaattttgtgactgcatcttctcttagcctcttgctagctgtagtattgcccgatttctcagatttagaaaaaggagcctttcttatcggtgccccacagaagtgtcatagttttgttgatctgtgaagatatcgtagcactggagcatggaacgtttggtgtgctgttgtttcgctctgttttaataggggtaagggtctcacatgtaggagaggcctcctgctgctttggttggcattggacattgttcaactatcagatgtagaatgtcatcgcgatgtacaaacgtaataaacaaacttaggacgatcagtatcaactatatacaggcaaagagaaaaaaaacagtatcaa

SEQ ID NO: 147961 - DNA, 5183 bp, Zea Mays
cgcccccatcgaaacacagccaaaaagccaccccgtccaaaacacacacacatagctcccaatcccaacccccggccaccctccatctcctgctcctcgcatcgccggtgacctcgccgcctcgctctgtctcaaaaccctagccccggttctctccgccgcctcgccccgttcgctcggatcgcgccgcgggagccgctgcctctcctctctctccgccctccaccggaaaccctagctcactcccccgctcgctccttcggatcccgcgaggctccgatggcggagaggaagctggatcgaccctcggcactcggcaaaggtgggctgtcgcttgggatcgaggaggacagggccgccgccgccatggggttcgtcgaccactccaaagatcagcaccacctggataacagcattcccctttctcctcagtggctctacgccaaacctgctgatggaaagatctcgctgcctcatgggtcctcccttgaacctgctgaaaaggaagcgaggatgttggaaggaactgctgataggaaagaacgaaggaggaatgtatttgatgctgacagtggtcttcgttggcttgaagaggagagggagacaagccttcttgggaggagggagcgcaagaaggatgtagaccgggatgtggataaccgcaagatcgatcgccgatctgacaatgtttctgcaagggacaacactgatccgcgcacagctccttcatctgaaaggtggaatgatggttccacccgtagcctggggaatgagggtcgacgtgatgcaaaatggtcatcaagatggggccccgatgacaaggagaaggactccaggtcagacaagaaggttgatgcagagaaggatgaaactcatgctgataaacaggccttcacaggaaggctgctgtctgagtccgattcccgtgataaatggaggcctcgtcaccggcaggaaagtcattctgttggaacagctacgtaccgtgctgctccaggctttggatccgagaaaggacgtgttaaggactcgtctaatgttggttttgccgctggaagaggcaggggaaacccaaactcagttgcatccttcaaccggccatcatctgcaggatcaatcggtgctccagctgtgcatgggaaatttgcaaaaactgcagttagtttccgctacccaagagggaagcttcttgatatatacaggcagaaaaatatgatgtcgtcgtttgatgatgcccacatgaaactggacgaaattccttctatcacactctctattgctgcaaaacctctagcatttgttgcaccagatactgttgaagaggctctcctggaagatattagaaagggtaaagtcattagcagtgaaggaatcaatgggactggaaacaaggagagggcaaaagagctcgaagaacctgcttctggtattgatgatgacaagggcaaagccagttttgcaattgctgggttgggtcaagaagggtcttcaggtttaatctcagtgaatgatgccttctatgttgaagggacacttcctagtggtgtcagtacatctctgccgaagaaaagtctggagggaaatgccttcagcaatcaacataggattactgacactcaggaaggtttgaaaactgctgagatcaaggaaaatgttgatcatgatcttggcactaagctacctgatgattcgaacactctgtttgatgtaccatcctttgagcatcttcaagaaccccctaagccataccaaagcaacaacatggatacaaaagtgggtggccatgctatttatccagaagagttgacattatattatctggatccccaaggaggtgtgcagggtccatttctgggtgctgacataatctcttggtatgaagatggatacttcggtttggagttacctgtacgtctgtctcagttttcagatgatgttccttttcgcccacttgttgaagtcatgccccaccttgtgcaaaagccgcaatcgcgtatacctgtaccttgtgatggaaattctgaatctcttgaatcatctcaaagtaaatttgaatccagtgtccgttctgcttcctctgtgaggggtgaccaattgtctaactgggatactgaaagcaatgctgttgatcctaaaagaggtgatcatgaagaatcaataccttctcgtagtggttggctatcttcaccggaaacaggaaaggatatatcaaatactagtaatcgccagcagcacattcctgaatcagtgaatcaggatgccgaagaagtgttgtacactgggaggcctaacagtagcatgggtcaatctttacgagaccttgagaacgaccatgcagatttccagttgacaccacatgatccccattctgtggttggagaagctaatttgccgcagcataatgtcccaagggacagcgatctgagtcctcttggcttactttggtctgagctggaagggcatccaaaacaacctctctcatcaaatgtacttggtgtaaatgaacgtagaaactccaagcctacaacacccaaggacattctacctgtaaacatgagacaagggccacttagcaggatgaatgaagtttctagtgtgcgtgatgagtggcctgcaaactttggacggctggacaatatgaatggccctaacatttctggcagaatccctcaggttgaagctgagcatcatttgaattttgatgggcacctcctgcttcagcagatcagacgggagcaacagcaacatcaacagcgacaggagcaattgatggcccgtagtaatttagagttttctggtgcatttcccgggcaggtgtttgattctttgcaccaacaccgacagcctatgaatcaacagcttcctgatgtagagcatcttttgagagtccagtttgaacttgagcaacagcagcaacaccaactccaacaagagcagcaccaacggcagctacagcagcaacgacaagcccagtttttgcaacgacagcaacagcagcagcagcaacagatgattcttgagcaattgttgcagcagcagctgcagggttctaattttggaccaacaaatatggttgatcaagtcttacttcgtgaacatgtatttaatgaactgcaccagcagcctcaccatttgcaaaggcagcatgatgcagctattgaacaacttattcaagccaaatttggtcacgggcttcatagggagcaccataatgatatgttggatgttctctcacgttcaaatcagagacaaatgcttcctttagagcagcaaattcttttaggccttcagcatgagcatgaacaacaacttcagtcccaacaattggcaaatgctctgcggcaacattcaggcagggaagaagaaatgcacttaagtggggtctggccaatggatgatgctgcccagtttatccgctcaggaaccagtccaaatcagagacacggttgtttcgatctcctggagaaccttcagagatcgtcatcgtttgatcatcatgaccatctagaccgcagcttatcgttacaggaacgattgcatatgggtggtctaggtattcactccctagaacgatctgattctttgcctggtggtggtcctggaccaaacacagatgtcataaatgccctatcacgccatcatggacttgggcagttggaaacacatggtgatgtataccctttgggtcaaatgcctatgcttccttcaggtgttcatcctcagcaacataggcatcaggaacagcttcctggttctcacataggaaggcgtgaaaggcactggtcagatgccaatggtcagttgcaaaatagtctaatgcaatcttcacacatcaaccagttgcagatggaagtggagaagcagaggaggaatgtggaaatgaacctttctgttgacaatccacatgcatgggcagccctaatgaataaagagaggaatgcagaacaagatttgagtgatatgattcacaagaaacttgcccttcaatcgcagcagtcccttggttttcctgatgtttctgttgcggcatcatttgggcataaagatcactttgtgcaacctgttgcggagaaccctctgaaatcagtggacatgttgtcgtttgaggagtctctttcagaaaggtcactttatgcaaagtcagggcagttggcacaagagggatcagctaatctgggtactttacccaacagtattgagaacactggaaattttaaccttagaccaggatctggatcaatgtttgagcagaagcatttccttggaattgacgatgttcaaagtgacttttcagagaccacaggtggtagaacatcagctaatcaactggttgggagtgtcaatgaattaacaaggggtaaaaggcagggttctagtgcaagtttggctggggatgatactaatttttctgaagaagctgttagtaaatgatgtccatatgcaggtctgattctggcatgtcaaaaggaagctcacactccttactaaagcgctctacaagccaacatagtactacatctcagtctgtttctgcagatctgtcagtgatcaggctgaagaaagcaggacttgcatcctctgatgagaataagatggaatcaggattggcctcagtagcccagggtatggaaggctgcgttattagcaacaaagagacgggggcgtatggcatgccatcagccaccaacaatccagatgcctctggtcagtccttcagcgaagcgttgaagagttcgaggaagcctcagttgcagtacgatgcctccgaatctgcagatggtggcccaggtggtaagggcgcaaagaagaaaacgaagaaagggaagcagattgacccttctcttcttggcttcaaggtccacagtaaccggatcatgatgggcgagattgttcgagatgattagcacgcatgagtgtacatacccggtaggagttggccttagaatcatgattggcttcaagctctacagtaaaccctaaactctgtacatgccagaaattttgtgccatggcttcacttctgcttagatcttctcttagcctctgttagttatagacttgcccgatttctcaggtttacagaagtgtcatttgtacagaacagccaagatcatcatgtatttagtggcaaagttttattgatctgtgttaaactgtgaagatgtcgtagtgacggaacttgg

SEQ ID NO: 147962 - DNA, 5422 bp, Zea Mays
cgcccccatcgaaacacagccaaaaagccaccccgtccaaaacacacacacatagctcccaatcccaacccccggccaccctccatctcctgctcctcgcatcgccggtgacctcgccgcctcgctctgtctcaaaaccctagccccggttctctccgccgcctcgccccgttcgctcggatcgcgccgcgggagccgctgcctctcctctctctccgccctccaccggaaaccctagctcactcccccgctcgctccttcggatcccgcgaggctccgatggcggagaggaagctggatcgaccctcggcactcggcaaaggtgggctgtcgcttgggatcgaggaggacagggccgccgccgccatggggttcgtcgaccactccaaagatcagcaccacctggataacagcattcccctttctcctcagtggctctacgccaaacctgctgatggaaagatctcgctgcctcatgggtcctcccttgaacctgctgaaaaggaagcgaggatgttggaaggaactgctgataggaaagaacgaaggaggaatgtatttgatgctgacagtggtcttcgttggcttgaagaggagagggagacaagccttcttgggaggagggagcgcaagaaggatgtagaccgggatgtggataaccgcaagatcgatcgccgatctgacaatgtttctgcaagggacaacactgatccgcgcacagctccttcatctgaaaggtggaatgatggttccacccgtagcctggggaatgagggtcgacgtgatgcaaaatggtcatcaagatggggccccgatgacaaggagaaggactccaggtcagacaagaaggttgatgcagagaaggatgaaactcatgctgataaacaggccttcacaggaaggctgctgtctgagtccgattcccgtgataaatggaggcctcgtcaccggcaggaaagtcattctgttggaacagctacgtaccgtgctgctccaggctttggatccgagaaaggacgtgttaaggactcgtctaatgttggttttgccgctggaagaggcaggggaaacccaaactcagttgcatccttcaaccggccatcatctgcaggatcaatcggtgctccagctgtgcatgggaaatttgcaaaaactgcagttagtttccgctacccaagagggaagcttcttgatatatacaggcagaaaaatatgatgtcgtcgtttgatgatgcccacatgaaactggacgaaattccttctatcacactctctattgctgcaaaacctctagcatttgttgcaccagatactgttgaagaggctctcctggaagatattagaaagggtaaagtcattagcagtgaaggaatcaatgggactggaaacaaggagagggcaaaagagctcgaagaacctgcttctggtattgatgatgacaagggcaaagccagttttgcaattgctgggttgggtcaagaagggtcttcaggtttaatctcagtgaatgatgccttctatgttgaagggacacttcctagtggtgtcagtacatctctgccgaagaaaagtctggagggaaatgccttcagcaatcaacataggattactgacactcaggaaggtttgaaaactgctgagatcaaggaaaatgttgatcatgatcttggcactaagctacctgatgattcgaacactctgtttgatgtaccatcctttgagcatcttcaagaaccccctaagccataccaaagcaacaacatggatacaaaagtgggtggccatgctatttatccagaagagttgacattatattatctggatccccaaggaggtgtgcagggtccatttctgggtgctgacataatctcttggtatgaagatggatacttcggtttggagttacctgtacgtctgtctcagttttcagatgatgttccttttcgcccacttgttgaagtcatgccccaccttgtgcaaaagccgcaatcgcgtatacctgtaccttgtgatggaaattctgaatctcttgaatcatctcaaagtaaatttgaatccagtgtccgttctgcttcctctgtgaggggtgaccaattgtctaactgggatactgaaagcaatgctgttgatcctaaaagaggtgatcatgaagaatcaataccttctcgtagtggttggctatcttcaccggaaacaggaaaggatatatcaaatactagtaatcgccagcagcacattcctgaatcagtgaatcaggatgccgaagaagtgttgtacactgggaggcctaacagtagcatgggtcaatctttacgagaccttgagaacgaccatgcagatttccagttgacaccacatgatccccattctgtggttggagaagctaatttgccgcagcataatgtcccaagggacagcgatctgagtcctcttggcttactttggtctgagctggaagggcatccaaaacaacctctctcatcaaatgtacttggtgtaaatgaacgtagaaactccaagcctacaacacccaaggacattctacctgtaaacatgagacaagggccacttagcaggatgaatgaagtttctagtgtgcgtgatgagtggcctgcaaactttggacggctggacaatatgaatggccctaacatttctggcagaatccctcaggttgaagctgagcatcatttgaattttgatgggcacctcctgcttcagcagatcagacgggagcaacagcaacatcaacagcgacaggagcaattgatggcccgtagtaatttagagttttctggtgcatttcccgggcaggtgtttgattctttgcaccaacaccgacagcctatgaatcaacagcttcctgatgtagagcatcttttgagagtccagtttgaacttgagcaacagcagcaacaccaactccaacaagagcagcaccaacggcagctacagcagcaacgacaagcccagtttttgcaacgacagcaacagcagcagcagcaacagatgattcttgagcaattgttgcagcagcagctgcagggttctaattttggaccaacaaatatggttgatcaagtcttacttcgtgaacatgtatttaatgaactgcaccagcagcctcaccatttgcaaaggcagcatgatgcagctattgaacaacttattcaagccaaatttggtcacgggcttcatagggagcaccataatgatatgttggatgttctctcacgttcaaatcagagacaaatgcttcctttagagcagcaaattcttttaggccttcagcatgagcatgaacaacaacttcagtcccaacaattggcaaatgctctgcggcaacattcaggcagggaagaagaaatgcacttaagtggggtctggccaatggatgatgctgcccagtttatccgctcaggaaccagtccaaatcagagacacggttgtttcgatctcctggagaaccttcagagatcgtcatcgtttgatcatcatgaccatctagaccgcagcttatcgttacaggaacgattgcatatgggtggtctaggtattcactccctagaacgatctgattctttgcctggtggtggtcctggaccaaacacagatgtcataaatgccctatcacgccatcatggacttgggcagttggaaacacatggtgatgtataccctttgggtcaaatgcctatgcttccttcaggtgttcatcctcagcaacataggcatcaggaacagcttcctggttctcacataggaaggcgtgaaaggcactggtcagatgccaatggtcagttgcaaaatagtctaatgcaatcttcacacatcaaccagttgcagatggaagtggagaagcagaggaggaatgtggaaatgaacctttctgttgacaatccacatgcatgggcagccctaatgaataaagagaggaatgcagaacaagatttgagtgatatgattcacaagaaacttgcccttcaatcgcagcagtcccttggttttcctgatgtttctgttgcggcatcatttgggcataaagatcactttgtgcaacctgttgcggagaaccctctgaaatcagtggacatgttgtcgtttgaggagtctctttcagaaaggtcactttatgcaaagtcagggcagttggcacaagagggatcagctaatctgggtactttacccaacagtattgagaacactggaaattttaaccttagaccaggatctggatcaatgtttgagcagaagcatttccttggaattgacgatgttcaaagtgacttttcagagaccacaggtggtagaacatcagctaatcaactggttgggagtgtcaatgaattaacaaggggtaaaaggcagggttctagtgcaagtttggctggggatgatactaatttttctgaagaagctgttagtaaatggtctgattctggcatgtcaaaaggaagctcacactccttactaaagcgctctacaagccaacatagtactacatctcagtctgtttctgcagatctgtcagtgatcaggctgaagaaagcaggacttgcatcctctgatgagaataagatggaatcaggattggcctcagtagcccagggtatggaaggctgcgttattagcaacaaagagacgggggcgtatggcatgccatcagccaccaacaatccagatgcctctggtcagtccttcagcgaagcgttgaagagttcgaggaagcctcagttgcagtacgatgcctccgaatctgcagatggtggcccaggtggtaagggcgcaaagaagaaaacgaagaaagggaagcagattgacccttctcttcttggcttcaaggtccacagtaaccggatcatgatgggcgagattgttcgagatgattagcacgcatgagtgtacatacccggtaggagttggccttagaatcatgattggcttcaagctctacagtaaaccctaaactctgtacatgccagaaattttgtgccatggcttcacttctgcttagatcttctcttagcctctgttagttatagacttgcccgatttctcaggtttacagaagtgtcatttgtacagaacagccaagatcatcatgtatttagtggcaaagttttattgatctgtgttaaactgtgaagatgtcgtagtgacggaacttggaacgtttgtgctgttgtttctttctgtttaggccttgttcgctctcaatccatatagatttagtgggtttaaattctaagcatgtcaaacttcttaattttttcaatctcatctaatccatgtgtcatagaaataaccgaataaggtaggtatttcatagtgaggttaaatctatcatttaatctatttatttcgtaaagctgattattcttttgatctatgtatctctaaaagctagttattcttttgtttc

SEQ ID NO: 147963 - DNA, 240 bp, Zea Mays
atgggtctggctccgcccctgcaggaggccaagatgctccgagtggtggatgcgttttcgagccaacaggtcgggtcaggcggaggagggctgaggcatcacggcgtcggcgtcgaagcagaggagggggcgatggtgcgagtgcgatcccaggcgaaggagggacgcgtttacgcacggccgcaacatttgaggagggcatgtatggggctcctggtggtggcgcacgatggcgattga

SEQ ID NO: 147964 - DNA, 1367 bp, Zea Mays
cagagaaggagaaaagtggtatgcgtggtcatgaactagaattgtactatacttgcattgcatagacagcctgtggaggagaataccttgattgttttaaaacgtggatcactactacaataaaaagaacacctctctaactgcaaaattacctgaatatctacacactgcaataacaaataaggcactcactcaagggtgatcgatccaatccatcattttctcagctagtatacacctgcaggtcggagagaaggctgtggcgatcatccactccatgagattgtaggaagaactgaggatgatctcgaatccgcaagtcctcacagcaagagaggcctccgttgagtttggataccacacgagaaaaaaatgaacacaaaaatccatcagaactcgaccaacaacagtccaagagtagcagaagcatcccgtggctgcacgcatacacttttctctccttccaacttgagggaagattcagcaacgcaaaaggttgaacggttacactactactgcccagactcgtcatcggactcgccgtcctcgcggtcgtcctccccgtcctcctgctgctggtgatggtgatgatggtgcccgtgcgcgtgatgcatctggccgccgccgccggcggcagcacccacctggtggtagaactggctgatcgactgcgcggcgagcacgccgatgtggccgtcctgcgatagcccgagctcgagccccggcatggcggcggcgtgtccagcgaacatgggcgcaaagccgatgtggccgccggcgccgagggtggctccggcggcggaggctcccggcagctcgaagcccgcggggatccccatccgctgcatgataccggcggcatcgcccgtgcccgcggcggcagagttcaggaaggagggcgaggagaagccggcggacggcgcccacatgtggtggtgcggcctggcgagcccggaggtgggcgacgggagcgagggcgcgacggaggcgagcgcggacgccggtatggtgcccgtgccggtggcggcgacgatggccggctcggcctgctgcagcagccactggacggtctcgccgtcggacttgtggccgagttcccgcgtgagctggaagatccgcgcggcgcagagcgcgggcatccggatccgccggcccctgccgtcgaccttggtgtgtcggtccttgttggagctccgcttgggcgcgagcgcctgctgcctcctctccccgggctgcgccaccacctgcagctgctgctgctccttccctccgccgcctccgtcctgctgcgactggtggatttggatttgcaggtgctgcgccggctgctgctgctgctgctggtagtccttaggatccagctgctg

SEQ ID NO: 147965 - DNA, 976 bp, Zea Mays
atgcactcgtacgtcgagcttggcccggtcggccttggtctgcgacgcggtggacgtggatccgaggacgctacgacaacggacttcatcttggcgtggacctcgaggtcgacatcgatgcagaagaggatgtcctctccggggaggtgggtcgatggcagcgagtacgccatcatcaccgccgtgcagggcaccttcggctacctggacccggagtattaccatacggggcagctgactgacaagagcgacgtctacagcttcgaagtgatactcgctgagctcctgacgaggaacaagccgatcatcgagaaggggaacggcgagaaggagaacctgtccaactacctgtgggaggccaaggagaaacctctcgaggagatagtggacggtcaggtctgggaggaagcgagcaaggaagcggtcgtgtgctttgctcgcctggcgctggagtgtctggatctgaggcgagaggcgaggccaaccatgaaagacgtggagttgaggctgcagctcctcaaggccaaggcacgcgctgctgcttcgggaccgagagcggacggcgagttccatcctcccggtgaaacagggcgacgcactaggcgctacggcgtggttccggtgactgctcaggatgggacgcgtcagtacagcctagagcaggagatcgcgtcgtccctgtggataccacgctgaagttggaagccataccatcattagcgcggtgccgacggcggtgcggggtccgacaccatcgggcggtcatcgtgagctcagcaacgaccatccccgcgacacggctgctcctgatccggtgatggggttcccggttcctggacagctccttcaactgggaatgggggcggctggaagtgagcgaggatggaaggggagtgtggttaggggcggggatgggaggcgccgcgaccgccgccgccatggcgaggtgggtctgcggcggctccggtcggtgcag

SEQ ID NO: 147966 - DNA, 82 bp, Zea Mays
tttgcaacagtgtgccatttctcagtagcactattttcaagattcagatcagcttgtgacaaacatccatcacaccattacg

SEQ ID NO: 147967 - DNA, 2131 bp, Zea Mays
acgcgagggcgagagcgaggcgccgaggcggcgcacacacagacacggcacgcgcgacgcacgcggcctcacgccgtcacctgctccactccgctccgctccgctgccgtccagccggtccaggtccatttagcgaggcggaaagggaggggggcgcgagcccagcggaagccccgaccccgaccccgaccgcgacccggaagaggaggaggaggaggaggaggaggaggaggagagagagagagagagagagggagagggagggacagacggggcgcggcgaggaggccggcgccggcggcccgcgctcgcggcgccggcgatgggggaggtggccgcgctgcgccagctcgtcggccaggttcaggagctctgggacctctacggcgccaacgcccaccccctgcccaggtggtatttacttgactttgaacatggttcaatcatggatgattattgtggaggaaggtctggatacaactcagaattactgaagatcatggaagctaaccaatctccccctcgcaagcgaccgcggagagatcgaaaccgtgaaaaggcaccctcctcaaacaagactgaagtaatgcaacaagagatctggagagatttccctgaagatctttttgaaactgtcattgcaaggcttccagttgctgcaatttttcgattccgcactgtctgccgaaagtggtcttctcttttgggctcagacagtttctctcatcagtactctgaagctccacgtgggctgccatggttctatacaatcacccatgagaacgcgaacaacaatgttgcaatgtatgatccttcgctgaagaaatggcaccacccatccgttcctctcactcctacaaagatagttattccagtggcatctgtgggtggccttgtatgtttattggatctgagccacaagaatttctacatttgcaaccctcttatgcaatcactcaaggagatcccaccaagatcagtccagggatggtcaagagtcgctgtagggatggtgttgaatggaagaagttctagtgatggctacaaagttatgtggtttggaaatgatgggacttttgaagtctatgactctacaaagaacatgtggtcttgccctggaacttttcctccaagcatcaaacttccacttgctctaaatttcaggtcacagcctgtggcggttggcagcacggtatacttcatgtgtgcagagccagatggtgttttgtcatatgatgtaagcactgggatttggaggcaatttgccatcccactgccaccgcatctgaccgaccacacacttgccgagttccagggaagggttatgctggtgggtctgctgtgcaaaaatgcagcgacctgtgtctgcatttgggagttgcagaagatgactctcctctggaaggaggtggacagaatgccaaatatctggtgcttagagttctacggtaagcacatgaagatgacatgcctgggcaacagtggtttgctcatgctctccttgaaggcgaagcgtatgaaccgccttgttacatacaaccttctgaaaagggagtggcaaaaggttcctgattgcgtgctaccatacagccgcaaaaagcaatggatagcgtgtggcacagcatttgatccggtcccctgcgccttggcctgacatggaatttaccttctttgcccgagtaccataatactatagtgaattcgtatcattggcctatatttttagatctttctaatgttatgatgagctctgcaaaaccgcgttcactgtggtttgttttctatcacgctgacgcatttgaaccgtttcctttgatcacctgctgctacttgggtcactgctacatcaattgggcaagtcgacctgaatatgtttcattgaagtaaaaaacggaacgccaggtgtctgtatttggtcttggttttggtatgtaccgtcaacttgtaatctttctgaacttgcagtttcctgtccagaaccgagtttattatacaataaagaccgggatgttgacgttttgattctggtgcatggagattgtgtttcttgttattaccatgaaaacacatgtacatgtacttctgtttcaggctgcctactatttatcaatttatgtgcctacttttgatg

SEQ ID NO: 147968 - DNA, 1275 bp, Zea Mays
accgtgcccccgcctccctctcccgtcgccgcgcatgcacaccccgcctcccaggtcccagcaaaatctccggcgcatggggaccgccgccgccggccgccccacccgacacctctctgattctctccctctatataacctgacctgatctcaaggtgctgctcgaagctaccctaaaccgccgccgccgccgccgccgattgctcgagctcgcttctttacggcggttctgcatctgcgtgctgatatcttcttgtcatgttctctcgttctgtgcttctgtgattttttcctattttctctcaactgtaccagggattggttcgtagctcgggctgatgatgatttggatccgaaaggatcttagcggatttcggtgaggcagattcgtccgccgctgatcgccttatgttgttacacacactgaagccctttcgacgcgtctctcagattggttcttttcccctttcgtctctttgtctaatttctcactggatgttgctgcaatgcgatgatgattcataacatggttttggcagtggttaccccttgtggtcaccgtgagccgtcaaacctgaaaacgacttctctttccactgagcattgcgaataaaatgcagcgtattatcatcgggcaattgaatttatcatcaaatccatactggttctagcaaaaaaaaacagataatttcacgtgagcctgaagtttctgaaaactcaatgcagctttcatggaagtgactttatggcacctgccaattaccagtcgccccattttttaggaacgaacgcacctttcctcaacacggcctgaatcgcatagccaaggccaaacaaattattggataaaacctgcatgcaatatcgtctgacagcagggaggtaattttgatttcagatttcagattagaagttacaacttgacagcagatttctacacgttgagctccatctccaactccagctctctccactttctgtgatgcaacagcttcagcgccacctgttgcttcaccttgccgcctgaaaccacaacggcgtcgtccctggccagagcgttatccaccggccgatctgaatgtagcctgtctagcagttccgagtttctgtggcggggttgatcattgtttgatcaagtcgtccttggccattatcagattcgggcatcattgcgagttccatgttggctaccttcatgtttgtgctgatgcctttgtagcaagtggctacctggtcgcatttccatgaaataacgatgagggaattgtttgttct

SEQ ID NO: 147969 - DNA, 4209 bp, Zea Mays
caatcagaccaatctccccgtctccctaaacacgaataccatccctctgctccggtgttccggctctcccacgcaccccaccccaccccactagtttttgcttcctgttcacttgtgcctgctctcgctcgctgttggcctgttgctgttgctattcccgtcccgtgcttcccttcctctcactggtcgtctagtatcctctctcccacctgccgctgccgccgccgccgccgccgccgccctgctcccacctgccgtcctctggtcaaagccagcggctcccgagatttgccgctgcttccttgcttgaggaatcaagcctgagcggtgagagatcaagagggagggacggagcgagagacgcaagaggaaagggagccagcccctcgcgcccggcattcaattggagccaacagtaggcgggtggggcggctgctacagcacgtcggactccataaattagctccccgctttccggcccccttttcgccccgtgtctcccccgatcggcccgtcgacgacgcggacgcccgccggagcatgcgcgccgcgggcctcggccgccgcagcgccgccgccggcgtccggaagatgtagctccgcgacccgcgaggagagggcgagggggatgaccgttacggcgcgcgggaggagcggcggggccgggatggaggagaagggcgacgcgcccgggctcggcttcctgggcctcgaccggatgcgcgtcctcctgccgccgctccgcctgccggagaagctgtcggccagggcgctgcggacgcacctcttcaccaactaccggatgcgcaaggtgcgggacagctccagctggctcatcccgctctgggtcctcttctgggtgctcctcgcctccgtcatctgcctctggatgagcaaccaggccgtcgccaagcgccgggagtcgctcgccagcatgtgcgacgagcgcgcgcgcatgctccaggaccagttcaacgtcagcgtgaaccacctccaggcgctcgctatcctcgtctccaccttccaccactccaagacaccctccgccatcgaccagaccacgttcgcaaggtacgcggagaggacggcgttcgagcggccgctcacgagcggggtcgcgtacggggtgcgggtcacgcacgccgagcgggagcagttcgagcgccagcagggatggagcatcaagaagatgtactcctccaagaccaagaagcagtcgcagggaccagggaacgctgaggacgccgaggtgcgggagccggcggaggagtatgctcccgtaatcttcgcgcaggacgcatacaagcatgtcatctccttcgacttgctatccggcgccgatgaccgcgacaacgtactccgagctagagaatctgggaagggtgttcttactgctccttttaagctgctcaataatcgccttggagtgatctccacctacgctgtgtacaagtatgagcttcccccaaatgccaggccacaggagcgcattcaggctgctataggctacttaggtggcatatttgacattgaagcgcttgttgacaagttgcttcaccagctcgcgggcaagcaatccatcatggtgaacgtttacgatactactaatgatagacggatcagtatgtatggttcgaatgatacaggcagtggcatgtgccaagtcagcacactgaactttggtgacccgtcaaggaagcatgaaatgcactgcaggttcattcagagtccaccttggccttggatggcaataacgacatcaattggaactcttgtgattgctttactgattggatacataatttatgctactgcaaaacggattgccagagttgaagatgactttcaggagatgagtgtgctcaaaaagcgtgcagaggatgcagatattgccaagtcacagttcttggctactgtttctcatgagatcagaactccaatgaatggtgttctagggatgctccaaatgctcatggatactgatttggacacaacacaacaagactatgttagaaccgcacaagccagtggcaaagctttggtatctctcatcaatgaagtacttgatcaggccaagatcgagtctggtaaacttgagcttgaagcggtgccctttgaccttagaacagtttgtgatgacattttgtctctcttctgtgggaaagctcaggagaaaggactggagctggcagtgtttgtttctgaccaagttccacaagcactaattggcgatcctggcagaataaggcaaatcattacaaatcttgtcgggaactctataaaattcacagagaagggtcatatctacttgacagttcatgttgttgaagagattatgaattgtcttgaggttgagacgggaactcagtccgccaataccttaagtggctacccagtggcgaacagaaagcgcagttgggaaaactttcgagtctttagcagggaactgaactcatctgagatgccttttgcacccatcgcatcagactcaataagcttgataatatcagttgaagatacgggtgttggaatcccgttcgatgctcagtcccgtgtcttcacccctttcatgcaagtaggtccatccattgctcgcatccatgggggcactggcattggattaagcatcagcaaatgcttggttggactcatgaggggagagattggatttgcaagtaaaccccaagttggttctactttcaccttcactgcggttcttacgagggcccattccagcagaaatgagaataaatcgtcagaatttaaagggatcaatgcattggtggtagatcataggccggtccgtgccaaggttactaggtaccatttacagagactgggagttcagaccgaattgacaactgacctagatcaatatatttctaaaattaattgcggatcacaaattgcaaagcttgtgctcattgacaaagaaacctggctgaaggaatcccactctatgcctcttttggttactaaattgaggaacaaagatcagccagactctacaaagttatttcttttggagaaccctaaaagtactgccaaaagcaattcacatatattcagggaatttaacttgaatgtaattatgaagccacttcgagcaagcatgcttcaggtttcgctacacagagcattgggtgggatagataaactgcactgcaggaatggagtacttggcaattcaacactgggcagccttcttcacaagaaacgaatcttagtggttgacgacaatattgtaaatctcaaggttgctgcaggcgctctgaagaaatatggcgcagaagtaacttgtgctgatagcgggaagaaagcaatcacgcaactgaaacctcctcacagttttgatgcttgtttcatggacatacagatgcctgaaatggatggatttgaagccacaaaaaggattagagtgatggaaagagatctaaatgagcaaatagaacgtggagaagccccaccggaatgcgcagggctccggcagtggcgaactccaatattagccatgacagcagatgttatccaggcgacgcacgaacagtgcttaaaatctgaaatggacggttatgtatccaagccattcgagggcgagcaattgtacagagaagtagctcgctttttccaaaatcaagaccaagttcagtaggtaggcttatatggaggagtgtaaagtagtggaggatatcgccaacggttcacccgtcgaggccgaaagaattttgtcaaagatctcatcttcttgaaagtgggcatcaattcgcaaagttagagggcccctattaaaacactagaaatgctgggatgtggccgccagttaggtggaaacgatttaggctggagatggaaccacccatgttcggatgcttggtacatctgaccaatctgcaaagctaaatgcgcaatgtcttgaaatcaacatgcacgtgcagctattcattcgacgatttgctgaggtcaaggcgtgtgaaaaaaaatcagctgcattcactaactgcaggtgccctctgccactatataatatataagactagggggagaagttttccttcccccggaaggcacggctgtacatattatattagggattggttggttgtttgtgcaggcatttttgtatgcatcatattcggcctgtatgggtcgaagctgtaaagtgtaaatgacacattcaaagatggaagttttgtttgacaaaaaaaaaaa

SEQ ID NO: 147970 - DNA, 99 bp, Zea Mays
atgttcatttgtcgccagccatatggcttgaatttgccagacgatttgggccttcgctaccgccccgtcagtgcttgcatagtgttctgcagcttgcat

SEQ ID NO: 147971 - DNA, 1908 bp, Zea Mays
cgcccacaggcacaccactccgcgctcccggtcgtctcgcccgcccgcgcggccgtttcacctttctccccaccttttctcccctccctctctggcgacgacgacttcggtggagatagagagagagagagatgaggacgaggagcgggtcccggtattctaacggcggaggcgaggatgccttggtggggcagaagaggaagagggcggcgtcggccgtcgccggtgagtgcgcctgctgcgagcgcaggaagcggcctgccgacgggccggactacctggacgcactccccgacgacctcgtcctctccatcctgaccaaggtcgcggccgactcctcggcgcccgccgacctgctctccgtccacctcacgtgcaagaggctcaacgagctgggcagtcacgacatggtgttcgccaaggcctcgccggcgtcgctgtccgtgaaggcggcggcgtggtccgaggcagcgcagaggttcctcaagcgctccgccgacgccggcaacctcgaggcctgctacattctcggcatgatccgattctactgcttgggcagccgcagcggcggcgcggcgctgctggcgaaggcggccgtcggcgggcacgcggcggcgctctactcgctggccgtcatccagttcaacggcagcggcggcgccaagtcggaccgcgacctccgcgcgggcgcggcgctgtgcgcgcgcgcggccgcgctgggccacgtggacgcgctccgcgagctcgggcactgcctgcaggacggctacggcgtgcggcgggaccccgccgagggccgccgcctcctggtgtcggcgaacgcccgcgagctcaccctcgcgctctccgcggccgcctcgcgccacgccgcgggcgtcgtcgtcggaggcggcggcggcggcgggtgccctctcctgtccgacttcgggtggagcctccccgaggcggagccccacgcggcgaaccagttcatggtggactggtggtgggcctccgaccgctgcgccgcccaggcgggcgggaagataaccggcgagagcggcgtggacggcgacggcgcggagctccggctgtgctcccacgtgcggtgcgggcggcgcgagacgcggcggcacgagttccggcggtgctccgtgtgcggcgcggccaactactgctcccgcgcgtgccaggcgctggactggaagcgcgcgcacaaggtgcagtgcgtgcccgtggaccgctggctacttggcgccgtcggcgacgctcaggatcagcagcagcagcagccgcagtgaggaaacgggaaacggctcggcgggcgcatcccccaacggctgacatgacgtagcagcaccagtaccctacgggtctacggctccgccgcagcggccgtgctggccggccggccggcccaccgtagcgaaaggcgcgctggaatcgaaggcgtttcgactgattttttcccccctccatgtcttttccatcgcaccagctggtgaattgaatgaggtttccgtttgggcccgggtgtcgtcttgtcagatgtacgtatcctactagtagtactgtagtaggcaaggaaaaggagacgcagatcagtagagagagtagaggtccagctgcgcttcttttcgttttttttgtattcttctggtatttctaagcagcctagaaacggtagtagaattccaatttccaagccgtttttgtaatggagctttggagttgaggtttccatggcggtttctgtcgtcttgtgtgttggtgtttcggatggacgctgtggaggtacggccaaaacacagctctgatgatccagcgcttcgagttttcaatcgggtttggtctgctactttattaccccctctttatcattacagtgccgttgagattggcgttagcggcgggaatcggttcgggtgc

SEQ ID NO: 147972 - DNA, 1621 bp, Zea Mays
acgaagaaagagcagcaagaagccgtgacggagtagcagcaccccccggcaacgcgcagaggggagaggcgaggcggccatgcaggcggtgcggacgcgggcggagcagcgtggtgccgaggcggaggcgaccccgcacgggagcgcgcggtcgtggagccccgaggcggagatcggcatgcgcgtggaggacatctgggacagcctggacgtgcagcagcggcagctgagccacggcgacaagctcaacagttgcttcgacagcatccccgtcgcgtccttcccgcacgccttcgacggcgcccagctggtggagatcccctcggacgccacgctcgccgaggccgtcgacatcctgtcccgcaaccggatcatcagcgcgcccgtcaggaacgtcgacgcgcccgaggacgccagctggatcgaccgctacatcggcattgtcgagttccccggcatcgccgtctggctgctccaccagtctgaagccgcggcgacggccgaagtaggcgccgacgagctggcagcgaagctaggcaccgtcacgctggagggcgccgccgcagccgcggcggcggcggccgtcacgtccaaagcggcggcggagcctgagggagccatcgcggaagtcttcggagccctgccgtcttcggacctgttcaacaaaacgaaggtgaaggatatctccgggtcgttccggtgggcgccgttcctggcgctgcagagctccgacaccttcctcaccatgctgctgctgctgtccaagtaccggatgaagagcctgccggtggtggacatcggcgagggcaccatcagcaacatcatcacgcaggccgccgtcgtgcacatgctctccgagtgcgtcggcctccactggttcgaggagtggggcaccaagacgctctccgagatcggcctgcccatcatgaggctcagcaagatcgtcaaggtgcgcgaggacgagccggcactcaaggccttccggctgatgaggagaaaaggggttggaggcataccggtggtggacgatagcggcagggcggtaggcagcataatgatcaaggatgtcaagcatctccttactgcatcggagacaaacagagactacaggaccctaacagccaaagaattcatcgcgaatgcgagacagagctccggcgaaaggcaaatgagcatcataacgtgcaaaaggggggacagcgtcaaggacataatactgaagctggatgcagagaagaggcagaggatctacgtgatcaacgaggaagggaacctggacgggttgatcaccctcagagatataatcgccaagctggtgtatgaaccgcctggctactttggggacttcttcaatggtgttatccctctaccatccaacagcagggtctgaaaaagtcaagaaaaccttttaccatgctctctgtttactctccttctctctatgatttggtaacacctatgttccatttctagtgtccataatttttttagtgagcttccttcgtctataattatcacttatgtagatgaataatggtagcttgtcataacgcttccatgtgtggaacaataatgctgtgtccatgtttatgttaaacaagtcgatgcctggaatttagcc

SEQ ID NO: 147973 - DNA, 716 bp, Zea Mays
atggatttcagtacaaagaagaaagtcccaggatttgacgttgctatctccataaaaccattgaaggttcgcaactggattctgccagaaacgccaggattgataactgattttgttatctctcttgatgaccgttatctctatttgttacattggcttcatggcgatatcagacagtacaacattggggatcctgcaaagccttttttggctgaacaagtatgggttggtggtcttcttcaaaagggtggtgatgttgtctatgtaactgatgatagtcaagaagaacaatataatgtgcctcaagtcaagcgtcatcgacttagaggtggaccgcagatgattcagttgagcttggatggcaagaggatatacgtgacaactcactttttagccgtttgggatgagcggttctctggtgacgatcttgtcaagaagggctcccaaatattgcagatcgatgtcgatactgaggaaggagggctggctatcaacactagtttcttcatagattttggcaccgaacctgatggtccttccctggcccatgagatgagatgggatatccaggcgcgaggactgcacctctgatatatggatctaaggtcaaggattcagcgtcaaagaccgatggagatacccgttgttgtatgtagtgtaattaacatggtagcagtgtttcatctgtattgagactgttgccaatgaaataagac

SEQ ID NO: 147974 - DNA, 672 bp, Zea Mays
cacctcaaaactgaaaaaaagggaaaaaaggtgctctcgatctagggaatagggatccccttcccggcttctagttcccctcctcgtccaaaaccctaggccagcctagcggcggagcccgcgcgcccgcctccaggaccatggccgaagaccacttctcctccgcgccgtccgccccgtcggcagcggcgacagcggcggcggcggccgccgcggcggtcgggtcctcggtgatcccgatcgtcaacaagctgcaggatatcttcgcgcagctggggagcagctccacgatcgacctgccgcaggttgccgtggtcgggagccagagcagcggcaagtccagcgtgctcgaggcgctcgtcggccgcgactttctcccgcggggctcggacatttgcacgcgccgccccctcgtgctgcagctcgtgcaccagccgcgccgacccgccgacgccgaggccgatgagtggggcgagttcctccacctatcggggcgtcgcttctacgatttccgcgaaattcgacgcgagatccaggtccccatccctttgcctcattccatcgtgcggggattgtgccggaataaacagtcggtttggctgcccgtattcaatgtataattattattggtcgggacttcagtgttagtatatcatattgttctggacactt

SEQ ID NO: 147975 - DNA, 3071 bp, Zea Mays
cacctcaaaactgaaaaaaagggaaaaaaggtgctctcgatctagggaatagggatccccttcccggcttctagttcccctcctcgtccaaaaccctaggccagcctagcggcggagcccgcgcgcccgcctccaggaccatggccgaagaccacttctcctccgcgccgtccgccccgtcggcagcggcgacagcggcggcggcggccgccgcggcggtcgggtcctcggtgatcccgatcgtcaacaagctgcaggatatcttcgcgcagctggggagcagctccacgatcgacctgccgcaggttgccgtggtcgggagccagagcagcggcaagtccagcgtgctcgaggcgctcgtcggccgcgactttctcccgcggggctcggacatttgcacgcgccgccccctcgtgctgcagctcgtgcaccagccgcgccgacccgccgacgccgaggccgatgagtggggcgagttcctccacctatcggggcgtcgcttctacgatttccgcgaaattcgacgcgagatccaggcagaaacagaccgagaggcaggtggtaacaaaggtgtatcggataggcagatacgattgaagattttttctccaaatgttcttaacattactttggttgatttgcctggaattactaaggtgccagttggtgaccagccaactgatattgaagctagaatacggactatgataatgtcatacatcaagcacaagacatgtatcatcttagctgtatcgccagcaaatgcagatttagcaaactctgacgctcttcaaatggctcgggttgctgatcctgatggttctcgaacaattggtgttatcacaaagttggatataatggacaggggcactgatgcccggaactttctgctgggaaatgtgatccccttaaaacttggctatgttggtgttgttaaccgcagccagcaggatatcaactctgacctcagtatcaaggatgctctggctcgtgaagaaaaattcttccgtactcagccggcatatcatggtcttgcacagtactgtgggataccacaattagcaaagaagctaaatcagattctggtccaacatataaaaacagttctgccagggcttaagtcacgcataagcagtcaattgactgctgttgccaaggagcttgctgtgtatggtgaccctgttgattcaaaggctggtcaaggtgctaagcttttgaacatactagctaaatactgtgaagctttttcgtcaatggtggaaggaaaaaatgaagatatatcgacaactgaactttctggtggagcgaggatccattacattttccagtctatctttgtcaaaagtttagaggaggttgatccttgcgaggatgttacagacgtagatatccgcatggctattcaaaatgcaactggtcctagaagtgctctgtttgtacctgaagttccatttgaagtccttgtacgtaggcagatcagcagattgcttgatccaagtcttcagtgtgcacagttcatatatgatgaacttgtaaagatgagccatcgctgccttgcaacggagttgcagcagtttcctatactccgcagaagcatggatgaagtcattgggaagtttttgcgggatggacttaagccagcagaaagtatgatatcacacattattgagatggaggaagattacataaacacatcgcacccaagttttattggtggcagcaaggctgttgaggaagcacagcagcaagttaggtctgccaaaacgtctgcagtggtagtaagaaaggatggagtggattcacaggtttctgagaaaactcaaaaatcacgcccgatattgggtagaagtggtgtaaatggagtagttactgaccacatccagggggtacggcctgctgctgaggcagagagaccaggatcttctggtagtggaagcacatctttctggaatcaaatatttacttccaatgaggatcgaacacatgctcctgcaagagataacacagcaaacaaatcttatgctatgcctgcccctaatctggatcattcattctccactatacagttaagagagccaccagtcgtcctgaagccttcagaacaccagtctgagcaggaggcacttgaaatagcaattacaaagttgctattgaagtcatattacaatattgtcaggaaaaatgtggaggacttcataccaaaagcaattatgcatttcctggttaatcacacaaaaagggcactgcataattacctcataacaaaactttatagagatgatcttttggaagacttgctcaaagaacctgatgagctaaccataaagaggaagcagatacgtgaaaatcttaaggtccttcaacaagcttacaaaactttggatgagataccacttgacgcagaggcagtagagaggggtggtggatactccctcgattctgatgcgattggtctaccaagggctcatgggctttcttcatccctccacggattcaatgatggaagctcatcatattcaaccccgaagcagtcaaggtcaaggaggccaaaccattctggcgagcaacttcctttcaaccccgcaacgagtggcaatggtttttgatgccaccctacacgatggccacccagattggttatggaaccaaccattgcagcaagcacaccttactctgctccaagtttgttggcacccgtagatatatgttatttctagttaaattctttgcagcgttgcgctgatgaagcctggcatggtgcgagttttgtcatttcgccttttgtacagtatatatctttgcccagtcatttcgtcttgaaatggtatcaagtgataggtatactttttcttcggacccagggaaagcaatggaaaaagttatactaggtgcagcacccagcgtctgagtgacttgccacggatttgccttgcaaaatagacatggttggtattgtggtggcaataaaatgtggcatgaaatagtttccgtttcgttaatgttttgtcttgatttaatacgcctttgttaatagttgtgcatttgtacatcagcattaataactgtgggat

SEQ ID NO: 147976 - DNA, 1881 bp, Zea Mays
ctttcatgtgtctttatatttttaaacattaaataacctatgtatactgtagctttttcgtcaatggtggaaggaaaaaatgaagatatatcgacaactgaactttctggtggagcgaggatccattacattttccagtctatctttgtcaaaagtttagaggaggttgatccttgcgaggatgttacagacgtagatatccgcatggctattcaaaatgcaactggtcctagaagtgctctgtttgtacctgaagttccatttgaagtccttgtacgtaggcagatcagcagattgcttgatccaagtcttcagtgtgcacagttcatatatgatgaacttgtaaagatgagccatcgctgccttgcaacggagttgcagcagtttcctatactccgcagaagcatggatgaagtcattgggaagtttttgcgggatggacttaagccagcagaaagtatgatatcacacattattgagatggaggaagattacataaacacatcgcacccaagttttattggtggcagcaaggctgttgaggaagcacagcagcaagttaggtctgccaaaacgtctgcagtggtagtaagaaaggatggagtggattcacaggtttctgagaaaactcaaaaatcacgcccgatattgggtagaagtggtgtaaatggagtagttactgaccacatccagggggtacggcctgctgctgaggcagagagaccaggatcttctggtagtggaagcacatctttctggaatcaaatatttacttccaatgaggatcgaacacatgctcctgcaagagataacacagcaaacaaatcttatgctatgcctgcccctaatctggatcattcattctccactatacagttaagagagccaccagtcgtcctgaagccttcagaacaccagtctgagcaggaggcacttgaaatagcaattacaaagttgctattgaagtcatattacaatattgtcaggaaaaatgtggaggacttcataccaaaagcaattatgcatttcctggttaatcacacaaaaagggcactgcataattacctcataacaaaactttatagagatgatcttttggaagacttgctcaaagaacctgatgagctaaccataaagaggaagcagatacgtgaaaatcttaaggtccttcaacaagcttacaaaactttggatgagataccacttgacgcagaggcagtagagaggggtggtggatactccctcgattctgatgcgattggtctaccaagggctcatgggctttcttcatccctccacggattcaatgatggaagctcatcatattcaaccccgaagcagtcaaggtcaaggaggccaaaccattctggcgagcaacttcctttcaaccccgcaacgagtggcaatggtttttgatgccaccctacacgatggccacccagattggttatggaaccaaccattgcagcaagcacaccttactctgctccaagtttgttggcacccgtagatatatgttatttctagttaaattctttgcagcgttgcgctgatgaagcctggcatggtgcgagttttgtcatttcgccttttgtacagtatatatctttgcccagtcatttcgtcttgaaatggtatcaagtgataggtatactttttcttcggacccagggaaagcaatggaaaaagttatactaggtgcagcacccagcgtctgagtgacttgccacggatttgccttgcaaaatagacatggttggtattgtggtggcaataaaatgtggcatgaaatagtttccgtttcgttaatgttttgtcttgatttaatacgcctttgttaatagttgtgcatttgtacatcagcattaataactgtgggat

SEQ ID NO: 147977 - DNA, 333 bp, Zea Mays
atggacgcagtcgaggcaggtggacgaagaagacgctgcagaggcagtggagggaggcaggagtgtggcgacggccgctggttttggcgcagcgggctccaggcggggcggcagtggcgtcgtagcaggcggaggcggaggaaggcggacgcgagtgtaaggtggaggcggcggccgaacgtgggtggtgcgaggaggaggccgcgtcggggtcggggtcgcgaggcgcgtggtggacggcgtcggccaggggggcagccccgccgggggaggcatggctcaccggcggtgggtgtaccactgtaccgtatgcaggcgggaaccgggaagtga

SEQ ID NO: 147978 - DNA, 668 bp, Zea Mays
agtccgttttcaaccctactacgcctcggaatcagaggaaccgaacggtggaagagtacgcctcggaatcagaggagcagcgaggaagctgaaggaggggcgaatctaagcccaattgaagcatgagggcgtcgattaatcgtcccccgacgccgagcgcggaggaggatcgggacaagcagccttctctcggagagatcattaacatcaagttggtagagactggggagaaggagaagctaatggagctactccgcgagcgactcgctgagtgcggctggagggatgagatgaaggcactctgcaggtttgacttctctcgcatcaaactcaaatattattcatgctgagtgtattctttcttgctactaacaaattacgtttattgattcatagtaataaacacatgcatccaatgatgctgagcaagtgcttcacattcctaaggttctgatatttgcattagcatatgaattgtttgcacttcttgagaatgcatgatgttttttccccaacttctcagtggtcctctcaatttaaatgcctttgacgattacaactgaatgcatgtgaaaggcacacattaatatgtcacaaccccaaacattgttctatctttctcaaatatgtgcagctaaattctgaagcaaaagtgtgatatcctggcc

SEQ ID NO: 147979 - DNA, 767 bp, Zea Mays
agtccgttttcaaccctactacgcctcggaatcagaggaaccgaacggtggaagagtacgcctcggaatcagaggagcagcgaggaagctgaaggaggggcgaatctaagcccaattgaagcatgagggcgtcgattaatcgtcccccgacgccgagcgcggaggaggatcgggacaagcagccttctctcggagagatcattaacatcaagttggtagagactggggagaaggagaagctaatggagctactccgcgagcgactcgctgagtgcggctggagggatgagatgaaggcactctgcaggagcctatctcgaaagaacctctggattaagtgtgcttggcccactaactggaaagtcttctcgggtgtgcgtgagtgaggacaaagtgcgcacaaagtactctttttgtctgtgcggatggtctatgatcgtagagggctgccaggagtaagtatcgccggttcgggagtagatggggtgttacaataagtagtttcttcatttcctcgtgaagaaatgacctgaaggggttcatttgcttcctaataaattgggaatttttgtaaatcttatgcaactcaagttggtttatcatggaaactacttatggttagttctctcaaattttctggtaaataaataattgcaatgattttactagatggctattgcagctgcaattattgcaacccatgcaagtgtgcaatatttgcaatttgtttaaatttcgtgctttccttttcctgaaattatattatt

SEQ ID NO: 147980 - DNA, 822 bp, Zea Mays
ggaatcagaggaaccgaacggtggaagagtacgcctcggaatcagaggagcagcgaggaagctgaaggaggggcgaatctaagcccaattgaagcatgagggcgtcgattaatcgtcccccgacgccgagcgcggaggaggatcgggacaagcagccttctctcggagagatcattaacatcaagttggtagagactggggagaaggagaagctaatggagctactccgcgagcgactcgctgagtgcggctggagggatgagatgaaggcactctgcagggcctatgcaaggaagaaaggaagaaataatgtgacagtagatgacctcattcatgttattactccgaaaggaagagcatccgtgcctgattcagtgaaggcagaactcctgcaacgcatccggtccttccttatgtctaccacacttcggtagtcatttgtcgcgacggttggagcctatatgtaccattgtaggatcattgggaagtcgatcttgttggggaccaaaggtgcaggaaagcagtgcgtaggggaatattgtgagcatgaaaagaaacagtgtgatcttcatgacactgtcgacatgttcctcgtcaggcgcaggcggttggcgtaatttcaggtgtaccaatagagttgtaagttgtaacccctgaatactgtattgttaaagcaaccttccaccttgtaatgctacattgtactataactgctcagcgctgatgcttaatttcacaattagaaaacagaaacgcaatcttgatatagatgataacacgcatgtgaaacctgaaaccctgactgggtcatcttcaattgtt

SEQ ID NO: 147981 - DNA, 832 bp, Zea Mays
aacccactaaacacttgcacgctaaaatcttcttactgacaggattcatctggttcatttgctttgttcaaattctatgctaaatgctcattgcagccaatcaaatttatctaattctgatgtcttcaaaaccctaggcattggagaccgttttgcagtttgacacttaactgtagctacctcaaactgcctcattagagcattctgaaatgtgtgttacattacacactccataggttgacaataaagatggcgtggttttaactggataatatgtatccttcccaatgcttatcattctctttcgacgcgtctctgttttgtccttttgtgtactgtgtagggcctatgcaaggaagaaaggaagaaataatgtgacagtagatgacctcattcatgttattactccgaaaggaagagcatccgtgcctgattcagtgaaggcagaactcctgcaacgcatccggtccttccttatgtctaccacacttcggtagtcatttgtcgcgacggttggagcctatatgtaccattgtaggatcattgggaagtcgatcttgttggggaccaaaggtgcaggaaagcagtgcgtaggggaatattgtgagcatgaaaagaaacagtgtgatcttcatgacactgtcgacatgttcctcgtcaggcgcaggcggttggcgtaatttcaggtgtaccaatagagttgtaagttgtaacccctgaatactgtattgttaaagcaaccttccaccttgtaatgctacattgtactataactgctcagcgctgatgcttaatttcacaattagaaaacagaaacgcaatcttgatatag

SEQ ID NO: 147982 - DNA, 638 bp, Zea Mays
aagggccagtttggcagccgcggttattttagcacaggagaaaactccagcggtgggttttatccatatattcatttttcagtgggtaaaaaccccggataggacaattcaaccggtggtcgtttggaaggagcaactgccatccagtttagtacaaaactgaatgcatacactaacgcatactggtgacatttttctgtatgccattcagtttggggcagtttgcatacacgaacgcatacaagaacagtcaccatgcatacacggcatacaagaatgcatacagaagcaaccaggttttaagcaagaatgcatacataatgcatacaagaacagtcaccatggttttaaaccaacaatagaagaatatctcaaagtgcaactgtcattcagtttagtgcaactgccatacaagaattaatttaaaccagcaatacaagaactatactgaaccataggttcaaggcatcatttctcataaggtagatggttctcagtgatctgcttgtccaaaaaattactgggaaaatcattccaccaacagattagtgcaactgccattcaattttccataggttagagctgaaactgaactacaatcaccataacagaactgcagttgtctgaaaaaaagataa

SEQ ID NO: 147983 - DNA, 740 bp, Zea Mays
gagcagaaacaattctattttgccacttgttagccatgccacaaccttagcatacgctaaaccttagtaataccaacatgtggtaataaatgaaacaaactctatgatcctaacatcttaattatatgatattcgaatcatttgttggtttcaaatgtcgcaagaaacaattaatgaccatataatataacctacacaacaacaaaataattaaataaatcataattattctagccactaatttgctttcggagcctatgaagtagtgagaaatccaggaggcagggccatgtttgtttcggcttctggcagcttctggccaccaaaagctgctacggactgccaaacgctcagcttttcagtcagcttctataaaattcgttggggcaaaaaccatccaaaatcaacataaacacataatcggttgagtcgttgtagtagtaggaatccgtcactttctagatcctaagccctatgaacaactttatcttcctccacatgtaatcgtaatgatactcagattctccccacagccagattctccccacaaccagattttcagaaaagctggtcagaaaaaagctgaaccaaacaggcacgaagtggcctacgcctaccaccataactccacgagcaggcagcaccagcaacggaccattccacaggcagcactatgttttctaggagagtaaccaaatgctgaagtcgcgagtccaagaaacgaacaattccaactagga

SEQ ID NO: 147984 - DNA, 455 bp, Zea Mays
atccgccacatgccacacatgtccaacatcgccagcctcgtccgggagccatgagcaacctcccactccccaccaacacgccttcgcctcacctcgtgatgcccgggacctgcagcagtcgccgcctcccctgagcgtctgagatgcagctccacgctcatctgcgtcccccgccgcaggagccacgttgtgcctgccgccagccccgacacctccagatgttgcctccatccatcctccgagcttaccgcctcgcccccgcccccaaaccctagaccccctacaatcacgaggaaggggagaacggccgaggaggatgctccgcaaggaaggggaggacggtcgaggatgacgttgttgctcgtcgctgagcatcttcgcgccctcagtgctgccaaggagccctctctatccctgatggcgtcccaaccgttggccgatcgtcggcgatgatg

SEQ ID NO: 147985 - DNA, 938 bp, Zea Mays
accaacccactcactgctctttatttactgcatgctatttaggtctgctaagcaaaaaatgatattctttctcaatcttttgtcatgtttagataaatttggtggttttaggataaagtttgtgaagggcttcactttttttttctataattagaatttaactcaaaagttttcccttgaaattcaagttgattttgagaagtatgaagggatgattaaggtcatggagaaggtggtaatacagttaattctatggagctcactggaggagcactaccttttgccagttgcttgcaagaatgtaattggaatccgatgtgcttcatggcgcatcgtatcctccattgagtatagggaataaggttgtgtcaacatggaccgtgccactctcatcgagggctaccataacaagattgaagttgaactcaacaagatctgcgttggaatcctcaagctctttgcttcccaccttcccccctcattaatagttccaaagtccaaggtcttctacctcaagatgaagggtgattactacaggatattgctttggaggagttggcccccttatcctattaggctttggctgatgcttaacctctcaactctcctgatcttgctcgtggtctccccaaacaggcaaagccaacgaatgaaagggactcactcgcagcaacaaccaaaaagctgatcacgcattctccttttcacatttgttgcatttaattaattcatccaatagcataaattggcactccttttgtgttattgctctttggttggtcttattgttgttgttgtactgcttgccatgtgtattttatcataagtgttgttttggctaatccctaacgatgcaatacatttgagcaacaattcaattgttttgttttttgaacagttattctaaatacccaatgttcacagcatatttcacttcc

SEQ ID NO: 147986 - DNA, 623 bp, Zea Mays
ctattttcaaataacttaccacttcttccattggaggaaaagaaccttgtttgctactgatgaccaatgcatctacaacagattgacacggtgggaggaaaaagacaatggtcagcaacttactcggagcagaaattttttaattgtggtacccgtggtgctgtaagtttcatctcatcctcttgtagttcacacttgaacaaagtactctttagattctatacaggcagcgattgcttgtgcaattatattccacttcattcctaattaacaatttgggtcttatgattgacgactttgactttatcaccataaataaacctgacacacgaattatatctggattctggaacaggttcaataagagagcatcatagtgttgcataaataagtgtgcttatgattcatatttgctcattgcaaattggagttatttgtgttgtttctttgtatactcaacaaagagatgttaaccacttgtgtttatctcattgccacactcagttatgtcacgtaacttcattttcatgttttattttgttccagcaatgtagtttatctttgttttaatagctctttctttgtaaaacaacattttgttgtggttattatgcggataagag

SEQ ID NO: 147987 - DNA, 1655 bp, Zea Mays
acgggtcaccagtcaccacatccctccctcactgccatttgtttggttgttcctctcgctcgccagtcgccaccaggcagcaggcatcccaatctcgcgagagccagtagcggcggcggcgcttccggcttcccttcccattggcctccgggatggcgctccgcctccacgacgtcgcgctctgcctctccccgccgctcgccgcccgccgccgcagcggcggcagtttcgtcgccgtcgcctccatgacgtccgccgccgtctccaccagggtggagaacaagaagccatttgctcctccgagggaggtacatgtccaggttacacattcaatgccatctcacaagattgaaattttcaagtcacttgatgattgggctagagataatatcttgacacatctcaagccagtcgagaagtgttggcagccacaggatttcctccctgacccagcatctgaaggatttcatgatgaagttaaggagctcagagaacgtgccaaggagatccctgatgattattttgtttgtttggttggagacatgattactgaggaagctctaccaacataccagactatgcttaacaccctcgacggtgtcagagatgagacaggtgcaagccccactgcttgggctgtttggacgagggcatggactgctgaggagaacaggcatggtgatcttctcaacaagtacatgtacctcactgggagggtagatatgaggcaaattgagaagacaattcagtatcttattggctctggaatggatcctaggactgagaataatccttatcttggtttcatctacacctccttccaagagcgggcgaccttcatctcgcatgggaacactgctcgtcatgccaaggactttggcgacttaaagctcgcacaaatctgtggcatcatcgcctcagatgagaagcgacatgaaactgcgtacaccaagatcgtggagaagttgtttgagatcgaccctgatggtacagtggttgctctggctgacatgatgaagaagaagatctcaatgcctgcccacctgatgtttgacggtcaggacgacaagctgtttgagcacttctccatggtcgcgcagaggcttggcgtttacactgccagggactacgccgacattcttgagttccttgttgacaggtggaaggtggcggacctgactggtctgtcgggtgaggggaacaaggcgcaggactacctctgcacccttgcttcaaggatccggaggctagacgagagggcccagagcagagccaagaaagcaggcacgctgcctttcagctgggtatatggtagggaagtccaactgtgaaatcggaaacccattgcgactgcttgagttggagcatagtctatcatgcaccctatgacgcatcgcgacgacaagacctggtgtgtcgcgtgacatagttgttcaggttttgaccaaatggtctgggagcatttgttttgccttgtgccgtctcatagagcgttaggatagtgtacgtctgtgttctagctttgttttgtctgctgctttgatgtacaacttgtggccatgaggctggacatggagtgaacatgttgtacattgtcgctggcggtatgtttcggtatgttatttcagttgttgagatctgttaatttttttgtg

SEQ ID NO: 147988 - DNA, 194 bp, Zea Mays
aggaaaaactttggtctggacttcagttttcaataccacagaaataccatggtattgataaaactatggtattcaaaactctgttttctaaagtccaaccaaacagctttgggtttgaaataccatggtatttctatatactatggtattgcatgaaaactatggaataactctgcttccaaacaggcccttaa

SEQ ID NO: 147989 - DNA, 1368 bp, Zea Mays
atgccagtaagcctgcaagaatctgctgcatttaccattcttggggattgtgtccgacacccccctaaagagttagaaggatactgctttaataaattggagcagctgcccttggatgcaaactttgttcagaaagaacattttggcacgagaagaaacaatgtcatgattggatcagttgggaatggggatcagggtccaagttatgatcataggagatggggatgcgattgttgtgtgttggatggttttctggaagtttgcagaaagtctgcagtcaaagagggcagttgggtgcacttgtattggaagtttggagagaactttaagagcaacctgaatcaagttccagttcttcaccatttgtatcttgatggccaacagattgaaaacaatcgttgccatgtcatactgtatgaggttccgaccattggcagaaaccatttctcactgggtttggatgcaccccgtacgttgaatgtttctttcaaaaagccaaattggataaatgatctacaaaagcaaccatcatttcttgatttggattcaattgttttggcgcttaattgttcaaatgcagctagactgccggacactcaggaatgttctactacatgctcaggggcttatttcatctttgcatctgtatacgatgtcttagttcaagtaacatggcattgcgtggggatatttttggcttcatcatcaactattctctacatcatgattctaatgtcccggaaatgtttaagccatatgccccagtacttgatgctaaataaggttttcagacattcatggaacaacattcatcttcgcagctgtcaaattctctactggccaattgtcttccaagatgcttccttaagctccactgtgaatgttgaatatgcacacaaagctgcaattcggaagcatgctttgtggtcaagtatcattgtggatctcctgatgggttttgtccttggagcagcattcttattaaatacagagactatttgtatttggactattgctctcgtccaccacatgacagaagcaatcttgagatccggttgtgtgtggctgatgggtgttccagctggatttaagctgaatacagagttagcagagctcttaggcatgatttctcttaatgcagttcaaatttactctaccctttggtttttcgttggaggctacctgagacatataattcaaggcattgcagtctctggaattattttaggacttacagctccagtttcattctttattgacattatccagcttgctacgttgcatgttaccatccttcactggttaatctcatcgttatattcaagacaaattcagacagtagcatcattgtggcgtcttttcaggtaa

SEQ ID NO: 147990 - DNA, 3509 bp, Zea Mays
gcgtgggcgcctgggctagtgctcccgcagcgagcgatctacggtagagttccggccgggcgcgcgggagaggaggaggtcggggggaggatccgatggccgggaacgagtggatcaatgggtacctggaggcgatcctcgacagccacacctcgtcgcggggtgccggcggcggcggcggcggcggggaccccaggtcgccgacgaaggcggcgagcccccgcggcgcgcacatgaacttcaacccctctcactacttcgtcgaggaggtggtcaagggcgtcgacgagagcgacctccaccggacgtggatcaaggtcgtcgccacccgcaacgcccgcgagcgcagcaccaggctcgagaacatgtgctggcggatctggcacctcgcgcgcaagaagaagcagctggagctggagggcatccagagaatctcggcaagaaggaaggaacaggagcaggtgcgtcgtgaggcgacggaggacctggccgaggatctgtcagaaggcgagaagggagacaccatcggcgagcttgcgccggttgagacgaccaagaagaagttccagaggaacttctctgaccttaccgtctggtctgacgacaataaggagaagaagctttacattgtgctcatcagcgtgcatggtcttgttcgtggagaaaacatggaactaggtcgtgattctgatacaggtggccaggtgaaatatgtggtcgaacttgcaagagcgatgtcaatgatgcctggagtgtacagggtggacctcttcactcgtcaagtgtcatctcctgacgtggactggagctacggtgagccaaccgagatgttatgcgccggttccaatgatggagaggggatgggtgagagtggcggagcctacattgtgcgcataccgtgtgggccgcgggataaatacctcaagaaggaagcgttgtggccttacctccaagagtttgtcgatggagcccttgcgcatatcctgaacatgtccaaggctctgggagagcaggttggaaatgggaggccagtactgccttacgtgatacatgggcactatgccgatgctggagatgttgctgctctcctttctggtgcgctgaatgtgccaatggtgctcactggccactcacttgggaggaacaagctggaacaactgctgaagcaagggcgcatgtccaaggaggagatcgattcgacatacaagatcatgaggcgtatcgagggtgaggagctggccctggatgcgtcagagcttgtaatcacgagcacaaggcaggagattgatgagcagtggggattgtacgatggatttgatgtcaagcttgagaaagtgctgagggcacgggcgaggcgcggggttagctgccatggtcgttacatgcctaggatggtggtgattcctccgggaatggatttcagcaatgttgtagttcatgaagacattgatggggatggtgacgtcaaagatgatatcgttggtttggagggtgcctcacccaagtcaatgcccccaatttgggccgaagtgatgcggttcctgaccaaccctcacaagccgatgatcctggcgttatcaagaccagacccgaagaagaacatcactaccctcgtcaaagcgtttggagagtgtcgtccactcagggaacttgcaaaccttactctgatcatgggtaacagagatgacatcgacgacatgtctgctggcaatgccagtgtcctcaccacagttctgaagctgattgacaagtatgatctgtacggaagcgtggcgttccctaagcatcacaatcaggctgacgtcccggagatctatcgcctcgcggccaaaatgaagggcgtcttcatcaaccctgctctcgttgagccgtttggtctcaccctgatcgaggctgcggcacacggactcccgatagtcgctaccaagaatggtggtccggtcgacattacaaatgcattaaacaacggactgctcgttgacccacacgaccagaacgccatcgctgatgcactgctgaagcttgtggcagacaagaacctgtggcaggaatgccggagaaacgggctgcgcaacatccacctctactcatggccggagcactgccgcacttacctcaccagggtggccgggtgccggttaaggaacccgaggtggctgaaggacacaccagcagatgccggagccgatgaggaggagttcctggaggattccatggacgctcaggacctgtcactccgtctgtccatcgacggtgagaagagctcgctgaacactaacgatccactgtggttcgacccccaggatcaagtgcagaagatcatgaacaacatcaagcagtcgtcagcgcttcctccgtccatgtcctcagtcgcagccgagggcacaggcagcaccatgaacaaatacccactcctgcgccggcgccggcgcttgttcgtcatagctgtggactgctaccaggacgatggccgtgctagcaagaagatgctgcaggtgatccaggaagttttcagagcagtccgatcggactcccagatgttcaagatctcagggttcacgctgtcgactgccatgccgttgtccgagacactccagcttctgcagctcggcaagatcccagcgaccgacttcgacgccctcatctgtggcagcggcagcgaggtgtactatcctggcacggcgaactgcatggacgctgaaggaaagctgcgcccagatcaggactatctgatgcacatcagccaccgctggtcccatgacggcgcgaggcagaccatagcgaagctcatgggcgctcaggacggttcaggcgacgctgtcgagcaggacgtggcgtccagtaatgcacactgtgtcgcgttcctcatcaaagacccccaaaaggtgaaaacggtcgatgagatgagggagcggctgaggatgcgtggtctccgctgccacatcatgtactgcaggaactcgacaaggcttcaggttgtccctctgctagcatcaaggtcacaggcactcaggtatctttccgtgcgctggggcgtatctgtggggaacatgtatctgatcaccggggaacatggcgacaccgatctagaggagatgctatccgggctacacaagaccgtgatcgtccgtggcgtcaccgagaagggttcggaagcactggtgaggagcccaggaagctacaagagggacgatgtcgtcccgtctgagacccccttggctgcgtacacgactggtgagctgaaggccgacgagatcatgcgggctctgaagcaagtctccaagacttccagcggcatgtgaatttgatgcttcttttacattttgtccttttcttcactgctatataaaataagttgtgaacagtaccgcgggtgtgtatatatatattgcagtgacaaataaaacaggacactgctaactatactggtgaatatacgactgtcaagattgtatgctaagtactccatttctcaatgtatcaatgtatatagaagttaacgtgcatga

SEQ ID NO: 147991 - DNA, 1167 bp, Zea Mays
atgtgtgatctggtggcccgcacgggccggcacctgcagcgctacgagaacggccgtcgccttgtggctgggtgcataccattcagatacatggatattaatgatggagcttctgatgatgaacaaaagaaacttgttgaagttctcatgatcagctcacaaagtggaccgggtcttctatttccaaagggaggctgggagaatgatgaagctgttgaagagacagctgtaagggaagctatcgaagaagctggagtgcgaggagatttagtgcaactgctggggttctacgatttcaagagcaagcagcccgaagcaacgtgtagagccgcaatctttgctctgcacgtgaaggaagagcgagcatcctggccagaacagagcacccgacagaggagctggctcacagttcccgaggcggcagagcggagctgctacctgtggattagggatggcaacgggatgacagtctcctcagctgatgatgacccgagggatgttggagttatgaccagagaagaactgaaactagatttttcaaaatcagatacgcgtaacacagagaatgctgaaattactaaaaggagaagggtgctctttcgggagaacatacctgttgattccaagctctgtgcaaagacatctttgctatattgctataaaagatctacaagggcttctgttttctcactggaacaacttcaatgggataactttgctgatagttttgaggtaacatctcaaaaaatggatgttcaggtttacgatcctttttttatcttgcgattctcaattcatactcttcacatgggttacattgaacctgctcaatttgcccgattagggcttcttgcaatcacacttgttagtatagcatctcctgatcatgaattaaggatgttgggctacgagtgcctaggaacattcaaaaaatcccttgagagcattccattatttccaaccttattgcagagcagttttgtgcattttaaagccgaacgtttgtggatgcttcgattattatctgctggatcaaatctagctgatgatgctaaaatatacaagagaggaagagtattagaacttgctcttgccttctgttcttcacctatttcagattttgaatcgaaggttttagtccttaaggtgttgaagaagtgtgtttaa

SEQ ID NO: 147992 - DNA, 465 bp, Zea Mays
aggctttcaggtggtgggcatagctgctttcgggatagtgatgaggcaagataaagattcaaacagaagttctaggagaaggctgtggagatagatgatctatgttgaaaggatggtgcatggtggggtattaaaggctgcatgcaagacaatttcaaccatagcaataaggtcacctcgcacaaagagcattttcagaacagtaggctcgtgaaatatttgttggatatgtattgggagcttcgtcctgttaccagttcatccttaacacacctaacaaggtatgacccagcacgtgcagttgacccaatcattgaagatggtcactacaccttgtttcgaagcctagcgagatttgacgcctcagtgttcaattgttacacgcagatggtatttgtgcagataccaggtttaatgttgagcacagacaatgtttaaagattttacgtgttgaggttgttttac

SEQ ID NO: 147993 - DNA, 805 bp, Zea Mays
ctccctcgctataaaagcgtccaagaacacccaccataacaaagccgtgatccatccgaataaacggcagactgtcatccctgccaaaatctgagctcgcgtccgcagaggtccatggcgtccaagtccgtcgagctgcgcatgacgctgctgggcgtggccctgctagggctgctgctgctgagccagcacgcggcgcccgtcgatgctgccgagagcgacggccccagaaaggaaaagactagcttcagcatgaacgtcgtcggcggccgcactctcagcagcttcagcatgaactccgcatacagcgagaagaagcccagcagcaagggcgcaagcgcaactgatcccgcacacgggtgatgttccacatccatgcctataggccactcacctcaccacgcagcgttaccggccgtactactatatctacatacgaccgtgggacaacgtcgaccggagctcgatcggcgcagttgccgcatgggcgtggctgtcaaagttcctttgtttctttcttgatttgtgcttgcgttgggttcggtgttccactttctttttatgtgattattaatcttgttttcagatgcatgtacgcatgtatgtgccggcaccatttggtcttgtgttaagtttattcttggattccaatctctagtgtagggtcgtttggtttgtgtgtgcatgttgtactcataccaacttctgtctttacatcagtatttattaagaaatagcaatgtgacctatccaaattagatagagtcgctagaattgctaaaagttgtatactgtttatatacaa

SEQ ID NO: 147994 - DNA, 991 bp, Zea Mays
ccgcgcagtgacgatccggacgcgaactcgtatcaaattcgcatatgggcagccgtcctataagaggcgtcgagtccgccggcgcatgtcaaccccaccgcagcacagcgccggcaaccgccgccatcgatcgatcgcccggaaactgacctctaccgatgtctggagccggcgaggaggataagaagcccgcggagggcggcgcccacatcaaccttaaggtcaagggacaggatggcaatgaggtgttctttcgcataaagaggtccacccagctgaagaagctgatgaacgcctattgcgaccgccagtctgtggacatgaatgccattgcattcctgtttgatggccgcaggcttcgcggcgagcagacccctgatgagctggagatggaggacggcgacgagatcgacgccatgcttcaccagaccggaggcagcgttcctagcaccacctaaaagcagcagctgcggagcctcgttttgctctccgccctgcgtagtactaaacaaaagggaaaaagtctttttaaggaacttgtgatgctctggctccttgtgccattgctgagggacatccttagcctttatttagtggtatggtttggtactttgttctgtcatcactcgtttatctatccctaatacatgccgccatgtttgtacttccaatgacgcgccgatcatttgctttgttttgtctgctcgaagtctatgcttttcaggccatctctttgggcctgtttggttttgtctcctgatccttacgttttgtgcactaagttgatggatcccttttggctgattcagtttgtataattccagccggtgatttgcagctgcctgattgttttttagttaaaatctcctcatatttaaaataagtgttacattaaagtaagttaaattgatgggtagtttatcatggctttaatgcctaccgttttctactttttcacagctgcatcaatctaaacatttgtctttaatcc

SEQ ID NO: 147995 - DNA, 1600 bp, Zea Mays
aaatccactcgtcctctccacccacctgccccccgcttccttccccggcgcggagaaccaaccagccttttgacgctgtcgcccgccgatagagcactagacgcgctagcccccggatctcctccgcggcctcgccgcacgcgtggggatggatttcgacggcgccattggcgatcagggtgagttgtgggaatggcaaagtcaggagtattgtatgcagaaagattcgttagctgctccatgtagcagtttgtgggccgaagcaagcaacaatgtgggtggtgattggagcatatttgaggagcaaacaccaattaaacactgtacagacttcgaatttcagttctgtgatgtaggaggtgaagtcttgttctcatggtaatgaaatctacagacatgagcttaaatctagattctaaactattccagttcacaccaagctatctacttaaattggtttttcactgccaatatcctgtacagagaccagtagcaccttcttttagatgctaatatatgttatctatttctctctgcttcttgaaattgcattaatgacatggtaacttgtgatatgtaaatccaaaacatatataaagcagaatgactagtataataacaaaatcagtcgattattgcaattagaacaagtacgtttcgaggctactatttccctattgtgtatgtctgatctgagctataaaatgcaacaggtagatgatttgacctaaatatcacaatggattaaactggatatttcctaactctatcccatctgacctttttggcaaacacttaataaggtgctaatacatatcagttgcatttccggactagtaaaaatgcaatctagatatcatcgtcaaggagtttgaagaaaggaaggaaactttacaggcaaaacgcacacgcatgctgcagttctgtccagaaaatcttgagatgacatgttcagtgactgaagatgggctcttggaaagtcttcaggagatgatttttcaggtactgactgtttactgaactctgacgggactgatgaactgccagaagaatggctagttagttgatcacaagatatcgagcccggttttccggcagaagaaattaggaataaccctgctgctgcaacggaagaaactgccgatgtcttggcttgagctcttcgcctgtcgtagtccacgacaatcctgcatgctctagacctacttctctgaaaggtgcagctggcaaaatttattatcggagcaaagaaggcgagaccatccgtgtccctcccttttgtgctgatcaaaccatacagcatccatggcgacatcaccctgaacgacatcaacgagaagatccacgccccttcgccgcataagatcaggcacaggagcgacgaggagcccgacccgctccaggcctcagcagcgatctcagggaaacctgtggcccacaagacgaagatccacacggagggggggaagggggaaggggagcatcacgatcaccagaaccaaaggctaggctgatgaccatttgtgtgacgctggcgaagtggctaacagttgattcgcctttgcatttttggcgctctgggctcgttcccaattggttt

SEQ ID NO: 147996 - DNA, 1710 bp, Zea Mays
aaatccactcgtcctctccacccacctgccccccgcttccttccccggcgcggagaaccaaccagccttttgacgctgtcgcccgccgatagagcactagacgcgctagcccccggatctcctccgcggcctcgccgcacgcgtggggatggatttcgacggcgccattggcgatcagggctccatgtagcagtttgtgggccgaagcaagcaacaatgtgggtggtgattggagcatatttgaggagcaaacaccaattaaacactgtacagacttcgaatttcagttctgtgatgtaggaggtgaagtcttgttctcatggtaatgaaatctacagacatgagcttaaatctagattctaaactattccagttcacaccaagctatctacttaaattggtttttcactgccaatatcctgtacagagaccagtagcaccttcttttagatgctaatatatgttatctatttctctctgcttcttgaaattgcattaatgacatggtaacttgtgatatgtaaatccaaaacatatataaagcagaatgactagtataataacaaaatcagtcgattattgcaattagaacaagtacgtttcgaggctactatttccctattgtgtatgtctgatctgagctataaaatgcaacaggtagatgatttgacctaaatatcacaatggattaaactggatatttcctaactctatcccatctgacctttttggcaaacacttaataaggtgctaatacatatcagttgcatttccggactagtaaaaatgcaatctagatatcatcgtcaaggagtttgaagaaaggaaggaaactttacaggcaaaacgcacacgcatgctgcagttctgtccagaaaatcttgagatgacatgttcagtgactgaagatgggctcttggaaagtcttcaggagatgatttttcaggtactgactgtttactgaactctgacgggactgatgaactgccagaagaatggctagttagttgatcacaagatatcgagcccggttttccggcagaagaaattaggaataaccctgctgctgcaacggaagaaactgccgatgtcttggcttgagctcttcgcctgtcgtagtccacgacaatcctgcatgctctagacctacttctctgaaaggtgcagctggcaaaatttattatcggagcaaagaaggcgagaccatccgtgtccctcccttttgtgctgatcaaaccatacagcatccatggcgacatcaccctgaacgacatcaacgagaagatccacgccccttcgccgcataagatcaggcacaggagcgacgaggagcccgacccgctccaggcctcagcagcgatctcagggaaacctgtggcccacaagacgaagatccacacggagggggggaagggggaaggggagcatcacgatcaccagaaccaaaggctaggctgatgaccatttgtgtgacgctggcgaagtggctaacagttgattcgcctttgcatttttggcgctctgggctcgttcccaattggttttgtggcccaggtgatgcatggccttagcagcgtgcttgtagcgttttctgttcttgctgtttactagtatcttacgcacgcgccttagcgcacgtcataggcagcgctgaatcgtgtcaatgagttaatataaaaatttaataaaataatccaaagaaaataagaa

SEQ ID NO: 147997 - DNA, 1177 bp, Zea Mays
agcactagacgcgctagcccccggatctcctccgcggcctcgccgcacgcgtggggatggatttcgacggcgccattggcgatcagggtgagttgtgggaatggcaaagtcaggagtattgtatgcagaaagattcgttagctgctccatgtagcagtttgtgggccgaagcaagcaacaatgtgggtggtgattggagcatatttgaggagcaaacaccaattaaacactgtacagacttcgaatttcagttctgtgatgtaggagatatcatcgtcaaggagtttgaagaaaggaaggaaactttacaggcaaaacgcacacgcatgctgcagttctgtccagaaaatcttgagatgacatgttcagtgactgaagatgggctcttggaaagtcttcaggagatgatttttcaggtactgactgtttactgaactctgacgggactgatgaactgccagaagaatggctagttagttgatcacaagatatcgagcccggttttccggcagaagaaatgaataaccctgctgctgcaacggaagaaactgccgatgtcttggcttgagctcttcgcctgtcgtagtccacgacaatcctgcatgctctagacctacttctctgaaaggtgcagctggcaaaatttattatcggagcaaagaaggcgagaccatccgtgtccctcccttttgtgctgatcaaaccatacagcatccatggcgacatcaccctgaacgacatcaacgagaagatccacgccccttcgccgcataagatcaggcacaggagcgacgaggagcccgacccgctccaggcctcagcagcgatctcagggaaacctgtggcccacaagacgaagatccacacggagggggggaagggggaaggggagcatcacgatcaccagaaccaaaggctaggctgatgaccatttgtgtgacgctggcgaagtggctaacagttgattcgcctttgcatttttggcgctctgggctcgttcccaattggttttgtggcccaggtgatgcatggccttagcagcgtgcttgtagcgttttctgttcttgctgtttactagtatcttacgcacgcgccttagcgcacgtcataggcagcgctgaatcgtgtcaatgagttaatataaaaatttaataaaataatccaaagaaaataagaa

SEQ ID NO: 147998 - DNA, 82 bp, Zea Mays
atgtacaaacaaatcaaattattagtctgttgcagacttgcaggcggctggaacaaatcggatacagctagaacaaatcaaa

SEQ ID NO: 147999 - DNA, 925 bp, Zea Mays
atgggctcgccgctccgcaccgtgcacctccgtcgctcgtcgccctcgtcgccagcggataccgtggcgatcacggtggatggcggctcaggggtggacctggccagggtggggctcgcgctggggctggaccccgcctccgtccggcccaacggctacttcctcagccgcggccctggccacgtctgctccgccgtcacgtggcgcgcgctcctcgccttcttcgcgaagcgcgggctgcccaccggcgccgacgccgccgcgcccgttgtcgtccacggcaggcccgccgcgcctactgcgccgagctcagattctgcaactcctccatgcccaaagcgaaaatctggagtcgaagtagaaagatgtcccaagaagagcaagcctcaagagaacaaatcagttcttccaaaacgaaggcacgatgtactcagcgatgaaatcatccttggtctaaagagaaggctcaggctggacgacccaatcccagctaagaagattacgcaagtacaatgcagttcagagacacaacgaccagttaaattttcttgcggctttgtgaatgcaaatggaaagcggctatgggatgtggagacacagcaaccagttaaattttcctgcagttttgtgaacgcaaatggaaagcggctacgggatgaggagatgatcacctcgctttcatgtaaaaaagctcggtgacaggagctgaggtaaatgccctaccatatgttccagcagtcatgtaatcttgaacaaaagggcgtatacttcgcttggaggcagttccagacgcagctgttgtatgtacatccatgcaccttgtgaatatcacattgattgtaactaaacaacatttttagagtgataatcctggtgacaagacgtgcaagtccgtaatcagtgcgcttgttgcatgacagcagct

SEQ ID NO: 148000 - DNA, 867 bp, Zea Mays
gcgagtgcgacacgtaaacgaaagaagaagaagaagatggggacgtgagcgtgctgtggcagggcccacaggccacacagactgggtttgcgtgcaactcacgcagcggcccacgaagcgctgtcgcacgcgatccccgaacagccgtgcacgcgccgtacccgggaggcagcaggtgcccactggccactaacccgaggcgccagttcacgcgggccacaggacgcccgcgcagtgacgatccggacgcgaacctcgtatcaaattcgcttatgggcagccgtcctataagaggcgtcgagtccgccggcgcatggcaaccccaccacaacccagcgccggcagtcgccgtcatcgatcgatcgccggaaaactaacccctaacgatgtctggagccggcgaggaggacaagaagcccgcggagggcggcgcccacatcaaccttaaggtcaagggacaggtcagcacgccagcggtttctctcttcctcattttcttctttcttgtcatctcgccggtggtcccccttcctcaccatcttccccgtagcgaggtagattagcgctgttaaacccgcacctcctagcgatcgatcgtcgttgcgaggtggattctcggattgctagggtgctggctaattgggattggtaggtagcgatgtgtcggtgctgttagatggttctctgcgagcgaatgttttgtcgattgcgcctggtgtgtgctataggtagcccttgcagagtgcagtacagattttctgaagagggcatcgattgttgacctaatgaccttacagtatttactagtttacaaggtcgaatgttcatcctttaattctctagctgtttgttaacaggattgttgat

SEQ ID NO: 148001 - DNA, 977 bp, Zea Mays
gcgagtgcgacacgtaaacgaaagaagaagaagaagatggggacgtgagcgtgctgtggcagggcccacaggccacacagactgggtttgcgtgcaactcacgcagcggcccacgaagcgctgtcgcacgcgatccccgaacagccgtgcacgcgccgtacccgggaggcagcaggtgcccactggccactaacccgaggcgccagttcacgcgggccacaggacgcccgcgcagtgacgatccggacgcgaacctcgtatcaaattcgcttatgggcagccgtcctataagaggcgtcgagtccgccggcgcatggcaaccccaccacaacccagcgccggcagtcgccgtcatcgatcgatcgccggaaaactaacccctaacgatgtctggagccggcgaggaggacaagaagcccgcggagggcggcgcccacatcaaccttaaggtcaagggacaggatggcaatgaggtgttctttcgcataaagaggtccacccagctgaagaagctgatgaacgcttattgtgaccgccagtctgtggacatgaatgccattgcgttcctgtttgatggccgcaggcttcgcggcgagcagacccctgatgaggtgacccaattcggctttagatcccagcattgagtggaatacttgatcgatagatcttttgcctgtgcagctggagatggaggacggcgacgagatcgacgccatgcttcaccagaccggaggcagcgttcctagcaccacctaaaagcctcgttttgctctccgtcctgcgtagtactaaacaaaagggaaaaagtctttttaaggaacttgtgatgctctggctccttgtgccattgctgagggacatccttagcctttgtttagtagtatggtttggtactttgttctgtcatcactcgtttatctatccctaatacatgccgccatgattgtactcccaatgacgcgcagatcatttgcttt

SEQ ID NO: 148002 - DNA, 1119 bp, Zea Mays
gcgagtgcgacacgtaaacgaaagaagaagaagaagatggggacgtgagcgtgctgtggcagggcccacaggccacacagactgggtttgcgtgcaactcacgcagcggcccacgaagcgctgtcgcacgcgatccccgaacagccgtgcacgcgccgtacccgggaggcagcaggtgcccactggccactaacccgaggcgccagttcacgcgggccacaggacgcccgcgcagtgacgatccggacgcgaacctcgtatcaaattcgcttatgggcagccgtcctataagaggcgtcgagtccgccggcgcatggcaaccccaccacaacccagcgccggcagtcgccgtcatcgatcgatcgccggaaaactaacccctaacgatgtctggagccggcgaggaggacaagaagcccgcggagggcggcgcccacatcaaccttaaggtcaagggacaggatggcaatgaggtgttctttcgcataaagaggtccacccagctgaagaagctgatgaacgcttattgtgaccgccagtctgtggacatgaatgccattgcgttcctgtttgatggccgcaggcttcgcggcgagcagacccctgatgagctggagatggaggacggcgacgagatcgacgccatgcttcaccagaccggaggcagcgttcctagcaccacctaaaagcctcgttttgctctccgtcctgcgtagtactaaacaaaagggaaaaagtctttttaaggaacttgtgatgctctggctccttgtgccattgctgagggacatccttagcctttgtttagtagtatggtttggtactttgttctgtcatcactcgtttatctatccctaatacatgccgccatgattgtactcccaatgacgcgcagatcatttgctttgttttgtctgctcgaacctcgaagtcgtctatgcttttcagattattttgggcatgtttggttgtctcctgaatcctgatccatacgttgtcagccgcaccatagtcacattgtgctgctcctgcaattgaggaacgatgataatggagggaaaatgttttagtaagaaattgccggtgattaattatgttgatggatcttgttcagtttgt

SEQ ID NO: 148003 - DNA, 1151 bp, Zea Mays
acgcctctccaccaccactccccgcgcgcaatccaacccggccacctccccacatctaccgccagtggcgccaccttatcgcctcgcctccaaccccgacgcgagccaggtacctacctgctgcggcggccgagagagatggatggccggcggccggagatgcggcggacgatgacgctgtccgagcagctgtccacgcccgacccgctcatccgcgacttcctcaagatcccgcacgacgccgacgccggcgagggtgatagcccctcggccgtcgacgcgcaggggggcggcaggacgaccggctggaagcagctgcgagaccggctccggctccggcgcgcggcgggcgcctggcagaggcgtaagaccggcgcggccgcggcccacgccccggcgaacggcggcggcctcagcaatatcagcagcgctaacaaccgcagcaacaagtacaactacaaccccggcgaggcggaggcggcgttctcccgcaccttctcccgcgcgccgtcgctccgcgcgacgcccacgttctcgcgcgtcgcgtccacccgggtcggccccgcctcctgccgctccagctcaaggcggctctcgacgtacgacttccgcgacgtcgaagagcgacgccacgaggacgaggacgaggacggcgacggggaagaggaagaagacggcgaggacgagggggacgaagaaaagacggcggcgcccgcggcgcagatgtcgctgatggcgctgctggggcagacggacaaccagtgggacgacgatgaggatgaggaggaggagagcggaggcggcgcgtttaagaaaggcggggccggcgccgtgggcgacgaggacgaggacgactgcgacagccgggaggatgagatggtgcacgtgtgctgcgtgtgcatggttcggcacaagggcgccgccttcatcccctgcggccacaccttctgccgcctctgctcccgcgagctctgggtcagccgcggcaactgcccgctctgcaacggcttcatccaggagatcctcgacatcttctgacggaccgagctcgccgcctccatcgtttgtttatcttctaggtcccttagcttcacgtacatccatggcatcatcgccgtcgatacccatgttcttgcaccggttcctatcct

SEQ ID NO: 148004 - DNA, 1651 bp, Zea Mays
atatacgaggggcagggccccccctcctctcccttcgtccattccgatcactcgctgctcccctctctcgccggagcgagccccgggccggatggcggcggcagcagcagctcctcccgcctccgcgatcgcgtgatggacgccgacgccgacgccgccgcgatccgccgatggacgacgccggaagggcaccaccacccgcgccagcggcggtgaccgtctccgccaccgccgcacccgcgcctaccccgccctccgccacggccgccgccgacaagtcctccctcgaccccgacgcgctttatgaagatggccatgaacagcggtgccacaatgcaacctgggtcatatcctgagcgaccaggtgaaccggactgcacttactacctcaggactggattgtgtcgatttggcatgagctgcaggttcaatcatcctccggataggaatctggctattgcctctgccagaatgaagggagaatatcctgagagagtgggacagccagagtgtcagtattatctgaagaccggaacatgcaagtttggtcctacatgcaaatttcaccatcccagggaaaaggccggaattgcagggagggtgcagctaaacacattaggatatccacttctcccgaatgaaaaggagtgtgcgtattatttaaaaacaggacaatgtaaatatgcaaatacttgtaaattccaccacccagaacttttcaatgtggtgccttcgtcacgtggttcacctatttatacttctgtacattcctctgcaagcgctggtccacagtcatatactggaactatgtcaagctggacttttccacgagcttcttttataccaagccctaggtggcaaagtccttcaaattatgcaccaatggttgtacctcatggccttgtccaagtgccgagctggaattcatatcctggtcagctgcagtcacctggggctcaacaaacttatggaagttcacaacaaggcgaagctagtgcaggaaatcagggaatgctatcaccctatagatccagttcatttcctgtgcctcaatatgcgttgcagagagataatgtatttcctgagagacccgatgaaccagaatgccaatattacatgaagacaggagattgtaaatttggtgcagtgtgcaagttccatcatccccgtgtgagatcacagccccctccggattgtgtcttaagtccaatgggtcttccaatacgtccaggtgaagaactttgcaaattctattctcgttatggcatctgcaagttcggcgccaactgtaaatttgatcatcctacaatggctgctccaatgggagtttatgcatatggtttctctgggtctgcttctgtcgcacccgcttcaactaatgcacctatgacgcgacatcttcttggatctccatcaggttctggatatatgtcttaggtgtcttttttttcagttgacctactttgatgtataaaatccacggcatcgcctcaggcgctgtgaatgtttctcctaacttcccgccgggatgaagttctgtaaattgagttgctgctggagatgtacagcccccccccccccccccccctccccaattaatccagaactttgggaataactgttggaacctaataaacttcagatacagaaa

SEQ ID NO: 148005 - DNA, 1512 bp, Zea Mays
atatacgaggggcagggccccccctcctctcccttcgtccattccgatcactcgctgctcccctctctcgccggagcgagccccgggccggatggcggcggcagcagcagctcctcccgcctccgcgatcgcgtgatggacgccgacgccgacgccgccgcgatccgccgatggacgacgccggaagggcaccaccacccgcgccagcggcggtgaccgtctccgccaccgccgcacccgcgcctaccccgccctccgccacggccgccgccgacaagtcctccctcgaccccgacgcgctttatgaagaggggatgtggcaacagatggccatgaacagcggtgccacaatgcaacctgggtcatatcctgagcgaccaggtgaaccggactgcacttactacctcaggactggattgtgtcgatttggcatgagctgcaggttcaatcatcctccggataggaatctggctattgcctctgccagaatgaagggagaatatcctgagagagtgggacagccagagtgtcagtattatctgaagaccggaacatgcaagtttggtcctacatgcaaatttcaccatcccagggaaaaggccggaattgcagggagggtgcagctaaacacattaggatatccacttctcccgtcatatactggaactatgtcaagctggacttttccacgagcttcttttataccaagccctaggtggcaaagtccttcaaattatgcaccaatggttgtacctcatggccttgtccaagtgccgagctggaattcatatcctggtcagctgcagtcacctggggctcaacaaacttatggaagttcacaacaaggcgaagctagtgcaggaaatcagggaatgctatcaccctatagatccagttcatttcctgtgcctcaatatgcgttgcagagagataatgtatttcctgagagacccgatgaaccagaatgccaatattacatgaagacaggagattgtaaatttggtgcagtgtgcaagttccatcatccccgtgtgagatcacagccccctccggattgtgtcttaagtccaatgggtcttccaatacgtccaggtgaagaactttgcaaattctattctcgttatggcatctgcaagttcggcgccaactgtaaatttgatcatcctacaatggctgctccaatgggagtttatgcatatggtttctctgggtctgcttctgtcgcacccgcttcaactaatgcacctatgacgcgacatcttcttggatctccatcaggttctggatatatgtcttaggtgtcttttttttcagttgacctactttgatgtataaaatccacggcatcgcctcaggcgctgtgaatgtttctcctaacttcccgccgggatgaagttctgtaaattgagttgctgctggagatgtacagcccccccccccccccccccctccccaattaatccagaactttgggaataactgttggaacctaataaacttcagatacagaaa

SEQ ID NO: 148006 - DNA, 1988 bp, Zea Mays
atatacgaggggcagggccccccctcctctcccttcgtccattccgatcactcgctgctcccctctctcgccggagcgagccccgggccggatggcggcggcagcagcagctcctcccgcctccgcgatcgcgtgatggacgccgacgccgacgccgccgcgatccgccgatggacgacgccggaagggcaccaccacccgcgccagcggcggtgaccgtctccgccaccgccgcacccgcgcctaccccgccctccgccacggccgccgccgacaagtcctccctcgaccccgacgcgctttatgaagaggggatgtggcaacagatggccatgaacagcggtgccacaatgcaacctgggtcatatcctgagcgaccaggtgaaccggactgcacttactacctcaggactggattgtgtcgatttggcatgagctgcaggttcaatcatcctccggataggaatctggctattgcctctgccagaatgaagggagaatatcctgagagagtgggacagccagagtgtcagtattatctgaagaccggaacatgcaagtttggtcctacatgcaaatttcaccatcccagggaaaaggccggaattgcagggagggtgcagctaaacacattaggatatccacttctcccgaatgaaaaggagtgtgcgtattatttaaaaacaggacaatgtaaatatgcaaatacttgtaaattccaccacccagaacttttcaatgtggtgccttcgtcacgtggttcacctatttatacttctgtacattcctctgcaagcgctggtccacagtcatatactggaactatgtcaagctggacttttccacgagcttcttttataccaagccctaggtggcaaagtccttcaaattatgcaccaatggttgtacctcatggccttgtccaagtgccgagctggaattcatatcctggtcagctgcagtcacctggggctcaacaaacttatggaagttcacaacaaggcgaagctagtgcaggaaatcagggaatgctatcaccctatagatccagttcatttcctgtgcctcaatatgcgttgcagagagataatgtatttcctgagagacccgatgaaccagaatgccaatattacatgaagacaggagattgtaaatttggtgcagtgtgcaagttccatcatccccgtgtgagatcacagccccctccggattgtgtcttaagtccaatgggtcttccaatacgtccaggtgaagaactttgcaaattctattctcgttatggcatctgcaagttcggcgccaactgtaaatttgatcatcctacaatggctgctccaatgggagtttatgcatatggtttctctgggtctgcttctgtcgcacccgcttcaactaatgcacctatgacgcgacatcttcttggatctccatcaggttctggatatatgtcttaggtgtcttttttttcagttgacctactttgatgtataaaatccacggcatcgcctcaggcgctgtgaatgtttctcctaacttcccgccgggatgaagttctgtaaattgagttgctgctggagatgtacagcccccccccccccccccccctccccaattaatccagaactttgggaataactgttggaacctaataaacttcagatacagaaacgctggttttcaggtgtttgcactattttgacactgctgcacctatggtccctaacagttgaggtaggaattcttctgaaggagctgaaacctgtagctgcaggtgtgcagtcgaaattatattattgcgtcaatttatttggaacctgtattcagctggtgttggggcagatattggcattcctcttatctgtgaatgctggttttctgatttgaacagtgtatcccagcctacggcttctgccaagacagtaaactcaggacctgtttgggactgttccactattcaaaaaatgaatttgaatctgggattcattatt

SEQ ID NO: 148007 - DNA, 463 bp, Zea Mays
tatacctttctcggccttttggctaagatcaagtgtagtatctgttcttatcagtttaatatctgatatgtgaactatgtgttcactttgatattaaatttattttttgtgggggaggactcactacagtagcttgctactagggtcctcatgtgtcgcttgggcgttgcactactgcccaagcctggcgcgccccaaccaatataaaaaaaaacatactgatctaaatcaatggcacaaaaaaatcgcgaagatgcaataaaaaagaaatcacactcatctttccccttgtatgttattgactcggttatacattgactatcctacagcacagttataatacatacatgggctatcctacataagtcaacatcacaggatttgactgcagttatgtacttggttatacattgtctatcctacagctcggttatgatacatacatgggctatcctacataagt

SEQ ID NO: 148008 - DNA, 2123 bp, Zea Mays
gcaattgtttccaggtaatctcgcatcagcaaacagcaccgggctccgttcaccgccttcccttctcttctccggttcctccctcgcgcgttcgctcgctctcgtggcgcaactcgtagaccgccgccgcctccgctctacgccaggtgcctaggtctagcttcgtcggtcccttcgccaacgacgagcacccacccgattgcgagatctgacgccagaagttcagctaggagtgcatcttgtttacctgttgcttaatcatggacaactctcagaatcaaccaccaccacctggtgttggaacatggccgcagacacctcctagtcacccgccacaatgccatgctgatccacagtcttatcatccacaatttgctgctagacctgacaatgctagtgccaataatagtggtagttcagcaaacattgagtcagctgtccaggaggctgttcttcacgcgcaggacattgagactcagcaagtcatacagaatcaaagatatgcaaacacaacaagtgaacctacaaaatatggggaagacttactttcgaaccgccgtgaccctaatgcattgaaggagcatttactaaagatgacagctgatcatcgtgcagagatggcaagcaaaagggggaagccacttcatccaaacaatggcaactgtgaaattggcaatggctatggtgtacctggaggcggtgcttattatgctgcaaacttgccaagtcctcaaatgaataaacctagagatgaaactgataaagctaaatgtgcaaacgatctccctgattttttaaagcagaggttaagggcaaggggaattctcaaagatgagactacaaataagaattacacgagtacgcagactgtggattctcaagaaatcgagaacaaatctgcacaagagttgcctcctggttggattgaagtgaaggacccgacaactggagcgccatacttctacaatcaaagcactggagtgagtcaatgggatcgccctgacagtgttgtgaatatcatgcaacatcaagtttctccatccttgccagagaactgggaggaggcaattgacaaatcaacaggccacaaatactattataacacgaagacacagaccacacaatgggaacctcctacttctgtgaacaccagtgttagacctccagcttccaccaacactgcagttgagccagtcgctcaagctgcagatatttggaactctcaaatgcagagatgtttgggctgtggtggatggggagttggtcttgtccagccttggggatactgcaatcactgcacaagggttcaaaatcgtccttttcaacagtacccatcttacacaaataatacgatgcacgccagtggtaacaatgctcccaaagctcaggggaatgtttcagctaagaacagatcaagctcaaagccacctttagggaaaccaaacagaaaagaccaccgcaaaagaaatcgccccgaggatgatgaacttgacccaatggacccgagttcttactcagatgctccacgcgggggctgggttgttggtttgaagggtgttcaaccacgagcagcagatactaccgcagctggacctttgttccaacaaagaccatatccctcaccgggtgctgtgttgagaaaaaatgcagaggtagcaacccatggcaagaaacgtggtggtatggctccgataacaaaaagaggagatggcagcgacggacttggggaggcagattagtcttttggtgaactgaaatgttgtgctatccgaatctccttggtggttgtctctggagctgctaaactatcattgcacgcctgaagaaaatcgaaaaaatattggctgccagatctggaatgaggaaactcactacagttcgcgagtttttgcagcgattaacgctagtgtactcgctggacctcgaggctagagcaatgcgagctcaccccggcttgctgatgacacattcactgagttcactgcggtttgccgatgacattcaatgtgcccttggtgtgaattttatatgaaaatgaactataatctgtaattggaaagagtgatttcaatgtaaggaattaacttttgtggggtgatgaaccatactagcgatgcacttag

SEQ ID NO: 148009 - DNA, 328 bp, Zea Mays
atggccgcgagagcccgccgccatgcgcggctaatcgcgcccatctcaacggcctaaggccatggtgattggccagcgccccccacgccatcagctactcgctgtattgcgtgccgaccctgtgtggcctccgcgctcatggtcgcgttgcactccatactgctgtcatcgatcaacgaaccacatcgtcttcgatggccatggcgctgctggagcctactacgtcggattcacgcgggacacgcttccgcccctcctactcgccctacgctgcaggcgacggcacacgggccaagcgcacgtcgtcggcgctgatccagcctgctga

SEQ ID NO: 148010 - DNA, 1008 bp, Zea Mays
gccaagggcagcgagctgcttgcttattactgtcctattgtctgcctccacctgccgcaagcaagggatgtggaacagcagatcacacttcgccggcgggcaggacaacgacggcaacgacgaccagccatacggatacggatacggtggcggccagcagtatgaagcaaccggcggcaagaaacgagcgtcctcgaggctgaagaagagcagcggcagcaagaaagacgacgagtacaccaagtacgcaggcaacagcaacgaggccgacgacaaccgccgcaacaggccgaacgacgacaataactacaacggcggcggcggcaaccactacagcggcgccggcgccgcaataggtgcgccctactacggtgctgctggcgccggcggctacgggagcagctctccctactacggcaacgccgctgtccacggcaccggcggcgacggcggcggcggctacgcaccgtacaacaacgctcccgccgccttctgggctccccaggacggcaccaggtcgcccatgtttatcagcactagggaggtgcacgtgtacggcgcgcctggcgggtacgacaactacgatggcagcaacaacgacgaccgccagaggaggagaggcggcggcggattcttcgggcccgcgttccatgccgtcggccgcttcttcgaccgcaagttcggcttcagcgacagggactgaagcgcacatacgccggcgttgccatgcattgcaacatgtatgctcgcgggcatctcgtcaatcgacgacagatctatctgccatctgcatgcgtgcaattacactacctagcttcttcgtccgcgtactagtgccctgctatcgttagctagagctcactgctcaccaccaggagccgtttattgcatcaaagtatttattccgagtgtgccatccagtgtcgtatttggtttccgttgtgatggagatgaaccgtatgtatacattaatacatgcatgtctatagcagaatgcaaatatgcata

SEQ ID NO: 148011 - DNA, 770 bp, Zea Mays
actcggaaagagccgaacgggaacgaggaaggaaggttccagcgaccgtggtcgtggagtaggagaaagcgcgatggggaagaagcggcagcttatctgcctcgcagccgccgtcgccgccgcggccatcctcctgacagcgtcggccaagaagtccagcgacgtcaccgagcttcagatcggcgtcaagtacaaaccggagtcatgtaccctgcaagcacacaaaggagacaagattaaggttcattatcgtggggcactcactgacggatcagtttttgattctggctatgacagaggtgacccgtttgaatttactcttggaaacggccaagtgataaaaggctgggaccaaggattgctaggtatgtgcgtcggtgaaaagcggaagctaaagatacctgcaaagatgggctatggcgagcgaggctccccaccgaagattccaggcggagcgactctggtattcgacacggagcttatcgccgtcaacgggaagacatctggcggtgcgaatccagaaactgaaagtgagctctgatacgatgcattggatggagagtttcagtttcagctcgagggagtagcaaagtcacgtagttcatttggtgccgtgaaagggctgttgttttgtttccttcatgcatggcaatttatgttttagagatgtcatactctggaaacattgaagcaggtctggactgttgttgcatcgatccacgggtcggaaaatttcaaatgtaatgagtggtgaggcagcatttttgcca

SEQ ID NO: 148012 - DNA, 113 bp, Zea Mays
tttttttttattcatctttttcttatggtgtcatggtaatagtactagcgtgtataacttcaccactgttcaacgttgccgtgtgctgttacgcggctacatttcaactcgac

SEQ ID NO: 148013 - DNA, 2281 bp, Zea Mays
ccagtgccacccagagccggcactcgcaatgtctacttgtctaccgtcgctgcgctagccctcctccctgcttcttgcttttgcctgagcctgcagcctgctgcaagcttttgctttggtttaggtgcttcttttccacccctttactgttccccccacttttgcttgctttgtcacgcacacgaaaagctcctgcctttaccttatctccgcacccgtagtgggatttggtgggagctgcgctgctcgcccctcgcgtttctttgctcaattgggggtcacggtcacggcccgcgggtgctgcgcgtgctcgtgggcgggcggaattcggggttcttgcgcggtcccggtcccctcggcgattgcggacgctctctgcagatcttcgcgtaactccgggagcgcgccggagatgaactgcgggccgcccgaccagctgccgccggggtcggcgccgtcgtgcttcctcaacctgaactgggaccagtctatggccgccgaccagctcgacccggcgctcagctcgatggtctcctccccggcgtccaactcgacggccgccgccgcggttactgacggccgcgctctccacgggatctctccgcagcagcagtacggaggcactccgctcagctcgccccccaagctcaacctgttccaccaaactcgcccccagttccaccacttcccgccgccgcaggtcggcggcctgccaatcctggagaacctgatgccgatgggccatctagaccagttcctcgccgacccaggcttcgccgagcgcgcggcgcggctgtccggcttcgacggccgccccggtggaagtggctatggaggcgtcggcgtcccgggacagtttggcatcccggacgccggccccatcggcgcattgaaggagctggagctcgggaacggccgggacgagtcgtcggtgtccgatccggcgtccggcagcgcggagatggcgctcaacaaggggccttccgacggcaatgcgaagaaacggaaggctagcgggaagggcaaaggcaaggacggccccgggtccgccgccgccggcgccgccaaggaggagtcgagtgggaagcggtgccgatcggcggacgagagcagtggcgcggaggacaacaaccccaccaccaagggcaaggccgcgcagagcagtagcgagaatggtggtggcaggaagcagcaggggaaggagagcgcgacgaagccccccgccgaggcgcccaaggactacatccatgtccgggcgcggcgcggcgaggcgacggacagccacagcctcgcggagagggtgagaagggagaagatcagccagcggatgaagctgctgcaggatctcgtgccgggttgcaacaaggtggtgggcaaggcagtgatgctggacgaaatcataaactacgtgcagtccctgcaacggcaagtcgagttcctgtccatgaaactggccaccgtgaacccgcagctggacttcaacagcctgcccaacctcctcctccctaaagacatacaccagccctgtgggccgccgcatttcccgctggagacctcaggcgctccgctgccgtacctgagccagcctcaccatgggagccctctaggctgctgcatggacacccaggggggctctatgcacccgctcgacgcggcgttctgccggccgatgaaccctcagcatcctttcctcaacggtgctagcgacgcggcgtctcaggtcgggactttctggcaagacgaccttcaaagcgtggttcacatggacatcggccaaagccaggagatcgctcccacctcttccaacagctacaacggttcattgcagacagtccacatgaaaatggagctttgaggcatggccggggaaaaagaaagaaagaaaaccccagtccgaagctcgacgccgtcgtcccccctgtacatacggagaagagaggacacagctcgcaccggaagcagcgggctcttggggggtccaatccaacctaacgacgttggcccctagcagtgtttcagcctctaattttccccacccccgcccaatggtgtgacgattctttctttgaacaagatgcggaagaccgccgcgccggcagctgctcgcaccatccccgtcgcctgtttcgtttcagctttagcaagatcccgccggcgcggtgcgtcccagactctcccccagtatattccttcccgatcagagaccccccgcacgtaatgtcatttgtattgccgtcatatttgtagctgatatatatatagtgtatatttaagatcgcca

SEQ ID NO: 148014 - DNA, 1304 bp, Zea Mays
gccggcactcgcaatgtctacttgtctaccgtcgctgcgctagccctcctccctgcttcttgcttttgcctgagcctgcagcctgctgcaagcttttgctttggtttaggtgcttcttttccacccctttactgttccccccacttttgcttgctttgtcacgcacacgaaaagctcctgcctttaccttatctccgcacccgtagtgggatttggtgggagctgcgctgctcgcccctcgcgtttctttgctcaattgggggtcacggtcacggcccgcgggtgctgcgcgtgctcgtgggcgggcggaattcggggttcttgcgcggtcccggtcccctcggcgattgcggacgctctctgcaggatctcgtgccgggttgcaacaaggtggtgggcaaggcagtgatgctggacgaaatcataaactacgtgcagtccctgcaacggcaagtcgagttcctgtccatgaaactggccaccgtgaacccgcagctggacttcaacagcctgcccaacctcctcctccctaaagacatacaccagccctgtgggccgccgcatttcccgctggagacctcaggcgctccgctgccgtacctgagccagcctcaccatgggagccctctaggctgctgcatggacacccaggggggctctatgcacccgctcgacgcggcgttctgccggccgatgaaccctcagcatcctttcctcaacggtgctagcgacgcggcgtctcaggtcgggactttctggcaagacgaccttcaaagcgtggttcacatggacatcggccaaagccaggagatcgctcccacctcttccaacagctacaacggttcattgcagacagtccacatgaaaatggagctttgaggcatggccggggaaaaagaaagaaagaaaaccccagtccgaagctcgacgccgtcgtcccccctgtacatacggagaagagaggacacagctcgcaccggaagcagcgggctcttggggggtccaatccaacctaacgacgttggcccctagcagtgtttcagcctctaattttccccacccccgcccaatggtgtgacgattctttctttgaacaagatgcggaagaccgccgcgccggcagctgctcgcaccatccccgtcgcctgtttcgtttcagctttagcaagatcccgccggcgcggtgcgtcccagactctcccccagtatattccttcccgatcagagaccccccgcacgtaatgtcatttgtattgccgtcatatttgtagctgatatatatatagtgtatatttaagatcgcc

SEQ ID NO: 148015 - DNA, 1509 bp, Zea Mays
gccggcactcgcaatgtctacttgtctaccgtcgctgcgctagccctcctccctgcttcttgcttttgcctgagcctgcagcctgctgcaagcttttgctttggtttaggtgcttcttttccacccctttactgttccccccacttttgcttgctttgtcacgcacacgaaaagctcctgcctttaccttatctccgcacccgtagtgggatttggtgggagctgcgctgctcgcccctcgcgtttctttgctcaattgggggtcacggtcacggcccgcgggtgctgcgcgtgctcgtgggcgggcggaattcggggttcttgcgcggtcccggtcccctcggcgattgcggacgctctctgcaggatctcgtgccgggttgcaacaaggtggtgggcaaggcagtgatgctggacgaaatcataaactacgtgcagtccctgcaacggcaagtcgagttcctgtccatgaaactggccaccgtgaacccgcagctggacttcaacagcctgcccaacctcctcctccctaaagacgtgagggggacacgcacgcataacatgatcgctcgcttcgcattactacgtttggttcctagctcacacgagtcatattccattcctgtctgtctgtctgtgatcagatacaccagccctgtgggccgccgcatttcccgctggagacctcaggcgctccgctgccgtacctgagccagcctcaccatgggagccctctaggctgctgcatggacacccaggggggctctatgcacccgctcgacgcggcgttctgccggccgatgaaccctcagcatcctttcctcaacggtgctagcgacgcggcgtctcaggtcgggactttctggcaagacgaccttcaaagcgtggttcacatggacatcggccaaagccaggagatcgctcccacctcttccaacagctacaacggttcattgcagacagtccacatgaaaatggagctttgaggcatggccggggaaaaagaaagaaagaaaaccccagtccgaagctcgacgccgtcgtcccccctgtacatacggagaagagaggacacagctcgcaccggaagcagcgggctcttggggggtccaatccaacctaacgacgttggcccctagcagtgtttcagcctctaattttccccacccccgcccaatggtgtgacgattctttctttgaacaagatgcggaagaccgccgcgccggcagctgctcgcaccatccccgtcgcctgtttcgtttcagctttagcaagatcccgccggcgcggtgcgtcccagactctcccccagtatattccttcccgatcagagaccccccgcacgtaatgtcatttgtattgccgtcatatttgtagctgatatatatatagtgtatatttaagatcgccatttctcgtcttctccctgtggggttggttctggaaatgaattctgccgagatgcgggacatggacagaaggaagaagaagcaggttgtgctgggagt

SEQ ID NO: 148016 - DNA, 1053 bp, Zea Mays
ctcctccccgttgtcatgcgcccgcccgtcgccgagccaccacaccaccaccctataaaacccgggcgcccgcctcctccccaccgtcgcagcagctcaacaccaccgcaccgcccccgccccgcctctcctcgccgccgacatggccgcgtacatccgcctcgacgacgccgtccgcgcgcgcctccgcgggggcgcccacgccgcggggtgcaccaccagcagcagcagcggcagcgaccacgacgcgtccgcctgcctctccgagctcgtccaggcgttcctggagacgggcgccggcggcacggccgaggaagggccccgcgcggcgcccaaggagtacggctccgacgacgaggacggggcggcggcctccgccgcggcgaccgtgcgggccctgctcgacccgccggcggaggaggacgcgttccgcatcaggctggccgcggcggtggcggccgcggcggaggcggaggcggcgctgcgggcgcacggggcggcgttcaggcgcgcgctggcgcggcggctgcgcggcgccgggtacgacgccggcgtgtgcaggtcgcggtgggaggcgtcgggcggcgccgcggccgggacgtacgagtacgtcgacgtggtcgcggtcgcgccggcggcggccaggtacattgtggacgcggacttccgggcggcgctggaggtggcccgcgccacgcccgagtacgcggccgtcgtggccgcggtgccggcgcccgcggtggtcgcgcgcgaggaggccgtcggccgcgccgtgcgcgtcgcgtccgacgccgcgcgccgctcgctccgcgcccacggcctccacgtcccgccctggcgcaagacgcgctacatgctcgccaagtggctcgggccctacaagcgctccacctcgtccgctgctggtggggtaatgtcgatgcccggcggcgcagggctggacgtcaagtgccgcgccgtcgggttcttcgcgcctccggccgccgcgccggcggccaggatcaagtagccttgccgtgtttcttattagtgagatcgagagtttgtgtttga

SEQ ID NO: 148017 - DNA, 1477 bp, Zea Mays
ctctctgttaattccggggagcaccagccaagctcctcccctgcggctcgcctccctcacggcgccgcctgctccccattgccgacctccactccagcacctgagcaagcgctcctgaggtcatcttccccatcttcctctagtgccggccgccaggtcatcttccccatcttcctctagtgccggccgccaggtcgtcttccccatccctcccatggcgccctcacctctgctcctcccagcgccctggctctgttcaaccttcacagtgagctcgccctcagccatggcggatgccgcctccacctcccccttggtgctcgccgagctcgccctcagccctgccgcgcccctgctttctgttcccagtgcgccctctgttctgttccaatcgttctccacgccgtgttcccccatggctccccttgcctctccggtcagcactagcccgaacggtacagcagcataccggtgccaaacccgtgtccgcgacgctcgccaagtgctcgatgaaataccgcagtgagctccacctcgacctgtgcagccccaacccgcgacgtcgcaacacccttgccctccgtcgatgtcgcgcttcgcccattgctcctcgacgaagagccagaaccgtggtagacatgcatgcgcaatccgaactaattttacctggttgttcgctttatgtgattgtagtttgctctaattacgtgtggtcgatggcgtgaatatgtgtgtgaaaatgtaagcacatactctcatgcttaacaaaacaatccaaaatattaccatatatggttgcaacagcagagtgccaaacaatggaaatcaaaatcgacttacttcttcgtgtgcttcatccactgtggtgctacatgactcttgtttttcattcttctcctcgctagcgtctacatctggcctcacctcccaggaaactccagatggaactgcgttgcatggctccatggagtccactgaacatggttcttgtaccttacccagttcaacagttctcttctgctgagattaatttgtggcgttatcatgcataaattatatttaattgaacaattgcaaaataaggttagagaacatcgttaatacaagcaacacatactctatcagaagcttcagttattacagtaggagctgcagtttggataatgttcttggtcccctcagattcatcatcattactatctgtgtgattcaagtctccagatgatgctttgcataaagtatcaagcttctcctgcaagcaaatcagttctcgagcaacagacttcctagcttcccttacacttggatgcaagccctgtgtcaatattaccaaggtcttagaaacaacccagcaagtaccaaaaaagtttaccaaataagaaataagtctatgccactcagagaaaaacaggctggaatgaaaaatatacctggattgcgtcaagcttcaggagtaaattcataatagtttcaccta

SEQ ID NO: 148018 - DNA, 1574 bp, Zea Mays
ggaatttgggcattggttgctttgactgtttcttggaatgcagataaactacgcctatgctcgtgacactgaaacactatttgatattattagtgtgaaggtatggagcttatcaggatatccaggaaattttctgcaatttatgtattttggtatcaattatcaatctgccaatcaatcattttcttttgctttcttcgataaacatttattggcaagacagatgaacctctcaattgacaagcgatgcaggataaataatttgtccacaagcatgattgcattatcccaggtgcttatgaaagtttttaccttttcttcaatatgaagtctgaatgtgtggtttggcctgtctgatctatctagcaggtttagtggtactcgcatcagctaaaccttaaacttgttttcttcttaatgtaatataattatacatggttctactacttgtttgaaaaaaaacttaaacttatttctacatatggaatcactaaatggtcgtgttttccaataccaattgcagatcccttcgttttgataagtaaacatgagaccccttttgctaggatgtttgtatatcttctgttttaaactatattatgtaaacagtgcaagcgatgagtgaagggtgactaataggcttctttaatcagcactgcagtatcttttgttgaattaacctatactcactttattttatttatataatacagtccatttagctaattttgtttgatgtgcagtgacacgaccttgacagtcaagatgctcttttaggttattttctcctgaaaccacttcttttgccatctcctaatgttatggtcccattacatctccattcattgcaggagatggtcccaattaccttacatggttctgttggacacaatgaagccatccagatatgctattaaaaatcctgctagtcattatggctttaaattgtaccatgtatgttctattttcagctaggcagagcatgttctatttacagcaagccagcagacaccaggcagtaaggtgatgtatgagtcaattatcaggtgacaaaatggttatatttaattatgcatgttatcttcctggctctctatgttttttgaggaattcaactacttgtagtaccagtgtgtcactgatatgtatatatgtgttgatgttcgtcatccaagatcaaatacatcctgctaggtcattacttgctaatgtgcatttgattttgctgttgccaggatggaaatttttttggcagctttctcagtgaatcagtatcaccgcagaacctttttggacacccagatgtcgaaagatgcccattcgtgaggaatatcaatggagctacaaccttttcccctcacttctgctttgccagtagctgctcaaggaggcaagggtccaatttttgaggaagggtcaggctttgagtcagcattcaagcttttctatggccgagatggaatagtccccctttaagaaagatcatatgtatctgatgaaaaccacaatttagagtacacttatgtatgagttatttgacaatgcttatttatgagatattgaatgttatttat

SEQ ID NO: 148019 - DNA, 224 bp, Zea Mays
tagcaaaatttaattttgacttgggttggggtgcgccaggcttgaactatagtgcaacgcccaagcgacacgtgaggaccccagtagcaagctactgtagtgagccctcccccacaaaaaataaatttaatatcaaagtgaacacatggtccacatatcagatattaaactgataagaacagatactacacttgatcttagccaaaaggccgagaaaggtatga

SEQ ID NO: 148020 - DNA, 224 bp, Zea Mays
tagcaaaatttaattttgacttgggttggggtgcgccaggcttggactatagtgcaacgcccaagcgacacgtgaggaccccagtagcaagctactgtagtgagccctcccccacaaaaaataaatttaatatcaaagtgaacacatggtccacatatcagatattaaactgataagaacagatactacacttgatcttagccaaaaggccgagaaaggtatga

SEQ ID NO: 148021 - DNA, 126 bp, Zea Mays
ttgataaccatttactaacaaaattactagttcataacctgaacaagcattttaaagtacaaaatgctcctctaggctccagtcctctactagctagcctcttgtaaaatagaaatgaaaaaaaaa

SEQ ID NO: 148022 - DNA, 130 bp, Zea Mays
actgtagtgagccctcccccacaaaaaataaatttaatatcgaagtgaacacatggtccacatatcagatattcaactgataagaacagatactacacttgatcttagccaaaaggccgagaaaggtatg

SEQ ID NO: 148023 - DNA, 714 bp, Zea Mays
aattccaacactcaggcaacccagctttggctgcccttgcttgctgctcagttctttgccccctgttcctcctcctcctcttttcgcacctcggcgcctgcttcggcatcaactgcgaccgagatggaggcgcaagacgactgcaagtggcgccaagtcccggcgttcggcgactggaacctgtgggacgacatgcccgtcacccagtactttcaggcagggaccttcttcttcgccgcgccgacgacagagaaggacgacgacgaggatctcttcaaggtgccccagttccctgccacgccctacagctacaagaagtgcgttgttcgagtgaagggggagaaaggaactgctgtgcctccggcggcgaggaagggaggaaggaggcgccgcgtgaacgagcaacagaagtggaagcccaagggagctgtggacgaggacctctacaagatatccccgcagcttctctgcaagaagaagctcctgaggaatctgctgggagggtgcctgggcctgagctgcatcgcatgaccgagagacgcatcgcttaataagtttctggggagtttgttgttcggtgggtgctctggagagttgtatagtgtctacgctaatatggaatcaatggaaacttactgctgcttttgcactcttttgaatgtaaacactagctcgcattccatctctcttggtgttgttttggtgactcacttt

SEQ ID NO: 148024 - DNA, 723 bp, Zea Mays
aattccaacactcaggcaacccagctttggctgcccttgcttgctgctcagttctttgccccctgttcctcctcctcctcttttcgcacctcggcgcctgcttcggcatcaactgcgaccgagatggaggcgcaagacgactgcaagtggcgccaagtcccggcgttcggcgactggaacctgtgggacgacatgcccgtcacccagtactttcaggcagggaccttcttcttcgccgcgccgacgacagagaaggacgacgacgaggatctcttcaaggtgccccagttccctgccacgccctacagctacaagaagtgcgttgttcgagtgaagggggagaaaggaactgctgtgcctccggcggcgaggaagggaggaaggaggcgccgcgtgaacgagcaacagaagtggaagcccaagggagctgtggacgaggacctctacaagatatccccgcagcttctctgcaaggtgaagaagaagaagctcctgaggaatctgctgggagggtgcctgggcctgagctgcatcgcatgaccgagagacgcatcgcttaataagtttctggggagtttgttgttcggtgggtgctctggagagttgtatagtgtctacgctaatatggaatcaatggaaacttactgctgcttttgcactcttttgaatgtaaacactagctcgcattccatctctcttggtgttgttttggtgactcacttt

SEQ ID NO: 148025 - DNA, 917 bp, Zea Mays
gttagccgaccccgactgtcattcgcgagcaccgccgccgctcgccagaatgacacttcgggtgatcctctcccgcctgcgcctcacccctctcatccacgacggccaccacctgcgacgctctctatccgccgccgctgccaaactacctgacgagttgcctcctggcgcgccggcgccaacctccgactccaggctcttcgtcgcagggctgtcgtggtccgtggacgagcgctccctcacggacgccttctcctccttcggcaccgtcaccgaagttagaataatgtatgacaaaaactctggaaggtcaagaggctttggatttgttcatttctcaaatgataatgaagctaagtgtgccaaggatgctatggatgggaaggtaatgctagggcggccattgcgaataagttttgcccttggaagagttcgtggcgcatcagttattgttcctcgactttctacggtgaaatgagcagaagcattggtcgtggcatactggcatggaccgatggacatatcaggagggttgcgaagtacccatataggctagtgtttttaatcttgcaaggtagggatcttagtcgaaggcgcctggcaatggcgtgaagggcagcgtggcaaagaagatgatggctatgtttgtcgccccaatttgctcgatgttgaagcatttcacgaggtgcattgtagctttgcagccacctcgtgtgaggccgccttttcgaatgtctcgtttgatgtgtgtgagtgagagagagagactcttcttgaattgattcatgtcaaatgtatccagtaggggcttttcgccccctcctgtttcataaaaaaaaatcatgtaaactgtaaatttgtggtggcaaccgtcactacgcactagtacaacgcagttaaactgtcttcgattcttc

SEQ ID NO: 148026 - DNA, 177 bp, Zea Mays
agtttctccaggtatgtcgatgacggaaggcccttttggcaatatatagtgagctcatcaaccggctgctcagatctacagtacttcgaggaactgtaccagtactacacaactgagaaggtctggcgtctctgcgacccagacgctggacgtgttttcgaggcgttgaggagggct

SEQ ID NO: 148027 - DNA, 1981 bp, Zea Mays
accacgcgacgcaaacaacagagctgccagcctgccactgaggagtgaggaaccctaagcggcgcactgtgcaggcgaaggcggcgcgctaccggcgacggccgacgggggatacggcgacatcgtccccctcgacccctcctccatccccgacgcggcggcgccagactgcaggtgttgaatgctgatttgttgtggcctgttgcgtcttcaccagttcatacattaaacttgaagaaccacgtggttgaagaaaagcccactgaaaatgagtaatacatcatcttcgtcaagtggtgagcgtgctatgcagtgacagagggctgtggagatcataagttcataacatcctatgttagcctttcacttgatcataagttcataacatccttatattcatgcagggatgtgatatatgctgatattccaaagctcattccatttattgatctgttgggctgttccctccctaaaccccagcgtcgcctccgacgagtcaccgctccgtcggctgcttgctgcagtccacgccacgcgctacgccgtcacggtcgctcctcccgtgacgcagccgtcgctaggcgccgcctatttctcggacaaagtcgctcgccaccatggcggcagcgtcggctgccgcagaagccagcggcgagagtaaaaacgaattcctcatacgcgacgacgcgccagggctactcgccgctctcaaggagatgaaggacggactggacctcgtcaggggcaaggtcgaggccatcacgcggaaggtcaaggcgaaccagttgccggcggccaacgggatcgggtacctagaagcgaagaaccacctgctccttggctattgccaggacatcgtctactacctgctccgcaaggccaaggggctctcggtggatggccaccccgtcgtacggagccttgtcgagattaggctgtttctggagaagattcgtccgattgacaagaaggcagagtaccaaatccagaagctcaccgatgccgctgacaatgccactgttcgagagaaaccaggaaatgcacaggcgaaggggaaggacgggcattcggatgaggaagacctcctgaagtataggccaaacccagatatgatggacacaaagcctggtcctgatgggcaggatactgatggtgtttaccgtcctccgaaatttatgcctactagcatggatgatgaagagaaacgtcgtaaaaatgattcaaggagagataaagcgatagcccgagtggcaatagaaaacccttatattaaagagataattgatgatgctgcagacagacctgaagagtggaaggaaacagtgggcgatgaaagcagagaatttgggaggtacatgcgacagagagaagagcaagagaagcaggaagaggagttgttcactcgggctcctgtaaccaaacgtgataagcagatcgagaagcgcataaggagacaacttcatgggctaggaggcttaactgacggtttcgaccttgggatgaacatgctgttgggaggagacaaggaagatgatggcggttcaagcaagtcgcatggcaagagcggaaaccgaaagaagcacctgaagagcagcaagaagaggaagaggcattagccttggacccacactgctgtagcacttcaacataccgatacagcctagagacggttcaagcaatccacacggaaagttgaagctggagaaaatacaagaaaccaagtagagaaaaaaagctttggttcctgtaggcgtattatttctgaaacagaaaacttgatctgagcgactgatcctgagccaatggaacagtatgaattatatggcttgaacatggtaggtgtaccaagttttgttctgatagtcgaatgattgttgtattattgattaacaagaccaacaatatatagactaggctccaaccggttcatagaaacagtgcccggtagagatggacggtgatcacctgattagtaccttct

SEQ ID NO: 148028 - DNA, 1890 bp, Zea Mays
accacgcgacgcaaacaacagagctgccagcctgccactgaggagtgaggaaccctaagcggcgcactgtgcaggcgaaggcggcgcgctaccggcgacggccgacgggggatacggcgacatcgtccccctcgacccctcctccatccccgacgcggcggcgccagactgcaggtgttgaatgctgatttgttgtggcctgttgcgtcttcaccagttcatacattaaacttgaagaaccacgtggttgaagaaaagcccactgaaaatgagtaatacatcatcttcgtcaagtgggatgtgatatatgctgatattccaaagctcattccatttattgatctgccgtgccaatttgccagttgggctgttccctccctaaaccccagcgtcgcctccgacgagtcaccgctccgtcggctgcttgctgcagtccacgccacgcgctacgccgtcacggtcgctcctcccgtgacgcagccgtcgctaggcgccgcctatttctcggacaaagtcgctcgccaccatggcggcagcgtcggctgccgcagaagccagcggcgagagtaaaaacgaattcctcatacgcgacgacgcgccagggctactcgccgctctcaaggagatgaaggacggactggacctcgtcaggggcaaggtcgaggccatcacgcggaaggtcaaggcgaaccagttgccggcggccaacgggatcgggtacctagaagcgaagaaccacctgctccttggctattgccaggacatcgtctactacctgctccgcaaggccaaggggctctcggtggatggccaccccgtcgtacggagccttgtcgagattaggctgtttctggagaagattcgtccgattgacaagaaggcagagtaccaaatccagaagctcaccgatgccgctgacaatgccactgttcgagagaaaccaggaaatgcacaggcgaaggggaaggacgggcattcggatgaggaagacctcctgaagtataggccaaacccagatatgatggacacaaagcctggtcctgatgggcaggatactgatggtgtttaccgtcctccgaaatttatgcctactagcatggatgatgaagagaaacgtcgtaaaaatgattcaaggagagataaagcgatagcccgagtggcaatagaaaacccttatattaaagagataattgatgatgctgcagacagacctgaagagtggaaggaaacagtgggcgatgaaagcagagaatttgggaggtacatgcgacagagagaagagcaagagaagcaggaagaggagttgttcactcgggctcctgtaaccaaacgtgataagcagatcgagaagcgcataaggagacaacttcatgggctaggaggcttaactgacggtttcgaccttgggatgaacatgctgttgggaggagacaaggaagatgatggcggttcaagcaagtcgcatggcaagagcggaaaccgaaagaagcacctgaagagcagcaagaagaggaagaggcattagccttggacccacactgctgtagcacttcaacataccgatacagcctagagacggttcaagcaatccacacggaaagttgaagctggagaaaatacaagaaaccaagtagagaaaaaaagctttggttcctgtaggcgtattatttctgaaacagaaaacttgatctgagcgactgatcctgagccaatggaacagtatgaattatatggcttgaacatggtaggtgtaccaagttttgttctgatagtcgaatgattgttgtattattgattaacaagaccaacaatatatagactaggctccaaccggttcatagaaacagtgcccggtagagatggacggtgatcacctgattagtaccttct

SEQ ID NO: 148029 - DNA, 1873 bp, Zea Mays
accacgcgacgcaaacaacagagctgccagcctgccactgaggagtgaggaaccctaagcggcgcactgtgcaggcgaaggcggcgcgctaccggcgacggccgacgggggatacggcgacatcgtccccctcgacccctcctccatccccgacgcggcggcgccagactgcaggtgttgaatgctgatttgttgtggcctgttgcgtcttcaccagttcatacattaaacttgaagaaccacgtggttgaagaaaagcccactgaaaatgagtaatacatcatcttcgtcaagtgggatgtgatatatgctgatattccaaagctcattccatttattgatctgttgggctgttccctccctaaaccccagcgtcgcctccgacgagtcaccgctccgtcggctgcttgctgcagtccacgccacgcgctacgccgtcacggtcgctcctcccgtgacgcagccgtcgctaggcgccgcctatttctcggacaaagtcgctcgccaccatggcggcagcgtcggctgccgcagaagccagcggcgagagtaaaaacgaattcctcatacgcgacgacgcgccagggctactcgccgctctcaaggagatgaaggacggactggacctcgtcaggggcaaggtcgaggccatcacgcggaaggtcaaggcgaaccagttgccggcggccaacgggatcgggtacctagaagcgaagaaccacctgctccttggctattgccaggacatcgtctactacctgctccgcaaggccaaggggctctcggtggatggccaccccgtcgtacggagccttgtcgagattaggctgtttctggagaagattcgtccgattgacaagaaggcagagtaccaaatccagaagctcaccgatgccgctgacaatgccactgttcgagagaaaccaggaaatgcacaggcgaaggggaaggacgggcattcggatgaggaagacctcctgaagtataggccaaacccagatatgatggacacaaagcctggtcctgatgggcaggatactgatggtgtttaccgtcctccgaaatttatgcctactagcatggatgatgaagagaaacgtcgtaaaaatgattcaaggagagataaagcgatagcccgagtggcaatagaaaacccttatattaaagagataattgatgatgctgcagacagacctgaagagtggaaggaaacagtgggcgatgaaagcagagaatttgggaggtacatgcgacagagagaagagcaagagaagcaggaagaggagttgttcactcgggctcctgtaaccaaacgtgataagcagatcgagaagcgcataaggagacaacttcatgggctaggaggcttaactgacggtttcgaccttgggatgaacatgctgttgggaggagacaaggaagatgatggcggttcaagcaagtcgcatggcaagagcggaaaccgaaagaagcacctgaagagcagcaagaagaggaagaggcattagccttggacccacactgctgtagcacttcaacataccgatacagcctagagacggttcaagcaatccacacggaaagttgaagctggagaaaatacaagaaaccaagtagagaaaaaaagctttggttcctgtaggcgtattatttctgaaacagaaaacttgatctgagcgactgatcctgagccaatggaacagtatgaattatatggcttgaacatggtaggtgtaccaagttttgttctgatagtcgaatgattgttgtattattgattaacaagaccaacaatatatagactaggctccaaccggttcatagaaacagtgcccggtagagatggacggtgatcacctgattagtaccttct

SEQ ID NO: 148030 - DNA, 750 bp, Zea Mays
tcgacgatgaacatgccattcctcactccacttgtgcgcctccacgctataaaagcgcacccgatgaacgctagcatgcatccaccatcacacagcaatccacacaagcacttcgacgtcgcacgggcgctgcacacagacacaccaagcgtcggcaccaatggcttactaccaggaggtggactactgctcggaggaggtgaggtcggtggccccggccggcttcggccgccacggaggcggcgtccagcagcacgtcgtcaaggagaagttcgaggaggtcgacacggtctcacgcgccggcgccaaccaccaccaccaccaccatggtcaccacggcggccacggcttcgtggtgcgcgagaccagggtcgaggaggacatcaacacctgcaccggcgaggtccacgagcgcagggagagcttcctcgccagggctaactgagccgcccggcggccggcatccacgcccgttcgtgcctgcctgcgtgccttatgtatgtctgtggttgactggttgtgcagggtcatcgtacttggctatcgtacgtgcacgcactcagctcctgtacgaattacgacaataagctcgtgacctgaataaaacttcttcgtaatactaatacctacatcaccacgcacattctctgtgtcaaaaaaaaggaatgcaattttaaaatagtactaagccaacaaacgatcataaatctaaccgaatttatatttaaaaatatgttaatatttatcata

SEQ ID NO: 148031 - DNA, 308 bp, Zea Mays
ggaatcataaactaattagatataaaagacttgtctcattgtttagtctttatctatataattatttctgtaactagactatggccctgtttggatccttcaagcccggctagagctagagctagtttctagctctaactctagcccaaactagctctagccctctacgtgtttggatccaagggctagtttacaataaatgctattttataatcatttgtctcatttaaacttttccttatccggatttagtgtggcaaactcttgtacggcaaggcaaggcaggcagctccactacctttccatgg

SEQ ID NO: 148032 - DNA, 772 bp, Zea Mays
gccatagccacagcccaccgcgcgagcaacgatgttcaggtgccccagcaatggctacggccaaccgcaccccaccgcgaactaccaccgcacccactccggcgaacacgtcaccaccaaggtcgcccagaaaccctgccatgccggcggcgccgtgcagcagcaccacgttgtccacaaggagtcgtcgttcaaggagctggacgggggtaaccgccgctgcttcgacaactatcccatgaacgctgctaacaacgcgaaccaccaccgctacgaggcctacgaggaaacctacgaggaaaccaactgcgaggaggagacgtacgcgtacggcgccggccgccaccatggtcacggcagcggcggcggcgggcgccgcttccagtaccagacccacgaggagacctacgaggaggaggaagaggaggtcgtcgtgggcgggggcgacggcgccggcgccggctgggcccagctcaggcgcccatcctgccgcgcatgagcagcaggcacctgctcgtacgtggaatgtgtggatgcgatgcgagtccggattggtggacgccacgcgttggttcatgggtacaattgcaaattctaataataacctgcaggtgacaacctagctaatctcgtacgtaaataaattgtactcctagtcccaatccccattaatccatcgatgctctgcatccaccgtatgtattccatgtatggctgtgagttgtgacacaagtaaaaccaaattgacaaaaaaagatcatgaaattgcgtg

SEQ ID NO: 148033 - DNA, 1603 bp, Zea Mays
acaaagcagagagctgcaacttggaaaaaaaaaaacaaagctcctactgcgagcatggattcgcttgtgaagcgcagcaatggctatggtgcttacggcagcagcaagccccagatgagctaccatcgccagagcaccgagtccgtgaccaccgtcgtcacggaaattaaccgcatgaccatcaacgacaagccctactacggcggcggcggcgtgcagaagcaggcctgcaaggtggaggcgttcgatgagcacgacaaagcatacaacggcaccctggccgtgaagaagcacgacgagtacgaggaggaggaggagtacggccaagtagtcgacgcggactacggtgcccactacggcaacgccggcgccgctgtgaagaagcaaggctacagctaccagcaggaggcgtacggggagactggagctgccgggtacggtggcgcggcaatgaagaagcaaggctacaactacacgaaggaggcgtgcggagagagcgacgccggctacggcgctcaccacggtggcgccggtgccgccgtgcagacgtacgcctacaaccagcaggcgctgtacggtggctccatcggtgccgccgtgcagcagccggcctacaagcagaagggcgccgctagtaagactaacggctcccggcagaaggtatacgggtacggggaagccgtcaacacagcaggggcggggtacggtgctcaccacggcgtcgttggcgccggggccgggcagcagcacggctaccaccagaaagatgcgtacgggaccgggtacggcgctgtcgcggtcgttggcaaagagaagaacggataccagtaccaggaggcgtacggtggaactgacgcgggagggtatggcggcgctcactacggcggtggtggcgccgtgcagcagcatgggtatggcggcgtaaccgccggtggcaaagtgaagcagagcggctaccagtaccaggaggcggcgtacggcggaaccgacgcgggaggatacggcgctcactacggtggtggcgccgccgccgccattcagaagcacggctacaggaaggacgtgtacgagagcgagactgagagcgaggacgacgagagcgactgcgaggaggcgttcccgccgcgcggcggccgaatgcagggcggcgtccaggtgcagcacggctacggagctgacaacctcggcggtgtgcgccgctacgagtcgtacgagagccgcgaggagcacggcgacggccgccgctatgagtcgtacaagagcaccgtccagtacaacggtggcgggcacgccacgtgctccccgatcaagaaccgccacctccttggctacggcgcgtaggcataatacgcgctggctgatccagtgcacctacgtactgtatattcgtatgctctgtcgtatatagacagacaggcctatatgccgctaccgctacggctacttggtcgatggatctgcttgtggttgctgatgcagctaaaccatcgaaatatctaaaaaaataagatgtaacataatgccaccttgggataataatgtatgatgctgggacactctggtacgcccaaatcaatataaacctcatagatataccagtctg

SEQ ID NO: 148034 - DNA, 1311 bp, Zea Mays
gctaaaccctaaacccagcaccagcgcccccaatcctccaacttccactcgagtagggttctgccggccgtttcctcgtcgtcgcaatggagttctggggtgaagaagtgaagccaggagccacggtttcttgcaaagttggtgatggtttggttatccacctttcacaggctgccctaggggaaccaaagaaagcgagtgagaatgccattgtgtctgtcaaaattgatgataagaaactagtgcttggaaccttatcagttgagaagcatcctcaaatctcttgtgatctggtatttgataaagattttgagttatcacacaattcaaagacagctagtgttttcttctgtggctacaagtcacctgttcctctgtttgagtctgattctggtgaagatagttcagatgaagaggttgaacccgatctaattccaatgcagaataatgaaattaaaatttctactgcaaaggttcccgtgaaggttggtatacaaaatgctgatgaagatgaaacttctagtggtgatgatgatgatttcactgatagtgatagtgaaatgtctgaggaagatgagtccagtgatgaagatgaagtgtcaagcgatacagatactagtgatgattctggttcggaagaacagacacctaccccaaagaagactgaggtagtagttggcaagaagagggcaattgaagctgagacaccttctggtaagaaggctaagtctgaacaatctgctcagaaaacaggcgacaaggtctcaacttctcatcctgcaaagcagtccagcaagactcctgcagacaaatctacaaagacccccacagctgacaagaagtcccccaaatctgggagccatgcctgcaagtcatgcagcaaatctttcggcagtgcgtcagcacttgagtctcatcagaaggcaaagaagcatgaagcctagagcacgtgctataccatctactcgttatcaaaatcagtggtcttatttttgaacttgaaaatgtccaagtttggaacttgcccagtagtcatctgattagtggtgttatttttctttgaacttgggaattgtctagtttgggacatacgcggtatgcctggttaagaacatgggaaatgtcaggttagaacaggtcctgctggcccagttttggtcgtcgtcgaatgttgctaatgttggaactgattattgtgacccgtaaggccgtaagggagaatctttgttatctggtagtgcctagtgcaaatcacctttttctcagttgttaaacatcttgcttttacggtgttcgttttttcccgagaaa

SEQ ID NO: 148035 - DNA, 1566 bp, Zea Mays
atgagcaaacggccgatgatgacaacgccggcgggcggagaagacggtgagccatccagcggcgctcgcggagccggtgcgccgccgccgtctcagccggtcggtaccggccgctacgcaagactgcagagcgccggcaccgggaccagtgccgccgacggcgaccggcccagacgtcgtgtgacctatatggaaggccgttttgaagcggcggagcagccgccaaccgatgacggttacggtgccggggacactgccccgccccagacgcgcacgcaacgccccaggccgacctacacgcctgtgtcgcagaggagacgagagccggcgattgatgagcagccacggttgtacggagattacccgcgccggggcagcccggcggaaccgccggcgcgaacgccaacgcggccccggggtagccgtgccgggctgggaggagctgcgggaggggcgctgccaccggggagcagcagcctccccagccccgaaacggctgtttcgacaactggtgggatccccggctcgtcgggaggagcaccaccggtgcaaccccggcgtggtggcctgaagaccaataagaccatcgagcgcgtcagcacgctgggggacgagccggtaggactgggtgggagtgggagttcggagccgccgccgccgccaacgcaaacgcaaccgaagccggagccacgtttttctcttcctcagcagccggaggaggggccgtatgtcgaccagccgccgaagcagccgtcttcgtcggggtcggggacgaagaggccagctggagcgtcgccgacgctgatcaggaggaaggagaaggcgacgaagctgatgacggtctgcttgacctgctgctgcatcctgttctggctcctggtggtctgcgtcggcctcgccatcctggtggtgtacctcctgtaccaccccagggcgccgcggatccacgtgagcacggccaccctcaacgccgggtacatcgacgagctcccgccaccgcacctgggcaaggcgctcaactcagacctctacgtgctggcggccatctacaacccgaacaccaaggtcgacgtcgtcctgcgctacatgcagctggacctctacttccaggggaggctgatcgggacgcaggcggtgtggccgccgctgtacgagaagcccggcgactcggcgctccgcagcgtgcacctggtggtcagcgaggtggtcatgacgcaggaggacgccgaggtgtggaagaacgtcaccaccggcggcggcctcgtggagatgcacctccagggcaaattccacgtccagctcaacttcggccgctggctcccgttcagcctaagagatacttcccttgcccctccagaaacacacatctccttactaaaaccttgcaatattagccttgaccgacaaccatgttgtgacataataccatcctattggcactgggacacctctgtctctggcaagaaccgacatcaggtaaagatggccattgtagagccgagacaaggaaaaaagatctgtgggcagatggttgctaataaaatgtatatgacagaattttcatga

SEQ ID NO: 148036 - DNA, 285 bp, Zea Mays
atgaataaaattcaacagcatcctgagaatacgattacaatactaaataatcaactcagaggcagtaaccatacaacagaacagaaccaaactttcatatcagatgctcatatgaccggaggacatgtgggaaaccaaataaccaattctccagcttccatctcgataatattgggatccaacagtcgccctgtctcagcagaatatacaggcaatagaagctacagcctacaattgacctcaactgaaaaaggtcccttccaattgcaatgcacagtaaactaa

SEQ ID NO: 148037 - DNA, 330 bp, Zea Mays
atggatcactggaggggccaacctgtgatgtccatcgcatgtccccatccagctcgaccttcctgccaccggccgcagatgcatccggcaccatgcccatttgctcactggaggcctggtacacacctccttcactacccggctcaccagctacacgcctacaccagtcccgctttgttgttgctctggtgtttgaggatcatgaggtgcttgggcttcaggttgtggagacagagtctgcggcttcaaagctacctttggttttgtcatgatcggtttgcagaacctcgtcaccgacgtaggcgtccttctgccccatcccgaccatga

SEQ ID NO: 148038 - DNA, 2341 bp, Zea Mays
agcgctgcaggccagcgtggaaactggaaaagctgcctccgccaaatccaaaccaaacgggacggtcgccggaggaagcatacccgaaactcccctcccctctccttacaataccgcgaggcggcggctgacgtcgcttagccgctttcccacaccttcgccgccgcctatactcctgcagaaatagccccagggagggcggttgctgctgcttcgtgtgcggtgttccttcccccgccgcacgcgggatccatttgacggacggaccgaccgagcgacccacccgtccaccgagagccatggggcagaggcagagccacagcaagcgggacgggagcagccacgggcggcggtcgcgctcctttcagcagcagccgtcggcgcagtggggcgccggaggaggagggtactaccagcaggacccaagcaccggctactacggcgcgccggtgccacaacagggaggagggtactaccaacaggacccaggcaccggctactacggcgcgccggtgccacagcagggaggagggtacgccgcgccgtaccgggacaagcccgccgccgccgccgccgttgctgctccggcgccgcaggctgcgaagccgcggcagctggatcgccggtactcgcggatcgccgacgagtatcactcggtggaccaggttactgatgctctagctcaagcaggacttgaatcatcaaatcttattgttggcattgatttcacaaagagcaacgagtggacaggcaaattctcgttccatggacgcagtctacatcacattagcaacacaccaaatccgtatgaacaagccatctcgattattgggcgaacactatcgaaattcgatgaagataatctgattccatgtttcggatttggagatgcatcaacacacgatcaagatgtcttctgtttctctcctgacgagaaaccttgtaatggatttgaagaagctctcgatcgatatagggaacttgtaccacatttgcgcttagctggaccaacatcctttgcaccaattattgagatggctatgaccattgtggagcaaagtggcgggcaataccacgtcctattgataattgcagatgggcaggttacgaggagtgtagatactgcatctggacagctgagttcgcaagagcaaaaaactgttgatgccattgtgaaggccagtgaattgcctttgtccattgtgttagtaggagttggtgatggcccctgggacatgatgaaggaatttgatgacaacattcctgctcgagcttttgacaatttccaatttgtaaatttttcagagataatgtccaaaaacatggcacaatcaaggaaagaggctgcatttgctctttcagcattgatggagataccaccacagtataaagcaaccgtggaattagggattttgggtcgtcgctctttcaagtctcctgacagggttcctctgcctcccccttccggaagtcatggcgcttattcctactattcatctaaaggatttagcaaaccgagcacctaccctcagagttcttcatcctcatcaccctatcctcactatgaaactccacatacagccaccccagctgcgccttcagccacttatgacaaccaggtctgtcctatctgcctcgtgaaccccaaggacatggcgtttggttgtggacaccagacctgctgtgactgcggacagatcctggagtcgtgcccaatctgtcgcactcccatcaccacaaggataaagctatactagcaagtagtggtttggatcattgtcaatgggtggtatactggaggagccacccagcgtcacactggaggatcgtgtcagcatgcccatagatcgattgcaatcggaaagctggagcggcactccatagatcgatcgattggatctaaggattgcagggacaaagcatggatcaattggagcgaggattgcagggccgttgattcatcgctcagggttgtcccagtattcatatccaccaggaatgatccgaatctcatatcgcaataaataataaaaaataataaacgagcagaaagatgagaaacacacacaaaaaaagtggtggcgtggaggatcagacgattgcgtgtagggtcatcacacgcaactcagcttggttactactctaatctgcaactttagttgtacatacccaactttaggatcagaggattccttatttgtgcgtgtgcccgtgtttttttgtttgtttcgtgatttcgtccgagatatgttgatttgttctttgctagcaattgtgtaaaaatccaatccgcattttttggcgccatcgaaataaatgctatgttgtaaatttggccatc

SEQ ID NO: 148039 - DNA, 2022 bp, Zea Mays
aagtttgaaaatagggctaaattcgtaattatgaataaagagtaattgcggtcgtggttccggattccccgccgccgccgcaagaccggagccctaattccaagcggtaaacgatgaggccgcacgcggtgggtatgggtggcggtggcgtggggaggcggaaggcgggggccgccgccgccgcggctagccgggagtggttggtggtgccggcgtcgggcccggcgcgggtggaggaagcagggaagcacgcggtgatggcgcgtacggggcttcccgcgcgcgatctcagggtgctcgacccgttactctcgtacccgtccacgatcctgggccgcgagcgcgccatcgtggtcaacttggagcgcgtcaaagctctgatcacagccgcggaggtgctgcttcctaacaccaaggatcccgccttcgcgcgcttcgttcgcgacctccagacccgcgtcctcgcatcttcgtctgaccaggcagctgaactcactgacatggaaggtgaatcacctattgttgcttcaccatttcctgtaccaagttcatccaaagggcatgaaatggagatgactaagaagactgctgctgttgtgcctgaaatgactagcagcagcagtatgcccaatttagctgttgcaaaagatggaaataccaaggttttgcctttcgaatttcgagctcttgaagtgtgccttgaatcagcctgcagatctttggaagaggaaacttctactctggagctagaggcatatccagcattagatgagctgacatcaaagatcagcacattaaaccttgaacgagttaggcaaatcaagagtcgtctggttgcgatatctggtcgagtacagaaggtgagggatgagcttgagcatttactggatgatgaaatggatatggctgaaatgtacttgacagagaagcttactcaacaagaaatcagtgaggcttcatctagagctgaggttgatgatgcatctcttacagaagacgatagggatgaagattatagaagtgaaccagatggaagcaatggtagtgttataggttataagcccaatattgaagagctagagatgcttctagaggcttactttgtgcaaattgatggcacacttaacaagctatcacatctgagggagtacgtcgatgacacagaagattatatcaatataatgttggacgacaagcagaatcagctgctgcagatgggagttatgctgtcaactgctactgtcgtcatcactgctggagtggctgtagttggtctttttggtatgaatattggcatatcactttacgcagacccaacaaccgaggaggaaactcgagcagcaaataggaaattttgggaaactactttcgggaccgttgctggctgcgtgattttgtacatcatagccatgggttggggaaagagaagtggattactgcaatgatgcggaagcatgactgcatgagtgttctgtacccagtgaatactgggttcacaaaaatctccaaaatgagagattattgtattggcatgctgctcgatcatactgctgccagaaaatacgcctcgttccactatgctggaaaagaaacatcttgtgtaccgctagtagctgctaatgcgtgaagtatattttacaatctgttgcccatcgtctgtcatggcaactcagcagttttgtacctgtttaccatgctaggtgctgtttttgctcttgttattgtgatcattcctgtaactgtatctagcggcctgtaatatgtatgccgctgattggttgagtgcctcccgcagtcccgcgtgcaggcctcccgcgcgcctggctcatcagcgattgtcatccgcgccatctccacacgcccagacgggtagtgaaaaaaatgcctagcctgcacacccgcatgctggccagcattctcatatctaagcaactaattagaatctcgtgcttggtcaaagcacgctggagcctcgttatctctatgcaagcaaccaatcacgtactatatgtacttgctctg

SEQ ID NO: 148040 - DNA, 2103 bp, Zea Mays
aagtttgaaaatagggctaaattcgtaattatgaataaagagtaattgcggtcgtggttccggattccccgccgccgccgcaagaccggagccctaattccaagcggtaaacgatgaggccgcacgcggtgggtatgggtggcggtggcgtggggaggcggaaggcgggggccgccgccgccgcggctagccgggagtggttggtggtgccggcgtcgggcccggcgcgggtggaggaagcagggaagcacgcggtgatggcgcgtacggggcttcccgcgcgcgatctcagggtgctcgacccgttactctcgtacccgtccacgatcctgggccgcgagcgcgccatcgtggtcaacttggagcgcgtcaaagctctgatcacagccgcggaggtgctgcttcctaacaccaaggatcccgccttcgcgcgcttcgttcgcgacctccagacccgcgtcctcgcatcttcgtctgaccaggcagctgaactcactgacatggaaggtgaatcacctattgttgcttcaccatttcctgtaccaagttcatccaaagggcatgaaatggagatgactaagaagactgctgctgttgtgcctgaaatgactagcagcagcagtatgcccaatttagctgttgcaaaagatggaaataccaaggttttgcctttcgaatttcgagctcttgaagtgtgccttgaatcagcctgcagatctttggaagaggaagtatgtgcttgcatctggaattgtttgtctggttatatgttgtttatctggccgcaattgaattcatacctctaacatcagacttctactctggagctagaggcatatccagcattagatgagctgacatcaaagatcagcacattaaaccttgaacgagttaggcaaatcaagagtcgtctggttgcgatatctggtcgagtacagaaggtgagggatgagcttgagcatttactggatgatgaaatggatatggctgaaatgtacttgacagagaagcttactcaacaagaaatcagtgaggcttcatctagagctgaggttgatgatgcatctcttacagaagacgatagggatgaagattatagaagtgaaccagatggaagcaatggtagtgttataggttataagcccaatattgaagagctagagatgcttctagaggcttactttgtgcaaattgatggcacacttaacaagctatcacatctgagggagtacgtcgatgacacagaagattatatcaatataatgttggacgacaagcagaatcagctgctgcagatgggagttatgctgtcaactgctactgtcgtcatcactgctggagtggctgtagttggtctttttggtatgaatattggcatatcactttacgcagacccaacaaccgaggaggaaactcgagcagcaaataggaaattttgggaaactactttcgggaccgttgctggctgcgtgattttgtacatcatagccatgggttggggaaagagaagtggattactgcaatgatgcggaagcatgactgcatgagtgttctgtacccagtgaatactgggttcacaaaaatctccaaaatgagagattattgtattggcatgctgctcgatcatactgctgccagaaaatacgcctcgttccactatgctggaaaagaaacatcttgtgtaccgctagtagctgctaatgcgtgaagtatattttacaatctgttgcccatcgtctgtcatggcaactcagcagttttgtacctgtttaccatgctaggtgctgtttttgctcttgttattgtgatcattcctgtaactgtatctagcggcctgtaatatgtatgccgctgattggttgagtgcctcccgcagtcccgcgtgcaggcctcccgcgcgcctggctcatcagcgattgtcatccgcgccatctccacacgcccagacgggtagtgaaaaaaatgcctagcctgcacacccgcatgctggccagcattctcatatctaagcaactaattagaatctcgtgcttggtcaaagcacgctggagcctcgttatctctatgcaagcaaccaatcacgtactatatgtacttgctctg

SEQ ID NO: 148041 - DNA, 1379 bp, Zea Mays
ctcgtctcagcaaaatatgatccaacaagttggtctccactcagcatataaatggcttttgccgataccaaaggtcaatataaagactccagcatacagaatatcagatagaacaaaaaagcggcgttcgattctcccatctgggaggagcaaattacacggaaattaacaacagagactagtagttaatatacgaatataaagataaccatcatccacataggaagcatgtttttttcatgtccgaatataaaagctctaacaagcaaacaacactcagcaacctactcgcaggcaggagttccaaaacaacgggatcgcaaagagaagcaactcagtacttgtagtccttgacgtgaaggctctcggtgtcggcggcagcatcacccttgtaggtgccgagggtagcctcggagttggccttgcacctggcgaggaaggccgctctagccttctccacgttctccaccttgccagcccaggccttgagggtgctcgcctggagggcacggccgaaggagaaggacagggcccatggcttcttggtgctgagcttgttcatggcattgagattcagggtggcctcctcctcgctctgtccaccggagaggaagacaacagcaggcacagcagcagggacggtcctctggagggtacggacggtgtactgggcgatcacctcaggtgtcaccttcttagagtcggagccaggagtcaccatgttgggcttcaggagggtaccctccaggaggacatggtgctcgttgagagccttgtagcaggcagcaaggactgtctcagtgacgtaagcgcagcgatcaatgtcatgagggccatcaacaaggatctcaggctcaacaattggcaccagaccgttctcctggcagatgatggcgtagcgagccagaccctgagcattcaggtcaatggcaagctgtgacggctcgttggggccaatcttgagaacagcacgccacttggcaaagcgggcaccggcctcgtagtacttagcgcagcgcttgccgaggtcatcgtggccctgggtggtggtctccttgtcggtgccaacaacctcaatggtgcccttgtcgaccttgatgccagggaggacgcctccctccttgaggacatcgacaaaaggcttgccatccttggtcttctggtagagggtctcctcgaagaggatcacaccgctgatgtactggagggcaccagggcagcagaacaggagctcacggagagcccgccggttctcctccacgttctcgacattgatgctggaaaggcgcttgccaatggtgccagttgactcatcagcagcaaggatacccttgccaggggtgccgatgtaggcagcattcttgatgagctcatctgca

SEQ ID NO: 148042 - DNA, 1426 bp, Zea Mays
ctcgtctcagcaaaatatgatccaacaagttggtctccactcagcatataaatggcttttgccgataccaaaggtcaatataaaaatatcagatagaacaaaaaagcggcgttcgattctcccatctgggaggagcaaattacacggaaattaacaacagagactagtagttaatatacgaatataaagataaccatcatccacataggaagcatgtttttttcatgtccgaatataaaagctctaacaagcaaacaacactcagcaacctactcgcaggcaggagttccaaaacaacgggatcgcaaagagaagcaactcagtacttgtagtccttgacgtgaaggctctcggtgtcggcggcagcatcacccttgtaggtgccgagggtagcctcggagttggccttgcacctggcgaggaaggccgctctagccttctccacgttctccaccttgccagcccaggccttgagggtgctcgcctggagggcacggccgaaggagaaggacagggcccatggcttcttggtgctgagcttgttcatggcattgagattcagggtggcctcctcctcgctctgtccaccggagaggaagacaacagcaggcacagcagcagggacggtcctctggagggtacggacggtgtactgggcgatcacctcaggtgtcaccttcttagagtcggagccaggagtcaccatgttgggcttcaggagggtaccctccaggaggacatggtgctcgttgagagccttgtagcaggcagcaaggactgtctcagtgacgtaagcgcagcgatcaatgtcatgagggccatcaacaaggatctcaggctcaacaattggcaccagaccgttctcctggcagatgatggcgtagcgagccagaccctgagcattcaggtcaatggcaagctgtgacggctcgttggggccaatcttgagaacagcacgccacttggcaaagcgggcaccggcctcgtagtacttagcgcagcgcttgccgaggtcatcgtggccctgggtggtggtctccttgtcggtgccaacaacctcaatggtgcccttgtcgaccttgatgccagggaggacgcctccctccttgaggacatcgacaaaaggcttgccatccttggtcttctggtagagggtctcctcgaagaggatcacaccgctgatgtactggagggcaccagggcagcagaacaggagctcacggagagcccgccggttctcctccacgttctcgacattgatgctggaaaggcgcttgccaatggtgccagttgactcatcagcagcaaggatacccttgccaggggtgccgatgtaggcagcattcttgatgagctcatctgcaaaacaacagacacagatttagagcaagaacagtgggacttgacaatcaataagcattagcac

SEQ ID NO: 148043 - DNA, 2203 bp, Zea Mays
ctcgtctcagcaaaatatgatccaacaagttggtctccactcagcatataaatggcttttgccgataccaaaggtcaatataaaaatatcagatagaacaaaaaagcggcgttcgattctcccatctgggaggagcaaattacacggaaattaacaacagagactagtagttaatatacgaatataaagataaccatcatccacataggaagcatgtttttttcatgtccgaatataaaagctctaacaagcaaacaacactcagcaacctactcgcaggcaggagttccaaaacaacgggatcgcaaagagaagcaactcagtacttgtagtccttgacgtgaaggctctcggtgtcggcggcagcatcacccttgtaggtgccgagggtagcctcggagttggccttgcacctggcgaggaaggccgctctagccttctccacgttctccaccttgccagcccaggccttgagggtgctcgcctggagggcacggccgaaggagaaggacagggcccatggcttcttggtgctgagcttgttcatggcattgagattcagggtggcctcctcctcgctctgtccaccggagaggaagacaacagcaggcacagcagcagggacggtcctctggagggtacggacggtgtactgggcgatcacctcaggtgtcaccttcttagagtcggagccaggagtcaccatgttgggcttcaggagggtaccctccaggaggacatggtgctcgttgagagccttgtagcaggcagcaaggactgtctcagtgacgtaagcgcagcgatcaatgtcatgagggccatcaacaaggatctcaggctcaacaattggcaccagaccgttctcctggcagatgatggcgtagcgagccagaccctgagcattcaggtcaatggcaagctgtgacggctcgttggggccaatcttgagaacagcacgccacttggcaaagcgggcaccggcctcgtagtacttagcgcagcgcttgccgaggtcatcgtggccctgggtggtggtctccttgtcggtgccaacaacctcaatggtgcccttgtcgaccttgatgccagggaggacgcctccctccttgaggacatcgacaaaaggcttgccatccttggtcttctggtagagggtctcctcgaagaggatcacaccgctgatgtactggagggcaccagggcagcagaacaggagctcacggagagcccgccggttctcctccacgttctcgacattgatgctggaaaggcgcttgccaatggtgccagttgactcatcagcagcaaggatacccttgccaggggtgccgatgtaggcagcattcttgatgagctcatctgcaaaacaacagacacagatttagagcaagaacagtgggacttgacaatcaataagcattagcacggttatctaactagtacagaggccgtcctaataaataatacaacaatcacttttaaaatgttaagtcaggaaaatcactactagtgattgcacaggatatgtcctctttatatataactggattaccataaacatcactactaaaaggaaccacatatgacgattctactagcacggtaggtaagcttaaaaggatttgtagatctgactatcctagatgcatgcatatagcatctattctagcagacatgacaggaaaaatatttagaatcaacaagcaggtaacatcatttgaaatacgcacaaaaaaactaacaacatgatccaccagtgcatgctagcaggagaatttatctttcgtcatgatccaacgacgtgccaaacgccgtgtgcctcaatcggaaacagcataaacagaatcatacagctatatggatggataaaatcgaaacaaaaataagcgaaccccaaatcaaattaaccgaccagaggcatcacctgctgctctctcctaaacccttttggcaaccaccaaacccctaaagtcacacacaagtaggcacgaccgcaagagcctgtacggatctaaaaaaggatccgcaaatcccttgggtctctcagagctagacgaatcgttaacatactcgtcaaacgcaggtagatctgagggcatcaacaacgaacaactagtagatcgtagatctacgacacacgaggccaaacgacatcacaagcagatcagcaacgaaggaggagacgatggaacgtacccgcgta

SEQ ID NO: 148044 - DNA, 84 bp, Zea Mays
caacgacgacgtcgtccttcacttcatatcgtcaaaaagaggaagaaaaaagagagagagagagagagagagagagaggaagat

SEQ ID NO: 148045 - DNA, 1137 bp, Zea Mays
agcaaccatccagagaccagagccggtgactggccgagatagatacagacaggagcagagcgcggagcagctgctagcctagtagagagaccgagagcagcggggatggtgaagattccgagccccagcaggctgttcaggagccggtccaggagcagcaccaccatcggcggcgccggagcggacatctgcgccatggtggcggagcacgagaagatcgagtgggaggtgcggcctggcgggatgctggtgcagaggcggcggccgtcgcccgaggacgacgcggcggcggccgtggacgtggagtacatcctggtaaaggtctccaccgggtggcagtggcacgacgtctccatcgacgccatcgcaaccttcggcgacctgaaggtgacgctgtcgctggtgaccgggctgtggcccagggagcagaggctgctgtaccggggcaaggagagggacgaccgcgagcacctgcacatggtgggcgtccaggacagggacaaggtgctgctcctggaggacccggccgtcaaggagaggaagctcaggtcaaccaccttggcgcagctcatgggcgtgccctgccactccttcatccaagtgtagtagagactagggggttgtttggtttcatgggactaaactttagtccctgccttttagtctattttagtccctacattactaaatataggaaataaaagggaataaatcagatttccttccctctctttagtcctatttttagtaatttaagactaaaaaagagggactaaagtttagtctcatagaaccaaacatgccctagagagagaaccccccggaatttcttgccggtttttttcgttttcgtttttcttttttcagtttcttgaccgcgtgagcgactgcgacacagcgaaggttccagttcagtctaactgctgagtttcaaggacttgcattcggtcaatcgaatcaaggcatttgcaaacgataggatatcagatgataaagataaatacatggtgtagattactgtgaacgggtaaatataataccagtgacagtgtgagacagtaattccttgtgttattgctctgtagtctgtacatatccctattcttgagaccagcaatacagttgagaattccaaag

SEQ ID NO: 148046 - DNA, 543 bp, Zea Mays
atggcgtggggacgtccggggctggatggcgcgctggcgaacgggggtggagcaggagctgtcgatgtcatcgtccatagcctgcgggcggctgcggctgtgcttcttcctagaggacgtcgtgcttcctccgctcctccccatctcccccacccaccatgctccctgaccgccatggtgggtccccggcgaggcgaggcaacccgagcgaaccccggatccgaatatgcggggacgacaggggtgggggaaggggcaccgaggacctgcgcggaggagggcaaggatggcgaggtgtgtgggcgggcgtggggcgaggatggcgtggatggtagaggagcgggggcatggtgttgccttgtggatggtggcggcgaggatggtggcggcgagcaggcggggcgaggattgtgggatctgctggggaggcaatccctggaaccatgcccttccatcgatggagtgttgggcgagggcgagaatggcagggcggagtgttgggcgagggcgagaatggcagggcggctgcagaggcttccctga

SEQ ID NO: 148047 - DNA, 2232 bp, Zea Mays
cctccgtcctcggaaccaaacgacgccgtccggccgtccggccactcgtgcggatggcggagatcgccggcgacgaggccccaacacctcctaccatctccggcgaagtatccggagacccgcatacttctgccgctacccctgccggcagcagcaacaagccgccgttgcgcgcgacgaagcccggagtgaagcgcctcattctcaccgcctccgtcctcctctcctttctcgtcgggctgcccttcctgctgaagtccaccgagatccatcggtcgccgctgccttcggacgcaatcacggcactcgcccaccgcctccactccactccgccctcgttcccgtgcgccctccacgcggtcttcctccggtcggttcccggccgctctgacgatgcctccctgtaccgtcgtcttgagcggtcgatttcggcgcagctccagcttcttgcagccacttctaccgccggtaatgtctcggtatcagtcaccgttgagtcagctggtggctgctccagcagcagcggcagcgttggctcaggttggcagtgtggcactgtgagcagtgcagacctggtggttggcgatgaggtgttcgatgaattgctgcactcagctttaggcagcgtcggaggggatgggtctagggtttacactgttgtggttgtggagattgatgatgcagatggtatgagggttgtcgttgggaagcaccggcatgcttgggtggttggaaaagctgatgaggttaaggctgtctcagttattggcaaggtatttgccaagtatttcatgaatgggggtattgaggagggtgaggcaggcattgggaaaggcgagttcatgccagttggatcagatggcaatgtcgttctatcctttagcttgctgaatgctgatccaagtgattgggtgtatgattgggactttgaaaagattggtgagaagatgttgaatcctgtggttgaggcactgcgaccgattgcggaaatcaatatagaaagtcaggttttgtaccacactcctaagtcgtcctattcttattttgatgataaactgggtggcaatttccttagtatgggagacattcctttctttgtaaactcaaatgagtggcacttggatacatctatttcagctacaggacgatcaaaagttcttcaatttgttgtatacattccatctgcaagggaatgcccattatatttacaacttcctgatggtgggctttcaaaaaccaatgcatttatatcccctatgtggggaggtgttcttatctggaactcaccggactgttcacttggttccaagaaaactcatggtacccagaagaaaatgtcatctcaggaacttatggaggcactcgaaatatttgttggacaactaaggcagctgtttggtctaaaaccatcttatttctcacaagatatggacgttccaactaaatttctagttagtgaaaagggcttcacagaatgggagttagatttattatatcggcaccatgcacgttccaatctgctgtcatgcctcaccacattggagtctctatccagtctggtccactctctccctaggatgattgtcatggatgaaattggaagacaggttgagctttctcttgaagctgcaaatttagcacagggaaatgcaactctaggaataagtgactcttcagcagtatctgcaacaagagccagggcactggctgaggatgcatttttccatccatccattatgtcaatcagttatgcttcagtagagcactatttcgccatttacatgccatttttcgcaccagtttccttgcatgtgctgctggcggcaatcaaagagctgaaacgttacaaggcagagcgagcaaaatattcggcatttcttgcttcccaggcgacatcctcctgatctggtgatgattagcacggatttgcaccagaaaattctgaacgtttatatgaagctgatggccactattggtactgcacatagtggagactggagagtaagcaacactgcagcgtcacttgttctaatgctcacggaagtggttaggatgtccaggtgatgtcaggccgagagctatagtcgaaatctctaccaattgagcagttcttgtaacccagattttgttcctagatacctcatacgtactcacattgaagttttttttaaaaaaaaatatatatttagaaaggacagacattaagattccagatcgaagatgttgagatgg

SEQ ID NO: 148048 - DNA, 2084 bp, Zea Mays
tccttatcgcaaccgactcgcaaccatagattcatagtagtactcgtagctcctcggcctcagcgaccaccgccattaacaccgcctgatctccggctaccgagtagcatccataaaactactgcacacacaccaatacgaccacccccaccgcgaatgatccatggagtttgaggagacgccggcggatgaatctagcctgaatcttcgacggcgacgcccccgacggacgagcaggggccggcagcccaagagcccagcccaggcagccaacttggtcgcagccagcacaaggcctcaactcccgagctgaatctgacaccatccccctcagctttccgttaccgccatcaattcaaatcaaatcgttcccgccgcaaaggcaagccggcatctcccccgctccgcgctataaatacggcaccgtacctcccaaaccaccaccatcatcagctctcacacactgcaacagccaagtgcaagtgatcgagctcccccctcctcatcagtcgctaggcacagcgcacttgcaggatggcgcaggtctctaagacgcttctccttgtggccctggtgttcgtgtcgtcggcggcggtggagctgtgccgcgcgatcgacttcgacgagcgggacctggcgtcggacgaggcgctgtgggacctgtacgagcggtggcagacgcaccaccgggtgcaccggcaccacggcgagaagggccggcggttcgggacgttcaaggagaacgtgcgcttcatccacgcgcacaacaagcgcggcgaccggccctaccgcctccgcctgaaccggttcggcgacatggggcgggaggagttccggtccacgttcgccgactcccgcatcaacgacctccggcggcaggattcccccgcggcgcgggccggggccgtgccggggttcatgtacgactccgccgccgacccgccgcggtccgtggactggcggcaggagggcgcggtgacgggcgtgaaggaccagggccactgcggaagctgctgggccttctcgacggtggtggccgtggagggcatcaacgccatccggacgggcagcctggcgtcgctgtcggagcaggagctgatcgactgcgacacggacgagaacgggtgccagggcgggctgatggagaacgccttcgagttcatcaagtccttcggcggcatcaccaccgaggccgcgtacccgtaccgcgcgtccaacggcacctgcgacggcgatcgggcccggcgcgggggaggcgtcgtcgtggtgatcgacggccaccagatggtgccggccggcagcgaggacgcgctggccaaggcggtggcgcaccagccggtgtccgtggccgtcgacgcggggggccaggcgttccagttctactcggagggcgtgttcacgggcgactgcggtacggacctggaccacggcgtggcggcggtcggctacggcgtcggcgacgacggcacgccctactggatcgtcaagaactcctggggcacctcctggggcgagggtggctacatccggatgcagcgcggcgccggcaacggcggcctctgcggcatcgccatggaggcgtccttccccatcaagacctcgcccaaccctgcagacccgccgcgcaagccccgccgcgcgctcatcgccagggacacctcttcttcccagtgacacacacgaccacaactggcacgtaagtacacgttgccaggaatgacatgctatgctactagtgtttgcttgaactattatcgattgggtttgtactagtgatgacagtttcatcgattgcgcggtcgatctccatcagagacagagacgatataatcagaataaagtatagcagcgcgtgtgcgcaacagggtaagattaggcgtgtgatttgatttcaaagctgtgcttgtaacgtaatgtaatacggtgtggcatatgcaccgggatatggtatgtgtattgggaagacgctatgcgtagcgtaagctagcagttgttgcattgcatttgcatgcttggatcggatatgcatgtgttcttctgcctgcgacatcggtagcgcgtgaggctgtgactctgtgagctgc

SEQ ID NO: 148049 - DNA, 2114 bp, Zea Mays
tccttatcgcaaccgactcgcaaccatagattcatagtagtactcgtagctcctcggcctcagcgaccaccgccattaacaccgcctgatctccggctaccgagtagcatccataaaactactgcacacacaccaatacgaccacccccaccgcgaatgatccatggagtttgaggagacgccggcggatgaatctagcctgaatcttcgacggcgacgcccccgacggacgagcaggggccggcagcccaagagcccagcccaggcagccaacttggcacagcgcacttgcaggatggcgcaggtctctaagacgcttctccttgtggccctggtgttcgtgtcgtcggcggcggtggagctgtgccgcgcgatcgacttcgacgagcgggacctggcgtcggacgaggcgctgtgggacctgtacgagcggtggcagacgcaccaccgggtgcaccggcaccacggcgagaagggccggcggttcgggacgttcaaggagaacgtgcgcttcatccacgcgcacaacaagcgcggcgaccggccctaccgcctccgcctgaaccggttcggcgacatggggcgggaggagttccggtccacgttcgccgactcccgcatcaacgacctccggcggcaggattcccccgcggcgcgggccggggccgtgccggggttcatgtacgactccgccgccgacccgccgcggtccgtggactggcggcaggagggcgcggtgacgggcgtgaaggaccagggccactgcggaagctgctgggccttctcgacggtggtggccgtggagggcatcaacgccatccggacgggcagcctggcgtcgctgtcggagcaggagctgatcgactgcgacacggacgagaacgggtgccagggcgggctgatggagaacgccttcgagttcatcaagtccttcggcggcatcaccaccgaggccgcgtacccgtaccgcgcgtccaacggcacctgcgacggcgatcgggcccggcgcgggggaggcgtcgtcgtggtgatcgacggccaccagatggtgccggccggcagcgaggacgcgctggccaaggcggtggcgcaccagccggtgtccgtggccgtcgacgcggggggccaggcgttccagttctactcggagggcgtgttcacgggcgactgcggtacggacctggaccacggcgtggcggcggtcggctacggcgtcggcgacgacggcacgccctactggatcgtcaagaactcctggggcacctcctggggcgagggtggctacatccggatgcagcgcggcgccggcaacggcggcctctgcggcatcgccatggaggcgtccttccccatcaagacctcgcccaaccctgcagacccgccgcgcaagccccgccgcgcgctcatcgccagggacacctcttcttcccagtgacacacacgaccacaactggcacgtaagtacacgttgccaggaatgacatgctatgctactagtgtttgcttgaactattatcgattgggtttgtactagtgatgacagtttcatcgattgcgcggtcgatctccatcagagacagagacgatataatcagaataaagtatagcagcgcgtgtgcgcaacagggtaagattaggcgtgtgatttgatttcaaagctgtgcttgtaacgtaatgtaatacggtgtggcatatgcaccgggatatggtatgtgtattgggaagacgctatgcgtagcgtaagctagcagttgttgcattgcatttgcatgcttggatcggatatgcatgtgttcttctgcctgcgacatcggtagcgcgtgaggctgtgactctgtgagctgcgatttccgcagttgaatcggtagtgtaagcggaaatgtcggaatttaaatctggctggatttcgttcagagcggcagggcttgtttgtttcatggatttgaaattgttttggtttattggaggtcatcctgcaaggtgcaaggcaacagatcctgggtcctggctccggctctgagcagcgtccaaaattggaggcctgggaagcctgcttgggccaggcagccttttgaagcccacctaccagcaccaaaccaggatgcgaagcaaag

SEQ ID NO: 148050 - DNA, 1399 bp, Zea Mays
gtagtactcgtagctcctcggcctcagcgaccaccgccattaacaccgcctgatctccggctaccgagtagcatccataaaactactgcacacacaccaatacgaccacccccaccgcgaatgatccatggagtttgaggagacgccggcggatgaatctagcctgaatcttcgacggcgacgcccccgacggacgagcaggggccggcagcccaagagcccagcccaggcagccaacttggcacagcgcacttgcaggatggcgcaggtctctaagacgcttctccttgtggccctggtgttcgtgtcgtcggcggcggtggagctgtgccgcgcgatcgacttcgacgagcgggacctggcgtcggacgaggcgctgtgggacctgtacgagcggtggcagacgcaccaccgggtgcaccggcaccacggcgagaagggccggcggttcgggacgttcaaggagaacgtgcgcttcatccacgcgcacaacaagcgcggcgaccggccctaccgcctccgcctgaaccggttcggcgacatggggcgggaggagttccggtccacgttcgccgactcccgcatcaacgacctccggcggcaggattcccccgcggcgcgggccggggccgtgccggggttcatgtacgactccgccgccgacccgccgcggtccgtggactggcggcaggagggcgcggtgacgggcgtgaaggaccagggccactgcggaagctgctgggccttctcgacggtggtggccgtggagggcatcaacgccatccggacgggcagcctggcgtcgctgtcggagcaggagctgatcgactgcgacacggacgagaacgggtgccagggcgggctgatggagaacgccttcgagttcatcaagtccttcggcggcatcaccaccgaggccgcgtacccgtaccgcgcgtccaacggcacctgcgacggcgatcgggcccggcgcgggggaggcgtcgtcgtggtgatcgacggccaccagatggtgccggccggcagcgaggacgcgctggccaaggcggtggcgcaccagccggtgtccgtggccgtcgacgcggggggccaggcgttccagttctactcggagggcgtgttcacgggcgactgcggtacggacctggaccacggcgtggcggcggtcggctacggcgtcggcgacgacggcacgccctactggatcgtcaagaactcctggggcacctcctggggcgagggtggctacatccggatgcagcgcggcgccggcaacggcggcctctgcggcatcgccatggaggcgtccttccccatcaagacctcgcccaaccctgcagacccgccgcgcaagccccgccgcgcgctcatcgccagggacacctcttcttcccagtga

SEQ ID NO: 148051 - DNA, 1293 bp, Zea Mays
aaaataacaattttttcttcgcctgctaaatagttaaagggttcctctctacgcacgtctccgagtccgagaggacttctcgagcgagttcgcgaatccaattctcccagcgagggaagtcatggtagtgatcgagctggagcccgaggaggcgacgcgcccctcgtcaccggcatcggaggagaaggcggctgccgcggccggtggggaggcggcgcgcccatcgtcttcagcggcgcccgaggaggcgcccaccgccgccgccgccgctgttggcggggaggcgtcgagggcggccggagaagaggaggaagccttcgaggacgcgctcaccgacgagcagctgcgagagaaatctagaagccaagcaaatgatgcaaaagcagaaggaaacaagttttttgggtccggacaatatgaggaagcattatctaagtatgaaatggcattgcaaattgctgctgagctggaatcttctgaggatatacgtgcagcatgccattcaaatcgtgctgtgtgcttcctgaaattgggaaagcatgatgagacggttaaagaatgcacaaaagcacttgagctcaatccatcgtacctgaaagccctgcttcggagggcagaagcgcacgaaaagctcgaacactatgatgaagctattgccgatatgaaaaaggttattgaaatggatccttcaaatcaacaagccacaaggtctcttttccggcttgagcccctggcagctgagaagagggaaaagatgaaggaagaaatgattggaaagctaaaagatctgggtaactccgtgctggggcgcttcggaatgagcgttgacaatttcaaagccgtcaaagatccaaacactggttcttacagcatccagttccagaagtgacacaacgtgaagaaagacatagatgaatggctgggccgctgggcggcatatttaagttgcaattgttcgaggcacttgtgcttcacatacctggaccatatccaaatagatacctgcaaatcgatccaaatagaagaggaactggattattgcgttgtgtttgcacttgacgttagagatgctttccgaagtgcaaagttgcacgaccattttgaactgtggtattttcttcaatatagttgttttctctatgttgcaaacgatgccttttcgtttagagcccgcctagtcaaatttattatacttgctctaaggaacccgtagactgcagaagaatggcagcaacaaaccaaatgtgagatctatactgttgtgtgagtgcctccaactgttctgttatgtcc

SEQ ID NO: 148052 - DNA, 697 bp, Zea Mays
gcagccacgagcttgtaaccatgagtttcctggcaatggtccctttttttaactatcaaatatatgtatgttattccatgtcagtttagtgatgtacgactgagataggttatggcaacatatgccatataataggaaagacagtttcatgctggcacctcttatttgaaaggttacttagcacttcttgtacacttcttagccccgaaaataaggaaggttattttttcttaatcacctacacatgttgtatggtctttttggcaatgttgtatggcaatgccataaaataagaaaggcaaagtatgccatagaataatagtttgaaaaacattgccaaaaaaggccacaaaaaagatttcttcacttttattatataccagcaatgttacttgacaattcttattcacttatttacaggttgatgaacaggtttcagctgagctcaataaagacagcctcgcgtcacctcctaagaagatcaagagtgcacagctaggttctacatcaacgatctgatgatgttctcatgaaggtattatgacgagaatcatcacttttggagcgaatcatcacttttggagcgcgaatgcttttgtgtatatataaccaaactgctgaaactttagcagtgctgtagatattgaacagatctctggtcgttgaaccactaatgatgtaatatataaatttgtac

SEQ ID NO: 148053 - DNA, 1443 bp, Zea Mays
gtttttgttttgtctcatgtaaattttagaacatcaaatcctatgtttttgtaattttactcttgcgagctcaaattatttgcataataatcagccgactgggatagagctttagccatacgttcctcttatatgttcagctatgtcgtgtgaactgaatgaaaatgatctgagctctactaaaaatatatgttcaccatgctatcatgcttagtaacagcgatatggcattgttagaagtacaaaaatctaggacctcacatgattactctctattgtctaaattttattttccagtataaccagttagtgcactccgtgtccataaaaatgacgcaaggacagatggggcaaggcaaacatgtatcactccaaagtacaaatagaccaatggaactatttgtattaataatattaattatataagtggtaattctattggtctattgacaatatatcttatccatggaaacagttggctggaccttgagttttttctctttcatagacaggactggacgcgacttgtggctattttctctctgtttataatattttgcagggctagaattattcctccaattcattgtttcgattaaaaaaagatacctacaatcttttctgtggcacctcttcagcacaaccgttatattcgttcttgcacttgtcagagtattatacccttacaaccatggtgcaaaatcaacgacattctttaaatgtttgtgttgagcttcactgttcaattgctccatcacagatgtagatttgatatctacattctgctttcacatacctataaaggagttatttttcatattttggtatgttgttgttttcactaaacttcaagagattttaattgtcaacctcatatgttggaaagcagatggttctagacacacttgaagaatggttgtcactgaacttaagggattttaattgttactgaactttattgatgcatagtgaatttaccattctaattgttgtgactgcatgatatcaaaacagtgacatgtctttttagttgctactgttgtcgggttgggtggtggaggagaaaacaatgatcccactgctcaatctatcgatatatgagccaaacaagacacaaatcatggaacaagtgaattgcctacatcttaccatcagtgtgttgaagaatggttggatgacaaaggccaaggagaatgctgcagctatgttattcagtttatatgtggtccatgacaataaaaaagataatgaatgatccagagaatgtggaatgtatgcatagccttttattcgagtcagctattaaacaagaaaaatggttggagtgattaaacaggctaaactattgttcaagtgagtagagatattttgcaacacttaaataatggatagtgtcttatcgttatagtttcctatcatatttttatgtaccatgcataattt

SEQ ID NO: 148054 - DNA, 498 bp, Zea Mays
atggaacctacaagctacacccgcatagtaacaaggaaccgatttgaattcacaaggagggagaagggaagagatcgcgccacagatgcggcacccgcaaagtaccttctcgtcctggtgaagggcgatccagacgtggaccctgtccatggactgccagaagaggaacgccccgaagtagtaaagcagaaacaagtgtcctggaggctgcgagcgcgtagaaggaacggcgcagtggttgtgggatgggacatgggagggccgcggcggcattgcctggactggagggcgagctgccctggggcaagaaggagcaagcgcagggaagaccagtttgctcgtaatggtgggggatcaggtggatccattcgtgagagcctggcctgtgcaatgctctaccaatgcaccccaaggttcaatggcttcatcactggctgcgttgacgtctgcagggagccagggactgagggacaacagcctccaggtccaggaaggtga

SEQ ID NO: 148055 - DNA, 2043 bp, Zea Mays
atggccctggccgacgccaccgcgttcccctacggcctgcgcgtcctcgtcgtcgacgacgaccccacctggctcaagatcctcgagaagatgctccgcaagtgctcctacgaagatgctatgagtgatcggaccgtgatcgctcggacaggaggcatttcttcctgtgtcaccacatgcggtttggctagcgttgctctccaaattctccgagagaggagaaacaagtttgacattgtaatcagtgatgtcaacatgcctgacatggatggtttcaagcttctcgaactcattgggcttgagatggatctacctgttataagtaccaaattgctccaatctgtttccacagtgatgtccatagacggagagacaagtagagtgatgaaaggtgtacatcatggtgcgtgtgactatctcctcaagcctgttcggatgaaggaactccgaaacatttggcaacatgtgtataggaagaaaatgcacgaggtgaaagagattgaagatggattggatgagaggggcctatttatgagagctgacactgataccatgaggaagagaaaagaagtggataaggaccatgcagaccaggactcaagtgatggagctactgctaagaaggctagagttgtctggtctgttgaccttcaccaaaagtttgtaaatgctgtcaaccaaattggatttgacaaagtggggccgaagaaaatacttgatcttatgaatgttcatggcctgacaagagagaacgtggccagccatcttcagaaatatcgcctctacttgagtaggttgcaaaagcagaacgaagaaaggataatgggtgcggctaggcaagatttcaatcaaaaggggccatcagataatcttaacctccgaagttccttccaagagcagccaggaaaccttaccaatggatttcagcatagttctcagaaggtccaatctcagaccaacattctcgatcctcatctggacgacacgaagacttcagtgcccttgaaagtgccagataaaaatggaacttcagcaagtgatgctgctgaccatcagaacatcaccggtgtttcacctttaggtgggggtggggtgttctcttttgaaagaatgccagtgaatcaggacacgaagctatcggaagccatgatcttggaatgtcagtcctggagtggtggtgtgccaccaaagcagttcatgcagtatccaaagcataaccatgagcgctgcgaccttctaggagactattcttgcctgcccaaaccggacttagagcacccaattgcgcctagccatctttatgccccaccacctgtaatatcgatgagttgcagtgtggagggagatgtcagagacttctcagatgtaaaaccagatcttcttggctgtatgaagtccttatcaccggcactgacatgtacagttgagtcagtttctgctcaactcagtgacagtgttgtgagctcaactaacaatgacaagaagatttccagtgtggaggggttgtccagcgttaaagattgtgactttgatcaggaaaggaaccaagccattttgcttacttcagaagaggcaagtatattatgcagcactgatttgacttgtctacctgatgaactgtccggctatcaacttcaaggcgtctccttcggggatataggactgaatagcatcgatttattccagtgcaatgatacaatggtactacctggactgcagaataactggtatgatgatccagattttagcaatgaaactatggagttcccgttgctagacggaggtctgtttgcataaatgcctcagcgggccctatcttttgatcatgcccttatgtgagttctttggtatgttcccgtatagtgcctcctgtagggctatactaatctaactttatcatgtggtggaagggtttaatttgtagtctctccacttttgataattgtctgtattatagaccgtgccatggtacaatgactgcaatatatactcttcacaatgatcaaaactacatatgaagactgtcaaatttttgccttgaac

SEQ ID NO: 148056 - DNA, 2125 bp, Zea Mays
tctcccagggacaggctcgtaatttttccactggccatcgcacccattcataaaaccctaaacccaggacccaggtttatcggtgaggcgagccgcgagtggaactgtggaagcgttgagcttttttcttctttgtcttgctgcgcaagaagaagggaaacgagaggcgggcggcgatggcgaagaggctgctcccgtcgctgaaccgggtgctggtggagaagctggtgcagcccaagaagaccgccggcggcatcctcgtcccggaaacatccaagcaggtagcagcaccatcgcccgctaatcgctaatgttgtttttgattagtttagtggattcaatttccggcgagggacgtttagatcatggtgtcaagaaaggtgttccgcgccgctcgcttgcctaactgaaaacgtctgcaggggttgggcggttgcaggttgggcgatttggatcgctttgcaggttgcgaatagttgtaagcagctgcaaatttctctcgattcttccacccactggtgaagttagttctcattgggttgtggttaggtctatgcgattcagattgcttggtttggactgcgattcttaacttaggtataacaatattatcgttcaagtgggtatgtttttttatgaagcataaattctctaaccacgtgctgttctcggatcaaaaaaaccaactcagttgcaagtgaattcctgctgtgaaatacatacatactatatacagttttggattcaaccaacgctagcatcggtcaatctattgtggtcactgtatccgtcccgacaacaaaaatacatatattcgtatccgaaaattcgagttattttgctacttgtatccgtacccaacccggtacctgtctcgttttcatccctagccctccgccaccacccccaaagtggaggggcgctgcacgagggattaaagggggcctagcggtgtcgtggggtttagggtttatccgctacgtccgacccgtttttatccctgcctaataataaatcaacaacggaaaaaaactctaatccctaactttcccgtctccagctcccacctcctgcattcgtgaagaacgactgaaccagccgccactcgcccgtccgactccggctccggccagctgcctctgtccctccgccgagctgcccgtccgccttcgtccctccggcccaggcgagcagaactccgcccccacccgccccgagccgagcagcagccagcagagccgcatcgccgccggggaacgctgagttgccggtccgccgccctgagaagatttccgtcccagcagcatagccgcagcgccgctgcccgtcgcctcaaggcaagtccgagcgccctgtcacaggccccagattaggttgatgtctttcctgagactgttgcctcaaaggctaccccaacttatcaggcaggtggagcaagatgttgagactgtaatccacgttctccagccgggtccaataggaattgtggagcacaaattcacagacgcggagatcttagaggccagggctacagtgaaaagagcagtggataattggcgaagaaattggacccttgagagaaatgttagcagataaatggaaaaaatatacccctggtgtcttctatcaacagtaattgaaataaatagggtgccatggctggatgcagttgttgccattagttagatttgagcacgatctgcttatcgggagttatgttaactgttctaaatgatcagtctgtttctctttgtttcatggtttgaaacgttcatatttagagaatgcagtaattcgactccgattcattccttgtttggaaatgatctttttttcatcatactactatatgggacattttttttttgttcattgcattgtcggtagccggctggcatattggatgtgatcctttcttttgatgcttcagtactttaactgtagtatctgaagagatacttgaagatcagtaacttcatgatccttgaccattgtgtcataatgccatactattttcactaactatcttcacctgctcatgtacaatcctggccctctgaatcggtttttgaagacaagaaggtttttgaagacaataaaaatctaaaagactgcatgatataat

SEQ ID NO: 148057 - DNA, 687 bp, Zea Mays
aacccaggacccaggtttatcggtgaggcgagccgcgagtggaactgtggaagcgttgagcttttttcttctttgtcttgctgcgcaagaagaagggaaacgagaggcgggcggcgatggcgaagaggctgctcccgtcgctgaaccgggtgctggtggagaagctggtgcagcccaagaagaccgccggcggcatcctcgtcccggaaacatccaagcagattaggttgatgtctttcctgagactgttgcctcaaaggctaccccaacttatcaggcaggtggagcaagatgttgagactgtaatccacgttctccagccgggtccaataggaattgtggagcacaaattcacagacgcggagatcttagaggccagggctacagtgaaaagagcagtggataattggcgaagaaattggacccttgagagaaatgttagcagataaatggaaaaaatatacccctggtgtcttctatcaacagtaattgaaataaatagggtgccatggctggatgcagttgttgccattagttagatttgagcacgatctgcttatcgggagttatgttaactgttctaaatgatcagtctgtttctctttgtttcatggtttgaaacgttcatatttagagaatgcagtaattcgactccgattcattccttgtttggaaatgatctttttt

SEQ ID NO: 148058 - DNA, 2141 bp, Zea Mays
cttttttcttctttgtcttgctgcgcaagaagaagggaaacgagaggcgggcggcgatggcgaagaggctgctcccgtcgctgaaccgggtgctggtggagaagctggtgcagcccaagaagaccgccggcggcatcctcgtcccggaaacatccaagcagctcccacctcctgcattcgtgaagaacgactgaaccagccgccactcgcccgtccgactccggctccggccagctgcctctgtccctccgccgagctgcccgtccgccttcgtccctccggcccaggcgagcagaactccgcccccacccgccccgagccgagcagcagccagcagagccgcatcgccgccggggaacgctgagttgccggtccgccgccctgagaagatttccgtcccagcagcatagccgcagcgccgctgcccgtcgcctcaaggcaagtccgagcgccctgtcacaggccccaggtagagtttcgtatcccctgcaaaatccaaatctaatccgattttgttaagatttaatctaatccaatgtattttcgatgacccttaaataagttttttttttcataattaccgcttattttgtaggtatgaattgctttaggccctgattgtttactctctagattatataatctatctcaaataagttaagagacaaaccaacaacacagcttattaggtggattatattatctagatacctagattacgataatcttataagcaggtcattaggtgcttatataatccataagctggattatataatcctgtaagcaaacaaacaggatcctagactgtactgtaaattttgttttattgttgcattagcaacacattgattttggcgagtcgtcagccactgccctctggccaggtccctccgatggacacggcagaccatggcctgcacgactcacttgatgaatctccctgtcgcgatgatggcagctggctagtggtgtcttagcaataggattttctcaacacacagatggcggcttggtgatgcgttcctatgtcctatctcggcaaatgaggatggctgctgggtgtggtgggagaggagaggcaggtttcctggtgttgagatgagatgaagggaactaggaccacaagtcgataatgtagctgacacagaacaatttcagtatgtagaatgcaatatctgctttttaagcagtttgaaaaaaaagaagaaattttgggatcagactgaagctgaaccctcaagtttcagggtccatgttgattgatccctcactgtaaaattagagaaacaaaaaaaatccttaggagcccatgggtagtttgatttgaagccagttaacacagacgttgttcaagaccagaactcctaagttacaactttattggctctagtggacttccctaagaagtctgatcgctgtgactaagagtaatcaattgttctataatcagcttatgcccttttcaggatagctaaatcaacagccaaaattcagtttattcagtagctatattagggacctcctcatgtttctaaagtagatatactgttatgttgcactatgaatgataatctgtcgtattcatttctgcttgttcatcagagtttggtaatcttcttcttccgagttatgcagattaggttgatgtctttcctgagactgttgcctcaaaggctaccccaacttatcaggcaggtggagcaagatgttgagactgtaatccacgttctccagccgggtccaataggaattgtggagcacaaattcacagacgcggagatcttagaggccagggctacagtgaaaagagcagtggataattggcgaagaaattggacccttgagagaaatgttagcagataaatggaaaaaatatacccctggtgtcttctatcaacagtaattgaaataaatagggtgccatggctggatgcagttgttgccattagttagatttgagcacgatctgcttatcgggagttatgttaactgttctaaatgatcagtctgtttctctttgtttcatggtttgaaacgttcatatttagagaatgcagtaattcgactccgattcattccttgtttggaaatgatctttttttcatcatactactatatgggacattttttttttgttc

SEQ ID NO: 148059 - DNA, 1335 bp, Zea Mays
gcgccggccagttcaccgcccatctcgatcggtaaaattgcaccggcgatcgacgtacggtaggtcggtagtagcagcaaagaaactaaccatgaggcaggcgaggccgtactcggggatcttctgcggcggggtgtcggcgcggacgggcccgcacgcgctgccgctggcgcgcatcaagaagatcatgaagcgctccgcgggggaggcggcggccgccgcggacggcggcgccaggatgatctcctgcgaggcgcccgttgtgttctccaaggcgtgcgagctcttcgtcgccgagctcacgcgccgcgcctgggccgccacgctcgacggcaagcgccgcaccgtgcacagggaggacgtcgccacggccgtgcacaacaccgacctcttcgacttcctcgtcgacgtcgtcacggcggacactgcaggtggaaccggcggcggcggcggcgggcacgacggcgacggcccgctctaagctgcatggggacgaattttcagccgtttgcttgtgcctaattaaaaaaccacctgcccacacgatgctctggtgcggtgacttgtaccaacttctctcatgaaatcccattctctgaaaatgatacgaaccccaaccaataagcacagcgccgactgaaaacgttgagaaattcacataaacgcagggtttcaccaaaattatgtcacaaaaattcgtttaaacggcagctcgacgcggtgcactgctgcgtcgtcaaggaggggctcgctgccgtgccggcgtcggatcgtcgagcggcacagtggcgaggaggtagtgcgccgtgcgcgacgcagatgagcgtggcggaggcgcggtgggtgccccccgaatgacgcggacgcgaaaggaggtcatgggcgagagggcgagcgttgcggccaggttggcgtggacgtagacattgaggaggttcattatggcctgcgaagaacttttccagatcggagcgaacttcctctctcgcctctcggtaggcgccgctgaagaagcgtgaggggaggccgactttggaggaggagggcacggcggaacagcacagcgccgatgcttctactcaatgaaaaggtcgcgactttgccctcctctccaccaagcagtaggcccttgtgctgcgccttctgcccacgcaatgggcatgcatggtggtggttggctccagcgagcagggcggcgcgctcaccagacagccttgtcggtggagatggcgtggaagagcggaagcgatttgacggcggcggcgacgcaaaagcaggtcagagcggcgctattggggtcgggagcaatggagggcagggggcgagaagccgagt

SEQ ID NO: 148060 - DNA, 645 bp, Zea Mays
atgaggcaggcgaggccgtactcggggatcttctgcggcggggtgtcggcgcggacgggcccgcacgcgctgccgctggcgcgcatcaagaagatcatgaagcgctccgcgggggaggcggcggccgccgcggacggcggcgccaggatgatctcctgcgaggcgcccgttgtgttctccaaggcgtgcgagctcttcgtcgccgagctcacgcgccgcgcctgggccgccacgctcgacggcaagcgccgcaccgtgcacagggaggacgtcgccacggccgtgcacaacaccgacctcttcgacttcctcgtcgacgtcgtcacggcggacactgcaggtggaaccggcggcggcgggcacgacggcgacggtgacggcgcgctctaagctgcatggggacgatttttcagccgtttgcttgtgcctaattaagaaaactacctgcccacacgatgctctggtgcagtgacttgtaccaacttctctcatgcaaccccattctctgattctctgaaaatgatacgaaccccaaccaataagcacagcgccgactgaaaacgttgagaaattcacgtgatttcagtttcagcggcctttgtgaaacgcagggtttcactaaaattatgtcacaaaaattcgttt

SEQ ID NO: 148061 - DNA, 1905 bp, Zea Mays
ccctaatcgagcgcgaaaggaacggaacggcgcagccgcggcggcggcggcggctcatgtaagctccccaccagcgaccagtggacacgtatatccatctcccctcgcacagtcgcaactcgcacgcatccgtcctcggcctcgttccgtccgccagcaatgccgctggcgctcgcgcaactgcaggacttgcgggaccgcatctccgaccgcctccgcccatggagccgctccgcgcagttctgggtccgcgccgcggacatctacaccagctacaaggtgtgccagctgcgcgcggggttcgtgaaggacgaggacgagctagagaccatgtgggagcggcagcacgagctcggcgcggagaagatgtactccctctgctccgagctcggcggtctcttcctcaaggctgctcaaattctgggaaaacctgacctggcaccgatggcttgggtgaagagacttgttacgctgtgtgatcaagccccatccacgccatttgatgtggttagagatgttgtggagaaacagttggggaagaacttcgatgacatgtttgaattcttcgatgtcgagcctgttgggtctgcttctattgcacaggtgcatcgagcaaggcttaaattatcaaagacagacgttgctgtcaaggttcaacatccaggagccgaacaactgatgatggttgatattcggaatatgcaagcaatggccttgtttttgcagaagcatgacctcaactttgatctattctctgccaccaaagagatggaaaaacagatatgttatgagtttgactttgtgcgtgaagcaagagcaatggaaagaatacgagaatttctacgtgtcactaataagaaacctccggttatggtgcctcgtgtgattcctgggatggttagcagagaagttttgataatggaatttatcaaggggaccccaataatgaatcttggcaatgaaatggctaaaaggggcatagatcctggtggtaagattgcagcaatggcaaagcagaagattttgtcagatcttactcttgcatatggtcaaatgatcttgaaggatggctttttccatgcagatccacacccaggaaacatccttatctgcaaggacacagaggtggctttacttgattatggacaagtgaaagaaatgccagaagatttacggctggcttatgcaaatcttgtagttgcaatggccgatgatgatttctcgagggctgaggaaagtttcagggagctgggtatccgaacatgggccataactgataacaaactagaagaattgtttcagttatccctgcgaatgttcgatacaagattaccaccaggtgtaactgttatgtcaccttttgccgatgattcttcgcttaacaaaattggagtggagagcttcccggaggagctattttcagtgcttcgaacaatccagcttttgcgagggttgactgtgggcatgggccttacattctcgtgcgcccagcattggagaccgatagctgaggaggcgttgttaaaagctggaagacaaagcgcttcaaaatcaagaaaacagaagaggagttttctgaggagattgttttggtgaagtaggcatttagccgcatagcgaacatcaaaggacatggtatacgaacattctgtgatgaaacggaagtagccaaaagctcgagccttcgatttttagacagtacatctgtccatattcgtttaccttgggtgcgtgttattttatatatttgctcattcctttatcactatgtgttttttgggattcagtatatagttgggattgtatcggaagctgacatgtacacaagtgacatggaccaattcaaaggaaatcatcgtggtatgtgggggtttgttctgtggactttttttgtttctgatgtga

SEQ ID NO: 148062 - DNA, 2209 bp, Zea Mays
gttggcaggggacacggccgacgactgcaccagcaccgcctgccttgctcgttctccttttccttcctagttccttttcttcgtcctcaccaaccaccaccaccacacccccctgttgtttcctcttgattgttcggtttgttttacaagttccttgcttgcgtcgccagcaagcaatcctctttcctcccccttccatacccgagggggagtaccgctaccgcgccacgctgccgccaccgtcatccgggcggccaccccgccaaacgccatttcgctccgcccgcttcgcatctccctcgccccccaccccaaccactcccctcgttccgcccgcgtcacccgactcaatccgattctatccgcccgcaccgcaacccgccggcgccgcccgagatcccgcccccagggttccgtcccgtgtgatgcgcggatctggctgagggcgagccatgccgagcgtcggcgtgaagatctacagcgtcttcttcaagctcttgctccgccaccgcctccagtcgctggcctccgcggggggcctcgacaacgcggccttcggggtctcctgccgccccgacgaggccaccgcgccgcccaacccggccttctccgccgccgccgacggcgtcgcctccaaggacctccacatcgaccccaactcctcgctctccgtccgcatcttcctcccgacgcccccgcccccgcacgcgcacccgcgccgcgccagcgaccccaccccgaccgcccccgccgctggcgcgccgtaccgaggctacctcccgcacgccgtagcctcgccgcgcgccgccgcgtcggcgcgccggaggctgcccatcgtcgtgcagttccacggcggcggcttcgtcaccgggagcaacaccgccgcggccaacgacgccttctgcaggagggtcgccaagctctgtgatgccattgtcgtcgccgtgggatacaggcttgcgccagagagcagatacccggccgcgtttgaggacggggtcaaggtgctcaagtggattaccaaacaggcaaatctcgccatgatgaccaaggtcaggggtggtgtggacaccttcggtgcgtccactgttgagccgtggattgctgcacatggtgatccagctagatgtgttctacttggtgcaagctgtggtgcaaatattgctgattatgtcactcggaaggtggtcgaagatgggaaaccatttgacccagttaaggttgttgcacaagtcctgatgtatccctttttcatagggagtgttccaacacactcggaaataaggcttgcgaactcatacttctatgacaagtccacatgtttacttgcttggagattatttttgtcagataaagagttcaacctagaccaccctgctgccaaccctctggcgcctggcagaggaggccctccactgaagtgcatgccgccgaccttaacggttattgccgagcatgactggatgagggatcgagcaattgcttactctgaggaactccgcaaggttaatgttgactcgccggttcttgactacaaggatacagttcacgagtttgcaaccctggacgtattcctaaaaacaccacaggcgcaggcctgtgccgaggacattgccatatggatgaagaaatatatatccctcagagggcatgagttctcatattagttgtagcaaaaaccatgcattgtgaaataggccctttgcagggaagcgtcaatgtgttcttttcaactggtggaaagagggatgttggattgcagtcgggtaaaccagctagcttaatgctgagtactgagtcctttaggccctgttcggtttcaccggaatagaccaggatttattccagctcatcaaaatctatataaattagagaagtaatccggctaggaatcaatccgaggctcaaatccataacaaccgaacagagccttagtgatttttgtggaagaatgtagtgtgcaaagttgtagactgtaatcaaaagatactcttccccttgtagagcttaattctttcattccttttgtaccctttgtgtattttggaattactggtgctgggggttaccattttttgagaagaaatagcaatctcagtggccatacttgtggagcactgagctccacacaacgacatgtaacctgatcgttcattttgttccgcgtagcgtatctgcttatatcagcatgcatcctttttgttgaaca

SEQ ID NO: 148063 - DNA, 2800 bp, Zea Mays
cctgtagtgatgtaagcattttgtaacaactcacataataaatttaagatttattttttatattttttataaatttactactaaaaataaaaatataaatttacgaagcagattatatatcctatttttcacaagaaaataaaaaaactaaaaaataatatataactatcagagtattagttttcatcttaccgacatgtgggccaccacatgaaccttatccccgccgcgcctccgctcccttaaaccccgcgacgggtcactggacggccaccagtccgtgctcccaaaatggcggcctccccagcggccgccgctaccttccttcaccatcacctcccctttcccagtcgccccaagacacttctcagaccacgcctccaccgcctcgccgcgtccatcaacccctcgtccaccgacgagacccccgccgcggacccaccggtcatcccctcgatcagcatcaagaacactgagcccgaggaggtcgcccgccgccgcagttgggtggagcacggatgggctccgtgggaggaaatcatgacgccggaggtcgcctttgcgcgccacagcctcaacgagggcgaggaggtgccgcttcagtcgccggagtccctcgaggctttccggatgctcacgccttcctaccggaagaaggtggaggctgagccaggatacctggagcgcctcttcgcgacgcgcgacacgcccgagcctctcgagacgacgtgggccggccggctcccgctgcggctcgtgccgccgcgggactggccgccgcctggctgggaggtggacccggacgagctggagttcataagggaggcgcacagggcggcctctgagaggctggacatggaggcggcggctgcggcaggggtgaccaacgtggagaagctggaggatgcgccacaggatctggcgctagagaggtacaaaatgttcctgaagcagtacaaggaatgggtggaggcaaaccgagataggttggagcaggagtcctaccagtttgatcaggattacttccctggcagacgaaaaagaggtaaggactacagtgaggatatgcgtgaacttccattctactatcccggacagatatgttacgggcaagtaacgactgttcacctctaccagggagcctttgtgaacattggttgtgtccatgaggggtgggtaccgataaaaggaaatgactggtactggatccgacatcacatcaagcctggcatgaaagtctacgtggagattctggccaaacgagacccttaccgcttccgcttcccacttgagatgcgatttgtatatcctaacattgatcacctaatatttaatagattcgacttcccaccaatatttcaccgtaaggaggatactaacctagagcagttgtggcgtgaagccggacggccacccattcctaggaaaaaacctttaaaagatatggaaaaggaacctttggtatcagaccatccttttgttgacacgctttgggaatggcataatgcagagcagatgattttagactacgaggaacaaaatccagataaattcaagaatacaacatatgagtccacagttgatgcaccctcaatcgatgaagaaaaaagagttgaatacaccgaaggatatttcaaagaaacactgctaaaaaagaaagttgtgaatattagcatcaaagaacttgatctggatgctgcccgtgctgaacgccagctgataaaaaggctgaaaaaggaagccgaggagagaggggaggaatacaaggttaggaagctccgacgaaacaaagaaatggatgagtatgatctgatgcaatggcgtcgttcatttgaagagagggaagcgcttatcagagacatctgctgccggaaagcgcttgatcttcctatcgaagagcccgggcgatacgacgtggacgagacagaggtgtacgggaaggattactatgacccagagaagccaatgtaccggtacgactactggggcgagcccaagaacacggagaagacgaagctggagcgggacgtggagcgccacaaccagcaggtggtcggcgacgcgaagaagtggtgcgagatgtcgtacgacgactacgtccgcaagaagctgcggttggaagcggctgaggcgagggaaaggcggaggaaggcggccgaggcgcaagaggacgagcaggagtacgatgacggcatggacctggacctgaagaagatgaccgatccacgcgccccgcacaaccggttttacatcacgaaatgaaaggttagagatagttgttagttgtgcaaaaggttcgattgccttggttgttgttgttgggccaccgcttccgcctatggtgcaagagttgggggcgcttgatcaggtcgtctgacattctccttgttgacccaaccccattccgattggggcgacctggtcaaacgcgggggcgtgctagctacgctcagtacaagtattcagcatggaatctccagtattttattctagagaacatatcttgtgtatattgaagtttagtgcacatgttacatatattaaatcagtatcactcattttagatttagcatctctagttgtttgatatattttgttaaagacacgctccgacattgtgggtagtggtggacgatgttatttataaattgcaatgatcaaccatataagttagatttatgatggatggtgatgatttatcatgtgcactatgtgcactaagcttctatgtacatgagatatgtcctctttattctatagatggtagctgctgaagtctgaacaactacaaatccctgtc

SEQ ID NO: 148064 - DNA, 1104 bp, Zea Mays
ttggaccaatggctgaagcctaccacggtccacggcagctcttgttccgtgggcgcaagtcgaccgatcggcatattcgccagcagcgcaggcttccattttgatgcctccctccgtccccttccgctccaatcagcggccgagctgctcctctcgcccacgcccgagaccgagaggccgcgccggcgcacccaaataaacccgaggagtgcctacctggcctgggcgcctggttgagcggtaaacaaatccgtgggcgtcctgcggctgcgattagaatagagtagaattcatcagcgggtcgccgtcgccattggcgcggtgcgtgtgcgagcccgagccgtgcgaagcaggtgaggcgaggggacagacgggacacgggagcgaagcaaagcgaaggaaggagtttccagtgagcgcggatcgcggaggcggtttatatagccggagggcgcgcgctccggtccgctaacgtcctgcagggagggaagggcaggattaggcagggcagcgccgcgccggccggaccgcccgcccgcccgcccgtccacgagccacggactttcggccatgggggacgctggcgctgacgcctcctcctcgccgccgccgccgtccgggtccttctcctacttcgccgtcttccgcaactaccccctcgtcgccgccctgctcggcttcgccgtcgcccagtccatcaagttcttcgtcacacggtacgcccctcgtccgtccccgtccggtatgtttgggtctggagatcgggcgcgaccgtggtcggatcggatcggatcctcatgcggtttcggcggtcaaagctgcctcatggcattgcttcgactgttccttattctggacgtccgaaacgaccttaagaatttctcctagttctaatacatctagaggaatgaatgaacgatgatagactgggaatgtaatagcatcgtatatggtaggtttgctttcgtttctcgacggttttggtgagttgagctcgaagcaaatggagttggccttgatccggtcagactatgtactaagaattgtccacagtggttgttctgtgaaaccaatgaagatgaacacagagtccgcattgtgttt

SEQ ID NO: 148065 - DNA, 1322 bp, Zea Mays
ttggaccaatggctgaagcctaccacggtccacggcagctcttgttccgtgggcgcaagtcgaccgatcggcatattcgccagcagcgcaggcttccattttgatgcctccctccgtccccttccgctccaatcagcggccgagctgctcctctcgcccacgcccgagaccgagaggccgcgccggcgcacccaaataaacccgaggagtgcctacctggcctgggcgcctggttgagcggtaaacaaatccgtgggcgtcctgcggctgcgattagaatagagtagaattcatcagcgggtcgccgtcgccattggcgcggtgcgtgtgcgagcccgagccgtgcgaagcaggtgaggcgaggggacagacgggacacgggagcgaagcaaagcgaaggaaggagtttccagtgagcgcggatcgcggaggcggtttatatagccggagggcgcgcgctccggtccgctaacgtcctgcagggagggaagggcaggattaggcagggcagcgccgcgccggccggaccgcccgcccgcccgcccgtccacgagccacggactttcggccatgggggacgctggcgctgacgcctcctcctcgccgccgccgccgtccgggtccttctcctacttcgccgtcttccgcaactaccccctcgtcgccgccctgctcggcttcgccgtcgcccagtccatcaagttcttcgtcacacggtacaaggagaacagatgggatcccaagcggcttatcggctcgggtggcatgccgtcatcacattccgccacggttacagcactagcagtagcaattggattccaggatggctttagctgctccctctttgcaacagcaactatatttgcaagcgtggtaatgtatgatgcttctggtatcagactgcatgctggaaagcaagcagaggtattgaatcaaatagtttgtgaacttccttctgaacaccccttgtctgagacaagaccactgcgagaacttttaggccatacaccaactcaggtggttgctggtgcattgcttgggtgtacaatagccacagcaggacaattattcctttgaactacgaaggtgcggcagaaatgttgtagcatttgtatcgcagggacttgagaagaagtttctccagtgttctgctactttaggtattggtaagatttgcatgttggtgctgtagtgttgttgaatgttgtatgttctgatggaatgtggttatatgtcaaaaaggtgacgttcacaggattgctgtacagaacattgttcatggttatgattgatgaaatctaaaatgtgattgaaacagctgc

SEQ ID NO: 148066 - DNA, 727 bp, Zea Mays
tgtggattgatacacccctccctataaactttatggaagatcgcggttcattctagtctgaacaggcgtttatacagttcccgtgctgcagtaagtttgatctcttcttgttttttaaacaaaggtacaaggagaacagatgggatcccaagcggcttatcggctcgggtggcatgccgtcatcacattccgccacggttacagcactagcagtagcaattggattccaggatggctttagctgctccctctttgcaacagcaactatatttgcaagcgtggtaatgtatgatgcttctggtatcagactgcatgctggaaagcaagcagaggtattgaatcaaatagtttgtgaacttccttctgaacaccccttgtctgagacaagaccactgcgagaacttttaggccatacaccaactcaggtggttgctggtgcattgcttgggtgtacaatagccacagcaggacaattattcctttgaactacgaaggtgcggcagaaatgttgtagcatttgtatcgcagggacttgagaagaagtttctccagtgttctgctactttaggtattggtaagatttgcatgttggtgctgtagtgttgttgaatgttgtatgttctgatggaatgtggttatatgtcaaaaaggtgacgttcacaggattgctgtacagaacattgttcatggttatgattgatgaaatctaaaatgtgattgaaacagc

SEQ ID NO: 148067 - DNA, 1592 bp, Zea Mays
cggggacgtcgtcctcgtagtctccccgtcccgcatcgacgtccccgtcatagacttcgcgctcatgtccatcggcgctgtcgtctcgcctgccaacccggcgtccaccgccgaggagtacacgcacatggtcgcgctctccagaccggtcgtcgcgctcgcggctcccgaggtggccgctaagcttccgaggaacctcaggtgcgttgtcatcggctcgaatgagtacaagagcctctcctccgccggcggcgtagcgccgtccccgccggtggcggtgaagcagtccgacacggcggccgtactgtactcgtcgggcaccacgggccgggtcaaggccgccgcggtctcgcaccgcaacctcatcgcggtgatcagcgcgcacaggaacaaccgggttatagcggagaaggaggctgccgaggccggcgaggagccgctcccgcctacggtgacgctgttccccctcccactcttccacgtattcgggttcatgatgctgctgaggtcggtggccatgggggagactgccgtcctcatggaccgattcgacttcatcgcagcgctgcgcgccattgagcggtaccgcgtcacgctgctgcccgcggcgcccccggtgctggtggccatgatcaagtccgaggaggcgcgccgctgcgacctctcctccctcctcttcatcggcatcggcggtgcgcccctcggccgcgaggtcgccgagcgcttcgccgccatcttccccaacatagaactcattcagggctacggtctgacggagacatctggttcggtggcttcgacggtcgggccagatgaatgcaaagcgtacggttcggtcgggaagctggcatcgcacttggaggcaaagatcgtcgatccctccaccggcgaggtgcttgggccagggcagcgcggcgagctctgggtccgaggaccagtcgtcatgaaaggttatgtcggtgacgacgaggctactgcagcaacagtggattcagaaggctggttgaaaaccggtgacctatgctacttcaacgaggatgggttactctacattgttgatcggttgaaagagttgataaagtacaagggatatcaggtacctcctgccgaactggagcatatcctgaattctcatcctgatatcatggacgcagcagttattccttatccagacgaagacgccgggcaactcccaatggcttttatagtgaggaaaccagggtcaaaccttaccgagcaacaagtcatggatttcgtggctaaacaggtcgcaccctacaagaaagttcgtcgagtggcctttgtttctgcaattcccaaatcgcctgctgggaagatcttgcggcgggagcttgtagagcaggccgtgtccatgggtacctccaagctttgaagtttgaagtttatactgacgtcgaaatctagaaggaaattcttttttccccgaaaagatggcagttatgctagctagaatggcatttttttacggaaacggaggctattatataattgacccgaatattatggacaaaaactattgtattattaagattctcgtgcacttaaattaagtcataaaaatttctttataa

SEQ ID NO: 148068 - DNA, 2039 bp, Zea Mays
atttcagtaaacggtcgattcaaaatggggcgagacggagtgcagcaaaaaccccaagccccgcaaaacccctaaaccctagctccccacccccagcctccccgcggcttccagcgattggaggcgaagcagccgccatggcgatcctccttaggcgcgcgtcgctgcggcgcgtcatcgccttcgccgccgcctcctcctcctcctcttctttgcactctgagatttataagcaaggggtttgtggatccatgtttcattgccgagagttcgcatcaaaagccaaaaaaaagaagtcaagtggaacagactccgatgaggagagtatgtcaaagaaagacttggctttacaccaggctatcgatcaaataacgtctgcatttgggaagggggcaataatgtggcttgggcgttcgcaaggccttagagatgtacctgttgtgtctactgggtctttcgctttggatatggctctaggaactggtggtcttccaaaggggcgtgtcatagaggtctatggtccagaggcttcaggcaagacaacacttgctctacatgtcattgcagaagcacaaaagaatgggggttactgtgcctttgtagatgcagaacacgctttggatccagctcttgcagagtcaattggtgttgacactaacaatttgctcgtctctcagccagactgcgctgagcaagcactcagtcttgtggacacactgattcgaagtggatctgttgatgttgttgtagtagacagtgtagctgcgcttgttccaaagactgagcttgatggtgagatgggtgatgcacatgttgctcttcaggctaggttgatgagccaagctcttcgcaagcttagccactcactttcactttcgcagacagttttgttatttattaatcagatcagggccaaggtagccacatttggatttggaggaccaactgaggtcacttctggtggtaacgccttgaagttttatgcttctgttcgcttgaacatcaggcgtattggttttttaaaggaaggtgaagagacaataggtagtcaggttgctgtgaagattgtaaaaaataagcatgccccacccttcaagactgcacagtttgagcttgaatttggaaaggggatatgccgcagttctgagctttttgaacttgggttgaagcacaagcttatccaaaagactggcggtgcatattatagattcaatgatatgagtttcaaaggtaaaaataaccttaaatcttaccttactgaaaacaagagtgttgcaaatgatctggagacgaaactaaggagattgatgggaaccgaagcacctaaagagcaggaggcagaagacagttcgccgagtgatttgcctgaagaggttgtcacacctgaagcatcctcagaagaggatatgggagtcgtaatcgaggcttgaccagtgatctgacgtgctggcaagcgagaccagaatttctggagctgttcctgtaaaacaatattttgggtcctgaagtcaccaccgcttggatcgacatgaccctgcggtgttctggtgattccattgtaacagacttcagcccttaccgtgcttttacagtagtgtagcatgaagagaattggcattgtgtgaaatcatgctgatagctgagaggtggaagttgaaggcggtaaggttgtggtctctggctatctgaactctagtgtagtatatagtgtaggcgacggtaaaatgtagtggcgtggtcgtgtatacatgatgctcacattttgagctcctggtttcacgtcgaagccaatttcaaaagcattctttattgagcgcagctagaattacatcgaattcccccctcttccggtacttgcctggtttctgctttgggatagctgttgcttggttattctgatctgcgctgatccgtgtttgccgatcaggcccgttggcaggtcctttatactggagtatctctttacaggcacattttctttgaggaatggtagacagtctgtggatcaagcaaagtgtcaatttttggaatcgaagtca

SEQ ID NO: 148069 - DNA, 3114 bp, Zea Mays
ctccatttattctcccccttctttcctcccccgccccacgctcttcctcctccttcgtcgtcgccggtaacccccgcggagccgcgttgatagctcgccgtagggggatttgtctgccgtcgctacggcagatatcagtgctggagcgtggttactgacagggtgcggctgcattcggcctcccggcttctccttcacgcgcgcgcttggcctccctacaaggctctgtctgactggctctgaagacgtctgaaggttaaaccaagctccctgcgctgctgcccaagcggccgacccttcctgccgccgatagacccgtgctggatgcctggatcctctgtctagtgctgccgctgccagcgctactcatcctcatcctcaccctagtggagtggagatccgtccaggcgtggattgatttcttctttttctggtcagatgttggagctcaggtaatagccacccatggaagcaatggaggccgaagaaggtccttttctggctaatgatgccaagttgcacgcaggaatttgtagagcatttcatccttctgtatctaaactttccaccattttcccctttatcgaagcatcaagacccagaagcaagtctggtatacaggcattgtgttcactacatgtggctcttgataaagccaaggggcttcttcaacattgtgcagactgcagcagactctacttggcaatcacttcggaaactgtgcttttaaagtttgagaagtctagaagccagcttcaggagagtctaaggcgcattgaaagcatagtaactgaagatatcggctgtaagattgtggagattgttggtgaactggagcaaattgtttttacattggatagatcagagaaggaagctggtgatgagctgatcaatttgctacagagaaacaataaaacaaatggttctagtgataatggggaacttgaggtcttccatatttctgctcttaaattgggaattacatcttctagggcagcactcaccgaaagaagagcccttaagaagctaattgagaaggctcgttctgatgaagacaagcgtaaggagcttgttgtgtcatacttgtacaatctcatgaggaagtactcaaagttcttcagaagtgagactggtgatgatacagattctcagggatcgtctccatgctcgccaacagtattaggcgtggatgatatgtgtagtccatacatcaatggccgtgcatttggtagacagattttgagcagtcagtcgttcaattcaaggtttggatctttcaattctaggctcggatcattcaattgcagacgtgctgctggtggtggtccaaggtctgggaatatctcagtccctcctgaagaacttaggtgccctatttccttacaactcatgtatgatccagtcatcatttcatccgggcagacttatgagcgtatttgcatcgagaaatggttcaatgatggtcacagcacatgtcctaaaactcagcagcagcttgcccacctgtcattgactccaaactactgtgttaaggccctgattgccagctggtgcgagtcgaacgattttccacttcctgatggtccaccaggaacttttgatgtaaactggagacttgcttcctctgacactgaggctacaggttgtgtgtctgttgaaagctttgattgtaccagtgcaaagagcgtcaagattgtcctgatggaggatgctagaaaagaggagccagcaaacagcgtatctggaacgctggatgacggttcttgtaacgatttcgatctgaacgaaggctatgggagcctgctgctcttgcttcatgaaagaagtaacatggacaagcagtgcaggctggtggagcagataaggtatcttctgaaagacgacgaggaagcaaggatccagctaggctcaaatggctttgccgaggcactggttgagttcttgaggaatgctgtggatgatggaaatgagaaggcacaggaagtcggtgcaatggctcttttcaatctcgcagtcaacaataacagaaacaagggactcctgttatctgccggagtagccggtctacttgagcagatgatatcgaatccacgcctatctggtcctgccacagcactctaccttaacctttcctgccttcctgacgcaaaggccgccatcggttcaagccaggcggtgccattcctagtcgactgtctgtatatccaagacgccagcgacacaaacggcagctccagcaagcacgacgccctgtacacgctgtacaacctgtcgagccaccaggccagcgtgtcggcgcttctagccgcaggcatcgtggacgccctccaccgcctgctcgcggagtctgcagcgcctccggaggaggggcttggctggacagagaaggctctcgcggtgctcatcagcctggcggccaccgaggctggcaggaaggagatcgtgtccacccctggtctggtcagcacgctggcgacggttctggacacgggcgagccgacggagcaggagcaggccgtgtcgtgcctgctggtgatgtgcagcgccgacgacgagtgcgtcgcggcggtgctccgggaaggggtggtcccgtccctggtctccgtctcggcggccgggacggggcggggcagggagaaggcccagaagctcctcaagctgttcagggagcagaggcagcgggacaccgcgccggcgccgcaaccccagcagcagctgctgcagagccagctggcggagggcgggaatggtggcggtgctattatcgcgtgccaccaccgggagtcgaagccgttgttcaatgtcaagtccaggaagctgggcaggacgctgagctctctgtggaagaacaggggcttctcgctgtaccagtgctaggatgcatgctagagtagtatgtgtttttgagttgatcagtgggttgtgtacatcgtcttctgccttgttttccgcttggtccttttcctcttctctggggtattgttctgtttcggggtaagaaagaggagagtgaaaacattggtgttcttcccccacctcctcggtggggtgatgtagggcattttccagtttggctttggccttgtcaagagctgtgtacagttgtttcttctt

SEQ ID NO: 148070 - DNA, 1143 bp, Zea Mays
atgacatactttcgagttcgagcatcgaacaacttgtacaagccagttccaaatgatatcatgattaccttcacgaattggacaaagttagagcaggttattgagattcctcctgcatttcctacacttacctactccctcactcacatagagcagatccattcgcgcatcgaccataaagactactatacagatgccattgggatagttacttcagtctcgaatgtttcaccacatcgctccagaggacaacaagcttccagcttgaagaggaacatttccatatgtagtgcaagaggtgcttcggtcaatgtcgtgttgtggggtgcccaagccaccctattcccaggagagcgcatatacgaagatgggcagaattccccacagattgtgctatttgttggcacacttgtcaaaaaatatgcagaaaaatgcgcctgcatagctgtcactcatggagactcttacaaatgcacaaaccgtgattgtgctaacattgctatgcccgtccaaaggaaaccgttgacgttggagatgctgaccgtgtcactactcagtcctcaacaactaggaagagctttgattgagtccactaaaaattgtagatcatgctcttcgcctggcaaatcaatagcgaaaaaattgtttgttgctgacgatgaggaaggaagcatcagtcaatccagtggaggtggtgttggtggatccagtgatgacaaagataattaggtgctggtgtaggaacgtggaacttttgccttcacagttgcagccatgtgtaattcagggttatcatctatttctatttttctcaagttattgtatatgttagttggatgggggagatgtggtacatacttttgtccgcagcatcgctaacggtttgcctacacaaacctaccaaggttaactttaatcaggatgctacgtctatcacgcttttgatatgctggcggccaacgtgaatccatctcacttacaatcgtgcctgttacctttcctcccctgatgttcatcctcagtgacttgtactgtgtagtggcagaagaaaaacctactcttttgtatatattaactgcatgttgttaaaccttttgctacattgcacggctgcaaactgtgctctacttatttgtgtggcta

SEQ ID NO: 148071 - DNA, 675 bp, Zea Mays
atggccgcgggagcagagggcggcggggttgcaggaccttcccaaggagagcgaaaatttaggtgggcgcgtccgcggatctcgccggtgtttgcctgcgcgagatggaggcgcacttggatcttgttaattacgagaggtttctggacattaaacttactcgggacaataactaaccaccggaaagatctatcagtgctgaagcgtacgcagccgtggggtgctgggttcaccgacgaggatcagacaaaggatgcatcccctgctcgctgtagttgcgcgtgggtccgcacggagccaggggccaccatagcagcggcagaccggctcgaaggtgaaggtggatcgatcccatgcggctcccatacggtggaagaagcacgattgggtcgaagcagggaaatagtggcagccaacggcgaccatgccgcttcctgttcagatctggagaccatctggagaccgtgcgcagccgtcgggtggtggtacgacgacgacgaccacgaggcggactgtgtcgtctgcccgctgcaagcctgcaaccgtacctgggtcctctcgatggtagggcccaccatagcagcgatggagcgtctccagtgcggtgggcgaaggtgtggtggctccggtgtggtggctccggtgcggcagctgaagcgcgatgggtcacagtga

SEQ ID NO: 148072 - DNA, 1104 bp, Zea Mays
cacgtactctgtcaaacgatacgccgcgatgcttccagacaagcgccatccccttcctcgccccacacgccgtcgtgttggccgcgcctctcttcaaccttttcttgagcattggcgagagcccttcacatggtgcggcgctggcatcgttgttggcgacctctgcgcggtcggatctgcaaaggttgcagctagcgcgcctacagtacgtcaacatggtgcggcatctctttttgcagatccccaacttgctacgccgccggccgccgcatcggaactccttgcaccgcttgcctttcttctcccattcaaccggcaagcgttccctggctcaataacgcaactgggggatgtctgtcgctatctccatataggaaacgacaggtgcgacagatttagattttcaggtgatgcgtggtcgggatcgccggatcaatcaaaataagtgtgaaatttgagaggccgtggaacttccagatcgagtagtatccatccagatcgatatcccagaagaccaagcctggccatgaaacgcatgctaccccgatctcttcttcaccttttcttatccgcaggtaccaacaaaaaaagtgacccttttgacgacgtattgcgtgggcaaggcatgacagtgcgacaagagagaaactaacaaagagctctgttcgttctgctgattgcttatgattcgactcgcagtggcggtagctgggagagcttgggactggccagacacgaccaactcaccactgtaataagacgacttttatacatagctgacagtacgcaacctcagttcaggcgcaaggttgaaacaacaacttttgaagactggccatgaatatctagatagtactacaccatctacatagtttgtaatcaatataatttgcatattattcttcgcacacctttataaccatagcacaacaggacaatagctcatcgactctttaacaacaactgatgttcacctttttctgcacaggtaattgttttgcatgtctatgacgagcatcgtcacttttggaccacgaatcttttttgtgtactgaaaccttttcagttctttatatgtttaagctatctctggctcttgaatta

SEQ ID NO: 148073 - DNA, 2105 bp, Zea Mays
cacgtactctgtcaaacgatacgccgcgatgcttccagacaagcgccatccccttcctcgccccacacgccgtcgtgttggccgcgcctctcttcaaccttttcttgagcattggcgagagcccttcacatggtgcggcgctggcatcgttgttggcgacctctgcgcggtcggatctgcaaaggttgcagctagcgcgcctacagtacgtcaacatggtgcggcatctctttttgcagatccccaacttgctacgccgccggccgccgcatcggaactccttgcaccgcttgcctttcttctcccattcaaccggcaagcgttccctggctcaataacgcaactgggggatgtctgtcgctatctccatataggaaacgacaggtgcgacagatttagattttcaggtgatgcgtggtcgggatcgccggatcaatcaaaataagtgtgaaatttgagaggccgtggaacttccagatcgagtagtatccatccagatcgatatcccagaagaccaagcctggccatgaaacgcatgctaccccgatctcttcttcaccttttcttatccgcaggtaccaacaaaaaaagtgacccttttgacgacgtattgcgtgggcaaggcatgacagtgcgacaagagagaaactaacaaagagctctgttcgttctgctgattgcttatgattcggtaattacctctacaccatgtccttttcgatcgataatgaacaaagtatatataggtgcacgaacgtgctagatcctagattacttttagctaggtcccaagcagccgaaaatgtgtgcatgctttcagataagcaatgtctctgtctattgcacgattttttcgggcttgttgaatcgcccccgcccctaaaaataattataaggaaatgaagcctgacattcttgctcagactcgcagtggcggtagctgggagagcttgggactggccagacacgaccaactcaccactgtaataagacgacttttatacatagctgacagtacgcaacctcagttcaggcgcaaggttagtctgatgatctgccttcattttgaatctcgattttgctgcttcatgcatgtatcatttgcgtcatcgatcatgtgctttttttctaagatctgtcattcgttttgcacgcacatcattttcctttgagttacctttacaaagatgacggacttcagcaagcgtctgcatatgcaattccttttcttgcctatccatcgatttactcatagattttattttcttcttagctcgatcaaatacttacatgttcgttttttgtttctagccattgggttggaattagatgatggatcgcacataacatacatagcactcttttttagcataccacctcatgcttaacgcatttcttatatatatacacaggttaactttccaggtaactcaaaccgacacagcttaagataaagttggcctccatattaattgctacttacatattatcatcatctttttccccaaaaaatcttactagaatactaagaccatttttacacagcaaccacataaagttggacccaacatcaacaatgattttacaaactctcttgaatcacctccaaaaggttcttattatacatctccaatagaattatctaaaattaaaattatgttcgtttcttacaggttgaaacaacaacttttgaagactggccatgaatatctagatagtactacaccatctacatagtttgtaatcaatataatttgcatattattcttcgcacacctttataaccatagcacaacaggacaatagctcatcgactctttaacaacaactgatgttcacctttttctgcacaggtaattgttttgcatgtctatgacgagcatcgtcacttttggaccacgaatcttttttgtgtactgaaaccttttcagttctttatatgtttaagctatctctggctcttgaattaccctagaatctggttaaccttgtctttgctcttatatacttatttactctctaatatacatataatcatcatacatttacattatactatgctgcgctaaacggattggcacgcgcgcatgggcgcgcgctataca

SEQ ID NO: 148074 - DNA, 639 bp, Zea Mays
ctgatttatattagaatcgatgtcggttgataccgatcgatcgatgcttgataacatgttaaacgattcgaccagtaccaatccaaatcacttgataatgacggattttaacgacgttataatttaattggtgtacatgtacatcgtgtcagcttatatccgttttaaaccgtttgaaattcaataaatccaaaaaacatattaactaagagaatattcctaccattttctccacagccacgtgaccagtttcacagactcacagctcaaggaggtatttaatttgccaattttgcacctcacccaataactgtcgtacatataatatagtctaacatccaagtttcgaaaagaaggcactaaaattaatttaggatgttattaaccaaaaatcattcttcaacacattcttaaacgaggtatctaaatattccaacttcttaaatattcatatttagtctctagacttagggacctcttgtgcactccttatagcctatttcgtacgtcaatcataccgtaaaatcatttaccagccacgagtgatggactttgaataattgaagccgtggaaagaatgaatttaaaattctcgttggccaagtttgaagatgacttttttcaaaaaaaagagaaaaa

SEQ ID NO: 148075 - DNA, 3970 bp, Zea Mays
atgttctactcgcagttcatcttggccaagaagggccccctcgggaccatatggattgccgcacacttggagcggaagctgcgcaagaaccaggtcgcggacacggacatcggcgtctcagtagaaaacatacaaagttgcaaacatgtaccacagaaagcaaagcatactcaagattccatcatattccctgacgttccaatcgcacttcggttatcaagtcatcttatgttaggcgtggtcagaatctattctcggaaggtcaactacctattccatgactgcagcgaagctttgctgaagataaaacaagctttcaggtccactgctgttgatctacctcctgaggagtcaactgctccatatcactctataactctgcctgagacattcgatcttgatgattttgaactgccagaagctgtgtttcaaggcgatactgatcatcatgtgagcacaaaagagcagatcactttgcaagacaacccagagaaaacaggatattcaacatcccagtttggcctagatgaaagatttggtgatggcagttcatcacatattggcttggacttggaggaggaattaattctgaacaaggaccactcaattcatctcgagtctgatgatggtattattattcaaggtcggtcatcggtcccttctactgatatggagattgatgataacaaaagtacaaacataacagctgaaggatacagcaacatggacggtgggccttctagtcatgtaaagttaggtccactgaatgcagatgacctaggaggaaacagtatccgtaactggactggttacaatgtacagactcctgatttgaatgatatattattgcataataatgaggatattgcaggcccatcaacttcgtactatcaacctagcccatttacttgtgatgaacctgcatcaccagagttcattagcgctcaggccccagctacacctggtttaatggaagagacagttccttccagagtccatgaaagtcctgttctgagtccacagagaaaggcatcaccatcaactaatgatgaaactgcaaaggctgacactcctgctgcaccagcctcagattttctccattcagctacaggaaatgccagtgatgtggtgggtgctgagatgacagaacttggattggcgaaaccggtgcaagttgagtcttctgttgtgcaggactctgatgcatcggtgcaacagcacacaagtgagggtttaccatcccagggtcaagcttcacacttggaagctgctgctgataagttggtcggctctgatggtatagctgcatcggttgatgaaacggtaactgtcaatgcaaccattgaagatgtacctttggctgtaaatgattcagagccatgtgttgatggttctgctggaccatctgtggtgaacctggtacagatggatggtccattatttgatgcacaaggtacagtactaagtgcagattttcaacatgaagtccaagcaatgcaacaagtagtggcatctaacgatagactgaatgaactatcaacttcagaatttgccgagcctgagaaaatgctgacagctccgaatgctgaattcaatcatgcgattgacttggggcagataactgcggaaaaaggaacaattgaatctgatggaagtaacataataggcagcctaacaagcagaaaaagacacctggaatatagcttaccagctttagagagtgagaccactaaaaagttgcctagccgaccacatgttaaaagaaccaatgattttgttcctcatgatgatgatatactggcatctattttagtcggtaggacccctgggttcacacttgattcaacaccactaccaccaagggaatcatctctgaaacgcccaaggttggggtcgaagatgggtacactcaagagaaaagtgcagatagatgatgccatggtcctgcatgctgatactatacggcaacagttgatcaatactgaggatatacggcgcattcgtaaaaaggctccatgcactcgttccgaaatatggatgattgagaaaggttcactggaagatgatttattccacgagcccatcttttcctgcctatctgaggagctaaacaatttacacaatcggacatatgagactattgtacaccctgctgttcagagaatggaactacatggtcaattagacatgcctgaaacaataccagaatatagaaatattgctgggtttggttctgctactattgatggcccacttcacataccagatgggattcaatcagatgccatgttgtcaggcgcaaatgttgcatatggcgctacagctgcttttggtttgcaaattcctcctgactaccaggttaaccgtgcatctaatgattttgttgtcggcactcagcttcaagaggtggctaaaccttttattggtaatgagcacgaagtggcacctcctgacagagagcatgctcaagtagatacattgtatagtgaccgttttcaaggtgttccatctgatttgcagaggagtaatgatgcaaatgtttctagtcaagatgtggttctagataactctggccaagcttgtgctcatgcagtggacggcatgacaagggagtttaatcattttgttcatagagacgctaatctttttgggagtactgaggtccctgcttctgagattactggggtggaatataatcaagatgcctctggttttcctcgacaaacagaggatgacaacacggtggagtataatcaagatgcctctggttttcctcgaccaacggagggtgggaatgcggtggagtataatcaagatgtctctggttttcctcgaccaacagaggatggaaaaacggtggagtataatcaagatgcctctggttttcctcgaccaacagaggatgaaaacacggtggagtataatcaagatgcctctggttttcctcagccaaccgaggatgaaaacacggtggagtataatcaagatgcctctggttttcctcggccaacggaggatgaaaatgccgcgtctgctacgggagataattctggcttccaagaaaacaacacgggttctcatatggatctggatatgatgaatgactatgaagtgaaggaatgcaacgattttgggagtgcgattcatggcgttgatacagattttctgaactatggtgacgacgacaacgacgacgacttcgtcgacgccgacgagccaaatcccagtgagttccagtctctcgacaacagcggctggtcttctcgcaccaggggtgtcgcgagatatctcaagactctgttcgacgaggagtccggtctggggaggaagagcgtcgccatcgaccatctggtgcgcgggaagacgcggaaggaagcgtcgaggatgttcttcgagaccttggtgctgacgacgaaggactacatcagcgtggaccaaccgaaccccttcgactttgtgagcgtgaagccaggcccgaagctgctcatgtcagagttctagttcaacaaagtcagcgtaccctggcgcgatacattccctcttaccattgtatccatcatcacaccgaccaacaacaacaccgcagatatccccccccccctcctcttccaaaaccatttttgtgtatgttgttgcagttcccctcccctgtagcatctggtgcgctgatccgttgttgttgccagggcgtctgtccgagtaggatggtggttgtgttgtaccgtcggctatccaacagtatatagtagtagtatgattttagcgacactcggtgaagcccgccatgtaatctgctagggttcatgctcccctaagttactgtcgctttagactggctaaagcccgtagaggaattgtatacgagaaggacagggacagcccgagatgatgaatgatgtattgatgtgcctgttgactatgtgaggactgacggttttaactcaataattcaagtgacctttcctgtgaa

SEQ ID NO: 148076 - DNA, 632 bp, Zea Mays
cgagcgagcggagggaggaagaggtcgtcgacaagtccaaaatactccacctcctccatgtaagctgtatcgatccactacaacaccgtcctctctccctcctcgctcctctctggctctccctctctctctcctcggagatctctcgatcacacacactacgccatacagacgcagcttttgctgttgctcgctcttctacctgcccctccttccatcgcaatgccatctccccggcaattctcgcggctgctgttacccatcttgctcgccaccacttgctgcgtcgatggaggcaacggcgccgacgctcccgcgaccgcgaggaggcagctccaccagcccttcttcgtcccgaaccagcccgggcagccgaccgcgccgccgccgttcttccccacgatgccggcggcggtgacgacgcccccgcccccgcccccgcccccggcgccggcggggcaggaccagccgacgtaccctgctctcgtgctccccaacaccggcggcgccacgcctccggccggcagctcgcacgggtccagcaagtcctccaagctcgtcccggccatactgctgccgctcctcacggtggccgtgctcgggctgtccgtcgccttcttcttctcgcaccg

SEQ ID NO: 148077 - DNA, 1626 bp, Zea Mays
ccggctccggctgtagggccaccgccgccacctcctccttctccgccaccaccaccgccgccgccggtgggctactgggagagccgtgtccggaagcccgacacgtccaaagaaacccgttcgccggcactgtcgccgccaccacaagctgccaacttcaggagcgtccctgcacccaccgatgcgttctcaagccgtccgcccgagagctccgaccaaggcgacaagtcggaggacacgacgccacggccgaagctgaagccgctgcactgggacaaggtccgggccagctccgaccgcgtcatggtgtgggatcagctcaagtccagctcattccaggtgaacgaggagatgatcgagacgctgttcatttgcaacccagccaatgcgccggccaaggaggccacgaggaggccggtgctgccgacgcccagggccgagaacaaggtgctagatccgaagaaggcgcagaacattgccatcttgctgcgcgcgctgaatgtgaccaaggaagaggtctgcgacgcgctctgtgaaggtaacacggagaactttggagcagaactactggagaccttgctgaagatggctcctaccaaggaagaggagatcaaactgagagaattcgaagaggagacttctccagtcaagcttaacccagctgagaagttcctcaaggcagtgcttgatgtgccttttgccttcaaaagagttgatgcgatgctatacatcgcgaacttcgattcagaggtcaattacttgaagaagtcgttcgagaccctcgaggctgcttgcgacgagcttagaagcagcagactatttcttaagctacttgaagcagttctcaagaccggcaacaggatgaacgttggcacaaaccgcggggacgcgcacgcgttcaagctcgacactctgctcaaactggttgacgtcaaaggcaccgacggacacacgacccttctgcacttcgtcgtgcaggagatcatccggacggagggctcccgtcagtccgccagcgcccaaacaaccccaagaacccaggcgaaccctctgcgagaagagctcgagtgcaagaagctaggcctccaggcagtggccggcctcgccaacgagctgagcagcgtgaagaaggcagccggcatggactcggacgtgctgagcagctacgtcaccaaactcgccggaggaatagagaaggtcaccgaggtggtgctgcggctgaagaacgaagggacggagtcaagggacggcgcgtggcggttccacgacaggatgcagaggttcctgaagaaggcggacgacgagataatcaggatccagtgccaggagagcgtggcgctgtcgctcgtgaaggagatcaccgagtacttccacggcgactccgccaaggaggaggcccacccgttcaggatcttcatggtcgtcagggacttcctcgcggtcctcgaccaggtctgcagggaagtgggcagggtcaacgagcgtaccatcgccagctccgtgcgccacttccccgtgccggttaacccaacgacgccgcagctgttcccgcggcttcatgctttgagagctgggttctccgacgacgacgacgagagttcagccgcttcagtgtcgtcgccgtga

SEQ ID NO: 148078 - DNA, 1465 bp, Zea Mays
actaattggacccccgcctccctcggtcccttccgaagcaaaggatcagatgcccaaaattcccggctcgaagactgcaggcatcggacgcgccccccgccgagaagctactcgaatcccctccaaaattcggaggcgagagccactgatctatcgcaaaacccatcaaattacacaattcaaatcagccaaccccacctacagccaccaattcgtgcgcatcaagtctagccccctaccccttcgcaatcagtgaacccccaatccacacacagcctgcgaatcgctggatcaaaatttggtctcggactctcgatccaccattccccgaggaaggagatctcagtcaaccgaataagtctcgggaagctctgtgttggaaacatggggaaaccgctgatctacgagatactggagaagccggcgagcagcagcgtcatcggcatctgctctctgatctggtggctcatccagaagcggggcatcgggtacgcggacgtcgggctgagctacgaggccgcggtggacagcgggcagtactggcgggtcatcacctccgccttctcgcacgtcagcgtggtccacctggtgttcaacatgagcgcgctgtggagcctcggcgccgtcgagcagctgggccagatcgggctcggcgtcgagtactacctgcactacacgctcgtcctcgtcgtgctgtccgggctactggtcctcgggttctaccacgtgatgatccagaggttcaaggtggagtacttcaggagggtcaccgcggtcgggtactcgtgcgtcgtgtttggctggatgacaatcctggccgccaagcaaccgtcgtccaagctgaacatcttcggggttctctcactgcccatcagcttcgcgccgttcgagtcgctgatattcacatccatcatggtgccacaggccagtttcattggccacctgtccgggataattgttgggtactcgattgcctggggtctggtccatgggatgaacaactactgggcagtcaccatgcttggctggactgcacttgtgtttgtcttgagcttgaagcgcacagggtctatggagctgagttttattgagatcgagccagtgacggacccctcgctgccttctgttggtgtggtagccaccagaaatggtagaagtagaactctgcaaatggatgccttgtctggaagaagagttgcagacattgtataacacgcagagaggaaatgtttgaggaatcctgagtttttgttctgaaaactgtatcatgtcgacacaatgatacgtattgggtttggaattctggtgtcgctgatgtctttggtcattgctggtgtaaaggaattcttcgtcttggccttccagatgcatgttcattttgaatagaaatgaattctttgcgctagttgcctagttaccatgtaatgtaaagagattttttttccagtttaactggattccttca

SEQ ID NO: 148079 - DNA, 867 bp, Zea Mays
ccactagcactttggcaggagtggaagctattcatttcaatatttcattgcccatgccccacgaacccaatcactcacccatcattggaccccattaataaataaacaaacaaaccgcaaggctgcctcgtttttgttgtatttcttctcccctcttcttgttcttgcagttgttggtgtcctcggagctaaaaaaaagcccccccgccttttggctcattgtcagactttgccacctgctccaagaaagcttcttggagatggtgcgcgccgagaagctcgccggcgatggctgctccggcggcgaaggccaagtggaggtggaggtcggcatggggatggacgggaagggggtcacagagtgccggatatgccaggaggaggggaaggaggccgctatggactcaccctgcgcctgcactggcgctatggactaccatgtcgtcgtccctgctgagactgagatggtgtggtctgcttctgttttgagtgtcgtgtgcttgcttctgtttgattttgatcgcaagactcctttttcttctttcgttcaggcgactcttcagttcaccggattctttctgccttgctatgtaatagctcgctcttgctacgctttgcagcaccggaaacgaagacaggtacacttcctttttcctacaagtcctgttgatacaactcttccgtttgatctattgacgcgaacgtccttctgcctgacttgtaagctgtaagagactgacgtttatttactactggaaccctgtgctgcttcttgcaaggggagtctcaagtacatgcgcagtggtctgtctatcctacagaggggacagtcctaacttgttgtgctgcctatctctacgtacaggt

SEQ ID NO: 148080 - DNA, 174 bp, Zea Mays
ctcggcgctaaattggagccttgcgggaggccaagaggcttcgcccgggtctctggttcgcgttggtggcgaatacggggcaggtgggtgaccggagcacgcccaatttgtcttcgccgtcgtgcattcgcggatcgccgtggaccgaccgaaacgacgccggactttgggtag

SEQ ID NO: 148081 - DNA, 1390 bp, Zea Mays
cttcgtctccacggtccactatataacccgccgcctcgccacatcaccagaaatttccccacacgcgcccacctcctccggtcctcccctctagtcctctctcccgaccccacctctgccgtccgtgcgtccgtccggcaaccgcgacgcaacaatggcggccgggcgagagctggtggtgagtttcggcgagatgctgatagacttcgtgccgaccgtggcgggggtctcgctggccgaggcgccggccttcctcaaggcggccgggggcgcgcccgccaacgtcgccatcgcggtctcgcgcctcggtggcggggccgccttcgttggcaagctcggcgacgacgagttcggccgcatgctcgccgccatcctccgcgacaacggcgtcgacggcggcggcgtcgtcttcgacgcgggcgcgcgcaccgcgcttgccttcgtcaccctgcgcgccgacggcgagcgcgagttcatgttctaccgcaaccccagcgccgacatgctcctcactgccgacgagctcaacgtcgggctcatccggagggctgcggtctttcactacggatcaataagcttgattgctgagccttgccggacagcacatctccgtgccatggaaattgccaaagaggctggtgcactgctctcttacgacccaaacctgagggaggcactttggccatcccgtgaggaggcccgcacccagatcttgagcatctgggaccaggcagatatcgtcaaggtcagcgaagtcgagcttgagttcttgacaggcatcaactcagtggaggacgatgttgtcatgaagctgtggcgacctaccatgaagctgctcctggtgactcttggagatcaaggatgcaagtactataccagggatttccatggagctgtcccttccttcaaagtacaacaagtcgatacgactggcgcaggcgatgcgtttgttggtgcgctgctccgaaggatcgttaaagatccatcctcgctacaagacgagaagaagcttgtagagtctattaaattcgctaatgcgtgtggagcaatcaccgccacgaagaagggtgcgatcccgtctttgcccactgaaactgaggtcttgcagctaatagagaaggcatagatagatcactgtaattgctttggttttcactagcttccacttctgcaaattgcaaaatgtattgtattctgatctggaacagaagaagtgggtgctccatcttacctgccattttttgcttgccctagttcctaagggtgttttgttttagaactctacttgcaataagtagagcccttttatatttatgtatatcagcatgcgctcatttgatacggtcatcgatcaccgaacagagcacactgcaaagtgcagacttcgaac

SEQ ID NO: 148082 - DNA, 803 bp, Zea Mays
agagaggaccttcttcccgcgccagtctacggaagatggaacttcaccgagcaggtactccccgacgacctgatcaagataggaatggccgttccagatccgtcgagcccgtacaaggtgctgctgctgctgatggaggactacccgtacgcgtcggacgggctggccgtctggcacgccatcgagcagtgcgtgacggagtacctggccatctactaccccaacgacggcgcgctgcaggccgacgtggagctgcaggcgtggtggaaggaggcacgcgaggtcgccacgccgacctcaagcctcaaggacgaaccctggtggcccaagatgcgcaccacggcggagctggccaaggcctgcgccaccatcgtctggatcgctgaaaacatcagctcatttacaaattgagtaattccatctttcattgacaagccctgaaaccgtgaggaaccaaactgaggacgtgtgccaaggacggcggcggcgggaaggagggaggtagggatgtacggcataccagttaaggtcccctgtgatcggcacgaggtcggggttgaccatggccatcgccgggccgacataccgccggaagtcgtaggcgcgctccgcatggtgcacgctgaagtggagatccgtgagctggggctgggccacccgcacaaccccgtccggcacaccgccgcaccggacacctccatcacctctctctcgtcacgggacatggcggacggagccgcggcagcggcgatgagaaccagtagaacggggaagaggagccgcttgccgcgcgtctccatggc

SEQ ID NO: 148083 - DNA, 2049 bp, Zea Mays
acccactccttgaccccgcttcgcagcatcatgcttctgctcctcctcatatacctcctcgtcgttcgtccctgtcctaagataggacccaaatactctctccattgcttcccttccaaacaggtgtaggaagcaagatcgatcgatcgatcgagagaacaaaacaaaagggtatctgcagttcctgcagagatatggcgccggcggcggctctggctctgagtctgctcctcgcgttcctggcgatcgggccctgcgccgccgccgacagcatcgacctgtggccgatgccgcagtcggtgtcgcacgggacgcagaagctctacgtcaagaaggacatcaccatgtcgatggtggggagcacgtactccgacgagaaatcgatcctcaaggacgcgttccagcggatgcttgacctgatcacgctgaaccacgtcatcgacggaatcgacccaggctcctcggttctcacctgcgttaatgtggttgtgcgtacacctgaagacgagcttagctttggggcagatgagtcgtataacctgactgttccaacgacaggagacccactgtatgcacagatccaggctcaaacagtgtttggagcgcttcaagccttgcagacgtttggtcagttatgttacttcgatttcacatcgcggctcattgagctcaactcggctccttggataataaccgacagacccaggtttccctaccggggactgcttattgataccgcgagacactacctccctgttaagacaatcaaaggagtgattgatgcaatggcttacagcaaattgaatgttctccattggcatatcgtggacgagcagtcgtttcccattgagataccctcataccccaaactgtggaacggttcatactcttattcagagagatatacgatgtctgatgctattgacattgtacggtatgccgagaagcgaggtgtaaatgtgttggctgagattgatgttcctggccatgcccgctcatggggtatcggctacccagcattatggccatcagaaagctgcagagaaccacttgatgtcagtaaaaacttcacgtttgaagtcatcgatggcattctttcagattttagcaagatttttaagttcaaatttgtccacttaggaggtgatgaagtcaacacaagctgctggaccagaacaccccatattgaaggatggttgaataataaccatatgaacgtatcagacgcatacagagattttgtattgagatctcaaaagatcgcgatatcacatggctacgatgtcataaactgggaagagacatttaacagttttggagacaaattggaccctaaaaccgtggtgcataactggcttggagaagatgtagcgcccaaagtggttgctgcagggcataggtgtatagtaagcaaccaggataagtggtacctggatcacttggatgcctcatgggaaggattttacatgaacgagcccctaaaaggtatcaatgatacaaagcagcagcaattggtcattggtggtgaggtttgcatgtggggtgaggaaattgatgcctcagatattcagcaaacgatttggccacgtgccgcagcagctgcagagaggctgtggactccgattgagaagctcgcaaatgacacaagatttgtcacgtcaagattggcgcgcttcaggtgtttgctgaaccaaagaggagtagctgctgcgccattagcaggctatggtcgtgcatcaccatcagaacctggcccctgtgtaaggcaataaatgtccataactaaacggaaagtgacgattccttgacacaaaaaaaaaaaataggattcactcttacccctgttatacattcagcagagtgcacgtcagatagtaggtttagggttgcgtagaatgtttcatgttcttttttgctcctctctgatccaatttccttccacaataatttggatgtctatgcaatctacatggtatggtgatgaactgtaaggtcccgtttgtttcctttcattttgaggaattggaatcttactaatggaataagcta

SEQ ID NO: 148084 - DNA, 2852 bp, Zea Mays
gcagccatggcgactcgcgccggacgactgcccaccactccggcgcccgctcttctgctcctcctcgccttcccgtttctgctgcagggagttcttccgtcgcgagccggggacaccgtcgccgccggccgcccgctgtccggcggacagagcctcgtgtccaagcgtggcaagttcaggctcggattcttccgcccaggtgcaacagacaactcgagccagcgctggtacctgggcatctggtacaaccagctctcggtgcacaccacggtgtgggtggcgaaccgggggacgcccatctccgacccggagtcctcgcagctatctatctccaaggacggcaacatggtcgtcctcgaccacagcaggtcgtctaccgccgtctggtccaccaacgtcaccaccggcgtctcctccacgtccacggtcggcgtcatccgcgacaacggcaacctcgtcctggcggacgcgtccaacacttccgcggtgctgtggcagagcttcgaccactcgggcgacacgtggctccccggcgggaagctgggccggaacaagcgcacgggcgaggtcacgcgcctcgtggcgtggaaggggcgcgacgacccgacgccgagcctgttcgcgctggagctggacccgcgcggctccagccagtacctgctcaactggaacgacagcgagcggtactggaccagcggcaactggacggggacggcgttcgctgccgtgccggagatgacgtccaccggcgcgtcgcccgtgtccgactacaccttcggctacgtcgacggcgccaacgagagctacttcacctacgacgtcgcggacgagtcggtggtgacgcggttccaggtggacgtgacggggcagatccagttcctcacgtgggtggcggccgccgcccagtgggtgctcttctggtcggagcccaagcggcagtgcgacgtgtacgcggtgtgcgggcccttcggcctgtgcaccgagaacgcgctgccgtcctgcacctgcccccgggggttccgggagcgcgacctggccgagtggatgcaggacgaccacaccgcgggatgcgccaggaacaccgcactccagccttgcggcgccggcgccgccgctcgagacgggcagaagcgccgcagggacgacgataggttctacacgatgcccgacgtgaggctgccgagcgacgcgcggagcgcggcggccgcgagcgctcacgactgcgagctcgcgtgcctccgcaactgctcttgcaccgcttactcctacagcggcggctgctcgctgtggtatggggacctcatcaaccttcaggacacgacgagcgctggcagtggcaccggaggcggcagcatctcgatccgcctcgctgcctccgagttctctagcaacgggaacaccaagaaactggtcatcgggctcgtcgtcgcgggctcctccttcgtcgccgcagtcaccgccatcgttctggctaccgtcctcgttctaaggaaccgaaggatcaagtcgttgaggacggtccaaggatccctggtggcgttcacgtaccgcgacctgcagctggtgaccaacaacttctcggagaagctcggcggcggcgccttcgggtccgtgttcaaaggggtgctgcctgacgcaacgctcgtggcggtcaagaagctggaaggcgttcggcagggggagaaacagttccgcgccgaggtgagcacgatcggcacgatccagcacgtgaacctgatcaggctgctcgggttctgctccgaggggtcgaggcggctcctcgtctacgagcacatgccaagcggctctctggacaggcatctgttcgatcgggaccagcagccgggtgtcctgagctgggacgccaggtaccagatcgctctcggggtcgcgagggggctggactacctgcacgagaaatgcagggactgcatcatccactgtgacatcaagcccgagaacatcctcctggacgacgcgttcgtccccagagtcgccgacttcgggctcgccaagctcatgggtcgcgacttcagccgcgtgctcaccaccatgcggggcacggtggggtacctggcgcccgagtggatcgccggcacggccgtcaccaccaaggcggacgtgttcagctacggcatgatgctgttcgagatcatctcgggccggaggaatgtcggccagcgggcggacggcacggtggacttcttcccgtccacggccgtcaaccggctcctcgacggcgacgtgaggagcgcggtggacagccagctcggcggcaacgcggacgtggccgaggtggagcgggcctgcaaggtggcgtgctggtgcgtgcaggacgcggagagcttgcgcccgagtatggggatggtggtgcaggttctggaggggctggtcgacgtcaatgccccgcccgtcccgaggtcgctcatggtgctcgccgatccgtccaagtacgccgttgagttcttctcaggtttgccgtcgacctgagattgggccgctgcctctgcctgttaggggcatcaactttgatcagtagtgcatggtgtatatacgagctaatgagttcgtcaagaacttactcgtgccacgaaccctgtggcggtatagaacttctgcacgtagccaagaagatttcggatctgttagggcttgttcggttacctctcaatccatgtggattgagagtgggattagatggttttaatcccaaacaagtcaaacttcttctcaattttttccaatctcatccaatccatgtgtattaggaataaccgaacaagcccttaaggtgccaaaaaacgtcacatatttcttgccacacgtgcatgaggttatatgctttggagaat

SEQ ID NO: 148085 - DNA, 1284 bp, Zea Mays
gagctctgctatccttgcacagggctccgaacacgcgtttccatggctctcctccgactccaagagcagtgctcgctcctccgaatctccagctcccaccacccaaaccccatcgatatcccaagaaatcctcgcaagaaccaacttttagtgcccaatgcggccaagattgccaacgcctccgaaattccggttcctcgcatccccactagcacttccaaggccgcaatcctggcccggaaggccgcgctttggcgggacgcccttgtccccgttgccgccgccttcgcgtcctgtccgctcccttccctcgcggcggagggcgacgggaaagtgagcctcgagtccatcgtggtggcaatcgacgacttcaacaatcgcaaccctttcttcgtggctggggtcgtgttcgtgtggctagtggtgatcccgctcctgcaggagtacgtcttcaagaagtacaagcccgtgagcgccatcgacgcgttccgcaagcttcgcgacgtgccggaggtgcagctgctggacatcaggcggggcaagagcgtgcggttcatggcgccaccgaagctgaagcttatcgacaagagcaccgtgcaggtcgagttcgacgaggaggacgagaaggggtttgtcaaggaggtgctagcgaggttcccagacccggcgaacaccgtcgtctgcgtccttgacaactttgatggtaattcttcgaaagttgctgagctactagttgagaatggttttaaggaagcctatgcaattaaagggggcttgagaggtccggaagggtggcaggcggttcaagaaaactatcttcccccatctgtccatgttttcccgaagaaaaaaaggggcgcgaaattagctcacacagatgcaagcaatgatggaacatacgttcagcaggagggaagcgaggaatcatcggctcctccaagcaggtttgtagtcaacacaagcgctgaatccaaagatgtttatgaaaatcccaatggaagtacaactgctgcaaaacatgcaactaggagaccgttatcaccatatccaaattaccctgacttgaagcctccatcatccccaacaccatcaaaaccgacgaattaagagcaatgcaggacaataacatgtgtggaactcaaaaggtcagaagtagttgtctcctgcacaaacatttttgtatacttccaaccgtggatgtccaggagattgactgggatggcatggaagaggaccagcagtggtgtttggagctcttgctgctgttgaggccatggtgaattc

SEQ ID NO: 148086 - DNA, 1175 bp, Zea Mays
gagctctgctatccttgcacagggctccgaacacgcgtttccatggctctcctccgactccaagagcagtgctcgctcctccgaatctccagctcccaccacccaaaccccatcgatatcccaagaaatcctcgcaagaaccaacttttagtgcccaatgcggccaagattgccaacgcctccgaaattccggttcctcgcatccccactagcacttccaaggccgcaatcctggcccggaaggccgcgctttggcgggacgcccttgtccccgttgccgccgccttcgcgtcctgtccgctcccttccctcgcggcggagggcgacgggaaagtgagcctcgagtccatcgtggtggcaatcgacgacttcaacaatcgcaaccctttcttcgtggctggggtcgtgttcgtgtggctagtggtgatcccgctcctgcaggagtacgtcttcaagaagtacaagcccgtgagcgccatcgacgcgttccgcaagcttcgcgacgtgccggaggtgcagctgctggacatcaggcggggcaagagcgtgcggttcatggcgccaccgaagctgaagcttatcgacaagagcaccgtgcaggtcgagttcgacgaggaggacgagaaggggtttgtcaaggaggtgctagcgaggttcccagacccggcgaacaccgtcgtctgcgtccttgacaactttgatggtaattcttcgaaagttgctgagctactagttgagaatggttttaaggaagcctatgcaattaaagggggcttgagaggtccggaagggtggcaggcggttcaagaaaactatcttcccccatctgtccatgttttcccgaagaaaaaaaggggcgcgaaattagctcacacagatgcaagcaatgatggaacatacgttcagcaggagggaagcgaggaatcatcggctcctccaagcagtaccctgacttgaagcctccatcatccccaacaccatcaaaaccgacgaattaagagcaatgcaggacaataacatgtgtggaactcaaaaggtcagaagtagttgtctcctgcacaaacatttttgtatacttccaaccgtggatgtccaggagattgactgggatggcatggaagaggaccagcagtggtgtttggagctcttgctgctgttgaggccatggtgaattc

SEQ ID NO: 148087 - DNA, 1288 bp, Zea Mays
gagctctgctatccttgcacagggctccgaacacgcgtttccatggctctcctccgactccaagagcagtgctcgctcctccgaatctccagctcccaccacccaaaccccatcgatatcccaagaaatcctcgcaagaaccaacttttagtgcccaatgcggccaagattgccaacgcctccgaaattccggttcctcgcatccccactagcacttccaaggccgcaatcctggcccggaaggccgcgctttggcgggacgcccttgtccccgttgccgccgccttcgcgtcctgtccgctcccttccctcgcggcggagggcgacgggaaagtgagcctcgagtccatcgtggtggcaatcgacgacttcaacaatcgcaaccctttcttcgtggctggggtcgtgttcgtgtggctagtggtgatcccgctcctgcaggagtacgtcttcaagaagtacaagcccgtgagcgccatcgacgcgttccgcaagcttcgcgacgtgccggaggtgcagctgctggacatcaggcggggcaagagcgtgcggttcatggcgccaccgaagctgaagcttatcgacaagagcaccgtgcaggtcgagttcgacgaggaggacgagaaggggtttgtcaaggaggtgctagcgaggttcccagacccggcgaacaccgtcgtctgcgtccttgacaagtagctttgatggtaattcttcgaaagttgctgagctactagttgagaatggttttaaggaagcctatgcaattaaagggggcttgagaggtccggaagggtggcaggcggttcaagaaaactatcttcccccatctgtccatgttttcccgaagaaaaaaaggggcgcgaaattagctcacacagatgcaagcaatgatggaacatacgttcagcaggagggaagcgaggaatcatcggctcctccaagcaggtttgtagtcaacacaagcgctgaatccaaagatgtttatgaaaatcccaatggaagtacaactgctgcaaaacatgcaactaggagaccgttatcaccatatccaaattaccctgacttgaagcctccatcatccccaacaccatcaaaaccgacgaattaagagcaatgcaggacaataacatgtgtggaactcaaaaggtcagaagtagttgtctcctgcacaaacatttttgtatacttccaaccgtggatgtccaggagattgactgggatggcatggaagaggaccagcagtggtgtttggagctcttgctgctgttgaggccatggtgaattc

SEQ ID NO: 148088 - DNA, 353 bp, Zea Mays
agatatgtacactcatttatatcctttgtttcttcactctttatgatgcaaactgacaagtgaccacaaaaactatcatgcaactgtacaaggtgttacaggcctttgagtttattgtgcagtaccctgacttgaagcctccatcatccccaacaccatcaaaaccgacgaattaagagcaatgcaggacaataacatgtgtggaactcaaaaggtcagaagtagttgtctcctgcacaaacatttttgtatacttccaaccgtggatgtccaggagattgactgggatggcatggaagaggaccagcagtggtgtttggagctcttgctgctgttgaggccatggtgaattc

SEQ ID NO: 148089 - DNA, 320 bp, Zea Mays
tcagcggcatctagcccgtgggcaatgtcgacgcccatgccgccggcgcttctgatgccggtggcgtacgccaccggaggcgcgcccgtgggagcggcggggagagggccgtcgtactcgtacggcccggtgatctccatgctggccgtcgtggccgtgctggcggccgccgcggtggccgtgggccggctctgcgccgtggcgcccacgacctggaggcctaggtggagcgcgcctgcgggccttgcgtcggcgccaccgcgctcgccgaggcaacggacgagggaggcggcggcggagcccgcggcaccggaatagct

SEQ ID NO: 148090 - DNA, 2089 bp, Zea Mays
atggctgcaagaaccctggtggctagggcggtagcattcgctgtggcccccatggtttcgctggctggttcccagatctcctccgtagcgctgccaaggacacgcaccatctgcatcgacttccacctccttgagcttgctgccaccacaggatttggtgaggaaggcgacgctggatgtgggacagcgtcattggcttctttgtgtcttgctttcgctttggcccgtgcggacgcgctccgccctgggctagataacctcgaggcccggactgggctaccgccgttcacttcacgcagcgtccgcgctgtctctgtcctcatctccgcgaagacaggctaccgccgccgccctacgccaggtgccgaggcctctctgtctcttcgccggcgacgatccaatagccagcagcagaaggaggacaccatgaagcttgacgtgaatgcccttcgctacctcgccaaggacgacttccgcgtccttaccgccgtcgagatgggcatgcgcaaccacgagattgttccagcagaacttgtcgacaggatcgccagactgaagcatggaggcacatacaaagtgctgaggaatcttttgaagaacaagctagtgcatcatgatgccactaaatacgatgggtatagactcacctatctaggatatgacttccttgccatcaagactttggttaatcggggagtttttgcttcagttggccgtcagatcggtgttggaaaggagtctgatatatttgaggttgccacagaggatggtacagtactcgccatgaaacttcataggctgggaaggacatcttttagggctgtgaaatctaaacgtgactatctaaggcacagaaggagctttaattggctgtacctctcacgacttgcagccttgaaagaatttgcctttatgaaggctttaggggaccatggtttccctgttccagctgctgtagattgcaatcgccattgtgtgatcatgtcacttgtgcagggatatcctcttgttcaagtgaaagagttacaaaatccagatgacgtttttgacacaattcttggtcttattgttcgtttggcagagcatggactgatacattgtgactttaatgagttcaatatcatgattgatgatgatgaaaaaattacggttattgattttccacagatggtatctgtttctcatcgtaatgcccaaatgttttttgaccgagacattgaatgtatctacaagttctttaacaaaaggttcaatctgacatcagagaaaaatgaagaacaagctgggtctgaaagtgatgatgaagggaatagcagaccttcctttttgtctgtgaaaaagactgctggttccttggacaaggaactagctgcaagtggatataccaggaaagagcaagtggagatggacaagtacattgaggaagatgctgaaagacatgattccagctcagatgatgatgacgacgacgacgacaatgacaaggacgattctgctgagcctgattgtaatcttgcctcaagggattcagatgtgcctggaactttttctgaagagaatgaaacaagctgtagcagtgagaagagattggaaagtccctcgggtgacaatggagaggctatgaaaccgcttgaatctgagggcaagacgctttcccagaaagacgacaacaatgatgatgactcatcagaggatgctgatgaagaagaagaagatgccgagctcacgaaacaattgaacaagcaaaggaaaaaggcaatagcagctgccagtggtcggagaaggccagtgtcgtccaggaacgcctgcaaggacaagggtaagggcaccatgaactccaaaatccagaggcaggcgtgccagtggtgatggtcactcgaatgtctgcagtgcctctttcgacaatcgtaaagtagaccaagagtaggattttccatgagggtagaaccgagggatccctgtactagaatcaactctggttttattcttttatcacatgtcgtatacctttttgtacacggttatggtgagatcatttgagttatgcttgtgtttataccaactgaatagctgagcgtactgccttctt

SEQ ID NO: 148091 - DNA, 1884 bp, Zea Mays
gactgggctaccgccgttcacttcacgcagcgtccgcgctgtctctgtcctcatctccgcgaagacaggctaccgccgccgccctacgccaggtgccgaggcctctctgtctcttcgccggcgacgatccaatagcgtgcggtggtctgccttggctgcagccagcagcagaaggaggacaccatgaagcttgacgtgaatgcccttcgctacctcgccaaggacgacttccgcgtccttaccgccgtcgagatgggcatgcgcaaccacgagattgttccagcagaacttgtcgacaggatcgccagactgaagcatggaggcacatacaaagtgctgaggaatcttttgaagaacaagctagtgcatcatgatgccactaaatacgatgggtatagactcacctatctaggatatgacttccttgccatcaagactttggttaatcggggagtttttgcttcagttggccgtcagatcggtgttggaaaggagtctgatatatttgaggttgccacagaggatggtacagtactcgccatgaaacttcataggctgggaaggacatcttttagggctgtgaaatctaaacgtgactatctaaggcacagaaggagctttaattggctgtacctctcacgacttgcagccttgaaagaatttgcctttatgaaggctttaggggaccatggtttccctgttccagctgctgtagattgcaatcgccattgtgtgatcatgtcacttgtgcagggatatcctcttgttcaagtgaaagagttacaaaatccagatgacgtttttgacacaattcttggtcttattgttcgtttggcagagcatggactgatacattgtgactttaatgagttcaatatcatgattgatgatgatgaaaaaattacggttattgattttccacagatggtatctgtttctcatcgtaatgcccaaatgttttttgaccgagacattgaatgtatctacaagttctttaacaaaaggttcaatctgacatcagagaaaaatgaagaacaagctgggtctgaaagtgatgatgaagggaatagcagaccttcctttttgtctgtgaaaaagactgctggttccttggacaaggaactagctgcaagtggatataccaggaaagagcaagtggagatggacaagtacattgaggaagatgctgaaagacatgattccagctcagatgatgatgacgacgacgacgacaatgacaaggttggtgatgctgtgtctttggtttccttgaagatagaccaggacgattctgctgagcctgattgtaatcttgcctcaagggattcagatgtgcctggaactttttctgaagagaatgaaacaagctgtagcagtgagaagagattggaaagtccctcgggtgacaatggagaggctatgaaaccgcttgaatctgagggcaagacgctttcccagaaagacgacaacaatgatgatgactcatcagaggatgctgatgaagaagaagaagatgccgagctcacgaaacaattgaacaagcaaaggaaaaaggcaatagcagctgccagtggtcggagaaggccagtgtcgtccaggaacgcctgcaaggacaagggtaagggcaccatgaactccaaaatccagaggcaggcgtgccagtggtgatggtcactcgaatgtctgcagtgcctctttcgacaatcgtaaagtagaccaagagtaggattttccatgagggtagaaccgagggatccctgtactagaatcaactctggttttattcttttatcacatgtcgtatacctttttgtacacggttatggtgagatcatttgagttatgcttgtgtttataccaactgaatagctgagcgtactgcct

SEQ ID NO: 148092 - DNA, 2354 bp, Zea Mays
catggagcacccacgcatggatcaaaatcctcccccaaaacgcgacgaaattctccgcgagcaaaatataaagtttataaacccactcctccccttcccctgttccctctaccaccaccaccggcaccgcgggacagtctgctctcgtcccgctgcagcccgtccccgacccggaaccctagcgactgccattgcccacgcgccgctcgcccgatgaacggcgggggctctgggctggcgcccaacgccgcgcacaccgcggacgaggtcttccgcgactacaaaggccgccgcgccggcatgatcaaggccctcaccactgatgtggagaggttcttcaaactctgtgaccctggtgagtgcgctcgatctctttggttcctcgccccaggatgtggagtgatagccgaggaggcttccgtggtttttctgcttgggcttcgttgcttcggtgggggattggatcattggaagctaaatttggagaaatttcccttttctctgtctcctctaccctcactcgacatgctttggattcgattattggtagccttgcagctttcgttaatgctctgcttgtgcttgattgtagctgttcgaatttggtgagagattgaaccccatgatgacagttttatgttggttggaactgtggaaccagtggctgacatataatttttttttgctgttaggttgttacttgttagcgctatggggttgccatcaatcttgtattgatagcttgcttgcagaaaatcgctagatatttttggctgatcagtgccgtggaatttcgactgtgtactgggtgcttggtttctatatgattgcttttagctagggcaatggtggttgtgcaagcagtccttaggtgcaaacgagttctctcgtccattagattatgatctaactgaggcgtcacactttaactagtatgtctattgtcttgtctgttgttttttaggggcggtctccagcagctctcctagtatcatatcatattacctatctcacatcctatttcaaactccactctgtaaacaatgttatctgcaatacaaaacattgttttatatgacaatatgtacgatccgcgacacaacattatgctactacatagttgttggtacagtcaatttattggagtcagtgacataatgtggataggtatactgattcagcaaatcttttttctttagtgcattgatggcactgttcgactggctgaatgcatggttgttttagctgctcgctctattaatgtaattattattattgtggagtttggttgcttctcattattgtatggcgtggtctgcagtgttttctgcttcagcctcgcactcttgtttgcagcagtgcccagttggtgtaacttgttatggctaattccattggttttgaacagaaaaggagaacttgtgcctttatggctatcccgatgagacgtgggaggtgaccttgccagctgaggaagttccccctgagatccctgaaccagcattaggaatcaactttgctagggatggcatgaatgagaaagactggctggcgctagttgcagtccacagtgattcctggttactgtctgttgcattctactttggtgcacgctttggatttgacagagaaactaggaggcgactctttagcctgataaacaacatgcccacgatatttgaggtagtgacaggagcagccaagaagcaggcgaaggagaagacacctaatagtagcagcaagagcaacaggcctagttcaaaagtggtaaatgtctgtcatttcctgttgccatccagcctgaattcttgctgataacattgtgtctgcagcagtcaagagcagagtctcgttcaaaggctaaggtcccccaagacgaagaagagagcggtgatgacgatgaggatgaggaggcagacgagcacaacaataccttgtgtggaacttgcggaactaacgacagcaaggaccagttctggatctgttgtgataactgcgagaagtggtaccatgggaagtgtgtcaagatcacgccagctcgagctgagcatatcaagcagtacaagtgcccagactgcaccaacaagcgggccagggcatgagcggcaaacatcggcatcgggcgacctttgataggaaggaagaaaccacctcctggcttcaagatccctagatatggcgtaggtccctagtttacgaagtctgcattttcatgtgttcattaatatatctgctgattagctgttcgacctagcagtgtctaaaacgtgccgtgtgtcttctgtgctgagtgttgacatggggcctcctccctccagcctgtaaacgctgtcactgaaggtacctctcaactg

SEQ ID NO: 148093 - DNA, 1369 bp, Zea Mays
catggagcacccacgcatggatcaaaatcctcccccaaaacgcgacgaaattctccgcgagcaaaatataaagtttataaacccactcctccccttcccctgttccctctaccaccaccaccggcaccgcgggacagtctgctctcgtcccgctgcagcccgtccccgacccggaaccctagcgactgccattgcccacgcgccgctcgcccgatgaacggcgggggctctgggctggcgcccaacgccgcgcacaccgcggacgaggtcttccgcgactacaaaggccgccgcgccggcatgatcaaggccctcaccactgatgtggagaggttcttcaaactctgtgaccctgaaaaggagaacttgtgcctttatggctatcccgatgagacgtgggaggtgaccttgccagctgaggaagttccccctgagatccctgaaccagcattaggaatcaactttgctagggatggcatgaatgagaaagactggctggcgctagttgcagtccacagtgattcctggttactgtctgttgcattctactttggtgcacgctttggatttgacagagaaactaggaggcgactctttagcctgataaacaacatgcccacgatatttgaggtagtgacaggagcagccaagaagcaggcgaaggagaagacacctaatagtagcagcaagagcaacaggcctagttcaaaagtgtcaagagcagagtctcgttcaaaggctaaggtcccccaagacgaagaagagagcggtgatgacgatgaggatgaggaggcagacgagcacaacaataccttgtgtggaacttgcggaactaacgacagcaaggaccagttctggatctgttgtgataactgcgagaagtggtaccatgggaagtgtgtcaagatcacgccagctcgagctgagcatatcaagcagtacaagtgcccagactgcaccaacaagcgggccagggcatgagcggcaaacatcggcatcgggcgacctttgataggaaggaagaaaccacctcctggcttcaagatccctagatatggcgtaggtccctagtttacgaagtctgcattttcatgtgttcattaatatatctgctgattagctgttcgacctagcagtgtctaaaacgtgccgtgtgtcttctgtgctgagtgttgacatggggcctcctccctccagcctgtaaacgctgtcactgaaggtacctctcaactgaccatccttcattgttggtgtcgtgcagtgagtagtggccgtactctttgttcccagttcctagcatttgaattgctcaaatgcgtaccttgctgagtaaggccgttggaaaatgacgaatagctgcatttccgtg

SEQ ID NO: 148094 - DNA, 1372 bp, Zea Mays
catggagcacccacgcatggatcaaaatcctcccccaaaacgcgacgaaattctccgcgagcaaaatataaagtttataaacccactcctccccttcccctgttccctctaccaccaccaccggcaccgcgggacagtctgctctcgtcccgctgcagcccgtccccgacccggaaccctagcgactgccattgcccacgcgccgctcgcccgatgaacggcgggggctctgggctggcgcccaacgccgcgcacaccgcggacgaggtcttccgcgactacaaaggccgccgcgccggcatgatcaaggccctcaccactgatgtggagaggttcttcaaactctgtgaccctgaaaaggagaacttgtgcctttatggctatcccgatgagacgtgggaggtgaccttgccagctgaggaagttccccctgagatccctgaaccagcattaggaatcaactttgctagggatggcatgaatgagaaagactggctggcgctagttgcagtccacagtgattcctggttactgtctgttgcattctactttggtgcacgctttggatttgacagagaaactaggaggcgactctttagcctgataaacaacatgcccacgatatttgaggtagtgacaggagcagccaagaagcaggcgaaggagaagacacctaatagtagcagcaagagcaacaggcctagttcaaaagtgcagtcaagagcagagtctcgttcaaaggctaaggtcccccaagacgaagaagagagcggtgatgacgatgaggatgaggaggcagacgagcacaacaataccttgtgtggaacttgcggaactaacgacagcaaggaccagttctggatctgttgtgataactgcgagaagtggtaccatgggaagtgtgtcaagatcacgccagctcgagctgagcatatcaagcagtacaagtgcccagactgcaccaacaagcgggccagggcatgagcggcaaacatcggcatcgggcgacctttgataggaaggaagaaaccacctcctggcttcaagatccctagatatggcgtaggtccctagtttacgaagtctgcattttcatgtgttcattaatatatctgctgattagctgttcgacctagcagtgtctaaaacgtgccgtgtgtcttctgtgctgagtgttgacatggggcctcctccctccagcctgtaaacgctgtcactgaaggtacctctcaactgaccatccttcattgttggtgtcgtgcagtgagtagtggccgtactctttgttcccagttcctagcatttgaattgctcaaatgcgtaccttgctgagtaaggccgttggaaaatgacgaatagctgcatttccgtg

SEQ ID NO: 148095 - DNA, 1468 bp, Zea Mays
catggagcacccacgcatggatcaaaatcctcccccaaaacgcgacgaaattctccgcgagcaaaatataaagtttataaacccactcctccccttcccctgttccctctaccaccaccaccggcaccgcgggacagtctgctctcgtcccgctgcagcccgtccccgacccggaaccctagcgactgccattgcccacgcgccgctcgcccgatgaacggcgggggctctgggctggcgcccaacgccgcgcacaccgcggacgaggtcttccgcgactacaaaggccgccgcgccggcatgatcaaggccctcaccactgatgtggagaggttcttcaaactctgtgaccctggtgagtgcgctcgatctctttggttcctcgccccaggatgtggagtgatagccgaggaggcttccgtggtttttctgcttgggcttcgttgcttcgaaaaggagaacttgtgcctttatggctatcccgatgagacgtgggaggtgaccttgccagctgaggaagttccccctgagatccctgaaccagcattaggaatcaactttgctagggatggcatgaatgagaaagactggctggcgctagttgcagtccacagtgattcctggttactgtctgttgcattctactttggtgcacgctttggatttgacagagaaactaggaggcgactctttagcctgataaacaacatgcccacgatatttgaggtagtgacaggagcagccaagaagcaggcgaaggagaagacacctaatagtagcagcaagagcaacaggcctagttcaaaagtgcagtcaagagcagagtctcgttcaaaggctaaggtcccccaagacgaagaagagagcggtgatgacgatgaggatgaggaggcagacgagcacaacaataccttgtgtggaacttgcggaactaacgacagcaaggaccagttctggatctgttgtgataactgcgagaagtggtaccatgggaagtgtgtcaagatcacgccagctcgagctgagcatatcaagcagtacaagtgcccagactgcaccaacaagcgggccagggcatgagcggcaaacatcggcatcgggcgacctttgataggaaggaagaaaccacctcctggcttcaagatccctagatatggcgtaggtccctagtttacgaagtctgcattttcatgtgttcattaatatatctgctgattagctgttcgacctagcagtgtctaaaacgtgccgtgtgtcttctgtgctgagtgttgacatggggcctcctccctccagcctgtaaacgctgtcactgaaggtacctctcaactgaccatccttcattgttggtgtcgtgcagtgagtagtggccgtactctttgttcccagttcctagcatttgaattgctcaaatgcgtaccttgctgagtaaggccgttggaaaatgacgaatagctgcatttccgtg

SEQ ID NO: 148096 - DNA, 2314 bp, Zea Mays
acttactcctcctccctatctccaccatcctccacctccgcatcgtcgtcctcccctccgggctccggctccgcccccacccacccagccatgttccggaccttcacgaggcttcgggatgcagcggcgccgctagccgcctcggcggtacggcggtgctcaggcgtcagcggccggatccgggccgaggccaattgcccgcgctgcgacgcccacatgtcggtccaattctccctccagcagctcccggcgccccctccggcctccgccggggccattgacggcgcccagcaccacaaccacgacggggcgggcgtgtgcccggcctgccggggcgcgttcctgttccgcgcccagcggatcgacccgctgcggggcgccttcctcgagatccctgccggcgtagcggccggcgacgaggacgcggagagcggagggttcgccgatcggatcaagaggatgttgtcggagcgcccgccggacgagttccccccgctgccgcagtcgcccccgatgcagatgccgcactatccgattcgacggaagccgcggaggagaccgagggaggaaggaggaggaggaggcggcggcggcggtggcggtaacggcaacggtaacggcggggactcgtcctcgggaggggacggcactagcgcttcgcctaagagggagtggtggggtggagccagcctcggcgatgacctgccgacccctcgggagttgtgccggaggcttgatgagttcgtcatcggccaggccaaggcaaaaaaggtgctatctgtagctgtatacaaccattacaagagaatatataatgcaaatgtacagaaagaatttgctggtaattctgggtttcctgatgctggacatgatgatcaaaatattgtagaaatagataaaagcaatgtactcttgatgggcccaactggctcaggaaaaacattgcttgcgaaaacattagcacgtattgtaaatgttccattcgttatagctgatgcgacatcattaacgcaggctggctatgtaggggaggatgtagagtcgatacttcagaaattgcttgtggctgctgagtataatgttcaggctgcacaacaagggatagtgtacatagatgaaatagataaaataacaaagaaggcagagagtgcaaatgttagtagagatgtatctggagaaggtgttcaacaagcattgttgaaaatcctagaaggaactgttgtcagtattcctgagaaaggatcacgcaagaattctcgcaatgacagtatacagatagacacgacagatattctttttatatgtggtggtgcttttgtggacttggaaaagactatttctgaaaggcgccaagattcatccataggatttggggcacccattcgtacgaacatgagaagttctggagctagctgtccaatggttacctcatctttattagaatctgttgaaagtggtgatcttgtaagatatggtctaattccggagttcattggtcgtttgcccattctagtaagtttggcagctctgaatgaaggtcagctcgttcaggttctgacagaaccaaagaattcactttccaaacaatacaggaaaatgtttaacctgaacaaagttaagctgcactttactgatggtgcacttagattgttagctaagaaggcgatagctaaaagcactggtgctcgtggtttaagagccatcttggaaactgttcttttggaggccatgtatgaggttccagacgaaaaaacaggaaatgagcgagttgacgctgttgtggtggatgaggaggcgattggttccgttgataggccaggttgtggggctaaaattctccgaggggatggtgcattggaccagtacataacaagaaccaatgtgatgaatttacaggaaactaacgatggtttggccggggagctcgaggaagcgtacatgctgtctagaattgttagcttgtaatttgaaaggctggggaggaagcgtatatgctgagttctgaccaacttcgtacatcgtgtaacatgtctaccccaacacaggccggctactttttgctcacaaaatcacctgtactctgtctccattcctgttaagctctaacgagcagatagatccggggcaccttttccatgtaaacaggagttgccttttgattgagcaaccgtcctgcggagtaaattgttgcccatttttccccgctgcccccaactgggcagctcgattgtggttgacagagttgtaaagatcatcaatttactgatatgatatgataagaaggagcactttcacaaagcacaccagatcaaat

SEQ ID NO: 148097 - DNA, 955 bp, Zea Mays
ttccttcgattttttgataaatagcataactggttaaccacccagcttagggcttgttcggttattcctacgtcacatggattggattggattgtaaaattttagtagacattttgacttgctatggatttaaactcactcaatcccctccaatccacatggattgagatgaaaccgaacaagcccttattatgcttccgtctgtttccactccggatccgaagtccggacgccgtcagcacgtcctagtgtcccacacaccggcctccacgcagccacgggcatgtgggccctcaacctgaaggccggtgggtcttgcctcacgccgaggcatccccagccggcagcgcggtcgtcgcttgccgccgggatcggctcgctggctgtggggatgaggtggatgcggcagcctgtgcggtggccgaggttggcggtgagcgcgtcggggaggaagggcaacaacggccgagaggacggcgacgagcccaagaacaaggccgcctcttctggaaaaagtgatgcatctactcccagtggagatgcttccaacgaaacaaaccaaaatcagggtgaaccaaaatcaagtgacacgatgtatatacctagcaacttgtcatattggagagatgtgagagcaagctttgtgattccaaagttggtaagaccaaactttctggtctttgctatatcatccgtactataaagtttggcaaaagattttgacaggtacctttaaatcagctcatttagcgattatgtaggaatgttgttagaatctgaaatgaaatttcatagtaactctggctatcatttttcctcagttgcgttcatttgttagtgtcataaaggaaagaagccaatgggtcaatttctgaagattgacttgcacttataacccctaacattgtacctaaatgttacaacctcagaaattgacacatgggactttggaaac

SEQ ID NO: 148098 - DNA, 1517 bp, Zea Mays
ttccttcgattttttgataaatagcataactggttaaccacccagcttagggcttgttcggttattcctacgtcacatggattggattggattgtaaaattttagtagacattttgacttgctatggatttaaactcactcaatcccctccaatccacatggattgagatgaaaccgaacaagcccttattatgcttccgtctgtttccactccggatccgaagtccggacgccgtcagcacgtcctagtgtcccacacaccggcctccacgcagccacgggcatgtgggccctcaacctgaaggccggtgggtcttgcctcacgccgaggcatccccagccggcagcgcggtcgtcgcttgccgccgggatcggctcgctggctgtggggatgaggtggatgcggcagcctgtgcggtggccgaggttggcggtgagcgcgtcggggaggaagggcaacaacggccgagaggacggcgacgagcccaagaacaaggccgcctcttctggaaaaagtgatgcatctactcccagtggagatgcttccaacgaaacaaaccaaaatcagggtgaaccaaaatcaagtgacacgatgtatatacctagcaacttgtcatattggagagatgtgagagcaagctttgtgattccaaagttggagcaaacattagatgcaaatagtccagtgcagacaggtcaggatggagcagcatatcgtcttcctcggaagtgggctcattccatccctatgccagagtctggatgtgtgttggtcgccactgaagagcttgatggcaacggaacctttgagaggaccgtcatccttctcctaagactaggttcaagggatgcctacgatgggccgttcggtatcatcctgaaccgtccgctgtacactaagatgaggcatgtgaacccatccttgggcgatcaggcgaccccttttgttgactgttccctcctgttcggaggccctgtggacatgagtatattcctgatgagcgcgggcgatgggagaccgatcaaggggtttgaggaagtggtacccggcatctgcttcggcttcaggactgacctggagaaggccggtgctctgataaagaagggcgcggttaagcctgaggacctcaagttctacgtcgggtactctgcgtgggaccatgaccagctgctgagcgagatcgacgcaggttactgggtggtgacttcgtgcagcacaggcctgatagccgacgcgctgacgacgacggacccctcctgcttgtggaccgaggttttgcagctgatgggaggccagtactcggagctgagccaaaagccgaagcaggatgggatgtagacttggttagtcctagccatctgcgacggtcactgtggctaatctgtacataatttgagtgatcctcggctgctcttagccgtcgtgattgctctgcccgatgtaattgactaattgcgtatgtggactgctttgacttgtttttttatatataatttggttagcatgttggcatctg

SEQ ID NO: 148099 - DNA, 1514 bp, Zea Mays
ttccttcgattttttgataaatagcataactggttaaccacccagcttagggcttgttcggttattcctacgtcacatggattggattggattgtaaaattttagtagacattttgacttgctatggatttaaactcactcaatcccctccaatccacatggattgagatgaaaccgaacaagcccttattatgcttccgtctgtttccactccggatccgaagtccggacgccgtcagcacgtcctagtgtcccacacaccggcctccacgcagccacgggcatgtgggccctcaacctgaaggccggtgggtcttgcctcacgccgaggcatccccagccggcagcgcggtcgtcgcttgccgccgggatcggctcgctggctgtggggatgaggtggatgcggcagcctgtgcggtggccgaggttggcggtgagcgcgtcggggaggaagggcaacaacggccgagaggacggcgacgagcccaagaacaaggccgcctcttctggaaaaagtgatgcatctactcccagtggagatgcttccaacgaaacaaaccaaaatcagggtgaaccaaaatcaagtgacacgatgtatatacctagcaacttgtcatattggagagatgtgagagcaagctttgtgattccaaagttgcaaacattagatgcaaatagtccagtgcagacaggtcaggatggagcagcatatcgtcttcctcggaagtgggctcattccatccctatgccagagtctggatgtgtgttggtcgccactgaagagcttgatggcaacggaacctttgagaggaccgtcatccttctcctaagactaggttcaagggatgcctacgatgggccgttcggtatcatcctgaaccgtccgctgtacactaagatgaggcatgtgaacccatccttgggcgatcaggcgaccccttttgttgactgttccctcctgttcggaggccctgtggacatgagtatattcctgatgagcgcgggcgatgggagaccgatcaaggggtttgaggaagtggtacccggcatctgcttcggcttcaggactgacctggagaaggccggtgctctgataaagaagggcgcggttaagcctgaggacctcaagttctacgtcgggtactctgcgtgggaccatgaccagctgctgagcgagatcgacgcaggttactgggtggtgacttcgtgcagcacaggcctgatagccgacgcgctgacgacgacggacccctcctgcttgtggaccgaggttttgcagctgatgggaggccagtactcggagctgagccaaaagccgaagcaggatgggatgtagacttggttagtcctagccatctgcgacggtcactgtggctaatctgtacataatttgagtgatcctcggctgctcttagccgtcgtgattgctctgcccgatgtaattgactaattgcgtatgtggactgctttgacttgtttttttatatataatttggttagcatgttggcatctg

SEQ ID NO: 148100 - DNA, 2776 bp, Zea Mays
ttccttcgattttttgataaatagcataactggttaaccacccagcttagggcttgttcggttattcctacgtcacatggattggattggattgtaaaattttagtagacattttgacttgctatggatttaaactcactcaatcccctccaatccacatggattgagatgaaaccgaacaagcccttattatgcttccgtctgtttccactccggatccgaagtccggacgccgtcagcacgtcctagtgtcccacacaccggcctccacgcagccacgggcatgtgggccctcaacctgaaggccggtgggtcttgcctcacgccgaggcatccccagccggcagcgcggtcgtcgcttgccgccgggatcggctcgctggctgtggggatgaggtggatgcggcagcctgtgcggtggccgaggttggcggtgagcgcgtcggggaggaagggcaacaacggccgagaggacggcgacgagcccaagaacaaggccgcctcttctggaaaaagtgatgcatctactcccagtggagatgcttccaacgaaacaaaccaaaatcagggtgaaccaaaatcaagtgacacgatgtatatacctagcaacttgtcatattggagagatgtgagagcaagctttgtgattccaaagttggtaagaccaaactttctggtctttgctatatcatccgtactataaagtttggcaaaagattttgacaggtacctttaaatcagctcatttagcgattatgtaggaatgttgttagaatctgaaatgaaatttcatagtaactctggctatcatttttcctcagttgcgttcatttgttagtgtcataaaggaaagaagccaatgggtcaatttctgaagattgacttgcacttataacccctaacattgtacctaaatgttacaacctcagaaattgacacatgggactttggaaacataagaatgaccatgatacaaaatgtattttattccctttcagtttttcaacttaatgaatattatttttgtctgttgttccccgtttttagagaaagttgaaatgtgagacttggctgtcctcattcctcaactcctcagttgattgaaacattttctctctctctctctctctctctctctctctctcacactatcatctatgtgctgatcctggacttctttttatggttcttgctgcaatattcattattctagattatgttgaactttttgtctagcaacgcagatacacaaaaatgtgtatttcttcacatcaaacaacaacatactgctagatgagttgtctccatcatgtagtgtaacaagatcttcagtgccctatttcttatagatcacaatgtcttaggctatctccagcagatccactatcctcaggggcgatgccgggttcacgtaccctggtgcactggcaacagggtaaaaacgagaaatgctactagctagatacaaattcactataaatatttgctaaatcatttattttcttaagttgtgcactagggtatgtttggagctggcttcgcccctgcctatcacatcacctatcacattttctatttcaaactacactctgcaaacagtgtcatctacctttgttgtcccaattatttttcttttgattgatttacagaccagattctttttttcttctcctttaggccttgttcgtttgtgccggattggtgggtcggaacgattcctaaccggattgcttctctaatttatatgaactttgattagctgaaacgattacgggtgcaatccgacacaaacaaacaaggccttagcaaagcagtagcctcgtctctgcctgaagctaattggtatttttgttaagaagtccctcattacttttttttttgctaatttgttatttgtcatgcatccaaactaggagcaaacattagatgcaaatagtccagtgcagacaggtcaggatggagcagcatatcgtcttcctcggaagtgggctcattccatccctatgccagagtctggatgtgtgttggtcgccactgaagagcttgatggcaacggaacctttgagaggaccgtcatccttctcctaagactaggttcaagggatgcctacgatgggccgttcggtatcatcctgaaccgtccgctgtacactaagatgaggcatgtgaacccatccttgggcgatcaggcgaccccttttgttgactgttccctcctgttcggaggccctgtggacatgagtatattcctgatgagcgcgggcgatgggagaccgatcaaggggtttgaggaagtggtacccggcatctgcttcggcttcaggactgacctggagaaggccggtgctctgataaagaagggcgcggttaagcctgaggacctcaagttctacgtcgggtactctgcgtgggaccatgaccagctgctgagcgagatcgacgcaggttactgggtggtgacttcgtgcagcacaggcctgatagccgacgcgctgacgacgacggacccctcctgcttgtggaccgaggttttgcagctgatgggaggccagtactcggagctgagccaaaagccgaagcaggatgggatgtagacttggttagtcctagccatctgcgacggtcactgtggctaatctgtacataatttgagtgatcctcggctgctcttagccgtcgtgattgctctgcccgatgtaattgactaattgcgtatgtggactgctttgacttgtttttttatatataatttggttagcatgttggcatctgatga

SEQ ID NO: 148101 - DNA, 927 bp, Zea Mays
agctaattggtatttttgttaagaagtccctcattacttttttttttgctaatttgttatttgtcatgcatccaaactaggagcaaacattagatgcaaatagtccagtgcagacaggtcaggatggagcagcatatcgtcttcctcggaagtgggctcattccatccctatgccagagtctggatgtgtgttggtcgccactgaagagcttgatggcaacggaacctttgagaggaccgtcatccttctcctaagactaggttcaagggatgcctacgatgggccgttcggtatcatcctgaaccgtccgctgtacactaagatgaggcatgtgaacccatccttgggcgatcaggcgaccccttttgttgactgttccctcctgttcggaggccctgtggacatgagtatattcctgatgagcgcgggcgatgggagaccgatcaaggggtttgaggaagtggtacccggcatctgcttcggcttcaggactgacctggagaaggccggtgctctgataaagaagggcgcggttaagcctgaggacctcaagttctacgtcgggtactctgcgtgggaccatgaccagctgctgagcgagatcgacgcaggttactgggtggtgacttcgtgcagcacaggcctgatagccgacgcgctgacgacgacggacccctcctgcttgtggaccgaggttttgcagctgatgggaggccagtactcggagctgagccaaaagccgaagcaggatgggatgtagacttggttagtcctagccatctgcgacggtcactgtggctaatctgtacataatttgagtgatcctcggctgctcttagccgtcgtgattgctctgcccgatgtaattgactaattgcgtatgtggactgctttgacttgtttttttatatataatttggttagca

SEQ ID NO: 148102 - DNA, 2055 bp, Zea Mays
ccccttggccccttctccctttctctctctcctcctctcccccctgtcttcccccattccccactcccccacctctccagctccgtcgctagggctccatttcccctgcacctccgccgccgccgccgcttcaacatcagaagcaccggattcggtggtgtttctcggctgcctcagcttccgccgccgggaggcccctggcggcgttcgccgccgccctccggcctttgctgagtcctctagacttgacaaggctgctgctgagtatatggtatctgcgggccattgtgctgtccatgcgagcggagagcatgcgtggcagctgtgcttcgggtgatgcccctgaccagagtagctgccgatgcattcggtgtgttgacgatcggactgttggcgctgcttgccgctctgggcctcttctgcatcttccaatcggtctacttcaggtgtcagatccggagaggaccctccttcctcccgctcggctactttaacggcccatgggtgacccgcgtcgctctggttctgatcaccatctggtggggagtaggcgaggtagcgagactgagcttcttgaagcaaaagctgttctccagcttgacatggcagaggaacatatgcgatgcgtacatactttccaacctagggttcgcggagccggggatcttcttcgcattcgctttcctgctccatggctcgttgcagaagaaggagctgggcactttaaaccagagatggaactggaagagcatggcctacacgctggttttctgcgttccagtgttctccgtgcaggcagtcctggtgttcgtcgtcgggcccaggcttgttagagactcgaaccatgatctcgggaggaggaagatcgcgaaatacttcgtacggacgcacacgccggttggagacaccagcgtctgcacctacccgttgttgggcaccatctttctcgggctcgtggatgccttcctgatgagctacgtgtcgtacgtcggatcacgggcgctgtccttggtcatcaacaagtcgctgcgaaggagggtgtacctgctgatgctgtcggtgctctgcttcctcccgaccagggtgcttctcctcggcttctcggtgctgcccaggccaggagacgctgccttcgagggcatcgtgttcctgtcgttcttgacgatgctgtcctgcacggccgtcgggatactcttgctggtctactaccctgtggccgattcgctggccctcagagacatgggccagagggacacggcggcagagatggtgccatacgatgactactactgctacgaaggcgcgtcgctcgtggccaaccggagtttccgagaactcgagcgcaactccgacacctcgacgaagccgggatccatatcgttccgcactatgatcagggaagaccagcttcagcaggacggcgccgccgacgagatcggcttctcttctcgcagcggtgcccatatcggatcaccatcacccgcaggctcttcgccgagcgcggcaatgccgatgctccctgtcaaggagatccctagatactaaggagtattcagctgtgctgtgcgttttgcccctctgtgctatgtcctctccttcaccctctttttttcccccttctcttcctcttactaccttgatgataacagttttgtggcaatcaaaaggtttttttttgtaaagttttcgaagtagcttaactcatcaccattagcccagtactcttgatcctatttaacaacgtagcaagtagctggatcttgcagtggctgttgagctgtgctctggccgtactggccgcaagaggctgactggctgagttggaattcacttttggttggttttgcttttgctgctccacaactcataatatcttagctgagaagttttacaccgtggactaggctggaatggggggcctctgctgtgtcgcttgttcctctccgcgacagctgtgcgaagagtgtatcttgctacacttggccttccatacctgtacagccctttcttatctgtctgaacaaacagtttatcggtgaaggtaccaggataatt

SEQ ID NO: 148103 - DNA, 1203 bp, Zea Mays
ggccttatcgcctccgcgctctgatggcctcacaccgcgccacgcagtaaacgaaaagacgggcccactccctcaatcctccgcacgccccttccatggggcagccgcacctcttgccgcagctctccccctccccggtcctctactccctcttctcgccgccggagacgggggccacgccctggcggcggccgctgaaccggggacgggccttccaaccgccgctctcctcgctgcgggagaccaacaaggccacgctccgcaaggccacgcccaacgcccccttccgcctcggggggggcggggggcggcagccccaaggatcgccgccccgccgccgacgacaaggaggacgaggacgagggtcgcggcggcgccggggcactcacagggacgctgatcgcaggagcattactggttggtttcgtaggggggtttggggcggccggttacgtgtacaaggaccagatcaacaccttcctcacgcagttctcggggttccttgacggctatggtccagccggatatgctctgttcgtacttgtatatgcagggttggaggttctcgcaattcccgcaatacctttaaccatgtcagctggtctattatttggtaatgtgactggtacaattattgtttcagtcggtggaacgctagctgcagcggtggccttccttattgctagatactttgccagagagagaattcttaaattggttgaaggaaataagaagtttctggcaattgataaggcaataggtgaaaatgggtttaaggttgttactttgctacgcttgagtcccctgttacctttctcccttgggaactatctatatggccttacttcagtgaagttcttgccgtatgtcttgggcagttggttgggaatgcttccaggttcatgggcttacgtcagtgccggtgcattcgggcgagctttaatccaagatgagtcggaaattggtttgggaggaaacgaacagctatggacactgggcgttggattattgtttacagccattgctgccgcttatgtaacgaggctcgcaaaggacgctgtaaaggagatcgacgactagaatggtaggattctctaggagaaagggccatctggatagtgtactagcctagcacattgtacatcactggcacctttggtgcgataaaatcttatagaaagccagagcaattttatgaggtaa

SEQ ID NO: 148104 - DNA, 1108 bp, Zea Mays
atggggcagccgcacctcttgccgcagctctccccctccccggtcctctactccctcttctcgccgccggagacgggggccacgccctggcggcggccgctgaaccggggacgggccttccaaccgccgctctcctcgctgcgggagaccaacaaggccacgctccgcaaggccacgcccaacgcccccttccgcctcggggggggcggggggcggcagccccaaggatcgccgccccgccgccgacgacaaggaggacgaggacgagggtcgcggcggcgccggggcactcacagggacgctgatcgcaggagcattactggttggtttcgtaggggggtttggggcggccggttacgtgtacaaggaccagatcaacaccttcctcacgcagttctcggggttccttgacggctatggtccagccggatatgctctgttcgtacttgtatatgcagggttggaggttctcgcaattcccgcaatacctttaaccatgtcagctggtctattatttggtaatgtgactggtacaattattgtttcagtcggtggaacgctagctgcagcggtggccttccttattgctagatactttgccagagagagaattcttaaattggttgaaggaaataagaagtttctggcaattgataaggcaataggtgaaaatgggtttaaggttgttactttgctacgcttgagtcccctgttacctttctcccttgggaactatctatatggccttacttcagtgaagttcttgccgtatgtcttgggcagttggttgggaatgcttccaggttcatgggcttacgtcagtgccggtgcattcgggcgagctttaatccaagatgagtcggaaattggtttgggaggaaacgaacagctatggacactgggcgttggattattgtttacagccattgctgccgcttatgtaacgaggctcgcaaaggacgctgtaaaggagatcgacgactagaatggtaggattctctaggagaaagggccatctggatagtgtactagcctagcacattgtacatcactggcacctttggtgcgataaaatcttatagaaagccagagcaattttatgaggtaa

SEQ ID NO: 148105 - DNA, 1255 bp, Zea Mays
ctccaagcaatcaagcaagcaagcgcgaaataaccaccgtttccttgcagctcgcgaatctgcggcccccgttccccgacccgacacggcacaccactcgctccagtccgccttcatccaacggttcccctcctatttgccctcggaatcccgcccgcgaaccctagccggcctccgcgagatggacgaggactgggagctcctcctcgcgtcccccaaggcggcgccggccgagccgtacgccggcggcggaggagacggggaggtcgacgccggcgccatcaagcacgactacttcgacctcggctccgacgccaagtacccccggagggcgtcgccgtcgaagggaagcgaggaggagtgtgcggaggaggggcctttcgcggcgtcggacaacgcgggctgggtggagccggaccccgacgaccttctcttccccggccgcgaccgcgcggcgctctggtcgcactcgtcctccgacggggagaggcccgaggtcgaggtcgaggttgaggccgccgatcaggtggaacgggccggggtcacggcggcggctgacgcgggcgagggggccgtggcgaagggaggagggccggcccagtggtggaggctgccgctggacgtgctgcgggtgtgggcgctgcgcgcggccaggagcgtctggtcggtgccgctcgccgtcgcgctgctcgggttcgccgtgctcgggcgccggctgtaccggatgcgccgccagagcaaggccgtcgcgcgcgtccgcctcgtcctcgacgagaagaaggtctcccaattcaagggccaaggatcacgtctgaatgaatccatgacggtggcgcggcgaactcctatcataaaacctatgcttcctgccaacggagtgactccatggcctgtgctgggacacctgtgagatgacgtgatcgagctagtagtacaagtacaactgccccagcccacgttgccacaggcgggcatattatgcgatgcccagcagcagatgtactactggctgcttgtaatttggaactacacacttgtggaagaccttgtaagtttaggacctgatctagtttatgccccttctgtgtatacccatgcttatatttttatttcctgaatccttatgtcatcgatcttgtgtgctggagttgtaaatgattggatactcagtacccatggtactatggtagtgtgatgtatatgactattacccataaatcaatgcacgagtggaagcttgattatgttctgggca

SEQ ID NO: 148106 - DNA, 1848 bp, Zea Mays
cactaacacaaacaggttgcactccactctcccacctccactgcgctgcccgcctgcctttataacgcggcgagcccagtgcggggaggcagagaacccaaggacgcgcctcgcctcgagatccactcggagggccaccgcgaccgctccggtcggttccggcgaggtaccagcctaccgcctccgcattgctgctccgttccctctctccttgcacccgcttgctggcgtggatccagcggagctggtcccgtccttccccgccgatgagctagcgaacgaggaggcgagcgaggtgctggattatttagctgtttcttcttcttcttttttctggatggaatccgccatttattagtgcgggttctgcgcccagctgagagctagtagctcaattggaaggtgccgtagctctccgcggaaggagcaggacgggggggttttaatgcccgcgctttactgaatttctttccatgcttggccttacggggtgatttctccgcgttcttttcttcaaagagacgctgtagtaggaaacaagatgctaatagcaccaatccgggaccgtcctttcggtgtcgcttgagtagatctccgtttccttctctagatccagcagcttgatttaaacccgcagcgatttagtttcttttttgtggtttgcttcaggtgccgcgcggtcgtaagtcgtaacagcatacacagggcagacaaagctgcgattttgggggggctgttggtccagccgtggttgttggtggagataaaccacgtgaaggctggtgctctggtacatgttcgccaggcactgatggcatttggccgaggtggaaagatggacggccgccggccgtcctcatcgtcgtcgtcgtcgtcgttctgcacaaccaccacggtcgtgctctttgtggcgctctgcctagtcggcgcgtggatgatgacctcgtccactgtcttcccgctggagatttcgtccaataagaagccggtggtgaagcaacagcctgcgcctgtcaatttcggggcgtcgcaggaggcatcacctggcattgctggtgaagggtccgagaaatttgaggacaccgacaacaatgatgccacagtcccagaggaaccgaataaacaggatgcttctgagcaagagaatttcaatgagaagcctgaagagaaagagctggaagtgccggtagagaaagcggagaccaaggatatgtttgatgacgcaaatggaaaatcagaagggctgtcagatgaaacgaagaatgatgatggggagaagagtgtggagaagaaagacaatgaaatcacaaatgagagtggtgatgaaaaaactgatggtgagagtaaggacggtcaagaagagaagcctgatggcgatgccgctcaggaggagcaacctaaaatagaagagaacgtggaagaaaatggagagaaggatcagagctcaaactccaacgaggtatttcctgatggggcccaatcagagcttctgaaggagtcaaatacccagaacggttcattccccacacaggctgcagagtcaaagaatgaaaaggaagtccaagcgttaccgaagtcttcaggcgatgcaaccagctatacctggaaattatgtaatagtagtgcctcaacagattacataccttgccttgacaacgagaaggctatcaagaagcttcgaactaccaaacattatgaacatcgtgagaggcattgccctgaggagcctcctacctgccttgttccactcccagaaggatataaacggccaattgagtggccaaagagcagggacaaggtgattctgtttattctgaattgtacaacaccgaatcatctttagctgac

SEQ ID NO: 148107 - DNA, 1345 bp, Zea Mays
cactaacacaaacaggttgcactccactctcccacctccactgcgctgcccgcctgcctttataacgcggcgagcccagtgcggggaggcagagaacccaaggacgcgcctcgcctcgagatccactcggagggccaccgcgaccgctccggtcggttccggcgaggtgccgcgcggtcgtaagtcgtaacagcatacacagggcagacaaagctgcgattttgggggggctgttggtccagccgtggttgttggtggagataaaccacgtgaaggctggtgctctggtacatgttcgccaggcactgatggcatttggccgaggtggaaagatggacggccgccggccgtcctcatcgtcgtcgtcgtcgtcgttctgcacaaccaccacggtcgtgctctttgtggcgctctgcctagtcggcgcgtggatgatgacctcgtccactgtcttcccgctggagatttcgtccaataagaagccggtggtgaagcaacagcctgcgcctgtcaatttcggggcgtcgcaggaggcatcacctggcattgctggtgaagggtccgagaaatttgaggacaccgacaacaatgatgccacagtcccagaggaaccgaataaacaggatgcttctgagcaagagaatttcaatgagaagcctgaagagaaagagctggaagtgccggtagagaaagcggagaccaaggatatgtttgatgacgcaaatggaaaatcagaagggctgtcagatgaaacgaagaatgatgatggggagaagagtgtggagaagaaagacaatgaaatcacaaatgagagtggtgatgaaaaaactgatggtgagagtaaggacggtcaagaagagaagcctgatggcgatgccgctcaggaggagcaacctaaaatagaagagaacgtggaagaaaatggagagaaggatcagagctcaaactccaacgaggtatttcctgatggggcccaatcagagcttctgaaggagtcaaatacccagaacggttcattccccacacaggctgcagagtcaaagaatgaaaaggaagtccaagcgttaccgaagtcttcaggcgatgcaaccagctatacctggaaattatgtaatagtagtgcctcaacagattacataccttgccttgacaacgagaaggctatcaagaagcttcgaactaccaaacattatgaacatcgtgagaggcattgccctgaggagcctcctacctgccttgttccactcccagaaggatataaacggccaattgagtggccaaagagcagggacaaggtgattctgtttattctgaattgtacaacaccgaatcatctttagctgac

SEQ ID NO: 148108 - DNA, 3238 bp, Zea Mays
cactaacacaaacaggttgcactccactctcccacctccactgcgctgcccgcctgcctttataacgcggcgagcccagtgcggggaggcagagaacccaaggacgcgcctcgcctcgagatccactcggagggccaccgcgaccgctccggtcggttccggcgaggtgccgcgcggtcgtaagtcgtaacagcatacacagggcagacaaagctgcgattttgggggggctgttggtccagccgtggttgttggtggagataaaccacgtgaaggctggtgctctggtacatgttcgccaggcactgatggcatttggccgaggtggaaagatggacggccgccggccgtcctcatcgtcgtcgtcgtcgtcgttctgcacaaccaccacggtcgtgctctttgtggcgctctgcctagtcggcgcgtggatgatgacctcgtccactgtcttcccgctggagatttcgtccaataagaagccggtggtgaagcaacagcctgcgcctgtcaatttcggggcgtcgcaggaggcatcacctggcattgctggtgaagggtccgagaaatttgaggacaccgacaacaatgatgccacagtcccagaggaaccgaataaacaggatgcttctgagcaagagaatttcaatgagaagcctgaagagaaagagctggaagtgccggtagagaaagcggagaccaaggatatgtttgatgacgcaaatggaaaatcagaagggctgtcagatgaaacgaagaatgatgatggggagaagagtgtggagaagaaagacaatgaaatcacaaatgagagtggtgatgaaaaaactgatggtgagagtaaggacggtcaagaagagaagcctgatggcgatgccgctcaggaggagcaacctaaaatagaagagaacgtggaagaaaatggagagaaggatcagagctcaaactccaacgaggtatttcctgatggggcccaatcagagcttctgaaggagtcaaatacccagaacggttcattccccacacaggctgcagagtcaaagaatgaaaaggaagtccaagcgttaccgaagtcttcaggcgatgcaaccagctatacctggaaattatgtaatagtagtgcctcaacagattacataccttgccttgacaacgagaaggctatcaagaagcttcgaactaccaaacattatgaacatcgtgagaggcattgccctgaggagcctcctacctgccttgttccactcccagaaggatataaacggccaattgagtggccaaagagcagggacaaggtatggtacagcaatgttcctcacactaggcttgcagagtacaaggggcatcaaaattgggttaaggtctcaggtgactatctcttgttccctgggggtgggactcagttcaagaatggtgccctccactatattgatactattcagcaggcactacctgatattgcatggggcaaacgaagccgtgtcatattggatgttggttgtggagttgccagctttggaggctacatgtttgatagagatgcgcttaccatgtcttttgctccaaaagatgagcatgaagctcaagtacaatttgcattagaaaggggaattccagcaatatcagctgtgatgggcaccaagagacttccgtaccccagcagagtctttgatgtcattcattgcgctcgctgcagggtcccttggcacatcgaaggtggcatgcttttgctggaattgaaccgcttgttacgccctggtggttactttgtctggtctgccactcctgtttaccaaaagctcccagaggatgttgagatttggaatgccatgtctactttgacaaagtccatgtgctggaagatggtcaacaagactaaggataagttaaaccaagttggtatggtcatatatcagaaaccaatggacaatatttgctatgagaaaagatctgaaaacagcccgccattgtgcaaggaatctgatgatgcagatgctgcttggaatgtaccgttggaagcatgcatgcacaaactgcctggtggctcaaaagtccgaggatcaaaatggccagagttatggccgcaaaggcttgagaagacccctttctggattgatggttccaaggttggtgtctatggaaagcctgcaaatgaagattttgaggcagataatgcccactggaaacgggttgtaagtaaatcgtatgtgaatggcatgggaattgactggtccaaagtgagaaatgtcatggacatgagagctgtctatggaggttttgctgcagctctgagggaccaaaaggtctgggtcatgaatatcgtgccgatcgattcaccagacacgctgcccatcatctacgagcgcggtttgtttggcatgtaccatgactggtgcgagtctttcagcacttacccaagaacgtatgaccttctgcacgcggaccatctgttctcaaagctcagaaagagatgcaaactggctgcagttttcgccgaggtcgaccgtgtactgaggccacagggcaagctgatcgtgagggacaccgcggacacgataaatgagctggagagcatggccaagtccgtgcagtgggaggtgcggatgacctacaccaagggcagcgagggcctgctctgcgtcgagaagtcgatgtggcggcccaaagaactcgacgctagcacgtgaactgtgttgaggaggaactgctaccacgtaggggtgaaattagaggaattttgtcttctagatatgcgtatggctcttgttggtgctgaaaggaccagaaaatatttggtgtaactgtagaacaatacatctgttttttctgccgtttgttttcgtttttgttttttcacaacgttgctgtaagttagtgctggaaatcacaggtacattcagttctactgggcacgttgttggcttgtcggatagcagtcgaacgatcttgtgctgcatatgttatatttgaactgttgtgcatctcgaatgttcagttctttcccaaaggtcagggtaagagtacgtggagaggagagcagcgaatggtggagcgacgaggcaaatgaatccgggacgacggtgacgtgtgaagcgagaagatttgttggagcgccggaaacgtccgaagtttgggggcgccccatggacgcacgccacaaaaacgtttggaattcggaaacgtctggaactcagggtgcagcgtttccctcgttgattcattcattcagcgtgaggag

SEQ ID NO: 148109 - DNA, 2271 bp, Zea Mays
tcagataaaaataattcaaatattaacagagctatgatggggagatttaggaagttggttgaggacttgagtctcaatgaggttccactttttgggcgcaaatacacgtggtcaaatcagcaagacagtcctgttcttgttaagcttgacagggtcctctgttcagtggagtgggaagacaattttccaaatgtccttcaaagtgctgcctctgaaggctccgaccattgccccttgctgcttggcattagagataataaaatgggtaaaagacgtttctgttttgaagctttttggcccaaattagaaggattccaggatgtcatccaggaggtttgggattctgtggcagctgtaaactgccctttcatgactctgaatttgaaactaaaagccacagctaggaagctgcaatcttggagtgggaagcatgtgggacatgtgaggactcagttggctttggcaaaggaaattctgcatagactagaaatagcgcaggactgcagagctttatccttggctgaaatctggttaagtaatttgctgaaaaagcactccctgtttttatcttcacttcaacggaccattgctagatcgagatcgaggatctcttggcttaaagagggggatgctaataccaaactctttcatatgcactctcgacatcgaaaaaggaggaattttgttgcacaactggtgaatggagaccagattctcactagtcatgatgataaagcagttttggtggacaatttctacgccatacttattggtgaatgtggggatagggagcagactattaatctggaggcgttgcacatgccaactttcaatcttgcacaccttgatgagcctgttacagagcttgaactttggaatacaattaagagtttacctaatgacaaggccccaggtcccgatggtttcactgggcgcttctataaatcttgttggaacattatcaagatggatcttatggctgtagttgctgcggtttggaacaggaagtttgacaatttttgcttgctgaactcggcctacattactttaatcccaaagcatgatggggctgtgcatgtcaaagactttaggccaatcagtttggtgcatagtgctgcaaagttgatcacaaaattattggccaatcggttaagtcaaaagctgaatgatatggtgtctccaatccagagtgccttcattaagggacgtttcattcaggataattttatgttggtccaacaaacggctagacttttccatcaacagaaaaggccacgtcttctcctcaagcttgatattactaaagcttttgattcggtttcttggcctttcctcatcgaagttatgaagtatcttggctttggacaaatttggagggacatcatttgtgggcttctttcctcctctagcactcaggtgcttttgaatgatgatgtggcactcttcttacacccttcggcagcggatattgctataactctagatattttacatctatttggggaagcttcaggtctccgcaacaacgaacaaaagtctaatgtttatcccattcagtgtgggggtgtggagctggaaatggttcaggatcttctcccttgtggcatctcgacctttccgtgtaaatacctggggctgcctctgtccttgaaaaatctcaccaaggttcaggtgcagcctattgtggatagaattgctgatcagctgccaggctggaaagcagatttgatgacaagagcaggccgtaaagtgcaagttcagcatgtgcttaccggaatgcttatttatcttgctatggcagtaaatattccctcttgggctattaatgccattgataaaattagaagaagtttcctttggagagggcgcaaggaggccagaggtggtcactgcctggtggcctggggcagagtctgtagacccctacagctgggcggtcttggcatttctagtcttaaagaacttatctgggccctgcgcatgagatggctttggctccaaaagactgaacctaaccgaccttggtgcagccttcctatccaggttcctgataaagcaagggctttcttctcgatggtgttgacttcaaaggttggtaatggggctaatactttgttctggactgataaatggattcatgggcagaaaattgcagatttggttcctagattatttgatatcattccgaaaaaaatcactaacagaaggacggttcaggaagcattgacagatagaagatggattgctgatatcacaggatcactctcggtg

SEQ ID NO: 148110 - DNA, 594 bp, Zea Mays
gttcacaatcacaacctccacgaccaacgaggcaacgaccaaacgtccaaacccttccccctccctagctccgtgctccagcgggagtccgcggcggcggtgaagatgattatcccagtgcgctgcttcacctgcggcaaggttattgggaacaagtgggatctatacctcgacctcctccaggccgactactcagaaggggatgctctggatgctttggaattgttccgctactgctgcaggcgaatgctcatgacacatgttgacctcattgagaagttgctcaactacaacaccctagagaagaccgagacaagttaagcgagcacatcatgctccaaaaacactactgtttggcagtatcatagagcttaggtagtatgttgtctcttctctatcagtagaaatgggttgtgagtgtgaacatgcttttcaaggacttttcatgcgacagtgcttgttgccacctatgcaacgatgttggatattttaagtgatataattgctaaaagaaagctaatgtatttgtgtgaattgggtcgataatatttcgttgacagatgtgcgtttttggttggactacatttagtgatg

SEQ ID NO: 148111 - DNA, 1668 bp, Zea Mays
atggcgccgagcaagctccggcaggcgatgggcgcggccaaggaccagaccaccatcgccctcgctagggcgagcgccgtggacgaggtggcctcggatgtcgaggcgtccatcgtgagggccacggcgcacggcgagtccgtccccgcagacgagcgccacgccgcggagatcctcacgctgacgcgctactcccgcgcgcgcgtggccgcgtgcgtggcctccgtgtcgcgccggctcgggcgggcgcgggcgtggcccgtcgccgtcaaggcgctggcgctcgtgcaccgcctgctcgcggagggggacccggcgtacgagcaggaggtgttcctcgccacgcggcgcggcaggcgcatgctcgacctgtcccggttccgcgaccgcgaccgcgaccgcgcgcggtgccgcgactggtgcttcgccgcgttcgtgcacgcctacgccacgtacctcgacgaccggctcaagcaccggatgcaggcccgcggagcatgcggggccagcccgggcaaatggcacgtcgacggcgaccctgacgcgatggcgtgcgaggtggccgaggcggcctgggagctcgtgccgcggggaaggtcggcgtcggcgacggagacggcggcggcagaggatgtcgtcgggaaggcgcagcagctgaagcacctcctcggccggttcatccagtgccggccgacggggaaggcgaggacgaacccggtggtgacggcggcactgtacaggctggtgaaggagagcgcggcgatgtactgcgagctcacggaggtgatggtcgtgctcttggaccgcttcgccgacctgggcactcctgcctgcgtgcgcgtccactccatcttcaccagcctcgcgaagctggtcgacgagctcgacgacttctactcgtggtgcaaggccaccgacgtgtgccgcccgtcggatatccccgagatacaacgcgtcaagcagacgaatctggacctcatggacgagttcatccgtgacaggcaagcgtcggcgtccccgtggggccgctcgccgcctacccccatcaagaagaacgacgtcagaggaacagagccgacgccgaaacagcagcagggtgttgcgccgaaggagaacagtgccggcaaggctgcgccggcggaacctgctacctcacccgtcgtcgtggacgtggtccacgacgacaagacagccgacttcttgaacttgggcgaagacgcatcgccgtcatccggcgaagaagagcatgggatgaatctgacactggcactgttcgagggtaactcggcggaggctgcgccgaaatgggtggcgttcgatgattcagaagccgactgggagacggcgctggtgcagtccacaagcacccagcgatcggagctcggtggcggcttcaacacgacgaccgtgacaagcacgcgtgcgttcaccggaagcgcaagcagtatggcaacgcagccgcttggcgcgacggtgcttgccctgccgccaccgcttggggccagcaccgcaagggccgatccattcgccgcgtccctggcggtgcctccgccgatatgtgttcagatgacggacttgcagacaaggcagcggctccttatgcaggagcagaattcatggcaccagtatgaaatgcatagggcagcctggagttacaatctgctgtaa

SEQ ID NO: 148112 - DNA, 1893 bp, Zea Mays
tttttttttgccgttctgcttttagggttagcggcccgccccggtgatcgcgggagaagggagcatctgtcgccggagtttggtgagtgcctggtctgccctggtgccctggcaccctgcatcggctgtcgttgtatttgtcttcccacgaccgactcagagctccctgatctcaagatctcgagagctgcgcgcggactttgggttggagccgtgcgtatcgatccaactccatccgccgggcaaatttgagtcaggaggaaggatattcatcggcgcttctgaattgggaggacgcagcgcatacgagattcgatgagattttgttgggacacagtttcgccgtgaattggttaggagccgatttggcaacagggaagctctcgaatgggagatccagcggcggcagtggcggcggaggggagatggtgagcggaagctttagccggagcacatccgcgcggctcacgtcgaggggtggagtcgggagcccgcgtgtctcgactcctggagccgtgcaccggaactggtggccgccggcgccgtcggggccgtcgttcgatcgcgtcgtcttggcctttttcctggcctccgtcgcgctcgtgctctcctgcgctctctacctctacgtattccggtacttgggccggagccgtgtggtcgcggagttcgccggcgagaatctcgagtcctgcgacgtgttcgacggcgtctgggtgccggatcagaggcaccccttgtacaacagttcgcagtgcccatttgcagagagggggttcaattgcctggccaatgggcggaaggacaccgagtacctcaagtggcggtggaagcctcggggatgcgatttgccgcggttcagtgcccgggctctgttgcagtggctgagagggaagagggtcgtgtttgtgggggactccatgagtcgaacgcagtgggagtccttcatttgcatgctcatgacaggggtggatgatccagagacggtttatgaggttaatggcaaccagatctcaaagacaatccagtttttaggagtgagatttgagtccttcaacctcagtgtggagttcttccggtccgttttccttgtgcagcagatccctgcgcttcgccatgggcgcagaagggtccgtgccatcctgaagcttgataagttggatggtttaagtcaggaatgggtgaactcagatgttcttattttcaactcagggcattggtggactgccagcaaattatttgacatgggttgctattttgaggctggaggtgtgcttaaactgggaacatccattaatgctgctttcaaaatggcattggaaacttgggcttcatgggtgaaagagagaattgatttaaggcgaacacatgtattcttccgtacatatgaaccgtctcattggagtggcttaaatcaaaaggtgtgtgaagtaacacaacaacctaccgctgaggccaatggaaatgacaggagagaatttggggatatacttgctggtgttgtggcaaatatgagtgtccctgtgacagtactaaatgtgactttgatgggggcctttagaagtgatgctcatattggactttggagtcatcctaataccatactagattgcagccactggtgccttccaggagttcctgatgcttggaatgagcttgtattttcgcaccttttgactaatggttggcgagtgccggctagctgactattgacatggtatatctttttcccccctgctttgtagtttcttctttcttttgctgcaagaatcctcgtgggcagcagcatcttccatcaggttgtgttatgttttcactttttttccctcgatcacacaggactgcacatctccttggacataaagttttgtactccctccgtcccaaattaaa

SEQ ID NO: 148113 - DNA, 1998 bp, Zea Mays
tttttttttgccgttctgcttttagggttagcggcccgccccggtgatcgcgggagaagggagcatctgtcgccggagtttggtgagtgcctggtctgccctggtgccctggcaccctgcatcggctgtcgttgtatttgtcttcccacgaccgactcagagctccctgatctcaagatctcgagagctgcgcgcggactttgggttggagccgtgcgtatcgatccaactccatccgccgggcaaatttgagtcaggaggaaggatattcatcggcgcttctgaattgggaggacgcagcgcatacgagattcgatgagattttgttgggacacagtttcgccgtgaattggttaggagccgatttggcaacagggaagctctcgaatgggagatccagcggcggcagtggcggcggaggggagatggtgagcggaagctttagccggagcacatccgcgcggctcacgtcgaggggtggagtcgggagcccgcgtgtctcgactcctggagccgtgcaccggaactggtggccgccggcgccgtcggggccgtcgttcgatcgcgtcgtcttggcctttttcctggcctccgtcgcgctcgtgctctcctgcgctctctacctctacgtattccggtacttgggccggagccgtgtggtcgcggagttcgccggcgagaatctcgagtcctgcgacgtgttcgacggcgtctgggtgccggatcagaggcaccccttgtacaacagttcgcagtgcccatttgcagagagggggttcaattgcctggccaatgggcggaaggacaccgagtacctcaagtggcggtggaagcctcggggatgcgatttgccgcggttcagtgcccgggctctgttgcagtggctgagagggaagagggtcgtgtttgtgggggactccatgagtcgaacgcagtgggagtccttcatttgcatgctcatgacaggggtggatgatccagagacggtttatgaggttaatggcaaccagatctcaaagacaatccagtttttaggagtgagatttgagtccttcaacctcagtgtggagttcttccggtccgttttccttgtgcagcagatccctgcgcttcgccatgggcgcagaagggtccgtgccatcctgaagcttgataagttggatggtttaagtcaggaatgggtgaactcagatgttcttattttcaactcagggcattggtggactgccagcaaattatttgacatgggttgctattttgaggctggaggtgtgcttaaactgggaacatccattaatgctgctttcaaaatggcattggaaacttgggcttcatgggtgaaagagagaattgatttaaggcgaacacatgtattcttccgtacatatgaaccgtctcattggagtggcttaaatcaaaaggtgtgtgaagtaacacaacaacctaccgctgaggccaatggaaatgacaggagagaatttggggatatacttgctggtgttgtggcaaatatgagtgtccctgtgacagtactaaatgtgactttgatgggggcctttagaagtgatgctcatattggactttggagtcatcctaataccatactagattgcagccactggtgccttccaggagttcctgatgcttggaatgagcttgtattttcgcaccttttgactaatggttggcgagtgccggctagctgactattgacatggtgtgcacggttgtgcaatttcgcagtgtcctgcggtgccgtcgaggttggcttgagctgtggccgccgcctgttgaggctcctccgtttccggttacagctgctccgtgttttagttatataaatatacttttaaaagtaaattataagtcgattagctcattgtttttagctttatcgactttagctcctccgtgtatgatagcaggggccaaaaccacttaaaattataccaaattaaacttaagttaagaagtaataagccatgttcctctgagttt

SEQ ID NO: 148114 - DNA, 1561 bp, Zea Mays
ctcgacgcttgtcgcgaaacagaaaacaggcaaaccacacacccaggacggtggacggacacccgcgccgccgccgccatggccgacgccgccgcagcagcagcacggcgcctccgcgccttcaagcggtggatgcgcgcgcacggcgtcgtctgcagcgacgcgctcagcctcgacgtctccgatcccctcggcgtccacgtgcgcgcggccacgccgctacgcgacggagaccttgtcgccaccatcccgcgcggagcgtgcctcaccccgcgcaccaccggtgccgcggcagccatcgaggcagccgagctcggcggatgcctcgcgctcacggtcgccgtcatgtacgagcgcgcacaaggcgccgactcgccgtgggacgcctacctccaactgcttcccgactgcgagtccgtgccgctcgtgtggcccgctggcgaggcagagtgcctactcgccggcactgagctagacaagacagattgtgaagcaagacaaggaattcctttgtgaggattggaaagaatgcatcgagcccctcatgttatctggagagctggatgttgacccagatgattttagcttggagaaatatttatctgcaaaaactcttgtttcttcaaggtccttccagatagatagctatcatggatctggaatggttccattggctgaccttttcaatcacaagactgattgtgaacacgtgcatttcacgtctgcatcagatgcctcagactcagatggtgaagaagaagaagatgatcgaagtgatgcttctgctgatgacaaaccgactacaaaaaatcccacaagtagtcctccaggttcgagagctaacgacgaagatttggaaataatcattgttagagatgtcaatgaaggggaggaggtgtataatacatatggaacgatggggaatgctgctttgcttcacagatatggtttcacagaacttgacaatcaatacgacattgtcaacattgatttagcattggttactaagtggtgcacatccatattctccggtcgacatacaagagcaagggtatcactatggcgtaatctgggttattctgggtgcactagccaagataccgagtactttgagattgcatatgatggagagccccagcttgaactctcaatcctcctttacatcatcaacatgaaacctgatgtttatgacaagctgatctgcgtggcccatggtttcgttagtgacgaagagcatgagactatctgtaacgtgttcaagtttgtcaaagcaacaagctccaaccaaaattctgaagtcaatggcctcgagaaactgcctgatgtgaagaagttattgcatagtgagagcgtttgttcggcgcttctatcactcgctgacatgagggaaagcctctatggttcgaacactttggaagatgacgaggaagagcttcacgcatgctgcgttgtcaacgaaaggaagctctaccattctctggttttgcgggtgagtgagagaaggatacttcgtagattgagggagtttgcctctagtgggtcaaagggccggaagaggaag

SEQ ID NO: 148115 - DNA, 1930 bp, Zea Mays
ctcgacgcttgtcgcgaaacagaaaacaggcaaaccacacacccaggacggtggacggacacccgcgccgccgccgccatggccgacgccgccgcagcagcagcacggcgcctccgcgccttcaagcggtggatgcgcgcgcacggcgtcgtctgcagcgacgcgctcagcctcgacgtctccgatcccctcggcgtccacgtgcgcgcggccacgccgctacgcgacggagaccttgtcgccaccatcccgcgcggagcgtgcctcaccccgcgcaccaccggtgccgcggcagccatcgaggcagccgagctcggcggatgcctcgcgctcacggtcgccgtcatgtacgagcgcgcacaaggcgccgactcgccgtgggacgcctacctccaactgcttcccgactgcgagtccgtgccgctcgtgtggcccgctggcgaggcagagtgcctactcgccggcactgagctagacaagattgtgaagcaagacaaggaattcctttgtgaggattggaaagaatgcatcgagcccctcatgttatctggagagctggatgttgacccagatgattttagcttggagaaatatttatctgcaaaaactcttgtttcttcaaggtccttccagatagatagctatcatggatctggaatggttccattggctgaccttttcaatcacaagactgattgtgaacacgtgcatttcacgtctgcatcagatgcctcagactcagatggtgaagaagaagaagatgatcgaagtgatgcttctgctgatgacaaaccgactacaaaaaatcccacaagtagtcctccaggttcgagagctaacgacgaagatttggaaataatcattgttagagatgtcaatgaaggggaggaggtatttctctgttgccatcattccgttggctagaggctgtggtgcaaaggttcactagctgtacttatacactaaatctctgttgttcttccgactggtaatgtgtctttgcttcttctcatcttctattccaggtgtataatacatatggaacgatggggaatgctgctttgcttcacagatatggtttcacagaacttgacaatcaatacgacattgtcaacattgatttagcattggttactaagtggtgcacatccatattctccggtcgacatacaagagcaagggtatcactatggcgtaatctgggttattctgggtgcactagccaagataccgagtactttgagattgcatatgatggagagccccagcttgaactctcaatcctcctttacatcatcaacatgaaacctgatgtttatgacaagctgatctgcgtggcccatggtttcgttagtgacgaagagcatgagactatctgtaacgtgttcaagtttgtcaaagcaacaagctccaaccaaaattctgaagtcaatggcctcgagaaactgcctgatgtgaagaagttattgcatagtgagagcgtttgttcggcgcttctatcactcgctgacatgagggaaagcctctatggttcgaacactttggaagatgacgaggaagagcttcacgcatgctgcgttgtcaacgaaaggaagctctaccattctctggttttgcgggtgagtgagagaaggatacttcgtagattgagggagtttgcctctagtgggtcaaagggccggaagaggaagcacccctagtgtttaagcaatattctgcgggtcaggcttggtattcctgaacaccatgctcaataaaggtatggtgacgttctgcaattctgctgctcttgtaatggaatactaacatttttaggaacaataactacatacaggcatgctttgttttctttaagtagattagatacttgagatttacgacgtgggggacattatgtgttggtttgcgtggtaacaaacatttggacaag

SEQ ID NO: 148116 - DNA, 1789 bp, Zea Mays
acgcttgtcgcgaaacagaaaacaggcaaaccacacacccaggacggtggacggacacccgcgccgccgccgccatggccgacgccgccgcagcagcagcacggcgcctccgcgccttcaagcggtggatgcgcgcgcacggcgtcgtctgcagcgacgcgctcagcctcgacgtctccgatcccctcggcgtccacgtgcgcgcggccacgccgctacgcgacggagaccttgtcgccaccatcccgcgcggagcgtgcctcaccccgcgcaccaccggtgccgcggcagccatcgaggcagccgagctcggcggatgcctcgcgctcacggtcgccgtcatgtacgagcgcgcacaaggcgccgactcgccgtgggacgcctacctccaactgcttcccgactgcgagtccgtgccgctcgtgtggcccgctggcgaggcagagtgcctactcgccggcactgagctagacaagattgtgaagcaagacaaggaattcctttgtgaggattggaaagaatgcatcgagcccctcatgttatctggagagctggatgttgacccagatgattttagcttggagaaatatttatctgcaaaaactcttgtttcttcaaggtccttccagatagatagctatcatggatctggaatggttccattggctgaccttttcaatcacaagactgattgtgaacacgtgcatttcacgtctgcatcagatgcctcagactcagatggtgaagaagaagaagatgatcgaagtgatgcttctgctgatgacaaaccgactacaaaaaatcccacaagtagtcctccaggttcgagagctaacgacgaagatttggaaataatcattgttagagatgtcaatgaaggggaggaggtgtataatacatatggaacgatggggaatgctgctttgcttcacagatatggtttcacagaacttgacaatcaatacgacattgtcaacattgatttagcattggttactaagtggtgcacatccatattctccggtcgacatacaagagcaagggtatcactatggcgtaatctgggttattctgggtgcactagccaagataccgagtactttgagattgcatatgatggagagccccagcttgaactctcaatcctcctttacatcatcaacatgaaacctgatgtttatgacaagctgatctgcgtggcccatggtttcgttagtgacgaagagcatgagactatctgtaacgtgttcaagtttgtcaaagcaacaagctccaaccaaaattctgaagtcaatggcctcgagaaactgcctgatgtgaagaagttattgcatagtgagagcgtttgttcggcgcttctatcactcgctgacatgagggaaagcctctatggttcgaacactttggaagatgacgaggaagagcttcacgcatgctgcgttgtcaacgaaaggaagctctaccattctctggttttgcgggtgagtgagagaaggatacttcgtagattgagggagtttgcctctagtgggtcaaagggccggaagaggaagcacccctagtgtttaagcaatattctgcgggtcaggcttggtattcctgaacaccatgctcaataaaggtatggtgacgttctgcaattctgctgctcttgtaatggaatactaacatttttaggaacaataactacatacaggcatgctttgttttctttaagtagattagatacttgagatttacgacgtgggggacattatgtgttggtttgcgtggtaacaaacatttggac

SEQ ID NO: 148117 - DNA, 1482 bp, Zea Mays
ccacacacccaggacggtggacggacacccgcgccgccgccgccatggccgacgccgccgcagcagcagcacggcgcctccgcgccttcaagcggtggatgcgcgcgcacggcgtcgtctgcagcgacgcgctcagcctcgacgtctccgatcccctcggcgtccacgtgcgcgcggccacgccgctacgcgacggagaccttgtcgccaccatcccgcgcggagcgtgcctcaccccgcgcaccaccggtgccgcggcagccatcgaggcagccgagctcggcggatgcctcgcgctcacggtcgccgtcatgtacgagcgcgcacaaggcgccgactcgccgtgggacgcctacctccaactgcttcccgactgcgagtccgtgccgctcgtgtggcccgctggcgaggcagagtgcctactcgccggcactgagctagacaagattgtgaagcaagacaaggaattcctttgtgaggattggaaagaatgcatcgagcccctcatgttatctggagagctggatgttgacccagatgattttagcttggagaaatatttatctgcaaaaactcttgtttcttcaaggtccttccagatagatagctatcatggatctggaatggttccattggctgacctatgcctcagactcagatggtgaagaagaagaagatgatcgaagtgatgcttctgctgatgacaaaccgactacaaaaaatcccacaagtagtcctccaggttcgagagctaacgacgaagatttggaaataatcattgttagagatgtcaatgaaggggaggaggtgtataatacatatggaacgatggggaatgctgctttgcttcacagatatggtttcacagaacttgacaatcaatacgacattgtcaacattgatttagcattggttactaagtggtgcacatccatattctccggtcgacatacaagagcaagggtatcactatggcgtaatctgggttattctgggtgcactagccaagataccgagtactttgagattgcatatgatggagagccccagcttgaactctcaatcctcctttacatcatcaacatgaaacctgatgtttatgacaagctgatctgcgtggcccatggtttcgttagtgacgaagagcatgagactatctgtaacgtgttcaagtttgtcaaagcaacaagctccaaccaaaattctgaagtcaatggcctcgagaaactgcctgatgtgaagaagttattgcatagtgagagcgtttgttcggcgcttctatcactcgctgacatgagggaaagcctctatggttcgaacactttggaagatgacgaggaagagcttcacgcatgctgcgttgtcaacgaaaggaagctctaccattctctggttttgcgggtgagtgagagaaggatacttcgtagattgagggagtttgcctctagtgggtcaaagggccggaagaggaagcacccctag

SEQ ID NO: 148118 - DNA, 1371 bp, Zea Mays
accaaacccaatgtttttgaggcgcccgtccaagcatcccatccattctctctcgctgctctgctccccacggaccacggggcaccaccacaaaccagacgcgacgcacgcgcgcaaaatcatccggcggagccagggcggaggcaagccagagacgcggcacgcgacgcgtgagggcgaggagcagcggcagcgcgggcgcggcgacaccgcgaggacagagcgagacgcagcggcggaggaggggcagaggcgagcgccgcctagagtccctgctaccatggacactttcttcctgtcgcacggctcgcccacgctctccatcgacgacaacatcccggcgcggcacttcttcaagtcgtgggtgccggcgaaggtcgcgggcgaccagcccccgcgcgccatcctcgtcgtgtcgggacactgggacacggccacgccggaggtcaacgtcatccgcggcagcaacgacaccatttacgacttctatggctttcccaagcccatgtacaagctcaagtaccccgctccgggcgccccggacctggccctgcggaccaaagggctcctggagcaagccgggttcggccccgtgaaggaggaccacagccgcgggctggaccacggcgcctgggtgccgctgatgctcatgtacccggacgccgacatccccgtgtgccagctgtcggtgcagagcgaccgggacggcgcgtaccactacagcctcggcagggcgctggcgccgctgcgggaggagggcgtcctcgtcctcggctccggcagcgccacgcacaacctgcgcaagatggggccgttcgacgcgcccgtgccgcagtgggccgccgagttcgacgcctggctcaaggactcgctcctcgacggaaggtacgaggacgtgaaccggttcgaggagaaagcgccgcatgggagggtggcgcacccgtggccggaccacttctacccgctgcacgtggcgctcggcgccgccggggacggcgcaaaggcggagcagatccaccagtgctggaccaacgccacgctctcctacgcgtcctacaggttcaccaccaagagctgacgcgcccgtgcagctgtcgggtggaggaccgccacccccctcccccccggggccagctgctgaattcgtgggaagcacatccgtcgacgtgcgcgacagcattcatatacacgcaccgcatgtagaaatgtgtttttctcaataaactcccgagtgccgatcgcggtagatatgtcttgcattgttcaacgcagcagcttgtttcgagaagcattctgttgttaaatctcattccatcatcattgtcttcaagtggtgcatattacggagtacgtgtctttttgcccttctca

SEQ ID NO: 148119 - DNA, 385 bp, Zea Mays
gcaatcgaattcctttcactcttcttttcggatcgtgcgtctctctttcgtccaaaatctgtagatcgatcttgatatgtctagattttgcaattgtcttaagtcaaaccatggtaggatcatttaccagacttctctggtgtaagagcagtttgtgcatagatgcttgggtgtttcctattggaccaagcatagtttgcacaaagggtcatttatccatcatcttttgtttatttttctgatgcagcaaggtccacacaaagaatctacacctcggttctgcttttgcctttcagattgggcatagatccgttcttgtgtaacttcatttgaataaagtacacaattttagcaggagtagcagtgccttaaatcagtgttcttt

SEQ ID NO: 148120 - DNA, 1559 bp, Zea Mays
tcccgatcccgtcgaccctgccacatacagcctcgtttgagctctagactcgagagaggcggatagggagaggcagcaccgcagggagcagtgacagagaggccgagcgagagagagagatggacgtggagaggaaggtggtggaggcggacgacgacggccgcgtcagaacagggcctagagatgtggtggtgtgtggactcgcacagtacgcgatcctctgggggacaatggtgggctacaccatcaccactgccacgagcatcatggccgtcgcgcgcacggactgccgccaccacaggggccacgacgcggcctgcgcctcgtccgggacggtgtacatggtggcgttcggcgtcgtcgaggtggtcctgtcccagttcccgagcctggagaagctcacgatcatctccgtggtcgctgccgtcatgtcgtgcacctactccttcgtcgggctgttcctgagcgccgccaagctcgcgtcgaaccacggggcgcgcggcagcctcctcggcgtcaagatcgccgcgggcgtctccgcgtcgaccaagacgtggcactcactgcaggcactcggcaacgttgccttcgcgtacacctactccatgcttctcatagaaatccaggacactgtgaaggcaccgccatcagagaacgtgacgatgaagagggccagcttctacggcatcagcgtgacgaccatcttctacgtctcgctcgggtgcatcggctacgcggccttcggcaacgccgcgccggggaacgtgcttaccggcttcgacgagccgttctggctcgtcgacgtcgccaacatcgccgtggtcgtccacttggttggggcatatcaggtgtacgcgcagccgatcttcgcgtgctacgagaagtggctggggtcccggtggccggactcggccttcttccaccacgagtacgcggtgcgcctgcccggctgcgcggtgcggttcacgatgtgcaagctggtgctgcgcacggcgttcgtggccgccacgacggtggtgtcgctgatgctgcccttcttcaacgccgtgctcgggctgctgggcgccatcgccttctggccgctgacggtgtacttcccggtgaccatgtacatcgcgcaggccaaggtggcgcccggcagccgcaagtgggtggcgctgcaggcgctcaatgtgggcgcgctcctggtttcgctgctcgccgccgtgggctccgtggccgacatggtgcagcgcctgggccatgtcaccatctttcagacgcagctctgaaacaagtattcagatcttatgcatgggaacgcgcttgcagaggcatacatcatacacatgcttgtgccgtatattcacctgtgatcttagtacattggttttggaagaacaactaaaaatggagcatgtaagtcattccacctagatttcgtgcattgcaagagtgctttttggggtgaaatagcagacagtgcacactccatgacacatttgaagcccagctaagcgttgggctgaattaatgattatgtttcttcaagggaaaaatagcacttcacatttttactc

SEQ ID NO: 148121 - DNA, 1796 bp, Zea Mays
tcccgatcccgtcgaccctgccacatacagcctcgtttgagctctagactcgagagaggcggatagggagaggcagcaccgcagggagcagtgacagagaggccgagcgagagagagagatggacgtggagaggaaggtggtggaggcggacgacgacggccgcgtcagaacagggacggtgtggacggcgacgacgcacgccatcaccgccgtgataggctccggcgtgctggcgctgccctggagcgtggcgcagatgggctgggtcctcggccccgtcgccctcgtcggctgcgcctacatcacctacttcaccgccgtcctcctgtccgactgctaccgcacgccggaccccgtccacggcaaacggaaccgcacctacatggacgtcgtccgctcatgcctcgggcctagagatgtggtggtgtgtggactcgcacagtacgcgatcctctgggggacaatggtgggctacaccatcaccactgccacgagcatcatggccgtcgcgcgcacggactgccgccaccacaggggccacgacgcggcctgcgcctcgtccgggacggtgtacatggtggcgttcggcgtcgtcgaggtggtcctgtcccagttcccgagcctggagaagctcacgatcatctccgtggtcgctgccgtcatgtcgtgcacctactccttcgtcgggctgttcctgagcgccgccaagctcgcgtcgaaccacggggcgcgcggcagcctcctcggcgtcaagatcgccgcgggcgtctccgcgtcgaccaagacgtggcactcactgcaggcactcggcaacgttgccttcgcgtacacctactccatgcttctcatagaaatccaggacactgtgaaggcaccgccatcagagaacgtgacgatgaagagggccagcttctacggcatcagcgtgacgaccatcttctacgtctcgctcgggtgcatcggctacgcggccttcggcaacgccgcgccggggaacgtgcttaccggcttcgacgagccgttctggctcgtcgacgtcgccaacatcgccgtggtcgtccacttggttggggcatatcaggtgtacgcgcagccgatcttcgcgtgctacgagaagtggctggggtcccggtggccggactcggccttcttccaccacgagtacgcggtgcgcctgcccggctgcgcggtgcggttcacgatgtgcaagctggtgctgcgcacggcgttcgtggccgccacgacggtggtgtcgctgatgctgcccttcttcaacgccgtgctcgggctgctgggcgccatcgccttctggccgctgacggtgtacttcccggtgaccatgtacatcgcgcaggccaaggtggcgcccggcagccgcaagtgggtggcgctgcaggcgctcaatgtgggcgcgctcctggtttcgctgctcgccgccgtgggctccgtggccgacatggtgcagcgcctgggccatgtcaccatctttcagacgcagctctgaaacaagtattcagatcttatgcatgggaacgcgcttgcagaggcatacatcatacacatgcttgtgccgtatattcacctgtgatcttagtacattggttttggaagaacaactaaaaatggagcatgtaagtcattccacctagatttcgtgcattgcaagagtgctttttggggtgaaatagcagacagtgcacactccatgacacatttgaagcccagctaagcgttgggctgaattaatgattatgtttcttcaagggaaaaatagcacttcacatttttactcttt

SEQ ID NO: 148122 - DNA, 158 bp, Zea Mays
ttatttattttttatcattaactattatatgaaaacatcgtcacatgtaagtttaacgggtccccgcggggaacggggatggggaatgcttccccatccccatccccgtttacccgtcgggggagaaaatttccccgtttacatccccgtgggggaag

SEQ ID NO: 148123 - DNA, 805 bp, Zea Mays
cgcgcgcgtagtacgtgcacaggttggtgcgattgaatactattttaggacgaggtgattactattttaggacatggaggacttcataaagttatcgtattataaataggtaaatagtttttagtggagcttctcgtatatttggccatgttaaaatccactcaactaccatacctggctagctgttagtgtcagcatcagagaactgatgcagcgtaagcggtccgttaaaggattgacggtcctgctcggctcccccgggtgcatgtgtattggtcgatggttcggctggcgctggcgcctacgccaacacagcctggcaaaaaaacaacagttcggcagaaccagaaacgcgcaacgtcctaacataacattttgggtgcgcgcgatattttgcttcgagagttggagccctatataaagcggatgagccaaaccccgtcgccgcttgcaccggatccctcctctctttccccggcacctgtcacgggaggaggatggacaagagcggcggcgaggcggcggcggcggcagcagcagcagacgacgtcgagcggcgggggggcgactacgagcaagacgagcacgagcggagaggtctgttcccgccctgtcccggtgcatccatgtactcttgtccccacgtttcgccggtccgttgaacccctctccggtcccttgctcgtcgtcccactcccagggacggtgtggacggcgacggcgcacattgtgacggcggtgatcggctccggcgtgctggcgctggcctggagcgtggcgcagctgggctgggtcgcggggcccc

SEQ ID NO: 148124 - DNA, 1643 bp, Zea Mays
ctcctctctttccccggcacctgtcacgggaggaggatggacaagagcggcggcgaggcggcggcggcggcagcagcagcagacgacgtcgagcggcgggggggcgactacgagcaagacgagcacgagcggagagggacggtgtggacggcgacggcgcacattgtgacggcggtgatcggctccggcgtgctggcgctggcctggagcgtggcgcagctgggctgggtcgcggggcccctcgcgctcgccggcttcgcgtgcgtcacctactacacctccacgctgctcgccggcgcctaccgcgcgccgcaccccgtcaccggccacaggaaccgcacctacatggacgccgtcagatcgtacctcagtcccagggaggtgttcatgtgcggggtcgcgcagtacgtgaacctgtggggcaccatggtcgggtacaccatcacggcgaccataagcatggccgcgatcaggcaggccgactgcctccgccgggacggcgccggcgccggcgcgcgctgcgacgcgccagggaccgtgctgatgctggcgttcagcgtggtccaggtggtgctgtcccagttcccgggcctggagcacatcacctggctgtccgtcgtcgcggcggccatgtcgttcgcctactccttcgccggcctcggcctctccgtagggcactgggtgtctcgtggcggcggcggcctcgggggcagggttgcaggtgccgccgcggcatcctccaccaggaagctctggaacgtgcttctcgccctggggaacattgccttcgcctacactttcgctgaagtattgatcgagatccaggatacactcaagtcaccaccaccggagaacaggacgatgaagaaggcagcaatgtacgggatcggagccaccaccatcttctacatctccgtcggctgcgctgggtacgccgcgttcggttcgaatgctccgggcaacatcttggcggcaggcgggctgggtcccttgtggctcgtcgacattgccaacatgtgcctcatcctccacctgatcggtgcataccaggtatacgctcagcctgtcttcgcttcggttgagaggtgggccgcctcacggtggccagaagccaagttcatgagcagcgcatacaccgtgtccgtcagcatccccctcttgcagagaggatcggtcaccgtcgcgccgcacaagctcgtcctgaggaccgccatagtcggcgcgacgactgcggtggcgctggcgatacccttcttcaacgccgtgctggggctcctcggcgcgttcagcttctggccgctcacggtctacttccccatcagcatgcacatcgcccagggcaagatcgccagggggaccaagtggtggtgccttctgcaggctctgagcatggtttgcttggtgatctcggtggccgtgggtgtaggctctgtcactgacattgtcgatagcctcaaggcctcttctagccctttcaaaattgtaggctaacaggttactgtagtcatgtacaatgctctgagccgatcgtgcgttgaggtttaaaagaactgtggtgcgcgaattcgcgtcaaatatcgaaacttctcgattgtattttcagagagtatttattgaatttgatcagtaagcatcattttgct

SEQ ID NO: 148125 - DNA, 1738 bp, Zea Mays
ctcctctctttccccggcacctgtcacgggaggaggatggacaagagcggcggcgaggcggcggcggcggcagcagcagcagacgacgtcgagcggcgggggggcgactacgagcaagacgagcacgagcggagagggacggtgtggacggcgacggcgcacattgtgacggcggtgatcggctccggcgtgctggcgctggcctggagcgtggcgcagctgggctgggtcgcggggcccctcgcgctcgccggcttcgcgtgcgtcacctactacacctccacgctgctcgccggcgcctaccgcgcgccgcaccccgtcaccggccacaggaaccgcacctacatggacgccgtcagatcgtacctcagtacgcctacgcctacgcgacgcacggctccacgtccgtccgtctcgtcttagctaactgaccgcggtgccctgaacatgcgtacgtcgtcgcaggtcccagggaggtgttcatgtgcggggtcgcgcagtacgtgaacctgtggggcaccatggtcgggtacaccatcacggcgaccataagcatggccgcgatcaggcaggccgactgcctccgccgggacggcgccggcgccggcgcgcgctgcgacgcgccagggaccgtgctgatgctggcgttcagcgtggtccaggtggtgctgtcccagttcccgggcctggagcacatcacctggctgtccgtcgtcgcggcggccatgtcgttcgcctactccttcgccggcctcggcctctccgtagggcactgggtgtctcgtggcggcggcggcctcgggggcagggttgcaggtgccgccgcggcatcctccaccaggaagctctggaacgtgcttctcgccctggggaacattgccttcgcctacactttcgctgaagtattgatcgagatccaggatacactcaagtcaccaccaccggagaacaggacgatgaagaaggcagcaatgtacgggatcggagccaccaccatcttctacatctccgtcggctgcgctgggtacgccgcgttcggttcgaatgctccgggcaacatcttggcggcaggcgggctgggtcccttgtggctcgtcgacattgccaacatgtgcctcatcctccacctgatcggtgcataccaggtatacgctcagcctgtcttcgcttcggttgagaggtgggccgcctcacggtggccagaagccaagttcatgagcagcgcatacaccgtgtccgtcagcatccccctcttgcagagaggatcggtcaccgtcgcgccgcacaagctcgtcctgaggaccgccatagtcggcgcgacgactgcggtggcgctggcgatacccttcttcaacgccgtgctggggctcctcggcgcgttcagcttctggccgctcacggtctacttccccatcagcatgcacatcgcccagggcaagatcgccagggggaccaagtggtggtgccttctgcaggctctgagcatggtttgcttggtgatctcggtggccgtgggtgtaggctctgtcactgacattgtcgatagcctcaaggcctcttctagccctttcaaaattgtaggctaacaggttactgtagtcatgtacaatgctctgagccgatcgtgcgttgaggtttaaaagaactgtggtgcgcgaattcgcgtcaaatatcgaaacttctcgattgtattttcagagagtatttattgaatttgatcagtaagcatcattttgct

SEQ ID NO: 148126 - DNA, 1741 bp, Zea Mays
ctcctctctttccccggcacctgtcacgggaggaggatggacaagagcggcggcgaggcggcggcggcggcagcagcagcagacgacgtcgagcggcgggggggcgactacgagcaagacgagcacgagcggagagggacggtgtggacggcgacggcgcacattgtgacggcggtgatcggctccggcgtgctggcgctggcctggagcgtggcgcagctgggctgggtcgcggggcccctcgcgctcgccggcttcgcgtgcgtcacctactacacctccacgctgctcgccggcgcctaccgcgcgccgcaccccgtcaccggccacaggaaccgcacctacatggacgccgtcagatcgtacctcagtacgcctacgcctacgcgacgcacggctccacgtccgtccgtctcgtcttagctaactgaccgcggtgccctgaacatgcgtacgtcgtcgcaggtcccagggaggtgttcatgtgcggggtcgcgcagtacgtgaacctgtggggcaccatggtcgggtacaccatcacggcgaccataagcatggccgcgatcaggcaggccgactgcctccgccgggacggcgccggcgccggcgcgcgctgcgacgcgccagggaccgtgctgatgctggcgttcagcgtggtccaggtggtgctgtcccagttcccgggcctggagcacatcacctggctgtccgtcgtcgcggcggccatgtcgttcgcctactccttcgccggcctcggcctctccgtagggcactgggtgtctcgtggcggcggcggcctcgggggcagggttgcaggtgccgccgcggcatcctccaccaggaagctctggaacgtgcttctcgccctggggaacattgccttcgcctacactttcgctgaagtattgatcgagatccaggatacactcaagtcaccaccaccggagaacaggacgatgaagaaggcagcaatgtacgggatcggagccaccaccatcttctacatctccgtcggctgcgctgggtacgccgcgttcggttcgaatgctccgggcaacatcttggcggcaggcgggctgggtcccttgtggctcgtcgacattgccaacatgtgcctcatcctccacctgatcggtgcataccagcaggtatacgctcagcctgtcttcgcttcggttgagaggtgggccgcctcacggtggccagaagccaagttcatgagcagcgcatacaccgtgtccgtcagcatccccctcttgcagagaggatcggtcaccgtcgcgccgcacaagctcgtcctgaggaccgccatagtcggcgcgacgactgcggtggcgctggcgatacccttcttcaacgccgtgctggggctcctcggcgcgttcagcttctggccgctcacggtctacttccccatcagcatgcacatcgcccagggcaagatcgccagggggaccaagtggtggtgccttctgcaggctctgagcatggtttgcttggtgatctcggtggccgtgggtgtaggctctgtcactgacattgtcgatagcctcaaggcctcttctagccctttcaaaattgtaggctaacaggttactgtagtcatgtacaatgctctgagccgatcgtgcgttgaggtttaaaagaactgtggtgcgcgaattcgcgtcaaatatcgaaacttctcgattgtattttcagagagtatttattgaatttgatcagtaagcatcattttgct

SEQ ID NO: 148127 - DNA, 1548 bp, Zea Mays
gggggacggcgtgttgaccggacccgggccaccccgtggatgcgcaacttggtgctgtggtgcagcacaaactaataacagaaagtccaaggtggaggtgggtcccacgtgcagcgacgcagccgccgcgcggggcgagaaccctagacacgggacaacgaggtcgagccgagcgcatcgtttattactgcaacaacaacaactggttccccccctccctccctccgttattgctgattcttcccgcaccggcctcagcctgccctctctctctctctctctctctctcccccttccttcctcgagcagctccacgcgcgacgccatcccaatgctctccacgcctcattggaccccaggaagcaatcgcgctgatcggggccgccgcctagcggtgccgtgcgggttagggcgcgaggctggcgctagctcgagctcgcggctgccgcaaggtcggtggctgggtccaggcgcctcccgtccggtggccgcagccctaatcgctgcctaggtgctggaaaggtgaggagtatgtcctcgatacgatttggatttgttagaagccagctcctctgttctggcaccatttgctaggattttgttatggtgtttattaggcagccatgaaaagtctgatatgcttcgaacagaagatggacatcagacacaatgggaaatgggtgcaactgcaaggagaacagattaacatcacatcagtggtcagcaacaagatccattaacaccacgcaaggtccacaaaagcctttaggtgcagcttactactctccatctcactatttacgtttcactacattatgtacagtcatccaactgttgccatgcgcccatacttgcctgctccaccaactgatgctccaatctcatccttgcacctcccagacgcagtaacctccattgttccaccaccgttgctacccccacccccacgtccgtctcccttgcgtggactagcacactttctgcagatgaaattttcagggacttcctcaaaatcacttatcccagagcacctggtatgctgccagactccacatatgtcacaagctagcatccgttccccatcatcatccttggccccacatgagcagtccaccgtccagttctccaaacccctctccatcctgaactgtacaattctcctgtaatccccagtgcaacgtccccttactcgaagcaactggcctgatccaagcacatgcttcacgggggttgtatcactgaagtttggaaagtcagggagctgttcagtctggaagctttggaacatcaggtacgtttcttggaaagcctttgaagcctgtactttcagatcacctagggtagcacttgctggtagaagtacaagttcttctggaggtgtcgtgtaatcttttgggtgatcaagcagttcaatggagcacctcacacagagcaggaatggatttgaaggagtccgcagagcatgctcatcataatgtttgatgaactgcttgcaatcaattatctttgctgctgcgctgtgtgctgatgcaccaaccacctctggtt

SEQ ID NO: 148128 - DNA, 2980 bp, Zea Mays
gggggacggcgtgttgaccggacccgggccaccccgtggatgcgcaacttggtgctgtggtgcagcacaaactaataacagaaagtccaaggtggaggtgggtcccacgtgcagcgacgcagccgccgcgcggggcgagaaccctagacacgggacaacgaggtcgagccgagcgcatcgtttattactgcaacaacaacaactggttccccccctccctccctccgttattgctgattcttcccgcaccggcctcagcctgccctctctctctctctctctctctctcccccttccttcctcgagcagctccacgcgcgacgccatcccaatgctctccacgcctcattggaccccaggaagcaatcgcgctgatcggggccgccgcctagcggtgccgtgcgggttagggcgcgaggctggcgctagctcgagctcgcggctgccgcaaggtcggtggctgggtccaggcgcctcccgtccggtggccgcagccctaatcgctgcctaggtgctggaaaggtgaggagtatgtcctcgatacgatttggatttgttagaagccagctcctctgttctggcaccatttgctaggattttgttatggtgtttattaggcagccatgaaaagtctgatatgcttcgaacagaagatggacatcagacacaatgggaaatgggtgcaactgcaaggagaacagattaacatcacatcagtggtcagcaacaagatccattaacaccacgcaaggtccacaaaagcctttaggtgcagcttactactctccatctcactatttacgtttcactacattatgtacagtcatccaactgttgccatgcgcccatacttgcctgctccaccaactgatgctccaatctcatccttgcacctcccagacgcagtaacctccattgttccaccaccgttgctacccccacccccacgtccgtctcccttgcgtggactagcacactttctgcagatgaaattttcagggacttcctcaaaatcacttatcccagagcacctggtatgctgccagactccacatatgtcacaagctagcatccgttccccatcatcatccttggccccacatgagcagtccaccgtccagttctccaaacccctctccatcctgaactgtacaattctcctgtaatccccagtgcaacgtccccttactcgaagcaactggcctgatccaagcacatgcttcacgggggttgtatcactgaagtttggaaagtcagggagctgttcagtctggaagctttggaacatcagttcaatggagcacctcacacagagcaggaatggatttgaaggagtccgcagagcatgctcatcataatgtttgatgaactgcttgcaatcaattatctttgctgctgcgctgtgtgctgatgcaccaaccacctctggttgtgaagacaacatggactccgggttcagcaaagcatcgtagaggaaccttagatcatgcaacagttggtcaacagaaggtccaaatgtagctgcatttgctggagaccgaacggaggaagattccagcctgattgtcatgaaacaatttagccaggaaagtttccggatcaagttcatcaattttatgaagggaaagcaatcagtgctcacctgtactcgattgcactagtaccggcattgcaacggacagcaacacaaaggccattatccagttgtttcccacccagtcctcggagagaataatcaagcagctcttgcgaatcaacagccttcgacgcagcacccctcagtgcccgccaagatacccactgtccagtttggacgacctggagaaccttgagcattgcaccttctgctctatgtagatcttctttagtccatgcacacagctcattagatgtaagctccttgtgcttgtctgctgagggttttgacatcttttgaccttgatggaggaggtgcataatgaagcggaaaagatcccggagggttactagttggcgattagagagcgcccaataaagagcgattgtgttctgcaatggagtcctaatttggctgcggtgcgagaagtacagcgccaggtttatgctggaaagcatgtctactgcatttcggtaggtgtctgaggtgagagcaaagctgccggcaccaaacttgtatccccattggccgtaccaagggtgcccacttatgactgcatgaagaagtctgtagtccattccatgtttcttggatatatccatgacagttaccttcctgcagtaatggaaatgatagttattaggttggagaaaggcatcatggaaagagaccaatcccaatcaaacaactgttatgttctttgggccagcggaaattccatttacctcacatgtaacaccttgcacaggcgatcccacaggctcattatgtcacggccagtgaggaatcttgagccaccttcacgcccatttaccctgagaagatgcccataaccatttgcatgcaccacagcgtgcagcaagtgggtggggtcatccagatgcagcggccatgggtgttccgcagcggaggcagcaggtgcgccggcggccagaaaggtggctactgtcgttctcgatgatgaaatggtaccgcttcacgcagaccgggtgtccactccagcctacaaccaaacaaacaaatcagacgcatgattccattgcagatgccgtgttgttgtatgtaacagtgtgcaagtatatgacaattcaatcaatcattctaacgggcggttgcacactgaaagcaacagcctaacgattgggattggctgatacgacgaaaactagcagatatttcagtgggaaaaaaactgcccgcaaaaatcaataaaatttctaagaaataagacagtcgttggatttcaaaaacttaaatcgacgacaagaaaacagtaacagaggagcagatcgtaagaagaaaaaaacgaacgggttcgtccattgaatccaaaacaaaaaaaaa

SEQ ID NO: 148129 - DNA, 1227 bp, Zea Mays
gggggacggcgtgttgaccggacccgggccaccccgtggatgcgcaacttggtgctgtggtgcagcacaaactaataacagaaagtccaaggtggaggtgggtcccacgtgcagcgacgcagccgccgcgcggggcgagaaccctagacacgggacaacgaggtcgagccgagcgcatcgtttattactgcaacaacaacaactggttccccccctccctccctccgttattgctgattcttcccgcaccggcctcagcctgccctctctctctctctctctctctctcccccttccttcctcgagcagctccacgcgcgacgccatcccaatgctctccacgcctcattggaccccaggaagcaatcgcgctgatcggggccgccgcctagcggtgccgtgcgggttagggcgcgaggctggcgctagctcgagctcgcggctgccgcaaggtcggtggctgggtccaggcgcctcccgtccggtggccgcagccctaatcgctgcctaggtgctggaaaggtgaggagtatgtcctcgatacgatttggatttgttagaagccagctcctctgttctggcaccatttgctaggattttgttatggtgtttattaggcagccatgaaaagtctgatatgcttcgaacagaagatggacatcagacacaatgggaaatgggtgcaactgcaaggagaacagattaacatcacatcagtggtcagcaacaagatccattaacaccacgcaaggtccacaaaagcctttagcggccatgggtgttccgcagcggaggcagcaggtgcgccggcggccagaaaggtggctactgtcgttctcgatgatgaaatggtaccgcttcacgcagaccgggtgtccactccagcctacaaccaaacaaacaaatcagacgcatgattccattgcagatgccgtgttgttgtatgtaacagtgtgcaagtatatgacaattcaatcaatcattctaacgggcggttgcacactgaaagcaacagcctaacgattgggattggctgatacgacgaaaactagcagatatttcagtgggaaaaaaactgcccgcaaaaatcaataaaatttctaagaaataagacagtcgttggatttcaaaaacttaaatcgacgacaagaaaacagtaacagaggagcagatcgtaagaagaaaaaaacgaacgggttcgtccattgaatccaaaacaaaaaaaaa

SEQ ID NO: 148130 - DNA, 129 bp, Zea Mays
aaacatctagcaattcgccctgacactagtttcatgtcttcagcatatacttctttcgttgaaagactccattgtcaggttggcagtgaaggctggtatggagttcatcctccttatgaagatgtcgac

SEQ ID NO: 148131 - DNA, 863 bp, Zea Mays
aagcaggttcaaaaactgaactaaacccaccgaaaaaccctccgtttccccgagggctcagttcgcacgcttcccaacatggctctcggtgccctagcccgcctcctccgccttgcgcccacccctcgcctcgcgcgccccttcgctgcaaaggtccgtgcgtctcggccgcaggaaccggagcttccgtcggaggacgacaacgacttcgccggcggcgagctcaccgcccccaccgagggcatcggcaagccgctcgccgaggtgctcaaagagctcgggaagagggttccggactcccttgtcaagacccgcgtcgagaataatggcttcgctatcaagtacatcccatggcacattgtgaacaaaattctcaacatacatgctccagagtggtcgggtgaggtacgcagcattgtttactcatttgacgggaaaacagtatctgttgtctatcgagtgactcttcatgggattgatgcagagatctatagagaggctactggaactgcttctgttgatgatacaagctatggtgatcccatacagaaggcagaagctatggcttttcgtcgtgcttgtgcacgtcttggtcttggactccatctctaccatgaagatatgtcatagactcgtagttgactaatgttagtgtttgtggcggaccattgtcccttaatgggctacccatttgcactgggcatgcttctttttcttaaatgtggtatgtatgtgcaagtgtttgaagtttaggctgtcatgctatatgtcagctatcaaagtaccaaatgcaactactgttctgagctgtttgcttgttacgaaacagctttccagtatctaaattcccgagtttcatgaaa

SEQ ID NO: 148132 - DNA, 982 bp, Zea Mays
aagcaggttcaaaaactgaactaaacccaccgaaaaaccctccgtttccccgagggctcagttcgcacgcttcccaacatggctctcggtgccctagcccgcctcctccgccttgcgcccacccctcgcctcgcgcgccccttcgctgcaaaggtccgtgcgtctcggccgcaggaaccggagcttccgtcggaggacgacaacgacttcgccggcggcgagctcaccgcccccaccgagggcatcggcaagccgctcgccgaggtgctcaaagagctcgggaagagggttccggactcccttgtcaagacccgcgtcgagaataatggcttcgctatcaagtacatcccatggcacattgtgaacaaaattctcaacatacatgctccaggtgaacttctcgtcatcattaggatatttgtttgccctctttttgatgacataagttcagagaaattgaactgtcagtgagttacttttcttctactatcgtcttgtaatccattacagagtggtcgggtgaggtacgcagcattgtttactcatttgacgggaaaacagtatctgttgtctatcgagtgactcttcatgggattgatgcagagatctatagagaggctactggaactgcttctgttgatgatacaagctatggtgatcccatacagaaggcagaagctatggcttttcgtcgtgcttgtgcacgtcttggtcttggactccatctctaccatgaagatatgtcatagactcgtagttgactaatgttagtgtttgtggcggaccattgtcccttaatgggctacccatttgcactgggcatgcttctttttcttaaatgtggtatgtatgtgcaagtgtttgaagtttaggctgtcatgctatatgtcagctatcaaagtaccaaatgcaactactgttctgagctgtttgcttgttacgaaacagctttccagtatctaaattcccgagtttcatgaaa

SEQ ID NO: 148133 - DNA, 730 bp, Zea Mays
aagcaggttcaaaaactgaactaaacccaccgaaaaaccctccgtttccccgagggctcagttcgcacgcttcccaacatggctctcggtgccctagcccgcctcctccgccttgcgcccacccctcgcctcgcgcgccccttcgctgcaaaggtccgtgcgtctcggccgcaggaaccggagcttccgtcggaggacgacaacgacttcgccggcggcgagctcaccgcccccaccgagggcatcggcaagccgctcgccgaggtgctcaaagagctcgggaagagggttccggactcccttgtcaagacccgcgtcgagaataatggcttcgctatcaagtacatcccatgatctatagagaggctactggaactgcttctgttgatgatacaagctatggtgatcccatacagaaggcagaagctatggcttttcgtcgtgcttgtgcacgtcttggtcttggactccatctctaccatgaagatatgtcatagactcgtagttgactaatgttagtgtttgtggcggaccattgtcccttaatgggctacccatttgcactgggcatgcttctttttcttaaatgtggtatgtatgtgcaagtgtttgaagtttaggctgtcatgctatatgtcagctatcaaagtaccaaatgcaactactgttctgagctgtttgcttgttacgaaacagctttccagtatctaaattcccgagtttcatgaaa

SEQ ID NO: 148134 - DNA, 120 bp, Zea Mays
gcagtatgaacatgacgacctagaggcatggcttattgtagaactcctaaaactctagtgtttggttcccttaaacacaatgaaacgcagctctcctgcgttttcggaaaaaaaaaagaa

SEQ ID NO: 148135 - DNA, 306 bp, Zea Mays
atggcagcacatcgctgcacactcgtcaccagcaagcaagctcaccggtccggggcagcagcaggaggaacggacggacatgcagagcgtcagcagtacaccactcggcaccaaagaggcaaagacttccagctgcggacgtcgatcagcattcaggaggcggccgtcatcctgtcctgcctgcctgcctaccatgtggccaaggaggaggagcaccatgagtcgatccccatgacttcgctgccggcgccggcattgaagggggaggcagccgcgcgctgcccgctggatcatgagtgcatgtga

SEQ ID NO: 148136 - DNA, 2955 bp, Zea Mays
gacgagatctcgcgcacaagagcacaaaagccataaacacctccttcctcgtctgcccttgatggagctccggccgtttcaaaaacccctatcccccgccccgcgccacgcggctgcgtctgcgcatcctcggcccttggcccgcgtcgccttgcgccggacgccgcgctgcttctgatttccgacctctcctactggggggtcggccggattccgcatgtccttgtcgtgttggagggtgcggtttcctggtgcggatgtgagggaagccgggaggggcagggaaggaatgcagaggtcgcggaaggcccttctgcggaggacggcggcggcgcaggtgcagagcgcagtggcggaggctgctggtaacgggaggaagaggcgtctgtacggcttctccgtctccctcgtcgtcaccttgtgggtcgccgtgctcctgctccactccctggtcgggcacggcgatggtcaacgagatggaggcggttctggtgtcgatattacttttatcgagcctgccttgaatggtggtcctgttaattcggctgtacaggaagtgcatggagagaatttggcagtgccgggtgatacctgtgttggatctgtcgaaaatgctgtgcttccagaggacacgctggtgcaagcagctcagttgtgctccaatgatgaggcacggagtgagaacacagaagctctaacaaaaaacaatcaggttgagctttcaggggatcagtgtgggtatcttcctcagccagattttgattctggagttcaaccaggggagaaggtggagagtgaagatttgccgagaccaccaagactatcacgggttgctcctcctgatcttgatgaattcaagacaagagcaattgctgaaaggggacctggtatttctagtcaacctggtaatgtcatccaccgaagggagcctagcgggaagttgtataattatgccgcggcatctaaaggggctaaggttctggatttcaataaggaggctaagggtgcttccaacatcttagataaagacaaagacaagtacctccgcaatgcttgctcagcagaggggaagtttgtcatcatagagctttctgaagaaactttagtagatacaattgcaatcgcaaattttgagcattattcgtctaatccaaaagaatttgaactgctgagcagtctgacatatcccacagaaaactgggaaactcttggaagattcactgccgcaaatgcaaggcttgctcagaattttacttttcttgagccaaagtgggctagatatttgaaactgaacttggtaagccattatggttctgagttctactgtactctcagtatgctcgaagtgtatggaatggatgctgtagaaaagatgcttgaaaacttgattccagttgagcataagaaaacggaacctggtggcaagttaaaggaacccattgagcaaattcctttgaaagagtctgctggaggaaaggaatcctcacaggaaccacttgacgaagatgaatttgaactagaagatggtaaaccaaatggacatggtgatccatcgaagaatggtgctagtgatccagtttcagagacaaggacacttcaggctggcaggattcctggagatactgttcttaaggtgctaatgcagaaagttcaatctcttgacgtgagcttctctgtcttggagaggtacctagtggagttgaacaacagatatgggcaaatatttaaagattttgattccgatattgatagcaaagatgccttgttagagaagatcaaaacagagctgaagaatcttgagagcagcaaggacagcattatgaatgaaattgaaggtatcatctcctggaaagtagttgcttcctcgcaactaaaccagcttgtcctagataatgctctactcagatcggaatttgaaacatttcggcaaaaacaggctgacatggagaacaggagtcttgccgttattttcctcagttttgttttcgcttgcctagctcttgctaagctgtctataggcatcatgtccagattttgtagattctatgactttgagaagttccataatgtaagatccgggtggcttgtgctgctgcttagcagttgcatcatatccaccattttgataatacagtaacacaagcattcaacctcacatgttcaaggaatcaaggctgtacattatagtcgcatgaggtttctgtttcaaaaacaaactatacctctttcacagctcatgcaatttcaaacagcgcagttgtttcgcgccattagttgctgtctcagttcggaggtccttttacagccgcagcagcagcagcagactactgcgagtagaatatttttcttgttccgctcaaggttttggggaatgtaaagcaaatcgacctggaaagcatgtgcagtctacctggcatacttgtggatcggcgcgcttctttatttgttcaaggaaccagagcatggtccccatgtggcttccatgttgccaatgtattcattgtcatggaggcatgggttaataattaatatactagtagtattcctccttccatgagcactgtgcagtccatgttcttcagctggccttctggctcgtgcacatggcctcaacgctgggactgccttgaaaggcactgtggagtccatgtttgtttccagcaggaaaggcgtcgctgataacttcagtcagcactcagcagcaaagtcaacgcggaaaaatactactacacgattgtgtgaagtgaaatccactcctgtctggagctcttttgagttggttgagagttgagaccgtggttgggttgcagtaggtcgctgatgcggactagtccaaacagtttcagaaatggtcggtcatccacgatggctgacagattttgtttcatattatgtacagaagacgcgaactgtatgcaaactatgaatgtgaccaacggtcagcttactgggtgt

SEQ ID NO: 148137 - DNA, 2322 bp, Zea Mays
ctcatctttcaacttgagcagtggccaccatctctgcacaaaagataacccccccaggaacaacgaacaataattgagagattcgacgaccgaatgagtatcctgtgacggcctcggcaactcgctagctccatctcgccatctatctgttcatgaaacaaagcactatcttcttctagagctggtcacccaatctccctcgcttccacagtcacagaggccaggactcctttttttttctggtggaatgtaggggcaacgcggaaaacacgctgcaaaccttgcgtgcaaagtaggcttttaccaccaaaacctagcaacaatccatgttcttgcgagaatggcaggcaccagcactccagcagagtccactacatgtattgcatcagtcagttccggcgcaaaaagtgcaacggcgatcaaaagcgagtgtatacgtacggtcactgaattcatttcagaatcaggtttttgctatcacccgaaaatgacacatcacctccttgagcagttcagtcggactggactgtagggatacacatcctgtgcatcgatcgagatttctgcggagggcggacgtccaagtcgcttgctttgcttcacccggtggagaaaccagagcacagcgcatgacttttataaatatatatatcgttcgatctatctatctatctatatatactcctgttgcgtagaatcggcacaagggtgcacgttcaggaggagctctcgtggcgtcctagtctgtggaaggtccaaagaagaagatggacggcgagatggacgaggacgtgctcacggagatcctcgcgaggctgccgtgcaggtcgctggcgcggttccagtgcgtgtccacgtcgtggcggcgcatcatctccagcgactacctccgccgccggctgccgctcatcacgtcgggcgtgctctaccacgatggtggcaggaggcagcagtcgtacacgtacgcgtgcgcgtcaggcggcggcggcggcggcggcgccatggcggaggccgcggacatgcgcttcttcccgcgccacgagacgtccaccatcatcgacggctgcaacggcctgctgctctactacgcgtcccgcccggcggcgttccacgtcgtgagcccgaccacgcggcggtgggcggagctgccggcgccgcgcgccatgacgctgctctccgtgctggcgttcgacccccgcgcctcgccgcgctaccgggtggtgtgcttcaccgggtggctgccccggggcgccaccgtcgaggtgttcgactccgagcgcggcgcgtggcggggccacgagctcgacttcggcctcggcaccgacgccatgtcggcctccatgcactacgccgccggcgcgctccacgtgctggcctactcgggccacgtcgtccgcgtcgacctggacaccatggcgtgcgcggtcaccccgctcccggcgcccgtcagctgccgcgcgcgcgccgggcactgccgcggccgcctgcggttcgcgtccagcgacggccagcgcctcaggatctgggagctccaggacgccgccgcgggcgagtgggcgctcaagcacgagatcggggtcagcgacgtcgtccccggcgacgcggcgtcacagcccatcacgttcctgttcatggcgttccaccccgaccgggagctggtgtacctgtggtcgccgtggaagctgctggcgttcgacttggtcgagaggcgcgtccaggaatgggtgttcggctccgagaaagaaggcacgcatctcatacaggtttggctgttcccgttctcgcgccatttggccaacgcgctggcctgatcaggccggcttgccgacgagccaaaaaaaaaaaaaagaaacatggggcgcaaatgttcgttgcctatccacactgctctgcttgcttaaacattgataaaatatcaaaaaaagaaaaagaaaataatgcgtcaaagactgtgttcgttgaacaaaaaaaaaagggagaagaaaaaagacgataggtagtagaactgaaaaatacatgcatgtaacaattatacattgcacgacatgtccatgtcctgtatatatcatgattactggtattaggactgttcacctgtaacggtgtgcaagcgtggaactgtctgtgtcgttgattttctagtaatgtttaagaacatatatatatgtggttcaagttactttgaatgttgttagcaactggagcaagttgcacaggagatatcaagttgtcaactgaatcgatgtgacagcttacagcgtgtactctcattgtattattatcgtggtacgcttgagttgaaatcatgccactcctttcctt

SEQ ID NO: 148138 - DNA, 1572 bp, Zea Mays
gccagttgagtaaacagtaggccaatgttctccattttcaaaggtaaagatcttatctcgagttctccgccgccgtcgccgctatgcctccctccccatcctccgccacgggctccgcctcgccgtccggctccgcgtccgcctcggcctccgacccaaccccgtcctggtgggagtccgtgtcgcaggcgcgctcccgcatcctggcgctctcctccatcctgccggccccggcctcccacgacgtcgcggcgctggccgacgccgaccgaccggcgcgcgcgctcctccgctcgcccgctgcctacgcggcgctctctgacgcactgcgggcgggtggcggcgccgatgaccccgcctgccactggctctacgacacgctcctctccgccgaccccgacctccgcctcgccgcgctcgcgttcctgcccctgctggcggcgctctacctccgccacctcccgcccgagctccgctcctcgctttcgggcttcgaggccgtcctcctcgccgtctactcctccgaagccaagaatcgtcaggggaagccggtcctcgtccagatgcccgacctctctgtcccatccctgtaccacacgccagcgatggcgtccagcctcagctccaagtcccctcggtggtcgcagcccccgcagtccccgccaatcccccctccgcaggcgactcccgtggtgggggttctctcgccgccgctggagccacaggccgcggtgaaatcaacgaagcgcgcgggaatcattgggatcgcatttgaggcctactattctaagatttggcagatgcttgctgcgtcgaaggtggatgcctgcaatgctgctgctgcgtgggcggggcagtactgcaaatgccgttttgagctggatgagaaggaactggaagaagaggaagctgactctttggggtctgtctcgccagtgtcctcggaggctgagaatgggaaggagctggtggacgaattggccaggctgcgtatcaatggagacaacaattgcagcgaggaggacatggaggcaagggtgccacttccctgggacctgctccagccagtgatgagggttcttggccactgcttgcttgcaccgctgaacctggccgaggtgcatgatgctgcagcagaagcagtgagggttgtttatgctcgtgcgtgccacgaccttgtgccacaggcaatcttagcagcccgaagcttgatcgagcttgacaagagtacacgaaaggttgcaaaggcagcggcagtggtggcttctgggcaaattgtcacagttggcactgctggaagcaacacatcaagctctaggccaagttcgaagccaaacacaccaagcaaacagcggaagcctgatacactactcatgtccaaatgaggttaattgcgccacatccagaaagagtgtttgcgtatggtacagtttctttctgatgagtgttgtgtgttcgccacttgaatattggtgaaagttttgtagaccttgcgatgctccaaatgtttggcgaatctgggcctagaaattgtttctccacagatgagcccatttcagttattaatctaag

SEQ ID NO: 148139 - DNA, 1454 bp, Zea Mays
agtgctctaactaaaccaaatatggccatagtactagagaatccccgacaggatttagcactccatacattttccctgcaactcggtcggttctccttccccatatcgttcctctcctgatacgtggcgaaggaggaactgaacgtctgaatctgaaccctttcgttcctctcctattcgaactcctcgcagccaaatccgatggcggcctcatcatcagcgggaccctcggcggtagacgcggcctctctcgccgcggtggcggaggcggcgccgccggaggagatgacgctggtggtgaagtggcgcgggcaggagcaaacggtgcggatggtgggggacgatacgctcggtgagctcaaactgcgcatctgcgaggtcaccggggtgctccccaagcgtcagacgctactctaccccaagctcatacttaaggacatggacgactccaccctcctctcctccatccctttcaagcccaacgggaagatcagcatgatcggtacaattgaagaagaaatatttgtcggccaagaagatgatccggagttacttgacgattttgactttgagcagaatgaagctacacccattaaggataaagatgtctacaagcaaaaattaaagcgacgcgcaagtcgttataagatcaagctcttgaatccgtgccgcaaaggaaagaagctgcttgtccttgacattgactatactctgtttgaccataagtcaacagctgagaatcctatggaactcatgcgcccatatcttcaccagttcctcacagctgcatatgcaaaatatgacatcatgatatggtcagcaactagtatgaaatgggtggagttgaaaatggaacaacttggagttcttagcaaccctgacttcaaaattactgctcttatggatcacttggctatgataactgtgcaatctgaaaatcaaagtagaaagaagacttttgactgcaagcctcttggtgtcatttgggctcagttccctgagtactacaacgaaaagaacaccataatgtttgatgatctaagaaggaatttcgtcatgaatccacagaacggtctcgtgatcaagccattcaggaaagcgcactcgaacaggcatgatgatcacgagctggtaaagcttacacactacctgctttcgatcggagacctagaagatctcagcaagcttgaccacggtaaatgggagtcctttgtagatgagagcgtaaagagacgcaagcgctcttagtttccgtcagtatagtgactgtcagaaagaaaaacagaacacccattttcttttcttttcagtgctacggatacctcgcagattagagtaaccgaatgaccaggatttactttgaacaatctggggcttcagcctcgtcaagttacagtgcttcctgcttcctgaatctatgctcaaaacttttaatcttgcgctgatttttgccc

SEQ ID NO: 148140 - DNA, 1297 bp, Zea Mays
aggatttagcactccatacattttccctgcaactcgccaaatccgatggcggcctcatcatcagcgggaccctcggcggtagacgcggcctctctcgccgcggtggcggaggcggcgccgccggaggagatgacgctggtggtgaagtggcgcgggcaggagcaaacggtgcggatggtgggggacgatacgctcggtgagctcaaactgcgcatctgcgaggtcaccggggtgctccccaagcgtcagacgctactctaccccaagctcatacttaaggacatggacgactccaccctcctctcctccatccctttcaagcccaacgggaagatcagcatgatcggtacaattgaagaagaaatatttgtcggccaagaagatgatccggagttacttgacgattttgactttgagcagaatgaagctacacccattaaggataaagatgtctacaagcaaaaattaaagcgacgcgcaagtcgttataagatcaagctcttgaatccgtgccgcaaaggaaagaagctgcttgtccttgacattgactatactctgtttgaccataagtcaacagctgagaatcctatggaactcatgcgcccatatcttcaccagttcctcacagctgcatatgcaaaatatgacatcatgatatggtcagcaactagtatgaaatgggtggagttgaaaatggaacaacttggagttcttagcaaccctgacttcaaaattactgctcttatggatcacttggctatgataactgtgcaatctgaaaatcaaagtagaaagaagacttttgactgcaagcctcttggtgtcatttgggctcagttccctgagtactacaacgaaaagaacaccataatgtttgatgatctaagaaggaatttcgtcatgaatccacagaacggtctcgtgatcaagccattcaggaaagcgcactcgaacaggcatgatgatcacgagctggtaaagcttacacactacctgctttcgatcggagacctagaagatctcagcaagcttgaccacggtaaatgggagtcctttgtagatgagagcgtaaagagacgcaagcgctcttagtttccgtcagtatagtgactgtcagaaagaaaaacagaacacccattttcttttcttttcagtgctacggatacctcgcagattagagtaaccgaatgaccaggatttactttgaacaatctggggcttcagcctcgtcaagttacagtgcttcctgcttcctgaatctatgctcaaaacttttaatcttgcgctgatttttgcc

SEQ ID NO: 148141 - DNA, 1465 bp, Zea Mays
ctgcaactcggtcggttctccttccccatatcgttcctctcctgatacgtggcgaaggaggaactgaacgtctgaatctgaaccctttcgttcctctcctattcgaactcctcgcagccaaatccgatggcggcctcatcatcagcgggaccctcggcggtagacgcggcctctctcgccgcggtggcggaggcggcgccgccggaggagatgacgctggtggtgaagtggcgcgggcaggagcaaacggtgcggatggtgggggacgatacgctcggtgagctcaaactgcgcatctgcgaggtcaccggggtgctccccaagcgtcagacgctactctaccccaagctcatacttaaggacatggacgactccaccctcctctcctccatccctttcaagcccaacgggaagatcagcatgatcggtacaattgaagaagaaatatttgtcggccaagaagatgatccggagttacttgacgattttgactttgagcagaatgaagctacacccattaaggataaagatgtctacaagcaaaaattaaagcgacgcgcaagtcgttataagatcaagctcttgaatccgtgccgcaaaggaaagaagctgcttgtccttgacattgactatactctgtttgaccataagtcaacagctgagaatcctatggaactcatgcgcccatatcttcaccagttcctcacagctgcatatgcaaaatatgacatcatgatatggtcagcaactaggtaagcttttggcaccctcatctatcagctaattgtttatgattctgattcgagattgccaaggcaaagtagtagtagtaatacatttgatccttggatgcagtatgaaatgggtggagttgaaaatggaacaacttggagttcttagcaaccctgacttcaaaattactgctcttatggatcacttggctatgataactgtgcaatctgaaaatcaaagtagaaagaagacttttgactgcaagcctcttggtgtcatttgggctcagttccctgagtactacaacgaaaagaacaccataatgtttgatgatctaagaaggaatttcgtcatgaatccacagaacggtctcgtgatcaagccattcaggaaagcgcactcgaacaggcatgatgatcacgagctggtaaagcttacacactacctgctttcgatcggagacctagaagatctcagcaagcttgaccacggtaaatgggagtcctttgtagatgagagcgtaaagagacgcaagcgctcttagtttccgtcagtatagtgactgtcagaaagaaaaacagaacacccattttcttttcttttcagtgctacggatacctcgcagattagagtaaccgaatgaccaggatttactttgaacaatctggggcttcagcctcgtcaagttacagtgcttcctgcttcctgaatctatgctcaaaacttttaatct

SEQ ID NO: 148142 - DNA, 1127 bp, Zea Mays
ccaattcaaacagtgagacggcggcagaggcagacaacgccgccatgaacgccttcttcacgtccctggcgcgcgggctggacgagctgggccgtgcaggcgggctgtcgtcgctgccggctctgctgcgggcggcgtcgctgctcagggggctgcactcgcagctcacgctcatggtcggccagctccacctgccgccgggcggccgctggctcgacgagtacatggacgagaccgcccgcctctgggacgcctgcctcgccgtcaaactcggcctcgcctccgtcgagcggtattgcgcagcggcctcgtgcgccgccgcggcgctggatgactggctccaggatccctcccctctgtccagtagccaggtgatgcgggcgatctccgtgtcgaggagggaggccatggccgcggaggaggagaaccgcgcgctggcggacgcgaggatcgcgccgctctcgctgcagctggacgagcggcttctgctgcgcgcgacggacgccaggcttacgggcttcaacggcttccgggggctgctgcacgcgctccacaacgcgagctcgctcctcctgctcatcctcgccagcggcgccgtctcgtgcgccgccgcggccggcggcccgtgcggcgcggacgacgccggggccggcttcgtggcgtccatcgtgatgctgcagcagcggatggcggaggaggccgctgacgctgagtccgacgggcctggcgcgcccgggatcgggatgtgcgagttccggtgcgcgcgcgccgccgtggaggcggcgcgggaggaggtggagcgcgccgccgccgccgccgccgccgccgccgccgcggcagcgggtcgcaagtgcgagggcggcggtgtcgtgaaggacaaggtggaggagctcaaggcgtggctggacgtgctacggaccggcacccatagcctggtgtgccagctggacgacttcctggacgacattgtggagggaaggaaggagctctccgacctgtgcagccattgatggatcgatcacgcctcctgccctgcccccggtcgagcctcggagctccagtgccaggataaagatcaccatcgtcatcacgaattcacgtgaacgaatgaatgatgctcgttgctt

SEQ ID NO: 148143 - DNA, 1736 bp, Zea Mays
ccaattcaaacagtgagacggcggcagaggcagacaacgccgccatgaacgccttcttcacgtccctggcgcgcgggctggacgagctgggccgtgcaggcgggctgtcgtcgctgccggctctgctgcgggcggcgtcgctgctcagggggctgcactcgcagctcacgctcatggtcggccagctccacctgccgccgggcggccgctggctcgacgagtacatggacgagaccgcccgcctctgggacgcctgcctcgccgtcaaactcggcctcgcctccgtcgagcggtattgcgcagcggcctcgtgcgccgccgcggcgctggatgactggctccaggatccctcccctctgtccagtagccaggtgatgcgggcgatctccgtgtcgaggagggaggccatggccgcggaggaggagaaccgcgcgctggcggacgcgaggatcgcgccgctctcgctgcagctggacgagcggcttctgctgcgcgcgacggacgccaggcttacgggcttcaacggcttccgggggctgctgcacgcgctccacaacgcgagctcgctcctcctgctcatcctcgccagcggcgccgtctcgtgcgccgccgcggccggcggcccgtgcggcgcggacgacgccggggccggcttcgtggcgtccatcgtgatgctgcagcagcggatggcggaggaggccgctgacgctgagtccgacgggcctggcgcgcccgggatcgggatgtgcgagttccggtgcgcgcgcgccgccgtggaggcggcgcgggaggaggtggagcgcgccgccgccgccgccgccgccgccgccgccgcggcagcgggtcgcaagtgcgagggcggcggtgtcgtgaaggacaaggtggaggagctcaaggcgtggctggacgtgctacggaccggcacccatagcctggtgtgccagctggacgacttcctggacgacattgtggagggaaggaaggagctctccgacctgtgcagccattgatggatcgatcacgcctcctgccctgcccccggtcgagcctcggagctccagtgccaggataaagatcaccatcgtcatcacgaattcacgtgaacgaatgaatgatgctcgttgcttacctgcatggctgtacctgtacacgcaaattaaagtcaaatacgtaggagatggagagggccttggcgcctgtggtctcgcggcattttggttgcccatgatgctgttcctgtatcgttgcggctgcgtctctgccatgaaaggaggaggtatggtatgatgggccgggatgagagagagaggtggagttggaagacgagagacaactgatcgatcaaaaggttgcttcttgtttgttcgcctgggcacgcagagagtgtggcctaggctggacccctgccattcattccccgtggaaaactaatggcagctttggttgcttctgtcctccgttcactcgctttctcgaagctctcagcttcaacctcacgaaaactacacccggagccggaggccggagcactggttaattaaagacacaatactttagttaacctagcaataagcataagggcatatacaataggtgtcttaagttatgtcttaaaatgtgtttagaggataaatataaaaaaaactcaagacatgtatcttgacgaatacacagtgtcttagctctatattcgagaccagaggctacttgattggtcattttaatttatttaatac

SEQ ID NO: 148144 - DNA, 591 bp, Zea Mays
aacgcgcgcaaggcgcgcatcaaacactagtatgatggatcctgggatggtcggacggatgggaagacacgaccggagcgaaaacgctgccatggcttccgccccgtggcgcgcttgtcggggttggaccggcggtgtcccgggctttctggaacggcagcggggattggctggcctcaccgggggagcagcccggctttctgctgcgcattcaagaaaaaaggacctctggccctttgccgcctgtgtcgctcgccctcgccctcgcctccaccccatcgctgatcggccgccgggaagaagatgcagcagctggcggagcggcagatgggagctgcccatggatcgcatcgatcggcggcaaccgagtcggaggatcatggtgtgaaggaaaaggaggagctcctcggcgtcggtctgggttgaagccggaattaggcaccaacgtttcatcatgtttttttttttttctttctctgtcccagacgacggacaggcctcatgaatcatgatgtctccgtgtcactgtgtcggtacttggctaccaagatttgtcttctcctgggccgtagtcaagacatgttgacaaca

SEQ ID NO: 148145 - DNA, 825 bp, Zea Mays
atggcggctgctgagaaggctggagcagtgaagtgggatcaagtgttgagcaccctggatacaatcgtgcagaggatcgaatcggtggagcgcgctcaacagcagttggcgggacaacagtcgttggcgaattcggtggctgagcaagcggcgcgcgctcgtgatgagatggcacgccagattgccgagacaggcaagcgggtggcttcgttgacattggagcagatggcggctggcatggaacagtttggggatggatctcctgcgtcgccttcgacttcacctgtgtttgcttctgatctgaggcgtgatgttcctcctgggggacatcgtgctccacacgatcgtggtgctcagattattgagtgccaattttggaaacggcaaattcaggttgtaagagtccatggatacgaggctgatgatgtggtggctaccttgacagaacaggttctacagaaaggttacagagttgtcatagcctcaccagataaagaattcaagcagctaatatctgatgacgtacagttagtcatgcccattcctaagattggccgatggtctttctatacattaaggcattatgtcgctcaatacaagtgtgatccaactgcagacttaagccttagtgagtatatttcttcggtattgatccatggtttctgtaaccattgggactctgttatatttgagcaacttgctatctatgctgcacagggtgcttcatgggtgatgaagcagatggtgttccaggaatccagcacttggttctgggatttggcagaaagactgcacttaaactactgtaaaaacatggttcattag

SEQ ID NO: 148146 - DNA, 258 bp, Zea Mays
atgggaggtggctggaatagggaagtggagattaggcgagcaggaatgcaggggcgagctcgccacccggggcaaggaaaggggcggccatggagaaatctagagcagggagggagtgcgaggtcgtccaacgcagggggaaacagaggtgagcaccagggagatgcggcgtcaggcactgaagggggctcagccggcgaccagcacgacggcgcagcagggcgcgaccccatggagaaggacgagccagagaaatga

SEQ ID NO: 148147 - DNA, 2494 bp, Zea Mays
atggggggcttttgctccaaggagtcggccgtcgacaagtcaccaagcgacactacgctcggcccaggcagggtggtcgaccaccatgaccgtctagtggtgaaggaggagaagaaagctgtggtgggggaggctgctgccaagaggattcaagaagagcaacatcaacagcagcggcagccagcgccgccaccgctgcacgtatcggtgtcgcggactgcagtgcctggagcttccgcagataccactgcagcaccatgggatggggtaccaccactggcacggttgccatcgctgaagtcggggatgggtgtggcgaataaggtttcggaagtaagctcaattctgggtagagctagtactgctggccttggaaaagcagtggaagtgcttgatacacttggcagtagcatgacagatttgaatataagtagttttggatcaggcactgcaacaaagggcaacaaaatatctattttagcatttgaggttgccaataccatagtcaaaggttgcaatctaatgcatgccctttcaaaagatagcataaagtacttaaaagaaacggttctgcactctgaaggtgttcagaatcttatatccaaagatatggatgaattactcaagattgttgctgctgacaaaagggaagagttgaaagtgttttctacagaagttgttcgctttggaaattgttgcaaggatcctcagtggcacaatttgaaccgctactttgataagctggcatcagaactgactcctcaacatcaattgaaagaagaggcagaatcagtaatgcaggagttcgtgacttctgttcagtttacagctgaactataccatgaaatgcatgccctggatagatttcaacaagattatcagcgtaaacagcatgaagaagatggttcaagtgttgtgcaaagaggtgataacatgcacatactaaagcaggaagtgaaaagccaacacaagcatgttaaaagtttgaggaaaaagtctctgtggtctaagaatttggaagaggtcatgggaaagcttgtggacattgtgcacttcttacatttggagatccataatgcatttgggctttcagacagtgaagaatcacaggaacctaccaagcgacgcaatagattgggttcagcaggccttgcactgcattacgccaatatcatcagtcagatcgatactcttgtttctcgtgcaagctccgttccttcaaatacaagggatacattataccaaagtttgccaccaaccataaagtcatctctccgttctaagctacactcctttggagtcaaggaagagcttactgtttctcaaatcaaggctgaaatggagaagaccctgcgatggcttgcccctattgcaagtaacaccaccaaggctcatcatggtttcggttgggttggagagtgggcaagtaccgggttagatgtgaactgcaagccaactgggcagctggacctgacccgaattgagacactgtaccatgctgacaaggacaagactgaagcatatatcctcgagcttgttattaggcttcatcatcttatcagtcaaactaaaactgctaatggtgagaggtctccaatcaagtctcctgtccagtctcctacacaaagaggggcctcaatcacattgtctccgaacataaaaaacagcaattcatcacctcttctgacgcaagatgaccaagacatgctaagtgatgtcaagtacaggacatttatccctggtataagcaaaagccaagagtttgacactaaggaaagacataataatcaaagcaggttaagcaaaagtaacagccattcaccaagcagtggcaaccggaaagaggcgctatcgatctcgatcaggaggctgcttcctgtgatcgactttgagatcgaccggacaaaagccctcgatgtgattgatagagttgacgatctgagagtacaatgatgaacctagattaatcaatgccaaagtctgaaaaatgcaccctcagtctatgatccagaaaatcaagattgcttgaggccctgttcggttgttccggattagagccccggattaattcctagccggattacttctctaatttatatagattttgatgagctggaatgaatcctggcttattccggtacaaccgaacaggccctgaaggataccagtaatcgctgagctaaattggcatgctgtcagagtgtcagtattgcagcaaggtagtgagataaccggcatcatggtgccagtttgatggcaccattagggttagagatggtggccatgggcgcatgtcctggccaactttgtatgatatatggcagggtgaataggaaagtaaaattgtattgtaaaaagggatttcttctgtttgttagcgcatgtacaaggaatgcaagttttgagcgagggggcatcaaagatctggctgtgtttccagctgtttttgttagccccatcgaatccttgacataatgatcccgcttaaataagc

SEQ ID NO: 148148 - DNA, 2530 bp, Zea Mays
atgcacacgcggcctccactctccgcgcggccttctctcgagtctcgacacaaccttctcactttctcagtagccgctgcgcaccgcactcgcacgccaccctgccgccctgccttgcccaaccctgccgcagtgccgcatccaaatccaactcccacggggtatggatcctgatcaggtcgccgacgccggggtccagcacgacgacctcggcggcagcgccacatccgcaaacgggtgctttgacggtggcagtgacgacggctgggggcgcgcgttgctccggctgggatgggacctgtccaggaaggccgtcatcgctggcgtggcggccacggccgcgcccgtcgtggccccgccactgcttgtcctgtccctcgccggcctcgcgctgtccttgcccttcgccgcctacctggccagcctcgccgccaccgaccgtcttatgggcgcgctcctgccggcgcctcgtactacccagccgtactgcggctgcgacctcgaagacgatgaattcttggatccatctgaagcgccgggcgccgaggccactgcactcgaccactggcgcgacacggaggacgacgccatcatggaggaaaacgagagctttgtgccgttgccgctgtcacgacaacctcgattctccgaagagccgataacatcatcgtcgacagacgtggaggataagatggctgaaggtgagtctctttcccgaggattgggccacgagtcactagtgttggacaataaggaaggcacaatcatggaggacaccgagtacattaccatggaggcaccgccgagaggctccgatgttttcggatcagcagtgcctgtgttgcgtggtgaagacgatatggttcagagagcggtagaagctcctcttacagccaaggaatcagtccaagaattatctgtatcagacagtgaggatagaacacaggacgacaagtgcaaagatgcggagtcttccaaggagattctgtcactgagcgtcgacatcactgaatcaagtgacttcccggtgccgggcaatgaaggtattgtggttcagaggggaaatggtgaaacaatttctgtccgaaaatcaggccaagattctcattcaacagagattggggatgaaatggagggccacaaaaccgaagaagagataccactgcacgacgctaatgtttcagaatcgtcggtgctggatgatacagtgctggaggagaggaagatagaaggtgatgtaacagtggggatggccgtgaaagaagtgaccatttacacggatccttgtacaggggaggtggctggtgatcaagtagattccattgccattgccctacctgctgaaagcgagttgatgcaagccagcaatgttgacgatgttatcaacgctgctttaacagaaggcattgtgctggatattggtgatactagtacagagggcacggagcactacggtgagggaggtgtttctactgccgtctcggtggtgaccgtggacgatgttgcagagacagtttccagtaggagtccagcagtctcagtcatcggcgatgacatgactagtgtcaagagtaggccagatgctgacagctccgatcaaacaactggctacgacgcgctaaggagcaaggaatttcgggagaaagaggtaatagaggacaagtgtgtgaaaacagaggagagcaaaaccgtgcctacagagagcacgtcaccaccacggatcattcaagtttctagatcgccagcgccagacggtcagagcagggtagaagacgaagcagccgtggggtcggtgctggaaggagcggcgaataacaccgacgatcttgccacaccacgcgcggtggtggttgctttgcaatcgagcatttctgctggtgaaagcgagccgccgtcggcgagtgaccgtgttgagtacaagccggcgaacgaaggatttaggaggaatgcgatagctgaggacacggacaactacacggaggaacagatgagggagcagcttgatgccctaagaacaataaccgggtaccgtcccacgccgtctttgactctggaagccgagctcgtgggtctctatgtattcgtgggcgtggaaccccctgtcggctccggctccagggaagactccgacctgagtgatctcagcgcaaaactcaggctcctgaaatcgatcataggcgtggagtaaagatctgaagcgggaactgatttaccaggagttctgtgcttgtgtataatgcataaggttcagcggtccagggttcatcccgcacgtgagctttgttacgctctgctggttttaatctcaaaatccatccatgtggactagagtggattgaggatgtttaaattcctagcaactcaaaaatctctcctgctccctctcaatcccctttgaccttcatggtgggacgacaggtagctgtgaactacgtatcctactctatatttttgtgtggaaaagacgttaacgaacgtgctgtatatggcctacttcgcactagtgatgcgaacaagggatggccatttg

SEQ ID NO: 148149 - DNA, 180 bp, Zea Mays
atgggcacgaatcttgaactaaaactaggggggtgtctatattcagtacatattaagctttctttgcccgacatcatctcccagttttttgcattcgccaacaagttctgctatgagggcttgaagccaacctacgacaaccgggtcacaaccatggtgctggctctcgacgacgcctga

SEQ ID NO: 148150 - DNA, 1137 bp, Zea Mays
gtgctcccgtgcgtaagtggctgtcttaagtactagcgtagccgaaagagacggtatgcattttgtaaggaaaacttagtatcctggaatagaactcctctggttctcctattcttctcctcctccttccaggttgctaacagagtggtatcaaagacacctttccttggccgtccgccatggcttctccacccatcgattcagccctcacgctcgccctcgaacaccaaacccgctccctgttgtccgagttggacaaacggttgtccgccatggatgtcaagtgggaatcccgtgtcggagagcttgaatctcaggtctctgcatccagccgccgcctggattccgtcaccaccgacctccgtgcggatgtggagatccagttctcctcagccgccgatcacctccaccagatcgaagctgacgtcaaaactcgcgtcgccgccctccaatcgactatgcacgtcttcgagctgtggcgccctcgcgtggaggcatcggtcgagtccctccactcctccgtcgattcgatccgcgccgaggtctccaagatggggatccgctggtccaccgacgcccgtgtggatggatctggacaacccggtctcctcggtgcgcacgggtctggatccggaagggtccctgctcctgaagaacctccagatcgcccacgttttgggtcctgcttcgagaattactaccgggatagtgggcacgtgcaccccggtgccgacgctcactacccggtcacgggttctggtgcagtggtccaaccttcctactgagttagccacatgggaagaccaagacaacctgaggcaatgttatccttttgctcctgcttgggggcaagcaggattccaagggggggaaaatgtcaacaatgagagtatggattcccctacagtcagccgaggcgtaccaaacggcgaaccggaagcagctccagttgtccgcacacgccgtgtctgtcgcgccaacgtccgtcagcaaggaccagagtgggtgcagtgagtcggcatattggtgttgggtctgagcctgcgtgctcccgtgcgtaagtggctgtcttaagtactagcgtagccgaaagagacggtatgcattttgtaaggaaaacttagtatcctggaatag

SEQ ID NO: 148151 - DNA, 734 bp, Zea Mays
ctgaacgctccttctcagttggcgattgggtttacatgaagctccaaccctacgtccagtcttcagtgcttccacgtgcccaccaaaaactcagttacaagttctttggcccttatcgagtggccaacagggtcggttcagtggcctaccgattggaactcccaaattccagcaggattcatcccgtcgttcatgtctcccaactgaagctggcaaaaggtttctcgggctctgctacttcttccttaccggatgaactgccagagttcagcataccactccgtattttgcagactcgtggctttgctaaaggtaaacgctttgtgaaacaggttctggtgcagtggtccaaccttcctactgagttagccacatgggaagaccaagacaacctgaggcaatgttatccttttgctcctgcttgggggcaagcaggattccaagggggggaaaatgtcaacaatgagagtatggattcccctacagtcagccgaggcgtaccaaacggcgaaccggaagcagctccagttgtccgcacacgccgtgtctgtcgcgccaacgtccgtcagcaaggaccagagtgggtgcagtgagtcggcatattggtgttgggtctgagcctgcgtgctcccgtgcgtaagtggctgtcttaagtactagcgtagccgaaagagacggtatgcattttgtaaggaaaacttagtatcctggaatagaactcctctggttctcct

SEQ ID NO: 148152 - DNA, 1701 bp, Zea Mays
gatgacgtcgagagtttatcggagacattctatttcactttccaaacaccgctgtcccttcccctcccagcgctacccaccatctccgctcttccctctccggctcatccccgccgggcttccgccttcctgcacacctcgccccgtttcttcctcgaacagattctctgccccaccccgattctacctataaatcacaactgcacacccccgaatcccggcaaaacccaacggccgaagctaagctcgagccgccgccgcgatgatcctccgtatccgcagccgcgacggcacggaccgcatcacggtcccagactcggcctcagtcaccgtcgccgacctgcagcgcctcatcgagtcgcacctcaccgtgcccgtcccgctccagcgcctctccctcgacccggccctcctgctccctaacccctccgccgttgtcccactcctcaccgactcggcggcgccgcttgcctcgctccgcctcgccaacggcgccttcgtctacctcgcatacccgcccgacgcgcgctcggcccgcccgccgccgcccaaggcactttccgccgctggctctttcggcaaaaagatgaccatggatgaccttatcgcgcgccagatccgcgtcacacgccaggagaacgcgctctgcgccgccgcctcttttgaccgcgatgccgccaacgcgttccagctctacgtcgccgagttcctcggcttcggcgtcaagcgggcgggtttcctctacggccgcgtcgacgcagagaccaaggatgtcttcgtcgactttatctatgagccgccgcagcagggctccgaggacgtggtccacctcttgagggaccccgacgaggaggcccgcgtcgataccatcgccgaggggctcgggatgcgccgggtcggcctcgtgttcacgcaggccgttgggagaaaggccagcgagactggtgagtacaccatgtccaaccgggaggtcgtgcaggcggcccagctgcaggctgagggcgggatcccggagtgggtcaccgccatagtcaaactggaggtgggggatgacggcaccggggatgtgcacttcgaggccttccagatgagtgagatttgtgtcaagctcttcaaggatggggtactggaaactgaggttcaggatgctgatgatccccgtctgtcaaagatgcggaaagaggtggtggctggggggaaggatactatggaggtggataatgacttcttcctcgtgcccgtcaagatctctgatcaccagggtccactctcagtaggctttcctatagagaaccgtggaaatcctgtgagcatcagcgcgttgagaagtcacctggagcggatgaagcatttggcatttgtgaagcggatctcggacttccatttgctcctcaagctcgctactttcctagatgtaaaggcagacatgcctactatagctgcatgtgtgaaaactcagagcagggtgcccgaggggtaccagcttctgatcgagtcctttgctagccagggataatatcgcatctgaaagcatggcatggcgatgcataatttgtttacttgatcacatcatgcatgtgtaacttatggatgtctcttggtgtataagtattgtgtgaattccttctttgccatcaaaatatatgtttattccttctcatgtcatgaaataaaagttgccttcagtgccatcggttttaa

SEQ ID NO: 148153 - DNA, 1215 bp, Zea Mays
gtcactccgtccccgccagggtttgacgtcgtcgtctctctctcggcggcccgtccggccgtccccgtcccgtctcttgcgtactccgccaccaaccgcttttgcttgccgctactcgccgcctgccaaaagcagccgtcctccctagctcgcccgcccgaagcgacgcctgacttcgcatctgtttcgttccacccgccccgcgagaagcttctagaagggggagacccgccggagccatgccggaggaggagtcgacgtcgatcccgctcagccaggcggcggaggccgtcgaccccgaggacccagccaagtcgccgccgcgacccagctcgcccaccacctccacacgcaaggcatgctgtgctgttcttcaaagttgggtctcaagaaaatttatgactggatgtgtagtccttttccctgttgcagtcacgttcttcatcacatggtggtttattcaatttgttgatgggtttttcagtcccctatatgcaaaacttggaatcaacatatttggtcttggttttttgacttctctggtattcatatttctggttggaatatttgtttcttcatgggttggttcaaccatcttctgggtgggagagtggtttataaagaaaatgccatttgtaaggcatatatattcagcgtcaaagcaagtcagcactgcaatttcaccagatcaaaatacgacagctttcaaagaagttgcaataattcgtcatccacgaattggtgaatatgcatttggattcataacatcaacggtggtccttcagactgacaaaggcgacgaagaactgtgtagtgtgtatgtgccaacaaatcatttgtacatcggtgatatatttctggtgaactctgaggaggtcataagacctaatttatctattcgagaaggaatcgaaataattgtttcaggagggatgaccatgcctcaggtgattgcatcactggagcccatgccacggaaaagccagaacattcgtctaaatagaatgacgtgatgtaaaacaagccacatgcatcaaggtcaaagtttccaacttatataacccagctggtttgttttccatgtgatttggatagaggagcagctttgtgctgagctattgtggcattctgtagtgcaggggaagcatcgtgttgatgcccagggatattattcccacacaagttgtgctactcattgtgcggggtgtttggttt

SEQ ID NO: 148154 - DNA, 1454 bp, Zea Mays
ctctcggcggcccgtccggccgtccccgtcccgtctcttgcgtactccgccaccaaccgcttttgcttgccgctactcgccgcctgccaaaagcagccgtcctccctagctcgcccgcccgaagcgacgcctgacttcgcatctgtttcgttccacccgccccgcgagaagcttctagaagggggagacccgccggagccatgccggaggaggagtcgacgtcgatcccgctcagccaggcggcggaggccgtcgaccccgaggacccagccaagtcgccgccgcgacccagctcgcccaccacctccacacgcaaggcatgctgtgctgttcttcaaagttgggtctcaagaaaatttatgactggatgtgtagtccttttccctgttgcagtcacgttcttcatcacatggtggtttattcaatttgttgatgggtttttcagtcccctatatgcaaaacttggaatcaacatatttggtcttggttttttgacttctctggtattcatatttctggttggaatatttgtttcttcatgggttggttcaaccatcttctgggtgggagagtggtttataaagaaaatgccatttgtaaggcatatatattcagcgtcaaagcaagtcagcactgcaatttcaccagatcaaaatacgacagctttcaaagaagttgcaataattcgtcatccacgaattggtgaatatgcatttggattcataacatcaacggtggtccttcagactgacaaaggcgacgaagaactgtgtagtgtgtatgtgccaacaaatcatttgtacatcggtgatatatttctggtgaactctgaggaggtcataagacctaatttatctattcgagaaggaatcgaaataattgtttcaggagggatgaccatgcctcaggtgattgcatcactggagcccatgccacggaaaagccagaacattcgtctaaatagaatgacgtgatgtaaaacaagccacatgcatcaaggtcaaagtttccaacttatataacccagctggtttgttttgcatgtttactgatattgggttgtgcatcaagcagatagcatgacctgtgtgcttagccatgtgatttggatagaggagcagctttgtgctgagctattgtggcattctgtagtgcaggggaagcatcgtgttgatgcccagggatattattcccacacaagttgtgctactcattgtgcggggtgtttggtttctaggtactaatttttagtctcttcattttattttataaattatcaaatacgaaaactaaaatagagttttagtttccgtatttgtcaatttagagactgaaataaaataaaatagatggattaaaaattaatcctcagaaaccaaacacccctaacactggtccaaaatgctaacgtctatgcttgaggtgcattattgattaaattcgtttataactgt

SEQ ID NO: 148155 - DNA, 1691 bp, Zea Mays
ggcccgtccggccgtccccgtcccgtctcttgcgtactccgccaccaaccgcttttgcttgccgctactcgccgcctgccaaaagcagccgtcctccctagctcgcccgcccgaagcgacgcctgacttcgcatctgtttcgttccacccgccccgcgagaagcttctagaagggggagacccgccggagccatgccggaggaggagtcgacgtcgatcccgctcagccaggcggcggaggccgtcgaccccgaggacccagccaagtcgccgccgcgacccagctcgcccaccacctccacacgcaaggcatgctgtgctgttcttcaaagttgggtctcaagaaaatttatgactggatgtgtagtccttttccctgttgcagtcacgttcttcatcacatggtggtttattcaatttgttgatgggtttttcagtcccctatatgcaaaacttggaatcaacatatttggtcttggttttttgacttctctggtattcatatttctggttggaatatttgtttcttcatgggttggttcaaccatcttctgggtgggagagtggtttataaagaaaatgccatttgtaaggcatatatattcagcgtcaaagcaagtcagcactgcaatttcaccagatcaaaatacgacagctttcaaagaagttgcaataattcgtcatccacgaattggtgaatatgcatttggattcataacatcaacggtggtccttcagactgacaaaggcgacgaagaactgtgtagtgtgtatgtgccaacaaatcatttgtacatcggtgatatatttctggtgaactctgaggaggtcataagacctaatttatctattcgagaaggaatcggtatggtagtttggttaatatgatgcctagcatctctatattattatgtcatgtggcaactttccttgaaattcttgttacttgttttttcctatctagtcaattttgcattacaaaaaacttacgaatccatcgaatcattattgcttgctagaattgataaatcaatatattattcattcttttggtttctgcagaaataattgtttcaggagggatgaccatgcctcaggtgattgcatcactggagcccatgccacggaaaagccagaacattcgtctaaatagaatgacgtgatgtaaaacaagccacatgcatcaaggtcaaagtttccaacttatataacccagctggtttgttttgcatgtttactgatattgggttgtgcatcaagcagatagcatgacctgtgtgcttagccatgtgatttggatagaggagcagctttgtgctgagctattgtggcattctgtagtgcaggggaagcatcgtgttgatgcccagggatattattcccacacaagttgtgctactcattgtgcggggtgtttggtttctaggtactaatttttagtctcttcattttattttataaattatcaaatacgaaaactaaaatagagttttagtttccgtatttgtcaatttagagactgaaataaaataaaatagatggattaaaaattaatcctcagaaaccaaacacccctaacactggtccaaaatgctaacgtctatgcttgaggtgcattattgattaaattcgtttataactgtgatgtataacatcttacgttacaaagagagcacacaacgctctgacca

SEQ ID NO: 148156 - DNA, 1336 bp, Zea Mays
gtcccgtctcttgcgtactccgccaccaaccgcttttgcttgccgctactcgccgcctgccaaaagcagccgtcctccctagctcgcccgcccgaagcgacgcctgacttcgcatctgtttcgttccacccgccccgcgagaagcttctagaagggggagacccgccggagccatgccggaggaggagtcgacgtcgatcccgctcagccaggcggcggaggccgtcgaccccgaggacccagccaagtcgccgccgcgacccagctcgcccaccacctccacacgcaaggcatgctgtgctgttcttcaaagttgggtctcaagaaaatttatgactggatgtccttttccctgttgcagtcacgttcttcatcacatggtggtttattcaatttgttgatgggtttttcagtcccctatatgcaaaacttggaatcaacatatttggtcttggttttttgacttctctggtattcatatttctggttggaatatttgtttcttcatgggttggttcaaccatcttctgggtgggagagtggtttataaagaaaatgccatttgtaaggcatatatattcagcgtcaaagcaagtcagcactgcaatttcaccagatcaaaatacgacagctttcaaagaagttgcaataattcgtcatccacgaattggtgaatatgcatttggattcataacatcaacggtggtccttcagactgacaaaggcgacgaagaactgtgtagtgtgtatgtgccaacaaatcatttgtacatcggtgatatatttctggtgaactctgaggaggtcataagacctaatttatctattcgagaaggaatcgaaataattgtttcaggagggatgaccatgcctcaggtgattgcatcactggagcccatgccacggaaaagccagaacattcgtctaaatagaatgacgtgatgtaaaacaagccacatgcatcaaggtcaaagtttccaacttatataacccagctggtttgttttgcatgtttactgatattgggttgtgcatcaagcagatagcatgacctgtgtgcttagccatgtgatttggatagaggagcagctttgtgctgagctattgtggcattctgtagtgcaggggaagcatcgtgttgatgcccagggatattattcccacacaagttgtgctactcattgtgcggggtgtttggtttctaggtactaatttttagtctcttcattttattttataaattatcaaatacgaaaactaaaatagagttttagtttccgtatttgtcaatttagagactgaaataaaataaaatagatggattaaaaattaatcc

SEQ ID NO: 148157 - DNA, 1528 bp, Zea Mays
gtcccgtctcttgcgtactccgccaccaaccgcttttgcttgccgctactcgccgcctgccaaaagcagccgtcctccctagctcgcccgcccgaagcgacgcctgacttcgcatctgtttcgttccacccgccccgcgagaagcttctagaagggggagacccgccggagccatgccggaggaggagtcgacgtcgatcccgctcagccaggcggcggaggccgtcgaccccgaggacccagccaagtcgccgccgcgacccagctcgcccaccacctccacacgcaaggcatgctgtgctgttcttcaaagttgggtctcaagaaaatttatgactggatgtgtagtccttttccctgttgcagtcacgttcttcatcacatggtggtttattcaatttgttgatgggtttttcagtcccctatatgcaaaacttggaatcaacatatttggtcttggttttttgacttctctggtattcatatttctggttggaatatttgtttcttcatgggttggttcaaccatcttctgggtgggagagtggtttataaagaaaatgccatttgtaaggcatatatattcagcgtcaaagcaagtcagcactgcaatttcaccagatcaaaatacgacagctttcaaagaagttgcaataattcgtcatccacgaattggtgaatatgcatttggattcataacatcaacggtggtccttcagactgacaaaggcgacgaagaactgtgtagtgtgtatgtgccaacaaatcatttgtacatcggtgatatatttctggtgaactctgaggaggtcataagacctaatttatctattcgagaaggaatcgaaataattgtttcaggagggatgaccatgcctcaggtgattgcatcactggagcccatgccacggaaaagccagaacattcgtctaaatagaatgacgtgatgtaaaacaagccacatgcatcaagatagcatgacctgtgtgcttagccatgtgatttggatagaggagcagctttgtgctgagctattgtggcattctgtagtgcaggggaagcatcgtgttgatgcccagggatattattcccacacaagttgtgctactcattgtgcggggtgtttggtttctaggtactaatttttagtctcttcattttattttataaattatcaaatacgaaaactaaaatagagttttagtttccgtatttgtcaatttagagactgaaataaaataaaatagatggattaaaaattaatcctcagaaaccaaacacccctaacactggtccaaaatgctaacgtctatgcttgaggtgcattattgattaaattcgtttataactgtgatgtataacatcttacgttacaaagagagcacacaacgctctgaccaattttcttctttcagacttacaatttcttcattttattttatcgtgtaatgtgtttaactggctatgatccagctttaggcataagcccatggttatcaatctacttgacaccataagtatcaatcta

SEQ ID NO: 148158 - DNA, 1335 bp, Zea Mays
atgggaacggagacggacgttagaacgggggagacagagacggagatcggaatggaggcggcggggagaggcggcttcgtggggacgggcgccggcgccaacgccggagaggaggatacgggaatggaggcccgcgtcggagacggtggccgcgcggggagaacggtggccggagatggcgcggcgtggatgaggctctcgatctcgtccatgtcggactgcgccgacgaggggtggagcgggatcgtgtcgccgtggttgtgcgacatggcggcggacgagcggaaaacacgcgagcgcgccggcgaggggaggcggatctggggggcggtgactccggcgtgcacagccacagcgttctgccgctcgcgcgagacgcaccccgcggccgcatcccggccaaccctcccgcggccaccaatcaacgcccgtggccaccaatcaacgtcgcgccccacccgcgaccttccttcaacggggcatcccgcccgcgaccgcatccaccccgcgtccttccttcaataccgcatcacggaccggcttccttgccgtgggcggcgctcctccgccgcggcatccgaccttctctctcccgcgccctccctcaagtcccgcctcgccgacggagacaccctgtacgttctgttcctcctctccttctcccgtaccctcgccgccctcgccggctacgactacgtcgtcgtcgacatggagcacgggttgggcaggatccccgaggcgctcgcctgccttcgcgtgctggacgccgcgcgcacccccgccgtgctctgcctcccggaggccagcgccgtctgggccaagaaggcgctggacctcggccccgcgggcctcatactccccgccatcgagtcccctgaggccgccgctgaggcggtcgagaccgccaccgcgatcgcgaagatcgacgccaacgccaccgtcgacggcgtggacgtcgtgcagatgggcccgctcgacctgtcggctagcatgggatacctgtgggacctcgggaacaggaaggtccgggctacgctgagggaggccgagaggaaggtgctggaggccaagaagaagaagaaggcggcagcagcctcgggtggcaatgctgcttacctgggcgggctgttccgagaggcagtgatggagatcgacgaggaggatgatgaggatgagaaatgtgagaaggaaaatgacgggtactggagtgaccgaattcttatcaaagctcgtgatgttgctaggagcagtgctcagaatagcttgtctgaaaggaataatttgaaggctatgggtcactacggtctcaagggtagtttctttagcattttataa

SEQ ID NO: 148159 - DNA, 955 bp, Zea Mays
agcgcttcgagccctggcccctagctcgcattgcgagttccagcgagccaaccaaaccattagaccaaccaccgctccgtcagtccctctccttccttcctagttcattccctcacctcatctaaccaagctcccgagagcagagagctgagagagggagagaaaaagtaatccgacggaaacgacaagggcgcggcgagggcggggacgggaaggccctgggcgcggaggcgccgagcacatggcatcgtcgagggtgataccgtcgtcctcgccgtcgcacacggcctcggatctcgcgcgcctagcgcaggccgccagcaggcccggcggcgggggcagcgggccgggctccatgaacgtcgaggagctcctccgcggcatctacagcgacatgcccaccccggcgccgcccgcgtcggaacccggacgcccgatgcccccggccccggcgccggtgagcgccacgcggaagacggcggaggaggtgtggaaggagatcactggcggaggtggcagtggggaagccgtggctcccgtggcggctcaggctgtcgctcccgatggtggcgctggcacaggcggcccggaggtgacgctggaggacttcctggccagggagagcgcggtgaaggaggatgaggttaagatttctgtcccccccgcgccggtcatggggttaccgggcggagcggagggcgtgagtgtgcctggcggcggaggcgggagggaacggaagcggcagcttgtgagtacagtggatcgcgctcgctctgctatccagcgagagaaacgaatgataaaaaaccgcgagtctgctgccaggtcacgggagaggaagcaggcctatatcgccgagctagaatacatggtaacgcggctcgcggaggagaaagctgagttgttgagacaacaggaagagcagttccagacgcggcttgaagaggtaactttc

SEQ ID NO: 148160 - DNA, 399 bp, Zea Mays
aagcctgcttatcggagtaagactgttcacttccttgctgaatctacctgccatgttgacaagaaatctagaaaataaaccaggcagaatgcaacacgaccagacaggaacaacaacctttcttggtcatgacctacacaacatgatttcatttaagctttgtgtcggctaattgcccatgcaatttcagttaaggtactacaactaagttggcgcatataaatagaaaaatgacatacagggcgcaaattctatgttataacagtaaggagacggcggccgagcttggctcaaatctaccactgcattgagttcgttcttctaagatctcgtgatgtttttttcctcagaatggctggcgtcgctcggtccacgagctgcatcaaccaaatgtattct

SEQ ID NO: 148161 - DNA, 1669 bp, Zea Mays
ctcaagtcacaacaaacaccaccatccctttgctcagagcatcacactccctctctctcgcgcgcgctcacaagcacgtcgtcaaccatggttgtcgagatgaaggagaacggcggagcggcgttggcggcgggcgagaaggcgccgcagctgggcgtgaagcgcggcgagccgacgctggtgccgccggcggaggcgacgccgacgggcgggcagtactacctgtccaacctggaccagaacatcgcggtgatcgtgcagacggtgtactgctacaagccttcctcgcccggcggcggcgaaggcaaggaggacgtggacgtggcaggcgcgctccgcgacgcgctggcgcgcgtgctggtgcactaccacccgctggcggggcggctgggcgtcagcccggagatgaagctcaccgtggagctgaccggcgagggcgccgtgttcgtggaggccgacgccgcctgcgacctcgacgccgtcggcgacctcaccaagcccgaccccgccgcgctcggccagctcgtctactccgtccccggcgctaagcacatcctcgagatgccccccatgaccgcgcaggtgacgaggttcaagtgtgggggcttcgcgctcggcctggccatgaaccactgcatgttcgacggcatcggcgccatggagttcgtcaactcgtgggcggagacggcgcgcggcgtcgccgagctcaccgtgccgccgttcctggaccgaagcgtcctgaaggcgcgcgacccgcccgtgcccaccttcccccaccacgagttcgccgagatccccgacgtctccgacacggcggcgctctacggcgcgcaggagctgctgtaccgctccttctgcttcgacccggaccggctggagcgcgtgcgcgggcttgcgctcgccgacggcgccctgggccgctgcaccaccttcgaggcgctgtcggggctggtgtggcgcgcgcgcaccagggcgctggggctggcgcccgagcagcgcaccaagctgctgttcgccgtggacgggcggcgccggttcgcgccgccgctcccgcggggctacttcggcaacggcatcgtgctcaccaacgcccttgccacggccggcgagctgctgtccgcgcccgtgtcgcgcgcggcggggctggtgcaggacgccgtgcggatggtcaccgacgactacatgcgctcggcggtggactacttcgaggcgacgcgggcccggccgtcgctcgcgtccacgctgctcatcaccacctggtcgcgcctcgagttccacggcgccgacttcgggtggggcgagcccgtcatgtcgggcccggtcacgctgccggagaaggaagtcatcctgttcctggcgcacgggaaggagaggaagagcatcaacgtgctgctcggcctgccagccaccgcgatggacgccttccaagagctcatggacgagatatgattcattcgtcggtgatgacggacatggatgggttgctgctatacatacatttacgatgcagggtgcttatacattcttcaattgctcggtgttatagtacgaccgtgttaatactcgatctatgttgatgttgttaagtttagtggccatatgagaatttgctgtcgattgcaattgttctaatattaatggaaaatagtaaactttatttcctttcatt

SEQ ID NO: 148162 - DNA, 651 bp, Zea Mays
atgggggcccggccggccctgccggagccaaggccagtagtgcttgccgtcgctttgggccacgtgcgcgaggtcgaccgcccctgggaggcctgccttcagcgccgaggggctcgcccgcccctgcctgggtcgaggctgaggccggccgcgcccgcccctgcgccggctggccagcagcgctcgagcccgcgtctggaggccgagcaatgccctcatggctgcggttacccgcgccggagccgaggccggcagcggccgtcgcccgtgcataggggtgcccacactggagcacccgcgctaggcccgagcagggctcgcgccgggaaccagtcgcgtccgagcgcgcctgcgcggagatccggccaccctttgttgtcctcgccggggatgaccgcgctcatggccgccgtggccgagcgctgtacgccggggtcggccgcgcctacgccgagcaccggccgcgcccgcgccgctcatgcgccgagcgccagcgccatggtcacgggcgctgtagcgcacctacccgtgtgcggtctggtctcacctgctcgcgtcggggctcgcagcacccacgtcgaggcggcgtttggccgtgcgggcctcgactcgtcatggccgaatgagtggagcgatggagatcgcacctag

SEQ ID NO: 148163 - DNA, 338 bp, Zea Mays
tttttttttaatacaggtagaatcatattaatttacaatcattataccatgatcctcggcgtcaattggcactcctgtagtacttttttgcgacttaacatccggtgtgtttctaagggcatgtacagtgggtgttttaagttgtgtcttacagtatgtctaggggggtgaatgtaaaaaaactcaagacacgtatcttgacgaagacacagtgtcttagctctatgttcgagacaggagactatctgattggtcactttaatttattgaatactctgattggtacaatgaatatcgtaagacacatgttttagacatgaccactgtattatgttgtg

SEQ ID NO: 148164 - DNA, 1397 bp, Zea Mays
ctcgtgagctaccaccgtataacactcccccctcctctcccggccccccacaccacaccacaccacaccactccttcaccccatcgaaccctctcacatcacaacattctcggcgaatcctccgtcccagctcgctccatccaagctcaccccccccccccccccccccccccggcgcgcgtggtggtctcgatcgctaccatgctgtcttcacaccacgaggccatgctgccgtatgcgccgccgtcgctgctggtggaccgtcggtacaggcagcaacaagccggagaggcggcgcccagctgcccgcgctgcgactcgcccaacaccaagttctgctactacaacaactacagcctcacccagccgcgctacttctgcaagggctgccgccggtactggaccaggggcggctccctccgcaacgtgcccgtcggcggcgggtgccggaggaatcgccgggccaagtcgtccgtgcggtcggcgttcggcggcggccaccggttcgtccagggccccgtcgtccggcccgacctggtcctggaaggcatggtgtcgaactcgaacccagcccatgagatgcccgccgctgccgacggctccaccattgatctcgcgatgctgtacgccaagtttctcgatcaccaccctccggcgccggaggaaggcctcggtagtgccgtgacgccggagctggcggtggcactggctgggccagagcggctcgacgaggcattattcgacacgttcagcgacctgagcccaccagctggcgttctggcggcgccgccggtgcagttcgatccgccgtgcggccacgacgacgggttcgacgactggtcatcgggcgggccagtgagcagcgccgggccctcgagtacggccagtactgccaccgcaaccacatgcatcccgccgtgcgccgacgtgagcgtgcacgctgcgttcggcgaggagttcaacttcgccaaggaccagagctgcctattattcgactcgctagggctgcccacggacgacgtcggcgacctctcttcgtcgtcgtggcgttcgatcgtgccgggcttgtcgacgctggaggacaccgagtatgacctgctggactcgtcgttccctgacgacgccctcagccttcacgagggcatggttagcgggactgatcatgactgctggagcgtggtggattgccaaggattggaggctctctacatgccataactacacacgtgataaaaaaaatcttcttcttcttcttcttgctaatccggtggtgttcttgtgatggttggtttcctacatttatttctctttttcttttctttcattcaattcggtttggaagaaatatatatagagatacgtatgttttcgaagagaggtacgtacgtgagggacaa

SEQ ID NO: 148165 - DNA, 215 bp, Zea Mays
actatttttaaaatctgttttatgtttcctggaaacgattttcactggcggttttattacgtcgaccgccagtgaaaatcgattttcactggcggtcttcagttacccgcctgtaaaaatgatgatttttactgggcccctagcactggcggttacgataaactccactaaaaataggtttacgaccgccagtatagatcttctctgtactagtg

SEQ ID NO: 148166 - DNA, 866 bp, Zea Mays
ctgcatagaccccgtatctgtcacgaacttgtctgcatttctgcaacagcgagcgaaatggcggcgtacgagaagcagcggccggaggctccgatgaacgccgcgtactacggccagccgatccgtccgctgcagccgccgtactatccaccgccgccgccgccaccgccaccaccacaaggtccaccaccgccacgacccgtcccacgccttggcggcggcccgcgctgcctgctcggctttctcgtgacccttatcgtcgcgatcggcgtggctaccctggtcctacggctcatctcgcgcccgtacagcctcaaggcgtacgccgactccgcggcgctctcccgtttcgatctcggcagcggcagcagcggcggaggggacgacctcctccagtacaacctcaccgtggacatccgcctgcggaaccccagccgcttcggggtccgctgcgactacgccgaggcgcaggcgttctacggcggcgaccgcttcgggttcgacccgctgcggccgttctacctggacggcaggagcgacgccagggtcacggccacgttcggcggctcggcggtggtagacggcgacggcgcgcggcgcacgtaccagagggagagcggggaggggttctactacgtcaaagtgaaggtgtacgcggacctcaggttcagggttaggacgatcgtccgccggcgtgttttcaagagcaagatcacctgcgtgctgcgcttgcctgtgcccgctgccggtggcggcgtcaactccacggcgatgacaacgctagggacgaggtgcgacgtagacttctgatccttgccgattgtacaagggtggccatgcatcctttgaccggcatgggataagcg

SEQ ID NO: 148167 - DNA, 1797 bp, Zea Mays
tgtagtacacatgccgtagagatactattatctgtcagcactgctccctgtctcctttactccttttacgctgcgtgcacactcgcctcgccgctctaattatccttcttcacaagctcccgctctcacctcttcgtctcagctctcggcccctcgatctcatctcactcagcccgcctgtgctctgccatccaatcgtttccctgcgctatcacatggcgatccattaatatatagccccgcgccaccaagctcatcctcccgctccaagctccgagaacgcaacaacccactgtaccccgccgtctaccacgagctcgtagcctcggctagctagcgcttgtacgttcgtgtgcgcgcaagcacgtactccacgcgcgcaggctgcatccggccagccacaccatgtcgggcacgggcagatggtcctcctcctcctccaggaaggggaggggcagcagcagcttcacgctgaggcagccgccggtggtggacatcggctgcaactgccgccgccccaagctgttctccgtcttctcctcttcctcctcgtccctgttccgcggcggccggggcaagcccaagtcccccaacgcctcctccgcctccaccaccaccacggcgttcacggccaccaccaacgccgggacgcgcagcggcacgacggccaactccaccaccgactcctcctcgtggggcgcccccgcgtcgttcgtcgccaccaactcgctgtacgaggaaccggtaccggcggtggcgccgctgcaggagcgcgagcaccaggatcaggcgaggcggcggcggaggcagcagcgccggcgccgcagcagcaggcgggcggccccgcccgcgcgccacggagtcgtggtggaggaggaggaggaagaggaggaggagcacgggcggcgggtggcccgggagagcgtggcggtggcggtggactcggcggagccgtacgaggacttccgcgagtccatggtgcagatggtggtggagaaggagatctacgcgtgggacgacctgaacgacctcctccaccagttcctctccctcaactcgccgcgccaccacccgctcatcctccacgccttcgccgacctctggacccgcaacggcctcttctgcccgccgtctccctgccagttctagctaggcaggctgctcgccggccggtccgagtccaacacggccggcgcgagtccgatacggccggcgccaccgccatgcacgtacgcttgcatgctgtattaaccacgtactactcctaggctcctagctagctagttagtctctgtcagtctgtcttgtcctactggctactgttatttctaccattaacgaaagcacgcacagctcacgcgaggccgagacgctattaaccgaggtcccggccagcgatcgagctagctgcactgcacctgcatcatgcattgttgagctgctgatgctcgtcgccttaattaacctgctgtaagagcgccatgccgtagtccaccacctactgtacgtgttaatgatgcgtgcgtgtgtggcgccaacccccgggagcgcaacgcaatgatacgctggtgtcgctcgagtgtgatcctactgtacgtgtgtactgacacttcactctggaggtttttagcagttccaaacgctgctgcttttgttgcgattcgagtgctcaacgctgccgcaaccgtcctgtgatcctgtcccctcccctgcgtttggcgcacgcacgcacgtacgagctgccgtcgctctgcacggcgcgcgcattacgccgccgcgcccccagctagctctccg

SEQ ID NO: 148168 - DNA, 1482 bp, Zea Mays
gtctcacctgatcttttttgctaaaaaaaactctagaaacaaagacagagagaaaaaagaaagctaaggagtcgaagaggaaaaggagaggtggccaggtggtggtgggggacgaccggacgaggaagtagtggcctgtgcgtgccgtcgcggaggagggggtggcgatggagaagggcgcgggcacgcggcggcggcggctggtggaaaggggatcggatcgccttgccttcatcaccggccagacgcgcagcctctcctgcgacccgattccagattcaccacttcgttcacagtttgaaggtggcactcgtgatgatgggttcagcgagagaaatcagttgcagaagtcagaacctagcgacctggtacctggatttcaagatcctggtactcgccaaggagtcaaggctagaaccttaagctatgatgccctggtacctgaatttgaacgagctggtggccgccaagaaaataacgcaagtaccttgagctatgaagacgaacttttccgcaaatttaagatgggcagtgcagtccctgaaattcagccagtaaatcaaacaccattgcatacccatgatcaggaaactgtgagtaacaatataattcatgctggagttagtaagaatactagtcatgatggagttagtaagaatacaagtcatgatgaagtggcaagtgtccaacctagcagagaagcggaaatgagacccagatctgcacctccaagccaatcaacccaagcggacaattcaggttggtctgtggaaactctgatggaactcttagatttcactccacaggaaataaccaaggccatttcggcgaccgagagtaaccgtttcgtagcatctgtcgtcattgctttcctggtggttctgtcaaactggggccttgacattggtggtgccatcaccagagtattagttggtacaaggcctcttctatttctcattgtaaccaacatcaccattgtcttcacattgttgatggagaacaaagaccccaatgtgagaagcagacccgttggcgtcaatctgggttcagctgatagcttagggcagatgctagagatcgggttgctgctacagaaagcactaggtgctctgctgattgactgcagcgtttgcgctgttattatgatatgttttcttggattctgagggagcctgggtagaagtctcacagaaacctttgtaattttttttgtctcatgctctggactgttattccattttgtaacatctcattttggctgagttctaatttatgcacccatgttttctgtttttctgagcgtctgtagttaattagagattacttgaaccaggtcaatggatacagactacagagcgaagagcgaatattcttggtgatcttatatcttgattatttagcgctagtttggcaatctcatttttacaagggattctcatttttctaagataaagtaaactatttttttgaaaaaaataaaaa

SEQ ID NO: 148169 - DNA, 1602 bp, Zea Mays
tccaaaaataaaatccaatcgaggggaaaaataatccttttcccgttcttctgaagctgtcctcttcttcccgtcgcttcgccgtcccgcaccagggaggagaggaggcttcaccgcgaagctcgccatgatctcgccggagaggagttcgtcacagagcccgcggtcgcaggcggtggcgggggcgccattcctgtggatatctgtcatggatcccgtcagatgggcaccggcgtgcaggcctacatctcctaccgcgtcatcaccaagaccaacctccctgaatttgagggaccagagaaaattgttattcgacgctatagtgattttgaatggttgcatgatcggcttgctgagaggtacaaaggcgtttttatacctccccttccggagaagaatgctgttgagaaattccggtttagcaaggagttcattgaattgcgtcgtcaagctttggatttatttgttaacaggatagcttcacaccctgaactcaagcaaagtgatgtcttgaggacatttttgcaggcagatgaagagataatggatagggcaagatcttatgagaccggtatttttaagaaaccatcagattttttacagatgtttaaggacgtacagtcaaaagtcagtgatgttgttctgggaaaagaaaagcccgtggaggaatctactcctgaatatgagaagcttaaaagttacatatttgagctagaaattcatttagcagaggcccaaaaacaagcataccgtcttgtgaaaagacacagagaacttggacaatctttggcggacttcggaaaggcgattaagcttttgggctcttgtgaaggagatttgatggaaaaggtgttttctgaagttggttcaaagtcagagatgttgtcaataaagctacaaagagaggcagacaaccttctctttaactttgaagaacccttgaaagattatgtgcgtgctctacaatctataaaagccactatgctggatcgagctaatgctttcaggcagcactttgatttggatcaggagaggaagtataaagagcttaatcttgaaaaattgaagttcatgaaccctgagaagtatgccgaagcagaatctgagtttagagggttgaaagcagacagtgaggaggctacgaagaagtttgaacacatagtaagactaatgaacgaagagctctctcgtttccaggagcagaaaacagctgacattggactcgcattccatgaatttgccaagggtcaggctaagctagctaaggacattgcggatgcatggcgcagcgtcctcccaaagctcgaagcttgttccacatcataaagtgtgatccgtgtttcctcatgatgtttgggaaggggttggtagctggtgaggtttaggctgttttttttttccagcctgttttgacacggattcctgtatacttgaactgcgggttggaaatgtaccagctgttagattcagttgacataatttcttgctgtttgagcctgtaaccatcatctcttcttagatcaattgacacaactgctggaatcgcgtaataatggtaatcaataatgaagaaatgctgtaccacggtgctggttcctgtaa

SEQ ID NO: 148170 - DNA, 1943 bp, Zea Mays
cggccccggaacgaggtgctgactggtgagccgacgagcaagacgacaagagccacccccacccaccacatctcagaccacaaacgccatcatgcaccgactctgatccaatttcacacgcatactagcgccgccggtagcagcaccggcagccgcgttcctctccgccatggatcccgcgaacagcagcgcgggcgccgagctcgacgacgcgtccgagtggcgcacccgggcgctgggcggcacggagtacagctggctccgcgccgtgccgggcggcaccggcaccacgctgctcgcgctccgcctatcccgcggcgacgcggccgaggcggcgctgcgctccctgcgggacgcgcaccccgtcctccgcgcccgcctccggacctcttctccctccggcccgacgctggcgttccccgatccggcaccgccgttcccgctggcgccgctcccggccccgggctccgcgcccgacttccacgcgctcctcgagcacgagctcaaccgcaacccgtgggccgacgaccccgcgtcctccgacgacgccccggtcctcttcgcgacgctctacgagctcccagccgccacgggcgacgcggcgctgttcgtccggatccacacggtcgcgtgcgaccgctcggcggcgagtgcgctggccagggagctcgtcgcgctgctggccggcgccggcggcgaggagcccgacccggaggatgcggcggcggaagcggggctggaggcgaggatcccccagagggacacctggaagccgttctgggcgcgcgggttggatatggtgggctactccatcaacggcctgcggacgtccacgctgccgttcgtggagaccggcacggagaggtccacgcagatgctgcggctcgggctcggcctcgacgagacgacgaggctgctcgacgcgtgcaaggagaacggggtgaggctgtgctccgccgtggccgccgcgacgatgctcgccgcgcggcagtcgaagccgctggagagcggccagcaggagacgtactctgtcgtgacccttatcaattgccgcaagtttcttgagccagtcttggaggaccgcaacgttgggttcttctactccgccatcaccaacacgcacacgatccacggcggggaagggctgtgggagctggccaagagatgccacgactcgtacaccagcgccaagagcaacaagaaacacctcaccgacatcaacgacctcaacttcctcatgtgccgggccatcgagaacccccagctgacgaccgccggcgcgctacggacggcgctcgtctccgtgttcgaggaccccgtggtcgccgacgtggccgaggtgcagagcaaggccggcgtggaggactgcgtctgctgcgccaccgtgcacggcatcggcccgtcgatcggcgtgttcgactcgatcaaggacggcaagctggactgggcgtgcgtctacccttctcctctgcactccaggaagcaggtccaggagatcttcgacaaggtgacgcagattttgcaccatgcagctgcggctgaggaaaattttggagactgcacctaacgatgtcgtcgggagctttagactgtgttcaacggtgtgcccttggctccccctcccctaccactgtagccgatttaggggctacagtgcgcccctaaatccttcaccggcttcctcctcctcctcctctcccctcccgattccttctctctcccgctaaatggatgggcacgctacgccggatttctcccccgcggtcggttcgttgggccacacaatcgcgcggtcggaaaactccgcggagggcaaaggaggcgaagcaagggcgacgtatccgccgccggagaaggtagccgtcgatccgcttcattggaacttcaaggtccacccgcgatgagcaaagcaggcggtcgatccggcgcggcggtcgggtatg

SEQ ID NO: 148171 - DNA, 825 bp, Zea Mays
atgccccaggtggacctggtgtgcggcgcgtcgggcgccggcgctggcgccggggacaggaaggtgtcgtgcgagacggtcatcgcggggggcagcggcgacgcctcgccgccgccgccgccgccgccggacccggacttccctcccgactcgataaccatccccatcggcgacgacgcggcgttctcagagctgaacccgatgtacgagcgggacgactccaccaagggcagcaccaaccccaagtccgcggccgccgccgtcgccaaccccatcgtcgcggccaagacgcggtccaactccacgcgcgccgcggggggcgcacccccgccccccgcgtccggcaccactttcttcggcctcccagccaggatccgcccgaccttctcccggcgccggccgtcgcagtcgcagtcgcagtcgcagtcgcagggccggatcttgcgcgacaagcgcgcgggcggcgaggtggagccgcggtcgcccaaggtgtcctgcatcggcaaggtcctctccgaccgggagcggcacgggcggcgccgtggctggtggcacggcgtggcggccatgttccggtgcgacggctgcgcccgcgttgcccgcggcgcgtccaggaacatggcggcgctggaggacgatggcgtggagcagcagcagcagcagcaggcgggcgttgcgggaatgcggaggttcaagtccgggaggagagctgcttcgtggggagacgaggcgctggccacggcggcggtgggcgatgtggacgaggggatggagatgcccgacagccaggacgctgagcagtggtcccggcggccggtaatttag

SEQ ID NO: 148172 - DNA, 877 bp, Zea Mays
tgtagagatggcccaattctgttgggccggactcgtcggttttcaacttataaggcccatacagaccaatctgataagcaatttaatgaagcaacctccatatattgtagacagtatatcaaacagacaaaaacactgaaacacacaaggaattctgaacttcgtcttgtgtcacccgtctctcaagtactccgtgctaacagtctagctagtgcacttcctcctccttgtgggtgtagatgacgcagtccgccctggggtaggagacgcaggtgagcacgtacccctcggccctctgcgcgtcgtccaggaacgacccctccgactggtccacctcgccggacgccagcttccccgcgcacgtcgcgcacgacccggcacggcacgagtagggcagctccagcccggcctcctccgcggcgtcgaggacgtaggtgtcctcggccacctccagctcgctctccgacccgtcgggcccgaccagcttcaccctgtgcacggccgccgcggacgccctgacgacccgcgcgacggaagaagaagcgacgcgcggagcatcggcttttttccatgtgcagaatgcccggcgccgcatgctgccgctcgggcctggaacggagcacatcgctgttgcagcagcagcagccgtcgccatgctctagaggttgtcggctgcaaacaacgacgagaccggagtttcaccggggtagagaaattaaccgacaagtacatggtcaaaattcagaaacgataagggatcgaacgcaaagaagggcgtgcgtggagagggtcgatgaacacgtacctgtatgtcgtgtgtcgtctttggctcctccagtagcacgaggtgaacagacgagatagcgcggcgcgaaca

SEQ ID NO: 148173 - DNA, 1955 bp, Zea Mays
atggtgcaaggcgaggagagttcctggaggatggagagggcagcgctgcctctcaaccaggcgctcgcgtatggagtccaagcccacggcgccggcggcgccgccgctgcgccgccgacctgcttcctggacttccaccagcctgcggccgcggccgctgcctacttcgggttcggggagctggaggaggccctcatccatggcggcggcggcggcgtcgatcccggcgtgatcaccaagaacgacgtcgcgcaggcaaagtcggcggcggcggcggcaggatatctcgcgggtgctgctgccaggccgcccacgctggagatcttcccttcgttgccaatgaggcatcaacagcagctgcacagtgggaattcgcagtcagtagggagcaccactgactcgagctcagcccagaacgcaatgtctcagatggagctggcgtccccagcagcctcctctgcgccgcggcaggaggccatgatggtgaccgctgatggttacagctacaagccaggcctcgccgctgcggctgccggtgccgccccgccgagctttcagtttcagcagcagcaccagcaccaccacccgctcccgctgcacggagacggaggtggagaccatgacaagaggaagcatggatccacaggaaaagatggcaagctggtagatgccaagacggaacggcggctggcgcagaacagagaggctgcgaggaagagcaggctgaggaagaaggcttacgtgcagcagctcgagactaccaggatcaggcttcagcacgtcgagcacgagttccagagagcacggtcacactcacagggcgtgggcgttggggggtgcggcgccgccggggacatgagctgtggcgccgccatgttcgacatggagtacgcgcggtggctggacgacgacagcaagcggctggcggagctccgaggcgggctgcaggcgcacctgctgctggacgccaacctgggcctcatcgtggaggagtgcatgcagcaccacgacgagctgttccagctcaaggcggcgctcgcgcgctccgacgtcttccacctcctcaccggctcctggaccacccccgccgagcgctgcttcttctggatgggaggcttccgcccgtctgagctgctcaaggtcctgataccgcagctggacccgctgacggagcagcagctgctggggatctgcagcctgcagcagtcgtcggagcaggcggaggaggcgctcgcccagggcctgcaccagctgcaccaggccctggccgacacagtcgccgccggcacgctcaacgagggctccgccgcccccaactgcatgaacatcatggccgtcgcacttgacaagattgccagcctcgaaaacttctatcaacaggccgacaatctaaggcagcagacgttgcatcagatgcgccgcatcctgaccactcggcaggctgcgcggtgcttcctctctattggggagtactacagccgccttagagctctcagcaacctctgggcttcccgtcccggcgacaccttcatcaggtcagagagcctcagccccacagcaacggaactgcaagccctgcaccaccagcggcagaatcagttcagcggattttgaggccttacctggtggtgcggtggtgtcggagggtgtaaactttggcggcgaaggtgatgttacaaagattagaggttttgagagagagatgcattgtaatgttctatcattaaagtactaagaaagcaatatcactaggcgaaaagggcggggggaaaggaattgctgtggtgcgatgttgggtggctgacctgttcatatggctcttgaactgattgaagggttagccccgcagaattttttgcgggtagcagcagaaaacaaagcagtggcagaagattctggctgctcacttgccagagagcactaattgcagttagagtgacagagtaaccattaaa

SEQ ID NO: 148174 - DNA, 786 bp, Zea Mays
atgccgtcgcccatcaccgggtatacagcgccgggcggcggcgccgccgctgccgccacctggtacatcatgggaggagccgcgttgtgctgcatgcccatcgggccggccgggaccatgccgacgccgtggccgtggccggcgaaggcgccccgcacgacgccggccttcacgaggaagtcctccagcgtcatctcgcccagcgtcgcctgccgcccgctggccgcgacgccgccgccgctcgccgcctggggctgcgccacgggctgcggcgccgcgctggcctggaagtccgccgggccctggctgatctcggcccagacctcctccaccgtcttccgggacagcggcggcggcagcgcgaacgaaccctgccgaaccagtcccctcccacttcctcctcctcctccgttctcacctgtgcccgtcgtcgtcgccacgggcaccggctcacgctccgcgccctccttgttgcagccggctgtggcggcctggaactcctcggcgttccatatgttggccatgaactcgtccatgttcatggatccgaagttgcggcccggctcgcacagcgagttctgcagctcctccagcgtcagcgacataatggacgactgccgcgccagcgggtccaccgcctgctgttgctgctgctgctcctcggcagcgtcgctggtctgggcgcgtgagtgctgcgaggtgacctcctgctcgtcgagggccttcacgtttttgctcatctcggacgccatctctcagtcgacctatgagactggctccttttag

SEQ ID NO: 148175 - DNA, 1226 bp, Zea Mays
gtttaagtgaaacttgctagcctggggattacagaacaaaaatgttttacccacaaccatcagcttctggcgtagctgcaaaacatccattaattctggcaatcagtttacatcactcacataaaatattttcacagaaataggatatagaaagaaactgaaagacagaaccaacttagcactaccgcacatgtgtctcgacgctagacagatgtagttgatattcgagatcaaatcacatccttcctcatctcgaccttccttcggttagtgacttggtgccgaatcttaggtttttgtggactgtcagatcgcctacacggcagtagccatgggaggttgaccgtattccctaattctgtttggagctagggcaggggaggtccctccttacacacttgccagtcagggagacacagaggcaagaagcacctggagccaccacgactgaacagtgggaggcgtggtcgcgtgctcgctggccgaagaagcgtggaggctgcaagtgcctggagccatgacgtgcttgccggtcagggaggcggtgcggacgcacgacgtgcttgtcgatcagaggcgtcgcatgagaagtggatccaagggcgcatcgcgggaggtagcgattgcgatgccgaggagctgcaaaagcgtaggcgcagggcgacggctctacgaaaagggcgatgcggcggggctggactccatctccatctcctcgtcgatgaggtctcgggggatcttggtggaaggcaagcgaccgggctagcttaactgcttggctcttgttcctcctttgctttcccctcccccatgacggagagagcaggctccgatgccgacgaggatggggccagagggggagtcatcgaggacgagggagggggtgcggcgagggtcgttgggcgagggcgggcgtggagcgggacgccgagaacgaccgaggatgatgcggcggacaagggctgtggggagagcggaacgcgcggcggaggcgacgagaacatccgagaacggggggaggagggaggatgagagtggaggaagaggccaaggacatgggggagaaaaccgcggtcgcgatgggcgtcggcatctcccgggccgggggccaatcgtgggcgagggagagctgtagtggcatggtgctcctagatccgaattccctcggtggcaagagagggagtcagtggcggtggagggtcaggggccgagatgggccgacggcg

SEQ ID NO: 148176 - DNA, 561 bp, Zea Mays
accaccaccaccaccaccaccaccaccccaccaccaccccacccccatacgcccccctccccccccccccccacccccccccccctacgcgcacacacacacacacacacacacacacacacacacatatatatatctctctctctctatagagagagagagagcgagccacacacacacacacacacacacacacacacacacacacacacacacacacacacacacacacacacacacacacacacacacacacacacacacacacacacacacacacacacacacacacacacacacacacacacacacacacacacacacacacacacacacacacacacacacacacacacacacacacacacacacacacacacacacacacacacacacacacacacacacacacacacacacacacacacacacacacacacacacacacacacacacacacacacacacacacacacacacacacacacacacacacacacacacacacacacacacacacacacacacacacacacacacacacacacacacacacacaca

SEQ ID NO: 148177 - DNA, 98 bp, Zea Mays
aaatggagcattcaattccgtgtcaaagattgcaattgtgcataatcctgtactaacaagggcaggtgaaagaatatgtagatgggtggtcagaacag

SEQ ID NO: 148178 - DNA, 666 bp, Zea Mays
gggggggggggggggtagggggggggggggggggggggggggcaggggggggggggggggggaggggggggggggggggggggggggggggggggggggggggggggggggggggggggggggggggggcagggggggggggggggcagggggggggggggggggcatgggggggggggggggggggggggggggggggggggggggggggggggggggggggggggggggggggggggggggggggggggggggggggggggggggggggggggggggggggggggggggggggggggggggggggggggggggggggggggggggggcagggggggggggggggggggggggggggggaggggggggggggggggggggggggggggggggggggggggggggggggggggggggggggggggggggggggggggggggggggggggggggggggggggggggggggggggggggggggggggggggggggggggggggggggggggggggggggggggggggggggggggggggggggggggggggggggggggggggggggggggggggggggggggggggggggggggggggggggggggccccccaaggggggggggggggggggggggtagctaggggggtgggtggggggggggtggg

SEQ ID NO: 148179 - DNA, 2197 bp, Zea Mays
tcccctgatataaaacgacctcctccggggacgccacgactcacaacacaagcacgcacccgcgtatgaaagcgcacgcgcgcccatagcaccacggacgcaggcacactcgtatggtcatggctgccgagaccggggcggcgctacgtgaagccgcgagcgccctggcgtcctcgatgcagccgcaggtggccgccgtgttcttcgtgtccgcggcgtgcacggtagcgctggccgccctgctggccgtgctgcgcatgcggccgccgtggtggtgcgcgtgccccgtgtgcgaggcgtacctgacggcgtcgtgggccggcgacttcgacaacctctgcgactggtacgcccacctgctgcggacctcgccggcgcagaccgtccacgtgcacgtgctccggaacgtgctcacggccaacccggccaccgtcgaccacatgctgcgcgcccgcttcgacaactaccccaagggcgccccgttctcggccatcctcgccgacttcctcggccgcgggatcttcaacgtggacggggacgcctggctgttccagcgcaagctcgcggcggccgagctggcgtcgccggcgctgcgcgccttcgcggtgcgcgtggtggcgtccgagctgcggggccggctcatccccctgctccgctctgctgcctgtgcctccggccgcgagggtggaggaggaggaggaggaggcagggtcctggacctgcaggacgtgttccgccgcttcgccttcgactgcatctgcaagatctccttcggcctcgaccctggctgcctgcagctgtcgatgccggtgtcctcgttcgaggacgccttcgacacggcctccacgctctccgccaggcgcgccaccgcgcccatgcacgtcgtctggaagctgaagcgcctgctcaacttgggggacgagaggaggctccgggacgcggtgcacctcgtggacgcgctcgccgcggaggtgatccggcagcggcgcaagctcgggggcgccgccagctcgggcagcgacctcctgtcgcgcttcatggggtccatcgacgacgacaagtacctccgcgacatcgtggtcagcttcatgctggccggccgcgacaccgtggcctcggcgctgaccgccttcttcctgctcctctccgaccacccggaggtcgcggccgccatccgggacgaggccgcccgcgtcgccggcgacgacgacgacggcgacggcgacgacgggcggctcacggactccgccttcggcaagctcaagggcatgcactacgtgcacgcggcgctgtacgagagcatgcggctgttcccgccggtgcagttcgactccaagttcgcggcgggcgacgacacgctcccggacggcacggcggtggcgaagggcacgcgggtgacctaccacgcctacgccatggggcggatggagtccgtgtggggccccgactgcggcgagttccggcccgagcggtggctccgggacgggcgcttcgtgcccgagagcccgtacaggtaccccgtgttccaggccggcgcgcgcgtgtgcgtgggcaaggagctggccctgatggagatgaaggccgtgatcgtggccgtggtccggggcttcgacatcgaggcggtcggccggagctcccgccggcccaggttcgcgccggggctgaccgccacgttcgcgggcggcctgccggtgcgggtgcgccggcgagcacgtgcgagcgggcacaagcgcacaacccgccaatgtgatgaaacggaataaaagaagaagaaaaaaaaatactgctggtgtcatccaggattcgtccctcgctcggcttttgccctgtcgtatttcccgtttcgtattcagacggaatattggtgggttagattttatatcacgcgcgcgcccgcccgtaatctatctagttgctgtcgatcgtggagcgagcgatgactccgtggccactccgctcggcatggcgcaccttggcggcacggagtggacgattggtcagtcaccacccccatatccccacttgagctgctagactaggaggatggctacagattcctagaattgaacggaatcggtcatatcaactcctgctcggctgctctagcgcgaaccggatttggatcggataaggaggggacgtcgccggctccaacttgcactctccagtctccacctgcgatgcgatctcctttttt

SEQ ID NO: 148180 - DNA, 1886 bp, Zea Mays
aaaccctaacttcttttctattctcctccccagccgccattcacatccggccgccaggaagcaccggcgcctggacgacggcgagcctctcttttcccttctctgtcttctgttttcgttctatcagctgcgcagaacttcagccgccaaggaactctggttcttggccgaccgcgcgctgcttcttcctctctgttttttttttctttgccgcgctcgtccggccgcaaggaggctcctagctgaccgcgacgtggttatcctgaccgagcggttccctggctgaccgagtgatctctctgttcttctttttcttaaaaaaatgagcatggccgaccgcacttgttgctctaattatgtcttttctttctttccctgtctttgtttttgtgcgttctctagcatctggccactagttcactggagcacatgcagttcattcgttacaccactggccatacagccatatgcctcacggtctctctctttttttttttgcatcacttgaactcagccgaaaaataccgtggtgctcatggccgtttctggttacacttatactcatatccagcctcatgtattcgatccctctcttctgtgtgaatgtatgtatgagatgtgttataatttatgggatcgagtacggaggtctaaaacgtggatgtagttcactttgcgttttttttcctctgattaacgcgtggatccagtcactcgattaaacgaacagtgctctgtgcactttgactgatccggatttagggttaatttaattagggttgagccctaactggatctgtgtttctgttacttgactttgtttgttggctgtggatcgttggatcctgagccttgtgcaccgtctggttcaactgattagggttaggttattaaaccctaaccctgaaataacggtgcgttttgctctcggtttccatgggttcggtagaccctaacccgagagatctaaaattctttctctctgttcacggggtgatgaacgatgataaaaaaaatgagttcattcatattgattcgagacctttctgtgatctcataagactgatgcggatcataagactgatgcggattaggagatctaggtttcttaggacgcctctgataccattgttagaatctattctatctaggatcgattcctaagtccctagaataccaatccgtaactgaaagtaaaaccttgatgacgtgtagatctgatctactgatctattgagaggaacggggaaacacacctttgttgttgttgctatcttcataccgtcgccctgcagagaagtagcaggcattgggatccgagccgctgtaggttgtcgcgtttccaaacactccgacgcctaggcgatgggggcctctgaggactagggttttggggcgaggtactagcgttagtctttcctgcgaccccttagtcctatatatatagcatcgtgtgtctgggggctccaaccgaggttagcatgggccctcccgatcaagggcccgattaaaggaacgatagttgggttaagcccaatccagtctctattgaccggctgtagaggacacacccaacaattatcaggataagaagggttgaatcgtgttccagcaacaagtggcaagggtcaggttcccaagaccaccagttgcaaggagagaagcaaaatttgggggctgcatcatcgattgtgcatgacgagcgatcgagggcgactccaatataatggcgacccatgctacatttgcacttaatctccagtagggcccaacaacaaaaacaatccttggcgacggcgacggtgtgataatactccaagatgaattatgaataattattattcccttggagatgatattgtgggctttttcgccaggcagtagct

SEQ ID NO: 148181 - DNA, 1942 bp, Zea Mays
aagccagacatctcatgccacgcctctctatcatcattattcaagacaccggaaatgttaccgcataattttacttaaataaatattgtgtgcctttggaaataaaggaatggttattataagaagaccgaaaacccggtccatctctgtgtggccggtatgcttttaaaaaagaactgctacaaagaattgagtgagaggaaacaatcaggcctgatttgataaacaacccccacacgtattggtgaaatgcggcagaggagagatcaggacaccgggcgtgcaaccatgcagggagcaaagacggaaggcagggcggggcgctgtagctgtaggtcttctctccttttcatttcagtgaaggaaactggaattctcgcactaccgcttattatctgaactcgtacactggccgacctcacttggacttggtgcgtgtgtggtcaggaaggcgacgacgacgacgatgaaggttttgctgctccgcacaccgcgcgcagtggcgacgcgaccacagccggtcgccgcctcggatcgaggaggaggagccgatggaggtgcttgtggtggctacggtggcgaggtgaggaagtggatgcagttggtgctgcgccggagagccccattctccgacgtcgactgcgtagcttcgccgtctacagccgcaggattttcggcttcgaccccggtcgggcccgcacggcgaccacagtgcggtaccggaatagggttctcggcggcggggacgggtggtgatggggagatttttcatgtccgttcggattcgtctgggaccctcgcgcaacggccgttgtgcgaggccttttctggccgtccagatgagatcgaacggttggggaaaaaagcggagtttagtttctttgcgccgctgagcgctggcagtcgcggcccaagcctgaggtcacagccccacagtcgccccttcggacttccctttattccccttcctatataatcccatcgccactgccttcttcttccgcttccaacttccgttccgcaaatcgaaagctcggcgttgccctgcctcgagctcgaaggactttgtccctttacgtcgttgtccagctcctcgcatattgtggcctggtgcagattggagatccgcccggacttggatcgagtcctcctgtctttggacattcattggagtgctccattcattgaggcagcatgcctaagataaagacaagccgtgtcaagtatcctgaaggatgggagcttattgaaccaacaatccgtgagttggatgccaaaatgagagaagctgaaaatgatccacatgatgggaagagaaagtgtgaagctctctggcctattttccgcatttctcatcaaaggagccgctacatatacgatctttactacagaaggaaggagatatcacaggagctttatgagttctgcctagaccagggttatgcagaccgtaacctgattgcaaagtggaaaaagccaggttacgagcgcctttgttgcctccggtgcatacaaacacgtgaccacaacttcgcaacgacatgcgtctgccgcgtccccaagcatctgagggaggaacaggtgatagaatgtgtccactgcggctgcaggggttgtgccagcggtgactaatcttgtcatcatgttgttgggctcacggctcatcatcgcaacgttaaccagatgaggtgccctgctgtgagcatggatccgctgcggtgattagcatgagtttattgggtaactagtggggagtactaaatttcctcacgtttggacgtttcaactgttatgtactacgctttctcgtgtctcagatgcttgcgttaaattagtggcgcttttgcattttatatgagtctgttaattggttattgttatgggttctaacaaaaaaatttctacgatttactacgtttttttttcaaaaaatcagaaaaaa

SEQ ID NO: 148182 - DNA, 1921 bp, Zea Mays
aagccagacatctcatgccacgcctctctatcatcattattcaagacaccggaaatgttaccgcataattttacttaaataaatattgtgtgcctttggaaataaaggaatggttattataagaagaccgaaaacccggtccatctctgtgtggccggtatgcttttaaaaaagaactgctacaaagaattgagtgagaggaaacaatcaggcctgatttgataaacaacccccacacgtattggtgaaatgcggcagaggagagatcaggacaccgggcgtgcaaccatgcagggagcaaagacggaaggcagggcggggcgctgtagctgtaggtcttctctccttttcatttcagtgaaggaaactggaattctcgcactaccgcttattatctgaactcgtacactggccgacctcacttggacttggtgcgtgtgtggtcaggaaggcgacgacgacgacgatgaaggttttgctgctccgcacaccgcgcgcagtggcgacgcgaccacagccggtcgccgcctcggatcgaggaggaggagccgatggaggtgcttgtggtggctacggtggcgaggtgaggaagtggatgcagttggtgctgcgccggagagccccattctccgacgtcgactgcgtagcttcgccgtctacagccgcaggattttcggcttcgaccccggtcgggcccgcacggcgaccacagtgcggtaccggaatagggttctcggcggcggggacgggtggtgatggggagatttttcatgtccgttcggattcgtctgggaccctcgcgcaacggccgttgtgcgaggccttttctggccgtccagatgagatcgaacggttggggaaaaaagcggagtttagtttctttgcgccgctgagcgctggcagtcgcggcccaagcctgaggtcacagccccacagtcgccccttcggacttccctttattccccttcctatataatcccatcgccactgccttcttcttccgcttccaacttccgttccgcaaatcgaaagctcggcgttgccctgcctcgagctcgaaggactttgtccctttacgtcgttgtccagctcctcgcatattgtggcctggtgcagattggagatccgcccggacttggatcgagtcctccttgctccattcattgaggcagcatgcctaagataaagacaagccgtgtcaagtatcctgaaggatgggagcttattgaaccaacaatccgtgagttggatgccaaaatgagagaagctgaaaatgatccacatgatgggaagagaaagtgtgaagctctctggcctattttccgcatttctcatcaaaggagccgctacatatacgatctttactacagaaggaaggagatatcacaggagctttatgagttctgcctagaccagggttatgcagaccgtaacctgattgcaaagtggaaaaagccaggttacgagcgcctttgttgcctccggtgcatacaaacacgtgaccacaacttcgcaacgacatgcgtctgccgcgtccccaagcatctgagggaggaacaggtgatagaatgtgtccactgcggctgcaggggttgtgccagcggtgactaatcttgtcatcatgttgttgggctcacggctcatcatcgcaacgttaaccagatgaggtgccctgctgtgagcatggatccgctgcggtgattagcatgagtttattgggtaactagtggggagtactaaatttcctcacgtttggacgtttcaactgttatgtactacgctttctcgtgtctcagatgcttgcgttaaattagtggcgcttttgcattttatatgagtctgttaattggttattgttatgggttctaacaaaaaaatttctacgatttactacgtttttttttcaaaaaatcagaaaaaa

SEQ ID NO: 148183 - DNA, 114 bp, Zea Mays
ggctaccaatataattaaataaaaatatatatgactacctatataattaatcaagttcctattcagttaataacatctcgaactattcaactgcaactaaatttctatttgttt

SEQ ID NO: 148184 - DNA, 76 bp, Zea Mays
tctacccttaccttttctcttcttcagtggtgcgtctggtgtcagtcatccccgtccggccgcccgactctgtaca

SEQ ID NO: 148185 - DNA, 1361 bp, Zea Mays
aagtcgttcggctcggcgcactgggtatagcagtagcagcactgccgcggttgattttcgagctgcggtgctggagaagtgaagagctcatgctgttctcccgttccccggctgccacaaatcagccactcgtcccttcccgccggacgctgctcctatcgccatgcccgcgagccggcgcgaccccggcaccggtggccgacgctgcgctcctaccgggcgggctgcgtgcggagtcgctgccgcggcacgtggctgtggtgatggacgggaactcgcggtgggcgcgcgcgcgcgggctgccgtccgcagccgggcacgaggccgggcgccgcgcgctggaggaggtggtgcggctctcccgcgcctggggcgtccgcacgctcaccgccttcgccttctcccacgagaactggagccggcccaaggtggaggtggaattcttgatggggcagtttgagcgagcgatccgcgaaagcgtagctgaatttttgagagaaggaattcggctacgcgtaatcggcgactcctcaaggctgccggtttctcttcagaggaccgcgagagaagccgaggaggccacgcggaacaactcgcagctcgacctgacactggcaatcagctacagcgggcggagggacatagtgcaggcgtgccggaccctagcccagaaggtgcgcgacaagctgctcgagccggaggacatcgacgagtcgctgttcgccggtgagctcgagacgagccacgccaacggcaacgagctcccttatcccgacctggtcatcagaaccagcggcgaactgcggctgagcaacttcctgctgtggcagtcggcgtacgcggagctcttcttcacggacacgctgtggcccgacttcggagaggccgattacctccaagcgctggtctcgttccagagcagagacaggcggttcggcgtaaggaaattgtagcggcgcagaggcagcgccatgtggaaggcgtgcttcaaactgtcaatagcaggaaagcgtcggtcaataaatcgtaacgcgagaccaagatgagtagatggagtattaaagtggtggtttgcatgcagcggtgagagtgagagtaatgtagcatatcaactcaagatggtaggtactacagctagagttcaagctcacagacagcagtcgtcgttgatgatggtggctagcagctatctgccgatggccacagatttattgttaaaaaccctttgctattgcaagagtacgtcaaatgccctttattaagtcgtgataaaataatcacttagaagatactacttccgttctcgaatatttgtcgctcgctagtttatttttaaactaaacgacgataaataaaaaaga

SEQ ID NO: 148186 - DNA, 1752 bp, Zea Mays
gcagaaccacgctaaaatctcgcccaaatcatccccgccccagcaatggcgacctccttcggtttcggcagctccgcgaccgcgggctccacggcctcctcccccttctcctccaccccatcagccttctccttctcccagccggcgtctgcctcctcccctgcccccgcctttggctcctccctcttctcctcatcctccgccgccgcttcttctgctccaacttttgggtcctccctgttcagggcctcgtccgccgccgccgcacccgcctcctctcccgctttcggattcggatccaccttctcgttcggtcagtccatggcggcggcctcatcggccgcgtccgcgccatcccttttcggtgcaacgcccgcatcctccgctggaacaacccttagcttattcggcgctgctacctccgccgcaagcagccctgggttcttcggcgccacctccactgccgcaagcagccccggcctcttcggtgcgtccgccactggctctgcggcaacctccccgagtctgttcggtggcacctcgggcctattcggcgggacttcctccgcagcgaccaccccgagcccattcggggccacctcttccacggcggcgacagttagtccgttcggcgccgcctcttctgctgcgtccactccaagcctcttctctggaggggccacgggatttagctttggctcgtcggcgtccggttccaccactaccacggccgccgccccggcaccatcatttggcttctcgttcaactcggggccggccgcgtcaagcactgcatccacgccgacatcagcaccggctttagggtttggcggcgccactggctcgtcgctgttcgggtccaccacctctgcgcccctcttcagtaccaccaccgcttcttctccagcgtctgctgcgaccaccacgccatcctttgggttctcttcttcgccagcaacaaccgcttccgccccatcgtttggctttacaccatcatcaggaagcgcgacgaccgcgaacacggctccttctttgttttcatcatccgccaccacactaaccacaccggcgtcctcgtcctccactggcttctccttggccacttcgcaggctgcacctgctccctcattgttctctaccagtgcaataggtagctcgtctgtcactacgcctggattttcctttggttcatcttcggcagcttctacaccaactttagcctctgtgtttgcaactggttcctccactgtgccatcagcggctgcagcttctgcagcatctgggtcgtcgttcccagctgtttctaccagtggttttagttttgcagttgcgccatcatcatcagcagctgcagctactgccactaccaccactgtcacaagtgcttctacatctgcaggcatgacaaccacggctcctttgactggaacaacggggtttccaaattttaatcttcaaacaactaccccagcttctacctcatctcccacactggcatttggtgtttctactactgctgctagctcatcagccaccagcaccacaactcaagcaacttcctcagctgttcaagtcagcagcacaggtccgactactactacatctatcactccagcagcatcccaagcacctaagctaccatcagaaattgttggcaaaaatgttgaggagattattagggactggaacaatgagcttcaagaccgtactgcaaaattcaggaaacatgccaccgcaatagctgaatgggat

SEQ ID NO: 148187 - DNA, 844 bp, Zea Mays
attctgtactgagtatttttttttcattttctttgcaggctgaggtggctaaagttgttgaaacacaaacaggcttggagcgtcaacttgaattgatagaaactcatcaacgagaggtagacaaggctctacagagtatggaggaggaagctgaacgcgtattccaggatgaacgagtgttacttcatgaagatggagctgcttcagcaagagatactatgtatgaacaagcagaagttgtggagcatgaactgcaacatatgacagaacaagtaaaatccatcattcagactatgaatgctactcagggtggtgagctcgagtccgctgatagtatgacaccatttgatgttgctgtccgaatactggataatcaactgcgttccctgatgtggattgatgagaaggttaatgagttctctggcagaatacagaggctgcctaacaacagcgtttcagccgaacgtgactctggaattcccaggttttggttaagctgattaattcgccgcattttcttgcggccctaatcgaggttcagtaaacattcttcgcttggttattctgctgctccaccggccaaggtttcgcgttattttctccccgttcaagcactttggtgccatgtagctctagccggttcactctggattggtaccattcagtgtcacttgtgcacacttcagcatagtttctatttgtttaacgttggacgtgattacggcatgtttggatctatttgtgttaactgttttagaagctaaaattagcactatttacgctattgtgttcaatatggagcacaagtctgcagaactaatctcaactcactttcatcccttag

SEQ ID NO: 148188 - DNA, 1901 bp, Zea Mays
gccaaacccaaaccaagaacctgatcaatcaacttcagtcccgtccgtaggagggttttgaaaagccaacgtacacctctgagagagttcaaccggagcctgaatggcaacgcccaagctgtccccggtctcgccggtgcggcaggacggcaacgacaagccgtgcgcgccatcctccccctcctcctccccgtcgaccgttctgagtgcgcaggacgcgtacgagcagcacctgcgcctgccggagctgtcgagcctgtggacggccggatgcttcccggagtgggcgggcgagggcctggtcaagccggcgctgcaggcgctggaggtcaccttccgcctcgcgtccctggcgctctccgacccgcgcgggcacgccggccgccgcgagctcgcgcgccggctggagtccctcgcggcgcgggaggtggagctggtgtcggcgctctgcgagggcgacggccggggcgcgccgctcgccgagctgagcgcctccgggggcgtgctcccgcgggagcgcagcgcgtccgaggtggtggtgtggcagctgcccgggagcgccgccgcggtcgtgtgccgggccagcgaggccagcctgctcccgcgcctcgccgcgtgggagaagtctgaggcgctcgcggccaggatcacgtacgccgtcgagggccagatgcagggctgcgccttcacgctcggcctcggcgagcccaacctcgccggcaagcccgtgctcgagtacgaccgcgtcgtgcgcccgcacgagctgcacgcgctgaagcccgaccctgcgccggagcccatgtccggctaccgcaaccgggagctcgagactctgttcaccatgtaccagatactcgagtcctggctccgcgtcgcgtcgcagctgctcacccgcctcgacgagcggatcgaagacaagtgctgggaggcggcggccggcgactgctggatcctggagcgcgtgtggaagctgctcgcggacgtcgaggacctccacctgctgatggacccggacgagttcctacggctcaagagccagctcgccgtacgagcggcgccggggtctgagtccgcgtccttctgtttccggtccacggcgctcctgcacgtcgctagcgccactagggacctcaagaagcgtgtgccctgggtgctcggtgtcgaggcggaccccagcggcggcccacgggtgcaggaggcggccatgaagctgtaccacagccgtaggcgcggtgagggcgaggaggcaggcaaggtggacctgctccaggccttccaggcggtggaggtggccgtgagagcattcttcttcgggtaccggcagctggtggcggcggtgatgggcacggcggaggcgtcgggcaaccgggcgctgttcgtgccggcggaggagatggatccgctcgcccaaatgttcctggagccgccatactaccctagcctggacgccgccaagacgtttctagcggattactgggttcagcttcagcagatggcggaggcctctgctccgtcaagacaaagctgaaacggcgaaatggcacggctgagccaccgaatcgcgcagttttgcaggactgaagatactatgcatgcatttcgttggggccttttgcccttgtggtgaatggtgatagagtgattcatttctatagcgatcatgtactattgcagtacatgtcgcactagaatactagattctcttactatcgttgtgcactgcgttgtacgtgttgtgttctacgtagatatagattgattcagttagatgtcatttgtattgccaagtaggtcaattggatatggaacttttgtaaataccgaaatactgttgttgagcaccgtgtacgtagatagactgaatgttgttgatagtcccaatgcagagtttggagtaaatt

SEQ ID NO: 148189 - DNA, 372 bp, Zea Mays
atgagggagaccatgagggccggggtgccggagaagatgtgctggaagagccagacgaaggaggcgtgcatctcggcgtggacgcgcgccaggacgccctgcaggtcctcgtagacgaccgcctcccgcatctgcagcgtgaagctctggagctcccggatgatgagcaccatcgaggagaaggcacggcccaccgcggcgcgcgcggactcgccggcgcagtcgatcagccgctcgttccaccgcccctgctccagctgctgctgctgcttcctccgtttgagcatccgcagagacagcggcagcccgacgctgctcgcgctccgctccacgctcgccggccacccgcagccgccggcgcccgggtgctga

SEQ ID NO: 148190 - DNA, 747 bp, Zea Mays
atggggagagaacacacggaggtggtggtggggcagttgcgcacggggagggccgacgcacggagcgaacacagggggacaactcacgcaggggatgtggggaggtggtggcggcagacggacgagcgagagctaggttgctcatgcgggcggggggacgcgggatggacggacgatacacgaaaacggagatctccagccagagctctccgcaaaactactcactgtgaaactccaatgttagccttcatccatcaggcactggacactccacatgatcctcactgcagaactccaagtcatgaccatattgagctactgcttgttgcactccgctacgttactgcctccgtgctctacctcaaggcccatcactacggcatcatcatcaccctacatatgcctttgctttgtgcttgttatagtgatattttctacaatgcatttctgtcatatgtgagaaagcgttctgatggaaaacactcaaagtttcagcatgtatttactgtgttccagttttcaagtcttttgagttttgtttatgctatactgcttgacagttttaaccacctaagacaccaacagtcagagtacaggactgtatctggtgttgctgggcctctgatcatattggataaagtaaagctcattctgcgcgtgaaattgcatcgtaccttgggtgtccatggggacgatgtcgtcggggtcatcgtcgtcgccatccttgcttctgaatttacctcatga

SEQ ID NO: 148191 - DNA, 1382 bp, Zea Mays
atggggagagaacacacggaggtggtggtggggcagttgcgcacggggagggccgacgcacggagcgaacacagggggacaactcacgcaggggatgtggggaggtggtggcggcagacggacgagcgagagctaggttgctcatgcgggcggggggacgcgggatggacggacgatacacgaaaacggagatctccagccagagctctccgcaaaactactcactgtgaaactccaatgttagccttcatccatcaggcactggacactccacatgatcctcactgcagaactccaagtcatgaccatattgagctactgcttgttgcactccgctacgttactgcctccgtgctctacctcaaggcccatcactacggcatcatcatcaccctacatatgcctttgctttgtgcttgttatagtgatattttctacaatgcatttctgtcatatgtgagaaagcgttctgatggaaaacactcaaagtttcagcatgtatttactgtgttccagttttcaagtcttttgagttttgtttatgctatactgcttgacagttttaaccacctaagacaccaacagtcagagtacaggactgtatctggtgttgctgggcctctgatcatattggataaagtaaagctcattctgcgcgtgaaattgcatcgtaccttgggtgtccatggggacgatgtcgtcggggtcatcgtcgtcgccatccttgcttctgaatttacctcatgaggccccaatctcgaacggcaccaggctctcctcccccaatccgttggattaagccacttccgtggtttgacagcctcttcaaaagatgtaccactgctcagtaaatccatctccttggacaaatcacctgtaagttgcaaagttggtgccgaccaagttaggagagggcaggagccggcgcacggtagcgtgtgcggtcggcggcgaaacggggccgacgagtcaggggagggcaagagccggcacagggcagggcgtgcagtcggcggtgaaacagggccgacggttggaggccgtggccgagggtgaggcgggccgatggagcaggcccatgggcgacgacggggacatgaacttgaaggcgaggtcaggaagagaatggcgtggagggcagggaccgaatggaagccgccgcgagggggttagcggcgaagcgtggctggtggtcggaggccgtggccgagggtgatgcctgcgtgctggtggagcgggccacgagcgacagcgggaacagggacccgagactgcctgcgggatgaggagtaatggcgctggtcaggcgtggggcgggtgaggagcgaccgacggcgggtgaggagccgccgcgcgagagccgcgaccgacggagagcctgc

SEQ ID NO: 148192 - DNA, 2684 bp, Zea Mays
cattggttcagcactgaggactttgaagatgttatttatccccaaggagatcctgatgctgtttctattagcaaaagagatgttgagctcctgcttcctgaaacctttgtcaatgatacaataattgacttttatatcaagtacttgagcacaagaattgaatctaccaagaagcgcaggtgccacttctttaatagcttcttttttcgcaagctggcagatcttgacaaagatcaggggagagctccagaaggtagagcagccttcttgcgtgttcgcaaatggacccgcaaaataaatgtatttgacaaagattttctgttcattccagtcaacttcaacttgcattggagtttaattgttatttgctatcctggcgaagtggcgacatttgaagatggtgatgccaagctctcagctaaactcccatgcattttacacatggattcacttaaaggaagtcacactggactcaaggatatcattcaaagttatttatgggaagagtggaaggaaagacaccctgaatcagcatcagataattcagacaagttcttaaacttgagatttgtctcccttgagctccctcagcaggataattcatatgattgtggcttattcttgctccattatgtggaattatttttgacagatgctccaagtaacttcaaccctctgaagattgatgtattttctggctttcttagtgatgattggtttccacccccagaagcttctctgaagcgttcggtggtccgaaagttaattcatgagctggtaactggatcttttcagaatcatcccaagctagcttgtggtggtgagcagcttgacgaaagacatcaaagatgctcaaatcctggtgaacctgaaacagtttgcacagttgatgatggaactccatgaagtacagccatccaagtccatctgtttatatgattccaaagaggggctacctacttctggatgcatgttggacactggaagtgtcccaattgttgatgtacagaatctacaagagtcagaggtttgtgcaccagtgaaggatactgttgtttgcttgtcaatccaggatgagaaaaatgacccacttgcatctaacagtcaacttaatatgagatcatattccccagaaggtgatggcgtgattaaggaatcaaatcgtgtggtgacagataaggaaaatgataagtctttgtttctttctttggataatgaccaaaaagttcacagccaagcagaagctgaggtgcaggatattatggttcgtactagctgctcaatatctgaaattttagctcagaaaattaccagcaaagaacagccctcccaaaaaagcatagaagttggggatgagtgctttagaccttctcaagatatggattatgttatgatgtttgactccagcaaagatgagaatggaccaaatccagaaagattgacagctgaaggtgattgtggcgatcctcatgaacgtctggatttagtcacagtaggtgatatcggaaaaatggttgtagacaatgcaatcatcgaagatgtgaagagtaataacacaactgcaaacaatgtcaatcacggtgagctgcatgtttcattgcagttgccagagggaaacactgacaatggtatgactggtgttagcacagcttcctctttagacataaaagagggaaacaatgacaaagtagtggcagatgcctctgcacatgaaggtgatataaatgacaatggtagctctgaattgaaaataggaaatacgaacagtggtattactggtgttatcgcagcttcctcagacttaaaagaggaaaatattgacaaagtagtggcaggtgactgtgcacatgaaagtgatataaatgctaaggattgcactgagttgaacattggaaatactgataatagtattgctggtgatagtacagtttcccctgaggtgagcgcggaaaacactgatcaaatcatagcaggtgattgtggaaatgaaaccgatttaaaagctgatggtgagggtgctgacaaattcttagcaactgacagtgctcttccttgtgaagatgatgcaacttgcatggatggtgcgaatgtgattgtatcactagatgtaccccgtagcacgaagaatgatacattttccaagaacacatcttctgacgctgaaatgcctctgcctgttggaacctgtgagctcgtcgatagaccttcttccgagaatgacatgtctgagcacacatcttttgatggtaaacggcctgcggatgataggactttggaagagaacgaaatggttatgcctggtgatgaaaaaacagaggtgcattacaagcgacggaaggttttggcctcagagaaacaaagcagcttctccggagcaacttctacagattaggtttggctggtgtgagacttagttttagtttctgggatatgtgacctgtctagtccttgacaatatgctgcctgtgatatagtatatatttctgtaatataaggtactgccactaatgactgtagaaataacaaaaagaactggaatcctgaaccctgatgtctgcttgacagcgtggtttgagaattgagatactgtatatggtctgagtattgcacgacctgcactgcacatgcaagttgcacgatataggctgtttccaaacatgtggaaggccttgtttacctgatta

SEQ ID NO: 148193 - DNA, 975 bp, Zea Mays
cggcctggccagaagaagatcccggaagcaacgaaccaaatcatcagacgaagaagcgccgaccatggacacggaggcgccgagcgggcgggtgggcgtcaagtgcgggcggtggaacccgacgccggagcaggtgaaggtcctgacggagctcttccgcgcggggctgcggacgcccagcacggaccagatccagcgcatctccgcccacctcggcgccttcggcaaggtggagagcaagaacgtcttctactggttccagaaccacaaggcccgcgagcgccaccaccacaagaagaagaagcgccgccgacgcggcgcggcaatggcatcgtcgtcctcccccgacagcggcagcggcagcgggagcagcgaggaagacggccgtgttgccgccgccgccgacgccgacctcgtgctgcaaccatcgccgggaagaagcaaaagcaaacgggaggccagaagaagctacggcggcggccaccatcgccggctcgttacatgtaagcagctagcgcacacacatcgctacgtcagggacgttgtggagcagcaggaggaggacacgtgggagcggccgacgagggaggcggtggagactctggagctcttccccctcaagtcgtacgtcgacctcgaggcggagaaggtccggcggtacgtcgtcagggccggcgccagcgagcagtgcagggacttctccttcttcgacgtgtccggcggtcgggatccgccgcttcttgagcttaggctctgcagcttcggtccctagactagatcggcgcatgcatatgcacggttgcacgcacgcacgcaagaactgttgcatgtccttggttcttgcagctgcactgcacataccgacatgaaaaggtgtgtgaggtgaaaattgaaatacggcataagcgtacgtacgcgctaccaaacgttgcatggacaggatcagagaaagagcatgcagctgagatttccaac

SEQ ID NO: 148194 - DNA, 738 bp, Zea Mays
tagcgcacgttgtgggacttcacttgcttcatcgacacacgcaaatcgctccacaccggaggcagtagcaaggtaatgacgagacgaacagagctatgcgggttccaaggcgttgagcgctacggggagaaaaacagaacacggcgaaatgggcaggaccgagcgcgcaggctccacggcgcggccaacagaggagcatcgagcgccataggaggacgtcgagcacagcgcgcgccgacagagagcagaggagcacgacgcgcaggggagcaaacagcagaatcggctggggaaaatatatttgcgcgcgcaggaaggggccaggacgaaggagaacgcgcgcagggagagctgaagaccgatccgagccggaggttggccggaacgcgaccacggaggggctcggcagagaagattggagctggggaagggaacgccgagctgagcgcgcgcgcaggggtaaaacgtcggcgagccggagaactgcgcggcatggcgagggaggaaaaacagagggatggctgggcgccgaacaggaaaccgctgtgctggggcgagcaggaaggacgccggcagagggtagaaatggagcaccgcggcgagcaggggaaacggcggccgagcaggagctggagcacgccggacctaggcgagcagctaaggaagcagagaggagttccaagctgccagcggcggcttgagataatcacggggagagatgagcgtccggggagctga

SEQ ID NO: 148195 - DNA, 1092 bp, Zea Mays
caccaagattccacaaaactccatcaccagatccagaacccacttccacttcctctctcgtgttttcattttaggccagaataaactccagccacttcggcatgcgccgggaatttgattcttctgcctaaaatagtcacgctaccttccacctccccctactactctgactctccctcgtcttcttcgctaccaagatgatggcggaggcgtggacgccggtgctgttgccggcgacggcgccctgcttctggcagcaggacacgcactcggttttgtggcggagaggagacgcgtggacggcggaggagaacaagctgttcgagaaggcgctggcgcagatcgaccggaacgcgccggacaggtgggagaaggtggcggcggtgctgccctggaagacggtcgacgacgtgaggagccactaccacgccctcgagaaggacgtgggcgtcatcgaggccggcgggctcgtgccgttcccgcgctacagcggctcggtcccgccgccgtccgggttcgccctcgaggactggggcggcggcgaccgcgggttcaggcgcgcgcgcggctcggaggagatgcaggagcggaagaagggtgtcccctggacggaggaggagcacaagcttttcttgatggggctgaggaagtacgggagaggggactggaggaacatctcgcgcaagtacgtgacgacccggacgccgacgcaggtggccagccacgcgcagaagtacttcatccggctcagctccggcggcaaggacaagcggcggtccagcatccacgacatcaccaccgtcaacctcccaggcgacgccccgcgctcgtcgccgcccgcggccaccaccaacccctccgccggcgccctggtggtggacgtgaagcccttcgtgtgacgaggatgaagagtggcacagcctcgtcgtccagctgccagctcgcggcagctccgagcgactgcgttcatcgagaacaagacgccatgggcggcaatgcggcatccgtttcagttcagtgtacataattcggcaagtacagagcccaacaacttccacgtaaaaggtactgaataataaagcattcgatgaa

SEQ ID NO: 148196 - DNA, 1054 bp, Zea Mays
gcacgcaagggcaatttggtcttgttacggaacagaagggatatggttcccgggctccggcgacgacgagaggtaggcagaaatcgtttgccaaatcaacaccagcaacagcaaagcgactacagatagtacgagatgcttactctccacaccattcagtcatgcccctcgctgcgcagatcctctctgttccggcgtgctctgctaggcaggaagagatctttcatttctgccagcagtcctgaggatgccgaatccggcactcccccgccgcttgaaggctacaaataccatgctgagctcttgctcagatcgccatgcttcagacgcagaaggtgcgcatcacagagttcttggacgagcgctctgcttacctgaccaagttcgccaaggacgccgactcggagttcgacctgattgggcagaacgctatgaaagaacttgatgccgttggtgaccagatactggagaggctcgacagcaagatgcaagccttcgaggagacggctgaggtgcaacggcaagagatagaaatgaacgataaggtgttagaggacttcgaagactggatcgaaaaggagaaaaacgaagggatgttcttcaaaagccttggcaaggtcaaacctcggaacaagatggaaataaaggtgaaagccaaggtggaagcacagaaggtcaaagagattgcagaggagagtgcaggatcaaaaactcgtatgaacatttacctggggctgatggggatactcgggattacaattgcgaatgccatctttgcaacaccagaggtggagtggaggaaggttgctgctctgggtctgattttcattggtctggttgctcaggtcatctacgagcaggatatctcaccgccggaagctgagaagacagagaaaatagaagaataaaaaaggagttgcagacatatcggtagggtggtgtaatctcacacaggcaatgtaaactgtatatggtagcatgaatagatacaaggtttaatacttcaatcgttcataacccaagaaattatttaatacgtagttcggcaaacaaa

SEQ ID NO: 148197 - DNA, 1133 bp, Zea Mays
aaccagaacattcgattctaaaatttacaatttacaatttacagctgtgcggaggcgggagcagggggcagcgagcacctagcagcgcgcggccggcgactccaccgagacacctcagccggccgcgcggtcgcggttgcctccggctggctcctcgcctcgatggtggggatgtaccagcaccaactccgcgacgaccccttcgacaccctaagcggcggccactgcgaggtacatggcggcggacagccgcggcagcgggtcgaggcgcttgccgacggaagaagcatgttgcgcggcgggggaagcggtatagttggcgccgcgggtggagatctaggggtgctagtgcggtggatgcgggaactcgcagcggatcccgtgggtccacttccggcgccatcagagcacagggtgaggaagcggcacgtgctggcctggcggcgcgctcgctacctcagattggaggacgtggcggacgcagaagagcttcccagcttctccaagaaaaggaagctctactgggatcaaaaaaagaaaggctgcttgaacatgccaacaaggaaatctgagaggcttgctaagagaatgaaactcatggcatcattgctcctcacgcaacggaaaaagattggagtaggtgagcactttcaggcagaggtacctggttggactgggcaaccttcagggaaagagctttcatgttacaggaatgacccagagacatcaaagatgttagggactagaatgtggcctcctgagggtgaagtttataaaactgacattgtagctgttgggcagggaaggcctggatcatgtaattgcccctacccaggatccttcctctgcagacagctccacacaaatgaagcaagagatcagctacgctctgaacttggtcgagtttttacaatgtggcaatttgattctatgggggaggaggtttctaagctgtggagtcgtgatgagcaactaaagttcgacgcacttgagcaattggttcccgttatggatcaaaagacatattgggctgttgtgtcgaaaaattttgcttcaaagcccaggatagatttgataaagtactatctgaatgtgttcctgatgagaagagtgttgtaccagtgcagactcgg

SEQ ID NO: 148198 - DNA, 1208 bp, Zea Mays
aaccagaacattcgattctaaaatttacaatttacaatttacagctgtgcggaggcgggagcagggggcagcgagcacctagcagcgcgcggccggcgactccaccgagacacctcagccggccgcgcggtcgcggttgcctccggctggctcctcgcctcgatggtggggatgtaccagcaccaactccgcgacgaccccttcgacaccctaagcggcggccactgcggtgagcagccacgcgttgccggcggcggcgcctcctcctcctcaccctcggctgttcatgacccgctgtctgcagaggtacatggcggcggacagccgcggcagcgggtcgaggcgcttgccgacggaagaagcatgttgcgcggcgggggaagcggtatagttggcgccgcgggtggagatctaggggtgctagtgcggtggatgcgggaactcgcagcggatcccgtgggtccacttccggcgccatcagagcacagggtgaggaagcggcacgtgctggcctggcggcgcgctcgctacctcagattggaggacgtggcggacgcagaagagcttcccagcttctccaagaaaaggaagctctactgggatcaaaaaaagaaaggctgcttgaacatgccaacaaggaaatctgagaggcttgctaagagaatgaaactcatggcatcattgctcctcacgcaacggaaaaagattggagtaggtgagcactttcaggcagaggtacctggttggactgggcaaccttcagggaaagagctttcatgttacaggaatgacccagagacatcaaagatgttagggactagaatgtggcctcctgagggtgaagtttataaaactgacattgtagctgttgggcagggaaggcctggatcatgtaattgcccctacccaggatccttcctctgcagacagctccacacaaatgaagcaagagatcagctacgctctgaacttggtcgagtttttacaatgtggcaatttgattctatgggggaggaggtttctaagctgtggagtcgtgatgagcaactaaagttcgacgcacttgagcaattggttcccgttatggatcaaaagacatattgggctgttgtgtcgaaaaattttgcttcaaagcccaggatagatttgataaagtactatctgaatgtgttcctgatgagaagagtgttgtaccagtgcagactcgg

SEQ ID NO: 148199 - DNA, 165 bp, Zea Mays
ttatgtttttttttttcgaaaaaggtgtaccttattcatcgaggttagttctcgatcgcctagttttacaaagtttacttcttattttcctaactggcaaatttatccctcggaagatcagttcttgattgcctaattttacaaagttcgttgaacgggaaaggg

SEQ ID NO: 148200 - DNA, 698 bp, Zea Mays
agccaatcaaattatatgtaggaaaaagaaattacacattgaccacacaatataccagtcagcacgtgcgtcttgctgaccagcaaagaaacatttgagtgcagaaatcattccgaaggaggcagattccgcttcacagggagatttttttgtgtatgcctctgcgcgacatcatttacaggtcaacaaattcagcgcagcaaaagcgaaaggtgcgatttttttttcggtctggacacatgtaatggaaataacatctggaagattctgatgtatccgctgaacataggtaaccaaactagtcagactcgaaggttttgtcatgccaagagcacaagccaatcaaatgcggatgagatgatgacctgcttaaccccctccccccttacaacagaaaatgatttggatctggtgaggttgaagtattgatttgcttccctagatagacgcacggggatgatttaacactcggtttagttttctgtccacaaaagatggctgaaccaaagtgaatgcagccctcaaccaaaaaatctgcaaaaaattagacttgcaatcactcggagcaatggtgcatcacttgatgcaatgtctcagcataaacttgaacaaaaggcacatgcaaaaaagcatgtcagattgttgtcagcagaatcatggcaccttcttcaagtcttgggcatcttgagtcctgaaaa

SEQ ID NO: 148201 - DNA, 91 bp, Zea Mays
ggagcctccgcgggcgggattcgtcgctgcgggagctgcgggcgggattcgtcggtgcgggcgggatctgcgagcgggattcgtcgcgctg

SEQ ID NO: 148202 - DNA, 1202 bp, Zea Mays
acgcgagcgagagagaccaacagaacaaaggaaacgccggcaccagagcgctacaatataaccccaacacaacacaaacaaactaaccttatcggtctatctatccttctatccccattcccatcccgagacaggagaaggcaaggatgctgctcctgagctcccccttcgtgtccgtgtcgccgccgccgccgccgctcagctcccatggcgctcgcccggcgctgcggatcgaggcggccaggcagctgacggggcgggtggtgacgaccaaggcggacaagacggtcggggtggaggtggtgcgcctggctccacaccccaagtacaagcgccgggagcgcatcaagaagaagtaccaggcgcacgaccccgacaaccagttcaaggtcggcgacgtcgtcgagctccaaccctcccgtcccatctccaagaccaagcacttcctcgccatcccgctcccgccccgcgacactcgccgcaagtctcagctcctaccgccgctccagtccgacgacgaccaggagccgtcctcgcgagagtgattgattgtgattgattgctgcctgtctatggcttcgtcgtaagctcctctccatcagaggtgctgcttcccaattccaaatgcgaatccatgtgtgtttttgtcagactatttcctttttcttttcgatcaaaggctttagcccaatttcatccgaaatagctgttgcccttgttggaactgatccatggatatagctgcatattcccattctgatgtcgtgtgttctattgaaatgcttattttgcctaatatacttaatttatattttttgagaaatcggttaatcgctaaagatgcatgtgttagggtttagggtaaacccaaataaataaatgacctgtatcttattaagggcatgttcatttcacccccaatccataaatgtgttcgttggtgagatgtgggccatccagccagtccaatatctagccacgagccatttgtttcgttgtgtagaagaactcatgtgggtacaaatccaagcaagcactcaacattaagggtctcttcgttttaatcagtaacattgatgtgtttttcatcgttgtatttgaaccgaagttctttatagccatgatttaccatgaacctttacccacaaatggcatgttatgtcaaaagagcccattctttgggcataagaagataagttttc

SEQ ID NO: 148203 - DNA, 276 bp, Zea Mays
acgcgcagccccatgggctggctccgcgatgccatctccgcctcggagccggacgtcgtcgccgccggcggggtcgatgccaccttctacctcgtcttcctctcctctgtgctgtccatcttggtgtactctgggatcgtgctgcttccggtcctcctcccagttgctgcaaccggtggtgccctatctaccatccctatccctaccaacaaaacagcccaatcggctcagaacttcttgtcaatagaaaggctcggagtgggcaatgtcctgtaa

SEQ ID NO: 148204 - DNA, 717 bp, Zea Mays
atggacctcgtgttgttcatcgcgtccgtgctcacgtcgttcgtcatctttgtggcgctggtgctgctgttcacgtggctgtcgcgccgcctggggaacgcgccggtctactaccccaacctcctcctgcgcgggctcgacccttgggcgggccacggccgcggcaagcgcagccccatgggctggctccgcgatgccatctccgcctcggagccagacgtcgtcgccgccggcggggtcgatgccaccttctacctcgtcttcctctcctctgtacaacaacaaaaaaaagataaactattcttacctcgtgaactgatgtgggttgcacgttttgggcaagagacaaaggttggcgaagccgacggtgaagccgacggcgaagccaagcaggatgcggccgatgatgagcatgttaatgtggacggcgaaggtgttgaggatggcgccgaccaagaaaaacatgccgcctatcagcatggagttcatcttcttgaggatgtttgtacctacaaatggttgtcttattcttgcaacaacaacaaaaaagtgctgtccatcttggtgtactctgggatcgtgctgcttccggtcctcctcccagttgctgcaaccggtggtgccctatctaccatccctatccctaccaacaaaacagcccaatcggctcagaacttcttgtcaatagaaaggctcggagtgggcaatgtcctgtaa

SEQ ID NO: 148205 - DNA, 345 bp, Zea Mays
atggcgagggttcaggacaggacgaagcacttcaaagaggtcgcaatgctctcacatggatacaccgaggtggctagatcacctgttggccgaactgtgaagtgtgaggagtttctgaacaggacctgctatggtcttgacttatatgtggcagaaaagatagataccagagcatcagttacaagcagattagatggtgtcaattttgactttataactcagcatgagcaggcgaagaggcagagggtcgagtatttgaagcaaagaggaagtccttgtggttcagcccatgctgattacataaagcatgtagatgcactctcaagaaaactagcaagatactaa

SEQ ID NO: 148206 - DNA, 956 bp, Zea Mays
cagctcctctgcgttacctttccccgtcggccggtttcatttacctcctcaatcctggcttgaatctgtgacccgtcgaggcggcgaagggccgaatcgcaccgcactgtagggagaagcttctgcaaggttttggagcgggcgatggaggcggcgagcaacggcgggcttctctaccacgaggtgcaggaagggaagctctgcgccgtgcactgcgtcaacaccgccctgcagggccccttcttctccgagttcgacctcgccgcgctcgccgccgacctcgaccagcgggagcgcctggtgatgctcgagggctcccgaagccccggtgcgggcaacgctgctgcaggggatttcttcgccgagggcgagggatctcacaacgtctcccttggcggcgatttcagcatccaggttagtccagaccctccaggtctaggcttcatgaaaaattatccatttaggtttcttgggctcggttagatcgaccaatgcgtagatcatatcttccgtgggcacggttacgagttggttgtctgttaaggtctctgcctagaatttaggggatttttgctcgagcattgctgcttggagatcgtcgattgccttctagtctagtcgaagattctaggttaaatgtggcggtatatacttcaataggatggatttgctacaaattagcagggtttagcctacatatagaagaaaagaaaattaggtagttaatgcgtcatcccagtcatgtgaaggaatacttatcaagtgattgcatgattagagactctctccttgaacatagatgatgcaatcatattccaatcctaatggtacttaggcaacttcctgcgttcaaaagcgtgctctgctaggtgttaaaggggtttctgatggataaataatactaaaatttgcaagattctctacaggtgatttgatataggattgtacctttttct

SEQ ID NO: 148207 - DNA, 1381 bp, Zea Mays
ctcctctgcgttacctttccccgtcggccggtttcatttacctcctcaatcctggcttgaatctgtgacccgtcgaggcggcgaagggccgaatcgcaccgcactgtagggagaagcttctgcaaggttttggagcgggcgatggaggcggcgagcaacggcgggcttctctaccacgaggtgcaggaagggaagctctgcgccgtgcactgcgtcaacaccgccctgcagggccccttcttctccgagttcgacctcgccgcgctcgccgccgacctcgaccagcgggagcgcctggtgatgctcgagggctcccgaagccccggtgcgggcaacgctgctgcaggggatttcttcgccgagggcgagggatctcacaacgtctcccttggcggcgatttcagcatccaggttttgcagaaggcgctggaggtttgggatctccaagttataccccttgattccccagctgcagggtcgtccctatttgacccagagcaggaggttgctttcatttgccacctgcaggaccactggttctgcatgaggaaggtgaacggggagtggtacaactttaatagtctctacccagctcccgagcacctgtcgaagttttacctctcagctttcattgacaccctgaaggggtcaggctggagtatatttgcagttagaggcaatttccccaaggagtgccctatggcaaccgaaggctctaacggtttcggtcaatggtttacccctgatgacgcccggaggataacagcctcctgtaaccaggtgcaaacaccacctactgagcaggtacaatcccctctacttgctgaacaaccagaagggatgagtgaaatggacatgatcgcagcgcagcaagaagaggctgatctgaatgctgctatagctgccagcttgatggacactggggttccatttgccagctatgccgcagctcgagaacatagcgattcacaagattctcctgctcgtgaagcagctccgagcaaagataataaccaggaagaagctggtaaagctgaaccgagcgcacctccctgtgaggaggacatccaggagttggcttcaggaagcgacaccagaagggaggttccttctgtagaggagaaagggtcagcgaaagaagaatagtctggcactttctgatcattctgtaactgagttagacccgtacaaacagaaactgcccaccatttgagtggagttatgccttcttctttttttttccccggttctgaacgccgtatacgaaatgcatagtctgaactgaatgggtttaagaacttttaactggtgtaactgtcatgtgcgaagtgcatagagactagagtctgagtggcggttttgaacccctttttccccgtcc

SEQ ID NO: 148208 - DNA, 2521 bp, Zea Mays
ccgtcacagcccgcgataaacgaaagagatcctggacagggaaagcgagcccgtgcggtgtggtcgagccagccagccagcgaacatggcacagtggaggtggcaacgacaccggtgaggcgagcctggttcctgaagaactcgctcgcctgctctgcctccctccctctcacaaaatcaccaggggttgcgggctgtggccctggagggcagggcatgcacgcgcgcgcacgaccgacgaccccctcgtgcaagctgcaaaccaccaccccacctcgcccccacgttcccttacgtgccctcccgtccagcgccgcgcggttgcccatcgaagcggccaaggcagggcgccagcgccacccggcccggccccttctcctgcttctgcttgctctggtctccctcctcctcgcgatcgagctcccgcgcttggcttggcttggctgcgcacttgtctaaagtctaaaccaaagccgctccggccatggtcgcgtcgccgtcacccacaccgtcggcaccctcgtcctcgccctgcagctgcagcagcagcagcagctgcagccccgtcacgtccggcgcggcgcaccgccgccgcctcccggacttgcccgccgcagcggaccgctccggcggggcggcgcgtgcgagggccctgttcttcgcccggagggccagcggcaagcgggcggcggccgtgctcgaccaggcctgggcgcggaacgcggtggcgtgcctgctcggcgccgccgtcgtcgtcggcctcgtcacgacgacctcgcgccggggcgccgtcgtcggcgcggggatggggagccgcctcgtccgcagggcggtgcccgccgaggcgctgcggttgggggaggaggagaacctcgccgccgtggctcgccgcccgctcgacgacgacgacccgccgccgtcgatgatggcccaggtatggacaaaaccagatagcgagggctacacgaagtgcactggacgcacgaagaatcgtcacggaaccaacagtacgaccgctggctatataatcgccgacgccaatggtggacttaaccaaatgagactgggaataagtgacatggtcgcggttgctaagctcatgaatgccacactagtaatcccggccctggatcacaaatcgttctggactgatccaagtgatttcaaagatatatttgacgtgcaacacttcaagcaaactctagaggatgatatcatggttgtggactccttgccgccagatttcaaaaggttcaaaccctacactagagcacccaagtcctgggccagggcttcttattatagggcattcacaaagacactgaagaaggccagggttgtgagattcacacatacagattcacgcattgccaacaacggtctccctccttccatccaaaggctccgatgccgtgcaaactacgaggcgctaaggtatgagaaggacatgctctcattcactggctgcagccacaacctaacacatcaagaggcagaggagctgagggaaatgcgactcagggtgcagcactggaaagagaaggagatcaacggtaaggagagaagactccaaggaggctgccctatgactcctcgtgaagcggctcttttcctgaaagctatgggttacccttccagcacaaggatctacgtcgtatcaggcgaaatatatggtgtgcgtagcatggacgcgttgaaggccgaatatccaaatgtctacacacattatagtctggcaacagtaaatgaattagagtctctcaggctgtaccagaacaggttagctgctgtagactacaatgtagccctccagagtgatgtttttgtgtatacatatgatgggaatatggctagagcagtccagggccataggagatacgaaggattccagaagaccataaaccctgacaggcgcaagcttgtcgagctcattgacaagctagatgaaggtacaatagattggacagggtttgcaagtgaggtgaagatgcaccatggaaacaggcttggaggtccgtatcagaggctgtttggtcgaagtccaaggcatgaggagtatttttatgcaaatcctcttccagggtgcttgtgcagaagaaacacacaggatcaagtggcatgaaccttacatacgaatagactgttatcatatattgaactttcctccaacccattgacatacaccaaacagtgaaaatccgggtaaactgacagcaaaaagacaagtttatgtagttttccatcttacatgaggatacaagagggaacactcactgaaatgtgcattttcaaaagatgtttattcaggttttaaaatagaacaggcaaagatattcaaagaggatacgtgttgtaccacagagtatataattagcagatttgatgagtttttagtgtatgtttgtatttactccatagtccacatgtaaagcctctcatgtatgagattcttctgggagcctccgacacttggtttgtcctccagatgtacagccttaaatctaaaaattaactttattca

SEQ ID NO: 148209 - DNA, 402 bp, Zea Mays
gctagcgactgcttgtaacccgagcgggggcaataaagtggtgtggatgccaattgtggcgcttggcccaggcctggtactgcaatctgcggcccgcccgttccaagttggtagttgggttgtgacagctttggcgaaggccatggcgaaccagcctctagagcggcgggcaatgcgtgaggctggtttcacagagcagcgaataccgtccgcttccaacggtggatggataacgggccactgcactccaggtccacctaggcctaggcgctctttctggcagaccaccatttttgtttttttgcttgtcttgcattcctactcgtttgccactgcagcccatttgtccaaccaacacgtccagtaacaaccatcgccaatcgattatgtaggctatttgag

SEQ ID NO: 148210 - DNA, 513 bp, Zea Mays
atgcgactcagggtgcagcactggaaagagaaggagatcaacggtaaggagagaagactccaaggaggctgccctatgactcctcgtgaagcggctcttttcctgaaagctatgggttacccttccagcacaaggatctacgtcgtatcaggcgaaatatatggtgtgcgtagcatggacgcgttgaaggccgaatatccaaatgtctacacacattatagcctggctacagtaaatggattagagtctctcaggctgtaccagaacaagttagctgctgtagactacaatgtagccctccagagtgatgtttttgtgtatacatatgatgggaatatggctagagcagtccagggccatagaagatacgaaggattccagaagaccataaaccctgacaggcgcaagcttgtcgagctcattgacaagcttgatgaaggtacagtagattggacagagtttgcaagtgaggtgaagatgcatcatcgaaacaagcttggaggtccatattag

SEQ ID NO: 148211 - DNA, 577 bp, Zea Mays
ttcagtgccacactcgccgagcagctagcgactgcttgtaacccgagcgggggcaataaggtggtgtggatgccaattgtggcgcttggacccgggcctggtactgcaatctgtggcccgcccgttccaagttggtagttgggttgtggccgctttggcgaaggccatggcgtccctctctctagagcggcgggcaatgcgtgaggctggtttcacagagcagcgaataccgttcgcttccaacggtggaaggataacgggccactgcactctaggcccactaggcccaagtgctctttctagcagaccaccatttttgttttttttgcttgtcttgcatacctactcatttgccactacagcccatttgtccaaccaacagcgtcaagtaacaaccatcgtcaatcgattatgtaggctatttgagcctctaggcactggtcctctatacgttcgatgcattccacatgtaacatgttcttgccattttgtacatgctagtgtgttctgattgagtttactgtgtctgtagtagacaaatctttttggatcaaaagcaattaaacgctctagaaga

SEQ ID NO: 148212 - DNA, 753 bp, Zea Mays
ggtgaaggtacaatagattggacagagtttgcaagtgaggtgaagatgcaccatggaaacaggcttggaggtccgtatcagaggttgtctggtcgaagtctgaggcatgaggagtatttttatgcaaatcctcttccagggtgcttgtgcaaaagaaacacacaggatcaagtggcatgaaccttacatacgaatagacagttatcatacatcgagctttcctccaactcattgaaatacaccaaacagtgaaaatccgagtagactgacagcaaaaggacatgtttttttcttcctataaacagataaaatttatgtagttttccatcttacacgaggatacaggagggaacactcactgaaatgtgcattttcaagggattgtttattcaggttttaaaatagaacaggcaaagatattcaaagaggatatgtgttgtaccacagattatagaattagcagatttgatgagtttttagtgtatgtttgtatttactccatagtccacatgtagagcctctcatgtgggagattcttgtgggagcgtctgccacttggtttgtcctccagatgtacagccttaaatctaaaatttaactttattcattttattatgcacaataatcattagttgtagcggtagtactatggccagtttctcttgtgaggtgaggtgaggtgtttctcttgtattcataggctcatcccttgacacctctatgatattagcctctttccatgccgtgtttatc

SEQ ID NO: 148213 - DNA, 786 bp, Zea Mays
aggcgcaagcttgtcgagctcattgacaagcttgatgaaggtacaataaattggacagagtttgcaagtgaggtgaagatgcaccatggaaacaggcttggaggtccgtatcagaggttgtctggtcgaagtctgaggcatgaggcgtatttttatgcaaatcctcttccagggtgcttgtgcagaagaaacacacaggatcaagtggcatgaaccttacatacgaatagacagttatcatacattgagctttccttcaactcattgacatacaccaaacagtgaaaatccgagtagactgacagcaaaaggacatgcttttttcttcctataaacagataaaatttatgtagttttccatcttacacgaggatacaggagggaacactcactgaaatgtgcattttcaagggattgtttattcaggttttaaaatagaacatgcaaagatattcaaagaggatatgtgttgtaccacagattatagaattagcagatttgatgagtttttagtgtatgtttgtatttactccatagtccacatgtagagcctctcatgtgggagattcttgtgggagcctctgtcacttggtttgtcctccagatgtacaaccttaaatctaaaatttaactttattcattttattatgcacaataatcattagttgtagcggtagtactatggccagtttctcttgtgaggtgaggtgaggtgtttctcttgtattcataggctcatcccttgacacctctatgatatcaacctctttccatgccgtgtttatc

SEQ ID NO: 148214 - DNA, 1931 bp, Zea Mays
cagtgggacctacatgtcaccttcgccgaaatgaagcagcactcctccggaacatcgctctaccatctagcggcagagaccaaagtgcccatcgcaccatgtcggccgccgaaaccgctgtttctccgacgacgacgccgcagccgcagctgcaatcggatccgaacgccgccgccgacgcggccagttccaattctctctgggtggccgacgagacgcaaaccctaaccgaggtcctgctccaaccccaaccaaaccacctgtcgcctcctccttctggtgaaggggacgacgggatcactgcctccggtgctcctgttggtggggacgccgcggcatctgcttctgctgcggcggcggctaacgcgacgatagaagagcgggtgagggggccgtggtccccagaggaggacgcggtgctgagcaacctcgtggagaagttcggggcgcggaactggacgctgatcgcgcgtggcatcccgggccgctccggcaagtcctgccgcctgcgctggtgcaatcagctcgacccccaagtcaagcgcaagcctttcactgaagaggaggaccgcattataatggcagctcatgctgtccatgggaacaagtgggcatctatcgcaaagcttttggatgggagaacagacaatgccatcaagaatcactggaattccaccctgaggcgtcgctactgcaatgatggccaatgcaagcatggtggttctgtggagcgaagtatcccaaaggtgtccagggaagtttcagaagaaccttggcctttaaacgatcttaattccttcaccgctatggatgtaaaggatgatcctgtgcaaacagctccagatacttctcctcgggcaaggcacatcacagatcattgttctattactcaagtcgttgatccaccatacctgtcccgaccagcggcaaagattggtgctttcagaccatattatctaggacacacggaacctacccaacaagaaatgccaggtgctgtcgtcatgtttgactcaactcataaagtctcgactcctgaaagcgaggtattcaagtttgttgatcctatatgctttgctgctgaggtgccagacaaatgtgggtatggttgctgcggtgctcatgagcagcatcgtaagaactcattgctgggtcctgagttcagtgagtttgaaggtcatccacctgttttaaatattagctttgcttcattggtatcagaaattagcagcattgcctggatgagaagtggtatgcaaagcagtgattccagcaacttgatgcaatcaattccaccaacctgacaaagtaggaatcttttgtcagtggcggatccagaaacagatcaaatgaggggctaaattatggattggggaggctggagatggctgcaatgcgaatgaatggaaccaccatgtaaataatgtgcgaattacaaacgcgtgtgggttgctgtgtgccgtgcacatgggtgatgaactgatggacctgcattgtgctgttatgcgcctgcatcttgtaatcgtgggccttcttcgtattactatgctgaaatcactacatggtactaagtgttacttaggctgctggaccggggctgcagccccgccagccctggtcctggatccacccctgcttatgaacttgcatgctggagtattctgtagttgtttgctatattcagacatagtgatgtcaggtcattaattacaatcctggggctcactgtcaataggtgacgatgcattttcttttgcaagcattaatttatatttatttcggtgtttccaccttaatataattctatgttagcctaaagtagatattgtactgtaccgtgtgtagctgtgctgcttaaggtattggccgtgtttatttcattgtagaaaaacacatgctatctatttgatgtttgtagttgtcttcagttc

SEQ ID NO: 148215 - DNA, 1714 bp, Zea Mays
atctagcggcagagaccaaagtgcccatcgcaccatgtcggccgccgaaaccgctgtttctccgacgacgacgccgcagccgcagctgcaatcggatccgaacgccgccgccgacgcggccagttccaattctctctgggtggccgacgagacgcaaaccctaaccgaggtcctgctccaaccccaaccaaaccacctgtcgcctcctccttctggtgaaggggacgacgggatcactgcctccggtgctcctgttggtggggacgccgcggcatctgcttctgctgcggcggcggctaacgcgacgatagaagagcgggtgagggggccgtggtccccagaggaggacgcggtgctgagcaacctcgtggagaagttcggggcgcggaactggacgctgatcgcgcgtggcatcccgggccgctccggcaagtcctgccgcctgcgctggtgcaatcagctcgacccccaagtcaagcgcaagcctttcactggtaccgcccttttcaatctttacttacattgctattttgagcccatgataaatgtatcaaaacctaagcttggcctcacatatgcagtatctatgtgatatgttgatctctggttacctatatggatttgatgcattctgtcattcatgcggatcttatatgcgtatatgtcttgcttttttttgttacctttggctttggctgcagaagaggaggaccgcattataatggcagctcatgctgtccatgggaacaagtgggcatctatcgcaaagcttttggatgggagaacagacaatgccatcaagaatcactggaattccaccctgaggcgtcgctactgcaatgatggccaatgcaagcatggtggttctgtggagcgaagtatcccaaaggtgtccagggaagtttcagaagaaccttggcctttaaacgatcttaattccttcaccgctatggatgtaaaggatgatcctgtgcaaacagctccagatacttctcctcgggcaaggcacatcacagatcattgttctattactcaagtcgttgatccaccatacctgtcccgaccagcggcaaagattggtgctttcagaccatattatctaggacacacggaacctacccaacaagaaatgccaggtgctgtcgtcatgtttgactcaactcataaagtctcgactcctgaaagcgaggtattcaagtttgttgatcctatatgctttgctgctgaggtgccagacaaatgtgggtatggttgctgcggtgctcatgagcagcatcgtaagaactcattgctgggtcctgagttcagtgagtttgaaggtcatccacctgttttaaatattagctttgcttcattggtatcagaaattagcagcattgcctggatgagaagtggtatgcaaagcagtgattccagcaacttgatgcaatcaattccaccaacctgacaaagtaggaatcttttgtcagtggcggatccagaaacagatcaaatgaggggctaaattatggattggggaggctggagatggctgcaatgcgaatgaatggaaccaccatgtaaataatgtgcgaattacaaacgcgtgtgggttgctgtgtgccgtgcacatgggtgatgaactgatggacctgcattgtgctgttatgcgcctgcatcttgtaatcgtgggccttcttcgtattactatgctgaaatcactacatggtactaa

SEQ ID NO: 148216 - DNA, 819 bp, Zea Mays
atgagacccagcaacactggtgccccacgccgccgccgtggcgacggcgagctcccgatcccgccggtgcttgaggagctgccgctgcttcagggcattaaaacgagcaatctgaatccgtcgctcttccaccgagttattcggcggctgggagtggttggccttcgcagtctccgccggcgcggagagcttcttcgccggcggcgtgacggggagtccttggttggcggcagcgtcgttcgttggcacgggggtgctgtttgtgcgcaggcgagccacctggccagccgcctctttaagaacgtcccagggatccgccggcgggcgctccagcggcgacgacggcggcgagcaaaccttcgacgccgcgccgttggggctgtcctccccatagtcctgcaggccgcacagaatcgactgcggcgagccggccaacacctccgcctgtcacacgacgcgacgaggggggtgacgaccagagctcagcgaaattcgaaaacggaaacctgcaaacacggcaccacagcagaaaaggtgacccacatttgcaggggaaccgtccccctggcccttcgcgttgccgacgacgagcccagccctgcggcgcgggaggccgtcagccccttcctcctcgtcgtcgttctcgctcctggcggcgaccgccgccttctcctcctcggagaaaaaatcgtcgtccaggaactcgtccggaagccagagctccacgccgccgccagtgggcgggcactcctccgccatgaacgacacgccgctctgcttgctcggacggaccgggaccggccacgaacctgtgagtaa

SEQ ID NO: 148217 - DNA, 914 bp, Zea Mays
agcccgcgcaccgcgccgcgcgtctctcgtcttctctctcatgaaagggcaagtgtcgagcagcggccgggcgcacgcacgcaccccacgaaaccacaggcttgtcacgggagatcgatgccaaagcaatagctagccggagcgaaagaaagcggacaccgcgattatattactgcggagcggcagggcagcagcatggcggagcggaagatcggcgtggcgatggacttctcgccgagcagcaagaaggcgctgcgttgggcgatcgacaacctggtccgcaggggcgacaccctcgtgctcctccacgtccggcaccacggccgtgaggagggcaagaacgtcctctggtcccgcaccggatcgccgctggtcccgctggaggagctcatggagccgcccgtgaggcagcgctacgacgtgccgtatgacgcggaggtgttcgacatgctcaacgccgcggcccggcagaaagagatgcgcgtggtggtcaagatgtactggggtgacccgagggagaaggtgtgcgacgcggtggaggagctccagatcgagtcgctcgtcatgggcagccgcggcctcggccagatccaaaggattctgctgggaagtgtgacgaactacgtgctgtccaatgcgtcatgccccgtgaccgtcgtcaagtcgaagtagtggctctggcctttcatttccagaaagatgaatctgcagctaacctatacgcaaaccgaaacaactaaatccgatatattgcaccttacgtttcagctgttttcactccatgatttgttttatttttctagatgtacctggacactgttgttttcgtgaaaaaggctgccagataaactgccagcttgtatcactacatgagaaagtcactggacagcatcactataccatttctttttaac

SEQ ID NO: 148218 - DNA, 171 bp, Zea Mays
atgatgcttctagataatggcaccaccactgaacgaaagcgggttcactatgacaccgacaatactattttctctttctgttcttctgttccagaagaactgtcaatagaatctccttctgttccttgttgtccaaggagaggccaccgggttctcttagtaataaaatga

SEQ ID NO: 148219 - DNA, 1013 bp, Zea Mays
aggctgcctcccctggttctgccttcagccaatctgcaccgtccatctatatgcgtcaaatcatcaccgtccgtctcgtcgcctccgcttcaagcctcttccatccctcgatcgcaactgctcctctctctgctcccctcttcgtcgacagcaggcttcattcgcgccgtcatcggcaacggctctggccttcccacaccgccgtccacctcccccacaccgccgccgctcgcattgtggcggtttggttggccacagagcccccgctctaggtgcctctagctcctcctcggtttcgttctcgcccccgtctccttccttttcttcttccccaagttcttcgcccccatctcgtcgcttccatggccagacctcaacgcctggcgcctcccagcgacctccgcacgtggggcccaaacagtccttgcgcctctgatgttgatgagccagcggctgacgacgacgtggcctcgtcgctactggagatgggggcgctcgtgctatccaccgccgaccctctcaccaaggcacgacgcacccacgccgccttctcccggtgggccgtcgggctccctgtcggccaggcgacggcccccctaccaccccaagcgcaaggaccgcctcgtcgagcgcgcgccctacgcccgcccgtcgtcccccgcggaggagccggagaagaagacggtcaagccggcctcggccttggcctcctggctcgggctcggcagcacggaagccgaccgcctcaccatcgctacctggtctgccccgccgtcttcccccagatcgtgcgagacctgggtctacccagtcaccgctcgcccgctcgccccctcaacctccaagcccagatcctgatgtaccagctttgcaacagcgtggccttcgtccacgaccccaaggtgctgcaccgggagctcaagttgcacatccttctcaaggaccacaagaccatggtgctcaagatcgccgacctcagccttagccacgccatcaggttcacggagatctag

SEQ ID NO: 148220 - DNA, 1785 bp, Zea Mays
ttgcggaatcgacgaggaagcatccatggtaaggtgtcaggatggctgcgtcgaacaaagcaatgccaggtaactaattacagagcacatatatatccttccttattcctcctctatcaatcatcagcattgggatcaatttctgttttcctgtgtaatttgtcagtgttaagcagcaacaaactcaggcgctagagaatgcccgctctcttgttctgctgctcgccactctcgcagcggccatccacctaccaagcagggctgaacccgcccggcgggctctggcagggcgacggcgacggctacaaggccggcgacccgatcctcctaaccacgagttccaggcggtacaaggcgttctactactgcaactcggtcgccttcgtggcctccctggtggccatcgtcctggtcaggatgaagaccttgcaccaccacaacgcgctggaggccgccatgatactggacctgtttggcctcatcggcgcgtacgccgcggggagctgccgggacgtgagcacttccatctacgccgtggccctggccggcgctgttctcgtctacgttgtgatccacgtcgtcttcttcacgctgggccacagcgacggcgaagcttccgccgagaaggaggtaaaggatgccgagtcggtgaagaagcggcgcaagcggctgcttctcttcgcgatcttggcggcgaccatcacttaccaggccgggctgacgccgccgggcggcttcctggccaagtacgatccagtaaccgggaaccacgccggcgaccccgtcctgctcaacaactacccacgccgctacacggcgttcttctactgcaactcggtgagcttcatgctgtccatcgcgctcatcatcctgctcgtgaacccgaacctgtaccggccggccatccagagcaacgcgctctccgtttgcacggcggcgggcatgattggtatcatgggcgcctacgccgccggcagcacgcagcatcggaagacgtccatctacatcttcgcgttggcggggttcgtcctctccgtggtcttcttactggttgtgctgttctatgtgatcgatccggacaagaagaacagaacggcagatgagccaacccaggaaggcaggccggcagatgagacaacccaagaaggcagggctgctgacaccaccggaagttccatggaagccgaccccgaagcacaaaaatccgacgcccccaatgaaatggcagccgagcgcgaagcagagacaaaagatgttgatgagtacgaaaagaagctacatgccaggcgcaagtatctgatgctgctgggtatactggtggcgggcatcacctaccaggccggcctggcaccgcccggcggggtgtggcaggccaacgacggcgggcacgaggcgggcgacccggtgatgcacgacaacaggaggcaccggtaccttgccttcttctacagcaactccgcctccttcgtcgcgtccgtcgtggtcatcgtccttcggctgccggactcgctgcacgagaagtggtggatggactggtggctcggcgtgatgaacacgaccatcgtgctggacctcctcggcctcctggtcgcgtacgcggccggctccagccggtcgtggaagacctctggatatgtctccgcgctcgtcatcgccgtgctagcctactttgtgatccatgtggtgctgtcgtgcttcatcaggatcagtaagagtaggaatactcagaatcggggcggcacctctcagcctaacaaacagctccagcttgctcaaattggttga

SEQ ID NO: 148221 - DNA, 1135 bp, Zea Mays
aggacctcatcacacatgcattatcattgcattggaacagatccaaatttcatccagaacaatcgcgtatcaactagctaccgcgcctctaatacagatgtctcggatgttttatacgacaaggaacaccacgacaaaatggtctgattacatcaatgcctactaaataggcattctgcttgttacgacaccaaactttgtagcatggaataaaagaaaagggtacttaaaaggggagtccagccattcgttacgaccacaacggagtgtgaactattattacttgcctcattgcaaaggaagatccttgtgggtgtaaaccactcccttgtcaccattcaccacttgtccactaccgcgcaaaatgctacatcgagtagttagaagtccatcaactccaacaggtccgcgggcatgtatgcgctctgtacttatgccaaccttcgcacctagcccaaaacgcgtcccatcacaaaaccttgtgcttgcattatgaaacacagcggcactgttgcagttaaacaaaaaatgatgtgtcgtcagatctaaaaacatcataggcaattgaatgatcgaacaaatcagtaacaaataacacttgcatagcaaagttcaaccacaagaatgttggaaagaaggtttcagtacctatcaacttgctgcagaaaggcctctgcagcacttctatcagttgtgatgatgcagtctgtgtgtgcactgaaaagaaaccaaattttggtcaaaagcagcctattgtagctataatacacttaaaatagaacttccttaccttccataacgatttatgtgatcgatagctgactgcacatcatcaacaaattcgactgtgcatgccattgagctatactcatgacgaaatgagtctacctttggtactttcaacttgtcatgtgcaacaggtccaccataaataactactcctgcaatatgaaactcaaagtaaaaatccagtgttgtaactattcagtttcactactgtgtaaacctcatatttttgtccaccagttactaaacaaatgaaagattttgagttctgaccttccttttcaagttccactaatagatcatcaagtccctcactcttgttaagatctttatgaacaagtagtgtttc

SEQ ID NO: 148222 - DNA, 1135 bp, Zea Mays
aggacctcatcacacatgcattatcattgcattggaacagatccaaatttcatccagaacaatcgcgtatcaactagctaccgcgcctctaatacagatgtctcggatgttttatacgacaaggaacaccacgacaaaatggtctgattacatcaatgcctactaaataggcattctgcttgttacgacaccaaactttgtagcatggaataaaagaaaagggtacttaaaaggggagtccagccattcgttacgaccacaacggagtgtgaactattattacttgcctcattgcaaaggaagatccttgtgggtgtaaaccactcccttgtcaccattcaccacttgtccactaccgcgcaaaatgctacatcgagtagttagaagtccatcaactccaacaggtccgcgggcatgtatgcgctctgtacttatgccaacctcagcacctagcccaaaacgcgtcccatcacaaaaccttgtgcttgcattatgaaacacagcggcactgttgcagttaaacaaaaaatgatgtgtcgtcagatctaaaaacatcataggcaattgaatgatcgaacaaatcagtaacaaataacacttgcatagcaaagttcaaccacaagaatgttggaaagaaggtttcagtacctatcaacttgctgcagaaaggcctctgcagcacttctatcagttgtgatgatgcagtctgtgtgtgcactgaaaagaaaccaaattttggtcaaaagcagcctattgtagctataatacacttaaaatagaacttccttaccttccataacgatttatgtgatcgatagctgactgcacatcatcaacaaattcgactgtgcatgccattgagctatactcatgacgaaatgagtctacctttggtactttcaacttgtcatgtgcaacaggtccaccataaataactactcctgcaatatgaaactcaaagtaaaaatccagtgttgtaactattcagtttcactactgtgtaaacctcatatttttgtccaccagttactaaacaaatgaaagattttgagttctgaccttccttttcaagttccactaatagatcatcaagtccctcactcttgttaagatctttatgaacaagtagtgtttc

SEQ ID NO: 148223 - DNA, 320 bp, Zea Mays
tacctttcctggctttagggtcatcctagcaaccaacgacttttcataaccagcaacttgtgctgcctcaacatcggcatcattttcagacctaattgcatcctcatttgcttccagagcatcagcaatatctagcaaaatctgtttgcgttcctctgatgacaacttctgtacgcctcgaacagtctcttgccgcaactgccatctctcgggctgtagcttccttggaacatgcccacaaatttgcttcgttgtggaaaagtgtaccgatcttttcgcctttgagaactgtaatgatgctatccgttgcaaacccactt

SEQ ID NO: 148224 - DNA, 957 bp, Zea Mays
tcatggggctcccgtagcgtcgactgcttcgagaagctcgagcagatcggcgagggcacttacgggcaagtgtacatggcgaaggagacgggcaccaacgagatcgtcgcgctcaagaagatccgcatggacaacgagcgggaaggggcccagagcgggacgagcaagggagttgacgacaacaagtacaaggggagcatttacatggttttcgagtatatggatcatgacctcactgggcttgctgatagaccaggaatgcggttcattgtgccacagattaagtgttacatgaagcagctgcttacaggcctacactattgtcacgtcaaccaagtcctgcatcgagacatcaagggatctaacctcttgatagataacgagggtaacttaaagcttgctgattttggccttgcaagatcattctccagcgatcacaatggaaaccttaccaaccgtgtgatcactttgtgttgttatcgcaaggttcttattgtcttcctggattgtagttgcagacctccagagttgctacttggaagcacaaagtataatctagccgttgacatgtggtcagtgggctgtatttttgcagaactgctcaatgggaagccaatattgcctggaaagaatgagccagagcagctgactaagatcttcgagctttgtggtacccctgacgacacaatctggcctggtgtcacaaaaatgccatggtacaacaacttcaagcctcaccggccattaaagatacgagttaaagacttctttaaacattttgatcggcatgcactggatctgttagagaagatgttgactttagatccatcacaaaggatatcagcaaaagatgcacttgatgcagaatatttctggacttcacgagcgatgagcgcggccgtgaacaccatgaggatacgggcccccagatggcgtcggctgtgcaggcggccatga

SEQ ID NO: 148225 - DNA, 1153 bp, Zea Mays
tcatggggctcccgtagcgtcgactgcttcgagaagctcgagcagatcggcgagggcacttacgggcaagtgtacatggcgaaggagacgggcaccaacgagatcgtcgcgctcaagaagatccgcatggacaacgagcgggaagggttcctaatcaccgccatacgcgagatcaagatcctgaagaagcttcaccaccagaacgttatcaagctcaaggagatcgtcacttccccaggtggttacaaccacaaataaaaatgaattagatgtgcgtatgtctacttgttttttgtccactggcgtgctgatgattggattcggggttgttgttgcaggcccagagcgggacgagcaagggaggtcaattgacgacaacaagtacaaggggagcatttacatggttttcgagtatatggatcatgacctcactgggcttgctgatagaccaggaatgcggttcattgtgccacagattaagtgttacatgaagcagctgcttacaggcctacactattgtcacgtcaaccaagtcctgcatcgagacatcaagggatctaacctcttgatagataacgagggtaacttaaagcttgctgattttggccttgcaagatcattctccagcgatcacaatggaaaccttaccaaccgtgtgatcactttgtgttgttatcgcaaggttcttattgtcttcctggattgtagttgcagacctccagagttgctacttggaagcacaaagtataatctagccgttgacatgtggtcagtgggctgtatttttgcagaactgctcaatgggaagccaatattgcctggaaagaatgagccagagcagctgactaagatcttcgagctttgtggtacccctgacgacacaatctggcctggtgtcacaaaaatgccatggtacaacaacttcaagcctcaccggccattaaagatacgagttaaagacttctttaaacattttgatcggcatgcactggatctgttagagaagatgttgactttagatccatcacaaaggatatcagcaaaagatgcacttgatgcagaatatttctggacttcacgagcgatgagcgcggccgtgaacaccatgaggatacgggcccccagatggcgtcggctgtgcaggcggccatga

SEQ ID NO: 148226 - DNA, 1498 bp, Zea Mays
ctcagctcggctcgggttcctcgcgttcccacttcccttcccttccttcctcaccacttcttccgacccaagcaagagaaaactaaaaacaacccggacccaccaatcacgtgggcccacccaccgcctcaccaccagcgtccagggaggaggaaagggaaggaggaaccgaggaacccgccgcaccgcaggcacaggcaggcagggcagcagatcgcgagttccgacttccgacgcgtctccgaccaggccgccgccatttctctgtctccacacagcgggatccctccgccgctcgccgcttctcccttggtccaccgtccacccaaccatgtataacaattaccggaatcctccggggacgcatatgcccccgcagaattctcaacctgtccagtttgacaatccattgtacggtgcaagctcgggtctaatccgatctgggataggagtgtatggggagaagttcttgggctctagttcagagttcatgcaaagcaacatcaatagatacttctccaacccacagtattacttccacgtgaacgatcaatatgtccggaacaagttgaaagtcatattgttcccgttctttcacagggggcactggactcgaataagcgagccggtcggtggacggttgtcctacaagcctccaatatatgacataaatgcgccggatctgtacatccctttcatggcatttggaagcttcatcattctttcagggtttacattgggtttcatgggaaagtgagtttttcgacagttcgttcttcaatccccaaatgcttacgtctattattggttgtacatgaatcatgatacctgtgcaggtttactccagaagctataaacctgcagtttacaagggcgctcatcggatggggcttccagctcacggtcctgaaaggcctgctctactcaatgggtggcggcgaggtgccactgctcgacctggtagcgtatggtggctatttattcgccgggctctcgctcgccgtcgtcgcgaggctcatgtgggcgtactcgtattacgtgatgatgccgtggatgagcctgtgcatgggggtgttcctggtgaggacgatgaagagggtgctcttcacggagatgaggagcagcgagaggcactcgtcgcggcagcattacttcctcctcttcatggcgatagtgcagttccccctgttcttctggctcggcagcataggcgtgtgatacacagttttgtgcgtgttatgatatttagatgtgttgtagaaaaaaaacagtcggaggatggtctcaccagcttgtgcccatccatattatgtgttcttgaggaaccttggatgtggtgctgtatagcttgggagctgttgttgtgaagttctacatgtgatccgtaatcatgttaacttagtccatgatgctattgttatcatttatttacagggagatgggtgctagttagtattgtggacatgttttctattcatcagtattgaatagttgaggt

SEQ ID NO: 148227 - DNA, 1552 bp, Zea Mays
ctcagctcggctcgggttcctcgcgttcccacttcccttcccttccttcctcaccacttcttccgacccaagcaagagaaaactaaaaacaacccggacccaccaatcacgtgggcccacccaccgcctcaccaccagcgtccagggaggaggaaagggaaggaggaaccgaggaacccgccgcaccgcaggcacaggcaggcagggcagcagatcgcgagttccgacttccgacgcgtctccgaccaggccgccgccatttctctgtctccacacagcgggatccctccgccgctcgccgcttctcccttggtccaccgtccacccaaccatgtataacaattaccggaatcctccggggacgcatatgcccccgcagaattctcaacctgtccagtttgacaatccattgtacggtgcaagctcgggtctaatccgatctgggataggagtgtatggggagaagttcttgggctctagttcagagttcatgcaaagcaacatcaatagatacttctccaacccacagtattacttccacgtgaacgatcaatatgtccggaacaagttgaaagtcatattgttcccgttctttcacagggtagtgttcccttgtaacatcgtatacggatctggttcttcaaatctagcttgacgatataaaccagcatttcctcaacgtcttcgcaggggcactggactcgaataagcgagccggtcggtggacggttgtcctacaagcctccaatatatgacataaatgcgccggatctgtacatccctttcatggcatttggaagcttcatcattctttcagggtttacattgggtttcatgggaaagtttactccagaagctataaacctgcagtttacaagggcgctcatcggatggggcttccagctcacggtcctgaaaggcctgctctactcaatgggtggcggcgaggtgccactgctcgacctggtagcgtatggtggctatttattcgccgggctctcgctcgccgtcgtcgcgaggctcatgtgggcgtactcgtattacgtgatgatgccgtggatgagcctgtgcatgggggtgttcctggtgaggacgatgaagagggtgctcttcacggagatgaggagcagcgagaggcactcgtcgcggcagcattacttcctcctcttcatggcgatagtgcagttccccctgttcttctggctcggcagcataggcgtgtgatacacagttttgtgcgtgttatgatatttagatgtgttgtagaaaaaaaacagtcggaggatggtctcaccagcttgtgcccatccatattatgtgttcttgaggaaccttggatgtggtgctgtatagcttgggagctgttgttgtgaagttctacatgtgatccgtaatcatgttaacttagtccatgatgctattgttatcatttatttacagggagatgggtgctagttagtattgtggacatgttttctattcatcagtattgaatagttgaggtacccaattttccaatattattatgttgcagagataagttatccttgac

SEQ ID NO: 148228 - DNA, 1657 bp, Zea Mays
ctcagctcggctcgggttcctcgcgttcccacttcccttcccttccttcctcaccacttcttccgacccaagcaagagaaaactaaaaacaacccggacccaccaatcacgtgggcccacccaccgcctcaccaccagcgtccagggaggaggaaagggaaggaggaaccgaggaacccgccgcaccgcaggcacaggcaggcagggcagcagatcgcgagttccgacttccgacgcgtctccgaccaggccgccgccatttctctgtctccacacagcgggatccctccgccgctcgccgcttctcccttggtccaccgtccacccaaccatgtataacaattaccggaatcctccggggacgcatatgcccccgcagaattctcaacctgtccagtttgacaatccattgtacggtgcaagctcgggtctaatccgatctgggataggagtgtatggggagaagttcttgggctctagttcagagttcatgcaaagcaacatcaatagatacttctccaacccacagtattacttccacgtgaacgatcaatatgtccggaacaagttgaaagtcatattgttcccgttctttcacagggggcactggactcgaataagcgagccggtcggtggacggttgtcctacaagcctccaatatatgacataaatgcgccggatctgtacatccctttcatggcatttggaagcttcatcattctttcagggtttacattgggtttcatgggaaagtttactccagaagctataaacctgcagtttacaagggcgctcatcggatggggcttccagctcacggtcctgaaaggcctgctctactcaatgggtggcggcgaggtgccactgctcgacctggtagcgtatggtggctatttattcgccgggctctcgctcgccgtcgtcgcgaggctcatgtgggcgtactcgtattacgtgatgatgccgtggatgagcctgtgcatgggggtgttcctggtgaggacgatgaagagggtgctcttcacggagatgaggagcagcgagaggcactcgtcgcggcagcattacttcctcctcttcatggcgatagtgcagttccccctgttcttctggctcggcagcataggcgtgtgatacacagttttgtgcgtgttatgatatttagatgtgttgtagaaaaaaaacagtcggaggatggtctcaccagcttgtgcccatccatattatgtgttcttgaggaaccttggatgtggtgctgtatagcttgggagctgttgttgtgaagttctacatgtgatccgtaatcatgttaacttagtccatgatgctattgttatcatttatttacagggagatgggtgctagttagtattgtggacatgttttctattcatcagtattgaatagttgaggtacccaattttccaatattattatgttgcagagataagttatccttgacaaaaatatatacgcttctcgaattctaattctccattccttgtaacaagagctgattgagtatttagggacatggaatcaccctgaacaggcaaggcttatgccatgcaggcagctgaagctgattatatacaaaaaaaaaaggaagggtggggcaaaacaaggtgggtttggaaaagaaaagaaaaaaaagat

SEQ ID NO: 148229 - DNA, 1046 bp, Zea Mays
cgtcatagtaccattttggtctaacttcttttctacccctgcttctccactgcagccatgtataacaattaccggaatcctccggggacgcatatgcccccgcagaattctcaacctgtccagtttgacaatccattgtacggtgcaagctcgggtctaatccgatctgggataggagtgtatggggagaagttcttgggctctagttcagagttcatgcaaagcaacatcaatagatacttctccaacccacagtattacttccacgtgaacgatcaatatgtccggaacaagttgaaagtcatattgttcccgttctttcacagggggcactggactcgaataagcgagccggtcggtggacggttgtcctacaagcctccaatatatgacataaatgcgccggatctgtacatccctttcatggcatttggaagcttcatcattctttcagggtttacattgggtttcatgggaaagtttactccagaagctataaacctgcagtttacaagggcgctcatcggatggggcttccagctcacggtcctgaaaggcctgctctactcaatgggtggcggcgaggtgccactgctcgacctggtagcgtatggtggctatttattcgccgggctctcgctcgccgtcgtcgcgaggctcatgtgggcgtactcgtattacgtgatgatgccgtggatgagcctgtgcatgggggtgttcctggtgaggacgatgaagagggtgctcttcacggagatgaggagcagcgagaggcactcgtcgcggcagcattacttcctcctcttcatggcgatagtgcagttccccctgttcttctggctcggcagcataggcgtgtgatacacagttttgtgcgtgttatgatatttagatgtgttgtagaaaaaaaacagtcggaggatggtctcaccagcttgtgcccatccatattatgtgttcttgaggaaccttggatgtggtgctgtatagcttgggagctgttgttgtgaagttctacatgtgatccgtaatcatgttaacttagt

SEQ ID NO: 148230 - DNA, 2201 bp, Zea Mays
gaaaagactactcacacacgtcaaactgtcccccccgacgcaccgccccccgacgcaaccgcgtccgcgtcggaccactgccgccgaaaccctacacgcccccgccacgccgcggcatggcggatccgccgcccgtggccgcctccgcctcgccggcgcagcccgaccagctcgccgccgcggcctccgtgtccaccccgcagaaccccaaccccctcctctcccctcaaattcccccgtccccgaccgtctccgacctctccgcgcacatctcgtccccgcagcagctcgaccaggcggctgcggcagctgacgcttcgggcggcggaggatccatggattacctcccgcgcccgccgcagctgcaggcgccttcgcccacgcaggcaggggtcggcgccgcggggtttgcccagatcccccgctcggggtcgacctcacgcctctccacggccacccagctccagcagtacgcggctaggatgtacggcgggcagatgagcttctcgggtggcggagggctcgtgggccagcagcagctggcggggcgcgcccccatgcttgggcagggccagctggggatgctgcaaggccagggtaacgcggcatctgcggcacattttgggcttcagtcgcagatgttggcgcaggctaggcaaaaggtcatggcacaaaacacccaattgaataatgctaatacagctcaagtgctgcaagggatgcagcccatgggtgtcatgggtgctatggggatgaaccagacgagaccgaatgtaactattccctatggtgctcaacaaaggtttgcccaggcacaaatgaggccacaagcatctcaacaacctgcactgtctccacagaaggtacctggtcaaggtttgtcgaggacagcatcaattaccgcattaaattcacaactgtctggatcatcacaaaatggacagatggtggcaatgtctatgcctcagcaacagcaacagcagcagcaatggttgaagcaaatgcaaccatccatgggctcaccactttccccacagcaacaatatcagaaccagcagaggctcctgttgatgcagcatcttcagcagaagacaggattgaaccaacaacaacttctccaaatccaacaacagcatccacatctcaatgtccaacagctgattaagcagcaacaatttctgaagcagtttcagcagcagcaaccgctacaatctcctcgtgttttagcatctggttcacagaaatctgcgaatcttacaggctcgcagccgggtacaccattgtcaggtggaactatgactggtggaagtggaagtcagggagctgaaggaactagccaacttcttgggaaaaggaaaatacaagatctggttgcacaggtagatcccttaggcaaggttgacccagaagtggaggatttacttctagaaatcgctgatgacttcattggctcggtgactgcatttgcgtgtaccttggcaaagcacaggaaatcatcagttgtcgaagccaaggatgtgttgctgcacttagaaaaaaattggaatttatctattcctggtttctcacggggggataagaatcctcaaagaaattctgcaaagcaactggtagatccccaacattcagaaagtgatgttactggtatcagaggcacaagcaataaacttggtgctaataactcggttggaaatcatcaaatacgacctccgatggcagaaccttcagcaatgccaacaatgggccctctatcaaaagcccctcgcttctagtggttatgcttctcttccctatcgaaggaaaaattcctgtaagttcacggagtgactaatccttctgaagtttcaggacaatctacctggaaaacaacccgtaggctctaactcaaggattgctagcaagtggaagcacaataaatccacgagcatctgtggcaaactgcagatgcttgtcttacagttacaggaaagcagttgctgacttaccaatcctctacatggggtcatatgtaactttattttattttattttatttttgtgcccgtaaatgcccccatccgttgtatataaatgtttttttttttggcaatggggcattatcgtcaccagttttgatgttgctaggtaggtgaacaaatactaaagtggatgcaacttatataatttaatgaaatgtaagattgatgtcatttttcgttact

SEQ ID NO: 148231 - DNA, 2206 bp, Zea Mays
gaaaagactactcacacacgtcaaactgtcccccccgacgcaccgccccccgacgcaaccgcgtccgcgtcggaccactgccgccgaaaccctacacgcccccgccacgccgcggcatggcggatccgccgcccgtggccgcctccgcctcgccggcgcagcccgaccagctcgccgccgcggcctccgtgtccaccccgcagaaccccaaccccctcctctcccctcaaattcccccgtccccgaccgtctccgacctctccgcgcacatctcgtccccgcagcagctcgaccaggcggctgcggcagctgacgcttcgggcggcggaggatccatggattacctcccgcgcccgccgcagctgcaggcgccttcgcccacgcaggcaggggtcggcgccgcggggtttgcccagatcccccgctcggggtcgacctcacgcctctccacggccacccagctccagcagtacgcggctaggatgtacggcgggcagatgagcttctcgggtggcggagggctcgtgggccagcagcagctggcggggcgcgcccccatgcttgggcagggccagctggggatgctgcaaggccagggtaacgcggcatctgcggcacattttgggcttcagtcgcagatgttggcgcaggctaggcaaaaggtcatggcacaaaacacccaattgaataatgctaatacagctcaagtgctgcaagggatgcagcccatgggtgtcatgggtgctatggggatgaaccagacgagaccgaatgtaactattccctatggtgctcaacaaaggtttgcccaggcacaaatgaggccacaagcatctcaacaacctgcactgtctccacagaaggtacctggtcaaggtttgtcgaggacagcatcaattaccgcattaaattcacaactgtctggatcatcacaaaatggacagatggtggcaatgtctatgcctcagcaacagcaacagcagcagcaatggttgaagcaaatgcaaccatccatgggctcaccactttccccacagcaacaatatcagaaccagcagaggctcctgttgatgcagcatcttcagcagaagacaggattgaaccaacaacaacttctccaaatccaacaacagcatccacatctcaatgtccaacagctgattaagcagcaacaatttctgaagcagtttcagcagcagcaaccgctacaatctcctcgtgttttagcatctggttcacagaaatctgcgaatcttacaggctcgcagccgggtacaccattgtcaggtggaactatgactggtggaagtggaagtcagggagctgaaggaactagccaacttcttgggaaaaggaaaatacaagatctggttgcacaggtagatcccttaggcaaggttgacccagaagtggaggatttacttctagaaatcgctgatgacttcattggctcggtgactgcatttgcgtgtaccttggcaaagcacaggaaatcatcagttgtcgaagccaaggatgtgttgctgcacttagaaaaaaattggaatttatctattcctggtttctcacggggggataagaatcctcaaagaaattctgcaaagcaactggtagatccccaacattcagaaagtgatgttactggtatcagaggcacaagcaataaacttggtgctaataactcggttggaaatcatcaaatacgacctccgatggcagaaccttcagcaatgccaacaatgggccctctatcaaaagcccctcgcttctagtggttatgcttctcttccctatcgaaggaaaaattccttttcaggacaatctacctggaaaacaacccgtaggctctaactcaaggattgctagcaagtggaagcacaataaatccacgagcatctgtggcaaactgcagatgcttgtcttacagttacaggaaagcagttgctgacttaccaatcctctacatggggtcatatgtaactttattttattttattttatttttgtgcccgtaaatgcccccatccgttgtatataaatgtttttttttttggcaatggggcattatcgtcaccagttttgatgttgctaggtaggtgaacaaatactaaagtggatgcaacttatataatttaatgaaatgtaagattgatgtcatttttcgttactgagcagctgtgccttatctaaggctggttttgggact

SEQ ID NO: 148232 - DNA, 2497 bp, Zea Mays
ggcgatcccatattccccttccgatcccatcccttccgcatcgtccccgaacgacgcagacggacgcaaggcacggcgccgacatctccccgtggcccgagggcccagacatgaaggccctgggcgcgcacgccgccgacctgctccgaggcccgcacctactccgcgccgccgtcttcgctttcgccgttgcgctcgccttcctcgttggctaccactggcccaacgcctccccgcgccttgtcttcttctcgtccgatgcctcctcgtcgtcgcccaggtcgtcctcccgctctccttccgtcgtgctctcccctaactctaacgtctccttcgacccatccctgatccctacccccagcaccccgcctgcttcttctactcccaatgcctggtccccgcccgcactaccaccgccgacatcggcgccgccgcctcccctcccccctcctccaccaccagcgcgcctcggcatcgtcggcgaggacggcgctatgcaggacgacttcgacatcggcaacgtcggcgccaacgacactgatctggccaccgacgagaccgcgccgcaggagcctagcgacgtgggcgccagcggtggaccacctagggtgcggattgagaggttcccggtctgccccgagagcatgagggagtacataccctgcctcgacaacgaggatgatatcaagcggctgccctcgacggagcgcggggagcggtttgagcggcactgccctgccaaggacaagggtctcagctgcctcgtgccggcgcccaacgggtacaaggcgcccatcccctggcctcggagcagagacgaggtctggtttagcaacgtgcctcacacaagattgattgatgacaaaggaggacagaattggatcaccaaggtcaaagataaattcagatttcctggaggcggaactcaattcattcatggagcaaatcaatacctagaccagatctcccagatggtaccaaatgttgcatttggatctcatactagagttgtcttggatgttggctgtggagtagcaagttttggtgcatatttactttcacgtgatgtcctgacattgtccatagctccaaaagatgttcatgaaaatcagattcagtttgctcttgaacgtggtgtgcctgcaatggcagcagcatttgcaacgcgccggttgttatatacaagccaagcgtttgatataatacattgctcacgctgccgaataaattggacccgtgatgatggtatcctgctcctggaggttaatagattgcttagagctggaggctactttgcttgggcagcccaacctgtttataagcatgaagaggcccaacaagaggcatggaaagagatggagaacctcactgcccgactttgctgggagtttgtgaagaaagagggatacatcgctatgtggaggaaacccttaaataactcttgctacattaaccgaggtcctgaaggaaaacctccactttgtgatgctgatgataacccggatgatgtctggtatgttggtctgaaagcatgtattagtcggcttccagagaatggcgaagcaccaactcctgttcaatggcctgcacgcttaatggagccaccaaagaggcttcaaggcgtcgaaatggatgcctactcatcaaagaatgagcttttcaaagcagaaacaaaattttgggacgacataattgacggttatatccgtatctttaagtggaggaagttcaaagtccggaatgtaatggacatgagggctggatttggagggtttgcagctgctttgatccgccagaaactggattggtgggtgatgaatgttgttcctattagtgagccaaatacactacctgtaatttttgatcgggggcttcttggagtagctcatgactggtgtgaaccctttgatacataccctaggacgtacgatctacttcatgcatctggtcttttctcaaaggagcagaacaggtgtaatatctctagcatcttgctggagatggaccggatactcagaccaggtggtaaagcatatattcgtgaccggaaagaagttatacaggagatcaaagaaataacgaatgccatggggtggcgtggtactatacgtgacactgccgaaggcgcgtacgccagtaggaaggttttgatgtgcgacaagcctatggcgcgttaggcgatcaggtgaagacaagcaggggtaattttaggtacttttgcaactgaaaagagctgctgtcgggactgacatttgtgctgtagatagggtaggtcaaggactaatttgtaactatttgattgatcatccatttgtaaaatgatgatctgtgtagtttctgacatgtgccaatttcttttgttgaaacattgtcatggaaaccctacaaaagtgggggaaatacgaagagaccgttttaaactcgggatctagtgtaactcagtaagatagttgttagtttgttatcactgcactataaaactacccatctactccct

SEQ ID NO: 148233 - DNA, 2452 bp, Zea Mays
ggcgatcccatattccccttccgatcccatcccttccgcatcgtccccgaacgacgcagacggacgcaaggcacggcgccgacatctccccgtggcccgagggcccagacatgaaggccctgggcgcgcacgccgccgacctgctccgaggcccgcacctactccgcgccgccgtcttcgctttcgccgttgcgctcgccttcctcgttggctaccactggcccaacgcctccccgcgccttgtcttcttctcgtccgatgcctcctcgtcgtcgcccaggtcgtcctcccgctctccttccgtcgtgctctcccctaactctaacgtctccttcgacccatccctgatccctacccccagcaccccgcctgcttcttctactcccaatgcctggtccccgcccgcactaccaccgccgacatcggcgccgccgcctcccctcccccctcctccaccaccagcgcgcctcggcatcgtcggcgaggacggcgctatgcaggacgacttcgacatcggcaacgtcggcgccaacgacactgatctggccaccgacgagaccgcgccgcaggagcctagcgacgtgggcgccagcggtggaccacctagggtgcggattgagaggttcccggtctgccccgagagcatgagggagtacataccctgcctcgacaacgaggatgatatcaagcggctgccctcgacggagcgcggggagcggtttgagcggcactgccctgccaaggacaagggtctcagctgcctcgtgccggcgcccaacgggtacaaggcgcccatcccctggcctcggagcagagacgaggtctggtttagcaacgtgcctcacacaagattgattgatgacaaaggaggacagaattggatcaccaaggtcaaagataaattcagatttcctggaggcggaactcaattcattcatggagcaaatcaatacctagaccagatctcccagatggtaccaaatgttgcatttggatctcatactagagttgtcttggatgttggctgtggagtagcaagttttggtgcatatttactttcacgtgatgtcctgacattgtccatagctccaaaagatgttcatgaaaatcagattcagtttgctcttgaacgtggtgtgcctgcaatggcagcagcatttgcaacgcgccggttgttatatacaagccaagcgtttgatataatacattgctcacgctgccgaataaattggacccgtgatgatggtatcctgctcctggaggttaatagattgcttagagctggaggctactttgcttgggcagcccaacctgtttataagcatgaagaggcccaacaagaggcatggaaagagatggagaacctcactgcccgactttgctgggagtttgtgaagaaagagggatacatcgctatgtggaggaaacccttaaataactcttgctacattaaccgaggtcctgaaggaaaacctccactttgtgatgctgatgataacccggatgatgtctggtatgttggtctgaaagcatgtattagtcggcttccagagaatggcgaagcaccaactcctgttcaatggcctgcacgcttaatggagccaccaaagaggcttcaaggcgtcgaaatggatgcctactcatcaaagaatgagcttttcaaagcagaaacaaaattttgggacgacataattgacggttatatccgtatctttaagtggaggaagttcaaagtccggaatgtaatggacatgagggctggatttggagggtttgcagctgctttgatccgccagaaactggattggtgggtgatgaatgttgttcctattagtgagccaaatacactacctgtaatttttgatcgggggcttcttggagtagctcatgactggtgtgaaccctttgatacataccctaggacgtacgatctacttcatgcatctggtcttttctcaaaggagcagaacaggtgtaatatctctagcatcttgctggagatggaccggatactcagaccaggtggtaaagcatatattcgtgaccggaaagaagttatacaggagatcaaagaaataacgaatgccatggggtggcgtggtactatacgtgacactgccgaaggcgcgtacgccagtaggaaggttttgatgtgcgacaagcctatggcgcgttaggcgatcaggtgaagacaagcaggggtaattttaggtacttttgcaactgaaaagagctgctgtcgggactgacatttgtgctgtagatagggtaggtcaaggactaatttgtaactatttgattgatcatccatttgtaaaatgatgatctgtgtagtttctgacatgtgccaatttcttttgttgaaacattgtcatggaaaccctacaaaagtgggggaaatacgaagagaccgttttaaactaaacaatatcagagtaaaaattaataataa

SEQ ID NO: 148234 - DNA, 345 bp, Zea Mays
cggcggagatccacgacgaccacgctaacattatcggcgctccgccgggccagcgccagcttcgccagcagcatggccgcgtcggagcacgccttgtcggaatcctccacgctcacgcccttggcggccgcggatccgttctcggctgcccggagggccgcgccgttcgcccgagcggccggcgccggcggaccgttgctgtggaagcacgcgcggacgacctcgcacgccatctcgttggtcacgacgtcccacaggccgtcgctggccaggatcaggcactcgtcgtcgtcggtgcgctccgtcaccgttacctccggctccgacgacacgaacggcttcagg

SEQ ID NO: 148235 - DNA, 1851 bp, Zea Mays
aagttcgcggtcgcctttctctcctctctgccccagggcgagagacctaagccagaacagcactaccaccaccgccggtatataaagaggctcccttcgtcacccgtaccggattaccaacccaaccgaacctgtaccgggcggcgggcgcaaaaccgcgtggagcaccagcgaggcatcggccgacagcgttgaagctctacctagcgggatgtatttcttcatgtctggtagtataacaagccactgaggagagcgggcacggagcttcgatcgagcagtggcgttgcagcacctgagcgagaaagtgagctgaggctgggagagggagggaggggtcatcacagttcatccatggttgtgcttgtccagaagccgtggctgcccatcgacctgcgtctgccggcagggccgcaggcgtcgctgggcatcctggcgttcgaggcggcggcggccatgtccaggctgctgtcgctgcaccggtcattgtcggaccaggaggtctcccggctgcgctccgacgtcatgcgctcgccggccgtggcgtacctcaactccaccgaccaggcgttgctcctcaagctggcctgcgccgagttggtcgtgtcgctggacgccgcggccgccgccgtcgcacgcctcggcctgcggtgcggcctcgactttggcggcgtgtacgcctgcctcaaggccggcgcccccgatgcgcgtcttgatccgctcgtggccaaggggctcagggtcaaggccaagaagatggagcgcctcgtcgccgccacggccaagctctgctccgagatggaggcgctcgacgaactggagtccgccgagcggaagatgagcgtccagggctggagccgcctcagcggccccatcccgcagcagccacaggcggcggcccagcagcagcaactgttggccaaggattcacccggcgcggagtcgcttcggcaggagctcaagacgcagcaactcaaggtgaagcgcctcaaggaggagtccctgtggaacgagagctacaagaaggccgtggggctcatggcgcgcgccgcctgcgcggtgttcgtacgcatctgctccatcttcggcccattcgtccccggcctcccgccgccgctgccgtcggccaccacggacagcgtccagacccggctgtcgaagctgctgcacccgcgattggggaagacgaaggcgtcgtccgggccgatcacgcgtcgggacggcccctcccaccgcgtgcacccgccgatgagcagcaactcgtgcccgatcatcgggcgccacctgcctggccacaacccccacaccaactggcgcaagctcctggacgcaccgcccagcaccgtcgggagcgcggggctggaccagcagtacgcgaacgtgatcgcgtccgcggaggagctgctgcggatggaggctgagggccgtcaggaggaggccgccgcagagcgcgccgagatgtacgagatgctcccggcgaagctccgcgtggcggtccggtcgaagctccgggagtggtggcgcgacccgggcccgctggacgaggccctggcgcgggggtggaaggatgcggtggaccgcatcatggcgtggctggggccgatggcgcgcgacacgctccagtggcaggcggagcggaacatggaccggacgcgccggttcgacggcgcgccgcgcgtgtacgcgctgcagacgctgctgtgggcggacaaggaaaaggccgaggcggccatcgtggaggtgctcgtcgcgctgagctgcatctgctggtacgaggagcgccggagaggctccgtccgtgtcggttgaaccgttcgacgccttcttgccctcgctcgtccggatcggacg

SEQ ID NO: 148236 - DNA, 444 bp, Zea Mays
atgtcatgtagacaggtgatgccgagccatcgaatgggtaacataggaagcaaatcagggacccccatccctcgcctcccctacttccaaggtttcatagagcaggaagggaagggaagaggcagtcatacctgttcgttgccggagagggacacgatgaatacatggacatctagaggcgacataggtagtataccgctagatacatacagaaagagagcatgcaagcggagaaagaagaccagccacaacagctccaaaccgagaggcacccgcaccaggcgtcagtccgaaaagggcgagagaatgagagtgccttctagccctggaaccgctgaggcgacacaacaacaccaccaactccgtagcatatgtcgattgctgtcgcgctacgagtcttggttgtccaatatctcagatctggactcgtcaccgccaagatag

SEQ ID NO: 148237 - DNA, 978 bp, Zea Mays
atgaagcccgtggctactgatagccatcttgatctgaaccaaatgccaagcgttggttcaaaagatgtccctggaagagcttattgtactattttgagcccaccttcacaggcatacaatttggactcatcaggcttgttttctttttctataccaactacgcagcctttaacttcatatgcaatgtcgtcactagttgatggttctgctgttacattggcggcacaaggtctgcaaagtgattctgtccgtgacaagggcctagaaatcgactctgtacatgagaagggtgttgaggttggctcaacgcctgatcctgctggggttgaattagaatctgcaccagccaaaagaggtgcagaattatcttcaaagattgagttgcattctatccttggtcctctttgttatcaaattccaaacatggaagatgtggtcccaatcagtaccccgctccgttctgaacataatagtgcacagaaaacatcacaacattgcatgtcacccaatggttatacttctccctctgcaacgattggaaacgtatcaagtcagctaactgttgattcaattttgaggattgctgctgacacctttccatgtactccttcaatactaaggaaaagaaaacgtgataaagcaacacctgcttcgggtaatgagttaaagacaggtggagtaaccaatgatagcttttacactcctaatcgaacgaatgggaaggatactacttctccaaggtcgtttaaaactgctgcatcttttttgtcgctgggttctgttaatgggttattgacttctgcaaggagctttgattcttcaccaccctatcagaagaaaaggtcaaaaagaatggccatcatcaaatcagttgagaaacagctagatttttcagcagatggactggatacttctggttctgagattatgaactctccttgccataattcccaaggtgcaaattctaacaggatgtag

SEQ ID NO: 148238 - DNA, 1409 bp, Zea Mays
gaacacagtaatttcacatgaattgctagatgccgtttggtcactgggcccgaggctcggtcgctcggaggtgccagctgctgcttggtcactgggcccgaggctcggtcgctcgcggttcgagacgaaatccggctgcgagtgctccaaaccggttggctccgctgcttccgcccggcctgcggccgttgccggaggcgcccgcagcatatcataagttcctttcttccgccgcaagaagcccagccaccgccacctgttcggcttccttgatataaccgtccatctcgattcgatccgcctcgtcactcacgaacgcacgaattcaccaaccaaactccactgtctccaactctccatcgcgtctgctacgcctctcctgcaggacgaccaatggcttccaggaagttcttcgtgggtggcaactggaaatgcaacggtactggcgaggacgtgaagaagatcgtcaccgtgctcaaccaagccgaggtgccctctgaagacgtcgtcgcaggtcaaggggctgctgcggctggacttcgccgtcgcagcgcagaactgctgggtgcgcaagggcggcgccttcaccggcgagatcaggtgccctgggtcattttgggacattctgagcgcagagctctgttgggtgaatccagtgattttgttgctgataaagttgcatatgcactcactcaaggtctcaaggtaattgcttgcattggtgagacccttgagcagagagaggcaggaacaacaatggatgttgttgctgcacaaacaaaggctattgctgaaaaaatatcagattggacaaatattgtgttggcatatgaaccagtttgggctattggtaccggcaaagttgcaactcctgctcaggctcaggaggttcatgatggtctgagaaagtggctccactccaatgttagccctgcagttgctgaattgacaaggataatttatggagggtctgtaaatggagctaactgcaaagaacttgcagctcaaccagatgttgatggattccttgttggtggagcctcattgaagcctgaattcgtggacatcatcaagtctgccactgtcaagtcttcatctgcctagtgttttgactttcaatgcacctggatgcttgtcgtactgaatgctgttgatcttttaaagctattgccattttaccatctcgttttggtattctagctccagtgcatcgtttgtatatcatcatctcctgcgtatgtgcacagagtagtcatttacctgaatcatccttgtgtaccctttggaactgcataattgaactgcgctattctagatctgtcctctcatggttacttcaatttatgaggtgttgcatcatgagtcaactcttcaaatttgatggaataattccatttatcatactagta

SEQ ID NO: 148239 - DNA, 1444 bp, Zea Mays
gaacacagtaatttcacatgaattgctagatgccgtttggtcactgggcccgaggctcggtcgctcggaggtgccagctgctgcttggtcactgggcccgaggctcggtcgctcgcggttcgagacgaaatccggctgcgagtgctccaaaccggttggctccgctgcttccgcccggcctgcggccgttgccggaggcgcccgcagcatatcataagttcctttcttccgccgcaagaagcccagccaccgccacctgttcggcttccttgatataaccgtccatctcgattcgatccgcctcgtcactcacgaacgcacgaattcaccaaccaaactccactgtctccaactctccatcgcgtctgctacgcctctcctgcaggacgaccaatggcttccaggaagttcttcgtgggtggcaactggaaatgcaacggtactggcgaggacgtgaagaagatcgtcaccgtgctcaaccaagccgaggtgccctctgaagacgtcgtcgaggtggtggtgagtccgcctttcgtttttctgcagcaggtcaaggggctgctgcggctggacttcgccgtcgcagcgcagaactgctgggtgcgcaagggcggcgccttcaccggcgagatcaggtgccctgggtcattttgggacattctgagcgcagagctctgttgggtgaatccagtgattttgttgctgataaagttgcatatgcactcactcaaggtctcaaggtaattgcttgcattggtgagacccttgagcagagagaggcaggaacaacaatggatgttgttgctgcacaaacaaaggctattgctgaaaaaatatcagattggacaaatattgtgttggcatatgaaccagtttgggctattggtaccggcaaagttgcaactcctgctcaggctcaggaggttcatgatggtctgagaaagtggctccactccaatgttagccctgcagttgctgaattgacaaggataatttatggagggtctgtaaatggagctaactgcaaagaacttgcagctcaaccagatgttgatggattccttgttggtggagcctcattgaagcctgaattcgtggacatcatcaagtctgccactgtcaagtcttcatctgcctagtgttttgactttcaatgcacctggatgcttgtcgtactgaatgctgttgatcttttaaagctattgccattttaccatctcgttttggtattctagctccagtgcatcgtttgtatatcatcatctcctgcgtatgtgcacagagtagtcatttacctgaatcatccttgtgtaccctttggaactgcataattgaactgcgctattctagatctgtcctctcatggttacttcaatttatgaggtgttgcatcatgagtcaactcttcaaatttgatggaataattccatttatcatactagta

SEQ ID NO: 148240 - DNA, 1365 bp, Zea Mays
tcggtcgctcgcggttcgagacgaaatccggctgcgagtgctccaaaccggttggctccgctgcttccgcccggcctgcggccgttgccggaggcgcccgcagcatatcataagttcctttcttccgccgcaagaagcccagccaccgccacctgttcggcttccttgatataaccgtccatctcgattcgatccgcctcgtcactcacgaacgcacgaattcaccaaccaaactccactgtctccaactctccatcgcgtctgctacgcctctcctgcaggacgaccaatggcttccaggaagttcttcgtgggtggcaactggaaatgcaacggtactggcgaggacgtgaagaagatcgtcaccgtgctcaaccaagccgaggtgccctctgaagacgtcgtcgaggtggtggtgagtccgcctttcgtttttctgcagcaggtcaaggggctgctgcggctggacttcgccgtcgcagcgcagaactgctgggtgcgcaagggcggcgccttcaccggcgagatcagtgctgagatgctggtaaacctgcaggtgccctgggtcattttgggacattctgagcgcagagctctgttgggtgaatccagtgattttgttgctgataaagttgcatatgcactcactcaaggtctcaaggtaattgcttgcattggtgagacccttgagcagagagaggcaggaacaacaatggatgttgttgctgcacaaacaaaggctattgctgaaaaaatatcagattggacaaatattgtgttggcatatgaaccagtttgggctattggtaccggcaaagttgcaactcctgctcaggctcaggaggttcatgatggtctgagaaagtggctccactccaatgttagccctgcagttgctgaattgacaaggataatttatggagggtctgtaaatggagctaactgcaaagaacttgcagctcaaccagatgttgatggattccttgttggtggagcctcattgaagcctgaattcgtggacatcatcaagtctgccactgtcaagtcttcatctgcctagtgttttgactttcaatgcacctggatgcttgtcgtactgaatgctgttgatcttttaaagctattgccattttaccatctcgttttggtattctagctccagtgcatcgtttgtatatcatcatctcctgcgtatgtgcacagagtagtcatttacctgaatcatccttgtgtaccctttggaactgcataattgaactgcgctattctagatctgtcctctcatggttacttcaatttatgaggtgttgcatcatgagtcaactcttcaaatttgatggaataattccatttatcatactagta

SEQ ID NO: 148241 - DNA, 1373 bp, Zea Mays
tcggtcgctcgcggttcgagacgaaatccggctgcgagtgctccaaaccggttggctccgctgcttccgcccggcctgcggccgttgccggaggcgcccgcagcatatcataagttcctttcttccgccgcaagaagcccagccaccgccacctgttcggcttccttgatataaccgtccatctcgattcgatccgcctcgtcactcacgaacgcacgaattcaccaaccaaactccactgtctccaactctccatcgcgtctgctacgcctctcctgcaggacgaccaatggcttccaggaagttcttcgtgggtggcaactggaaatgcaacggtactggcgaggacgtgaagaagatcgtcaccgtgctcaaccaagccgaggtgccctctgaagacgtcgtcggtgagcagaggtggtggtgagtccgcctttcgtttttctgcagcaggtcaaggggctgctgcggctggacttcgccgtcgcagcgcagaactgctgggtgcgcaagggcggcgccttcaccggcgagatcagtgctgagatgctggtaaacctgcaggtgccctgggtcattttgggacattctgagcgcagagctctgttgggtgaatccagtgattttgttgctgataaagttgcatatgcactcactcaaggtctcaaggtaattgcttgcattggtgagacccttgagcagagagaggcaggaacaacaatggatgttgttgctgcacaaacaaaggctattgctgaaaaaatatcagattggacaaatattgtgttggcatatgaaccagtttgggctattggtaccggcaaagttgcaactcctgctcaggctcaggaggttcatgatggtctgagaaagtggctccactccaatgttagccctgcagttgctgaattgacaaggataatttatggagggtctgtaaatggagctaactgcaaagaacttgcagctcaaccagatgttgatggattccttgttggtggagcctcattgaagcctgaattcgtggacatcatcaagtctgccactgtcaagtcttcatctgcctagtgttttgactttcaatgcacctggatgcttgtcgtactgaatgctgttgatcttttaaagctattgccattttaccatctcgttttggtattctagctccagtgcatcgtttgtatatcatcatctcctgcgtatgtgcacagagtagtcatttacctgaatcatccttgtgtaccctttggaactgcataattgaactgcgctattctagatctgtcctctcatggttacttcaatttatgaggtgttgcatcatgagtcaactcttcaaatttgatggaataattccatttatcatactagta

SEQ ID NO: 148242 - DNA, 955 bp, Zea Mays
aaataataactggagtatttcttccaattgactaatatgtgtcagttttcttgtttcagtgctgagatgctggtaaacctgcaggtgccctgggtcattttgggacattctgagcgcagagctctgttgggtgaatccagtgattttgttgctgataaagttgcatatgcactcactcaaggtctcaaggtaattgcttgcattggtgagacccttgagcagagagaggcaggaacaacaatggatgttgttgctgcacaaacaaaggctattgctgaaaaaatatcagattggacaaatattgtgttggcatatgaaccagtttgggctattggtaccggcaaagttgcaactcctgctcaggctcaggaggttcatgatggtctgagaaagtggctccactccaatgttagccctgcagttgctgaattgacaaggataatttatggagggtctgtaaatggagctaactgcaaagaacttgcagctcaaccagatgttgatggattccttgttggtggagcctcattgaagcctgaattcgtggacatcatcaagtctgccactgtcaagtcttcatctgcctagtgttttgactttcaatgcacctggatgcttgtcgtactgaatgctgttgatcttttaaagctattgccattttaccatctcgttttggtattctagctccagtgcatcgtttgtatatcatcatctcctgcgtatgtgcacagagtagtcatttacctgaatcatccttgtgtaccctttggaactgcataattgaactgcgctattctagatctgtcctctcatggttacttcaatttatgaggtgttgcatcatgagtcaactcttcaaatttgatggaataattccatttatcatactagtattagttattgagtaataataaggtgatgatgcatcaacttattctatgatgcaaaccaaacc

SEQ ID NO: 148243 - DNA, 921 bp, Zea Mays
atcctcttggtatgtattttcaaaagaaagaaaaatgcagagtttggcgtaggatcatcttcatccaaaggaaaggcaattgcaggtaaaaggggagaaaaattcaagggggaatacaacaacagtggtattcaagaagcagagagaaataaactgtttttctttgagggctcttcatataattttgatttggaggatctattgagggctttggctgaagtccttggaaaaggaagttatgggactacgtacaaagctgttctggaggatggaacaacagtggtggtcaagagattgaaagaagtggtggtgggaaagagggaatttgaacagcagatggagctaattgggaaggtttgccaacatcagaacattgtcccattgcgtgcttactactactccaaggatgagaagctcttggtgtatgactatgtcccactaggtagcctttgtgctgctttgcatggtaacaaagctgctggaagaaccccattggactgggagaccagggtgaagataactctgggcacaacacgcggaatggcttaccttcactctgtgggtagcggcgggaagttcattcacgggaacatcaagtcaagcaacatccttctctcacaggaactcggcgcctgcgtcaccgagttcggccttgcccagctcatgtccacgcccccacgtccacccactacacacggaatggcttaccttcactccgtgtgtctcaagtatgaacgcttatgcttttctggattaattgaaatgtctttcatcttctatgactatgcattcgagggggagtcaccaacgaacgacccacaattgattaatgtgaggtataatcttgttttcggctctcctgatgttatagctgttgagtgcaagaaatcacatgcaagctggattgtgttagacaagtaa

SEQ ID NO: 148244 - DNA, 874 bp, Zea Mays
aatagaagtacctaatactctctctgtttctttttatttatcgctggataaggagtacatgatttcagcgagggattcgaacaatatccaaacaaaacctcaagtggcaagcgtgtgggggtgggggagggagaggctacaaccacgcaccagtagcagcagcctccactacataaccaaccggctatgcagctatgctatgctatgcccttcctccacatacaagaccaaccgcagatcaacacacgcaactcactcactctactgcctatcaccatcctcttcgcctagcgagaagggacgccatccatccatccatccatccatggagctctttgcagcagccgaggagaagccgtgcaggctgttcaaaaagaggagcggcggcggcggcaaggggggcatgggcgtgcgcgccgacggcagcggcaagggcgggtccttctccgggcggtgcgcgcggctcgtcaagcagcagcgcgcgcggttctacatcatgcgccggtgcgtcacgatgctggtgtgctggcgcgagcgcgagtacgcctgagtcccgagtcctacgactggcagaggttgcggcgccgcatgcaggatgcaagcaagctgagacgaaaggaggaggagcagcagcaggcagcagccgagcaggtccaagaagatgctcgatccgtctcctcttttaaccaggaaccaagaaccttgtgtaaagagaggatctttctttctttttctcctgctttgtgctcttgttcttttagccgttgcaggagcagagagagagctatgcaggctagatgatcacggcgccgcgctgttccgatgtaatgcgagcatctagtttctagtatacaggaacctgagctgtttagct

SEQ ID NO: 148245 - DNA, 378 bp, Zea Mays
ttgatcttagtgcatgcatgttgatatttacagacaatatacaacaacactacctgttcagtaaaataaagaagcacattagtacactacacttaatttccagtttacactagacaccgtacatgccacatgaaaaaggataaacaagttccaaactttagaatcgtttggcaggttaaggttatatggcaactggaggagctaacccccgagccagagcacaggccgcgtcacagcatgaggccgagccgctcgctggcgacgtcgcacttgacaggcgcgagcccgacgcggccgcgctccaggtcgtactcgacccacaggttcatctggtggtggtgcccgatcacgtacgccgtcaggggcaccatgtccgcg

SEQ ID NO: 148246 - DNA, 1695 bp, Zea Mays
ctcaagcaacgaaaccgtaaacctccgaagaggaaaggtgagggcgagaaaagaccaaaatattcccctctcatcaggcaaccgcaacccccgtccctcttccgtccgtcgtcatctacctcactacctgctcctcactccccgctccactggcgagatggggagaggcttgggcgccgctcccgtctcgccgcgcctcgctagtctcggggcagctgcgctggcgctgctcgtggcggcggcgctgccttccccagcagctggggctgggctcaacgcgacggcggtgctctcggcgttccccaacttcgccgacttcgcgcggctgctggcatccactcccgtggccagcgagctggccgggaggtcgtccctgacgctcctggccgtgccgaacgccaacctgccgcagtcaccctcggctttcgtagccggcgccgacatcgccgacgtgctgaggtaccacgtcctgctggagtacctctccccgtccgacctcgcccgcctccctccctccgggaagctcgtgacgacgctgttccagaccacgggccgcgcgccctccgacttcggcgccgtcaacctcaccgtggggcccaactccaccgtcgtggtccgctcgccggcgccgtccccgggatcgagcgccacggtcctcggcgccgtgaccgcggtcccgtacaatctcagcgtgctcgcggtgggtggccttatcgtaccctccggattcgacctcgcggcctccgagagccgcccgccaccgccggtgaacatcacccgggttctcaccgacgcgcgtgggttctacgtggcggcctccatgctgcaggcttccggtgtagcgagcgagtttgaggccgacgagcgcggtgctggcatcaccgtcttcgtccccaccgacgacgcctttgccggcctccccgccaccgaccgcctccagtcactacccgctgagcgcaaggccgtcgtgctccgcttccatgtgctgcactcttactacccgctgggctccctcgagtccatcgtgaaccctgtccaacccactctcgccacagagcacaccgaggctggccacttcaccctaaacataacccgcgtcaatggctccattgccattgacacgggcatcgtgcaggcatccatcacccgcacagtgttcgaccagaatcctgtggcggtctttgccgtctccaaggttctactgcccaaggaaatgttcagccggggcgattctggcagcaccgccatggtaccaccttcggttgcgatggcgcccggcgacgccgggaccgagcagacaccacagacgaggctctcatccccgcctgatctccacggggaagatagcgagtcgtcagctgctttggcgacagcaaaggggacttcttggtggtgtgtaggactcatgtatctgcatctattactatctctggtatgagattctggtcgtgcttgttgctttcttgcttccttgtgctcagtttttgtattacttactgtctagaacgtctacaccgggagggagggattggggagagaatttcgtagatttaaagtagcaaaaaaaattagttgcttcacctgattattctaatttctttccattttgtcatgtggcaaagggaaataatgtcatgtgtacaaatctatgcagtccttttgctctacaatgaatagtattttctgttttggcca

SEQ ID NO: 148247 - DNA, 903 bp, Zea Mays
atggagctggtggtggtgcagctcctcctcctccgcctccgcatccacttcccgcggcgcgacccgtgctgtcggctccgggctctgtatcagattctccttgtcgccgtcgtcaccgtccttgtgcttccaccaccgctcctcgaactgcgagtggctccgcccgaatcggccgccgtcgtcgtgcctctgccgctcctcgcgcttggagctgctccggccgtcgccgcggttcccgtcgtcaccgggtggctgcgactgcgacacggcgtggtgggaggcgcctgcgctgaggctgaagctgccgaagcccgtgatctcgcgcgcgatcttgcgcgcccgctcgcgctcctcctccaggaacgggccgcgctccagcagcttgagcacgcgctccgacttgctcctcaccgtcaggccccagttgaagcctttctcgtcgacgtgttggaaggtggccatccggtcgatggcctccctgtccttgtggaactccgccgcgacgctgcggggcccgtgcgtgaggaggtgctcgaggaggagcagcgccttgtacgcctcccgccactgcctgcggtcgaagctcgcgaggcgcccgtgcaggacgcccgtgatcctgacgtactcgtcgacgtcgaacgcctgccgggctatgcgccccatcgtcctgacgttcggcggcgacgcgtccccgttcgtcgcctcctccgtcaagagctgcgtcggggtgacgtcggtgagcgccagccgcgcggagcggatcttgccggtcaggtaggaggaggcctgccgcctgagctcgtggaagaagggcgcgtccatggcaatcgatgccccgctgccgccgaagaggcgagaagccgagacgggacaggaagcgatcgtccagcactgcacggatga

SEQ ID NO: 148248 - DNA, 521 bp, Zea Mays
ccccagagccggcaggcaggcagacgcggagaggtatcgagccatggacatggagatcccacagcagcaagccgcccacggccaggacgagagcgggccggcggcgccgccgctgtccccggcctccgccgcggcggccgcgcggtggaacccgaccaaggagcaggtggccgtgctggaggggctgtacgagcacggcctgcgcagccccagcgcggagcagatacagcagatcgcggacaggctgcgggagcacgggcacgggcacggcgccatcgagggcaagagcgtcttctactggttccagaaccacagggcccgcctgcgccagcagaggcagaagcaggaaagcttcgcctacttcaccaggctcctccgccggcccccgccgctgcccgtgctctccatgccccccgcgccaccgtaccgtcacggccgtgtcccgtccccggccacgatcacgatgccggcgccgccgccgccgacgcccgctgcatgctacaacagcggcggatcgcgtg

SEQ ID NO: 148249 - DNA, 957 bp, Zea Mays
cgttctctcgtcttcttctccgtcttggcgctctgaccacagtggggtcagttggtggcttgctgtgatgtacatgaatccattctacatgactgtgccacagctgccccctgcaaatgctgctgcctactactacccgcagcagcagcagcagcagcaggtgacagtcatgtaccagcagtacccaaggatggaggtcggccaggacaagacgacgacgcccccggccgccacgttccagcaggccgcagcagcaccgcgcggtgccgccagcaccaccccaccgcaggtgctgcactccccgtccccgcccgccattaataacggcgcccgcgggccagcggatcagcgcgtcggccgccccagccgcgaccgcgacctcgagacgctgcagctgttcccgctccaacccaccttcgctcagctgcggcgcgacaaggggaacgccgccgctggcagcagcgcctcctccctgacgtcgaccgcagtggcggcgtccgcttccgtcgtctccgaggacgccgagaacctggagagcgccgagtccaacggcggcgaggcgcccgcgctgccgttctatgacttcttcggcctccagtccgccgcaggccgctgatgagatcaggcggagcgagctagctcgagtggagtgatgatgcgagccgagaaccagacgctcgtgcggtctccagtcgatggacccgagacggcgagacccgttggccgttgccttccgttgggctatgctatgggtgtgcttcatctatcaactcgatccaagcctatgccgattgccgaacaagactgcatgcgtttctgtggcaacaatgtagtggttgaccgtttctttgcatgttcagttctaccgatgcttgctagtagtgatcgccagagtaaggttgctgtgactgtgaacattccttccatagttctatttgcctgttgaagaaaccaaac

SEQ ID NO: 148250 - DNA, 1414 bp, Zea Mays
agcagtcagcagagcagagaacgcaggcagaggcagagcggcagcccgcagagcaggcaccataccagtcaaccaccgcttcgttctcctcccacaccgctcgccttcgccttcccatcttctatcatccccgagctccagttctccacacctcacgtctataaataataaataaggcgcccgcggtgcccatcaattcgtgtcaccgcgtcccgagagcgcaaatcattccgcgcgacgcaaaaaccctagcccagccaccgacccctctcatggcaaccaccaccacccaggcgagcctcctcctccagaagcagctaagagatctcgcgaagcacccggtggatgggttctctgctgggctggtcgacgacagcaatgtcttcgagtggcaggtcaccatcatcggaccgcctgacaccctatatgatggagggtacttcaatgcaataatgagcttcccacaaaattacccaaacagcccgccatcagtcagatttacctctgaaatgtggcatccaaatgtctatcctgatgggcgggtttgtatctctattcttcatccacctggtgaagatccaaacggttatgagctcgcaagtgagcgatggacacctgtgcacacagtagaaagcatagttctgagcattatatcaatgctctctagtccaaatgatgagtctccagcaaacattgaggcagctgtcattggtgccctagcggcctagcccactcggcctgtcggttactccaagttggactctcacagccgctgtgcgtcgtcgtctgtcagcctcctaggctcccagccgccgcacgccagctcttgcgacgtcgcgagagcgagctcgcgtgacgcgccacgacgccagcagctgcccgctggccgccgagccctgcctccacctcgccgtcgtccatctccggggctctccctccacctcaccgagtcgtcgtccttcacagcagaaggaatggagggaacagagggaggatttcaagaaaaaggttaggcgcatcgtgcggaaatcacaggaaatgttctgaaggaaatgggagtcctggcgaagttaaccatgccatctcaggctgcaggattttgctgccaacctcaaagtgctcatctgacaccagcgtcttgtgtattttccatttatcgtctgttcattggtgacaattgcctccagaaatgcattgggacgtggtcggcttgaaggttctgtttgtgtcgtgtggcttgcgctctactaatgtttggcaaacctgaagtggtaccggttatcgtaaatttggtggtgaacctggcataagcaggcaccattcatgtcatctagccgttttgaaaacatatcaggccttgttcgtttcttatcaaaatcaattggttggaggaaattaaggctttatttagata

SEQ ID NO: 148251 - DNA, 1149 bp, Zea Mays
agcagtcagcagagcagagaacgcaggcagaggcagagcggcagcccgcagagcaggcaccataccagtcaaccaccgcttcgttctcctcccacaccgctcgccttcgccttcccatcttctatcatccccgagctccagttctccacacctcacgtctataaataataaataaggcgcccgcggtgcccatcaattcgtgtcaccgcgtcccgagagcgcaaatcattccgcgcgacgcaaaaaccctagcccagccaccgacccctctcatggcaaccaccaccacccaggcgagcctcctcctccagaagcagctaagagatctcgcgaagcacccggtggatgggttctctgctgggctggtcgacgacagcaatgtcttcgagtggcaggtcaccatcatcggaccgcctgacaccctatatgatggagggtacttcaatgcaataatgagcttcccacaaaattacccaaacagcccgccatcagtcagatttacctctgaaatgtggcatccaaatgtctatcctgatgggcgggtttgtatctctattcttcatccacctggtgaagatccaaacggttatgagctcgcaagtgagcgatggacacctgtgcacacagtagaaagcatagttctgagcattatatcaatgctctctagtccaaatgatgagtctccagcaaacattgaggcagctaaggaatggagggaacagagggaggatttcaagaaaaaggttaggcgcatcgtgcggaaatcacaggaaatgttctgaaggaaatgggagtcctggcgaagttaaccatgccatctcaggctgcaggattttgctgccaacctcaaagtgctcatctgacaccagcgtcttgtgtattttccatttatcgtctgttcattggtgacaattgcctccagaaatgcattgggacgtggtcggcttgaaggttctgtttgtgtcgtgtggcttgcgctctactaatgtttggcaaacctgaagtggtaccggttatcgtaaatttggtggtgaacctggcataagcaggcaccattcatgtcatctagccgttttgaaaacatatcaggccttgttcgtttcttatcaaaatcaattggttggaggaaattaaggctttatttagata

SEQ ID NO: 148252 - DNA, 976 bp, Zea Mays
atcgggtttcgggttacgggtttttgcccagcctactggcgccatgccatcccgttcgcatttcggctcccgcatccttccgcaaggaaaccaacccaggtccgcggcatcacgcgtccccacgccgaatcgcctccgcgcgctgaaatcccagccgtcccgcgcttccaacgcttcagataccgacatctcagcgatccgcgccgccacccgttccaccaatcacgtcacgcctcgcctttctataaaatcccaccgcatccccattcatagcacatagtcgaaagctacgagcactcgccgccactcaccagcaaattcccaagccgccccttcccccatctctttcgcgccccatttgatcgattcctgatggcgcccaaggccgagaagaagcccgcggagaagaagccggcggaggagaaggccgagaagaagccaagggcggagaagcgcgtgccgagcaaggagggcggcgagaagaagggaaagaagaaggcgaagaagagcgtcgagacgtacaagatctacatcttcaaggtgctcaagcaggtgcacccggacattggcatctcgtccaaggccatgtccatcatgaactccttcatcaacgacatcttcgagaagctcgccgccgaggcagccaagctcgcccgctacaacaagaagcccaccatcacctcccgggagatccagacctcggtgcgcctcgtcctccccggcgagctcgccaagcacgccgtctccgaagggaccaaggcggttaccaagtttacatcctcttagggtgccgccgccgccgcacgttgctaaattttctcatatttaggactgtgctaggttgttcgtgcaacaatgtagaatttgttataattgctgaatgaatcagttacccctgttgaagttttctaatatattaatcttgctagtataacttgcttcaaatcttgatggggtttccattcgtcgtttaaaa

SEQ ID NO: 148253 - DNA, 3548 bp, Zea Mays
caccttcctttccttgtgtcgcactcgcgccatttaaacgctactacgagctcactagctggtagtactccagaaacgacacctcgccaactagtccagtccagtgccaaagagcgcggcagccgttttggcaagcatggcggtggtggtggcgggcagcagggcgagagcggagcaggcgaggcggcagtggcgggagcaggagcccagaagccccgagatggccgcgccaccgccaaggtcgaccatgccgcggccggcgagggcggcggcggtcgtctactacctggccaggaacgggcacctcgagcacccgcacttcatggaggtcgcgctttcctgccccgacggcctccacctccgagatgtgatggatcggctcgacgcgctgagaggcaaagggatggcgcgcatgtactcgtgggcgtccaagaggagctaccggaacggcttcgtgtggcacgacctggcggaggacgattacatccacccggtggtcgcccgggagtacgtgctcaagggcaccgagcgcctgcacccggcgctgctcgacgcggcggccgcgtcctcctcgtcctccgccggctcgcaggagacgcccaccacgtcgtcctccgccaggtgggaggcgcaccggatgacgatgaagggcgcgtgcggcggggctgaccttggcgagtacgtggcggcgtacatgggcgaggagcgcggcgcggacgccgcgacgcagaccgaggacgacggccgcggccgccagaggcgcgtccagtcccccgccgcgcaggaggagctgagcagggcggagacgtcgccgccgacggcgtcgacgagccccgaggcgctggccaaggcggacgggcgcgccgtgctggagggcgccgtcagcggaagcggccgggccagggcgtcctccgtgctgatgcagctcatctcgtgcgggtccgtatccgtgcgggacgcgcgcgcctccccggtgatgccgcgcgcgcaccaccaccaccgcccaccccggccgccggccgtggaggcaccgtcgtaccgccgcgccaagctcgtggtggaggacaaggagtacttcagcgggagcatcgtggagaccgcgacgaagcgctcgccggccgacggtgtgacgtcccgggacgacctggccgttctccggcggtcggcgtcgtacaacgcggaaaggtaaaggaacaaaacaacccgtccctctcgcaatcattgacgcgagcggcaggcgccggaaactgacccgtcgcttacgcgggacgccctctgtcgctcgctctcgctcctagtatgccagcaggaaggatgagctgctgccactgttacattgagccaggctgtcctagtcgggagttaaaggctctggctcgcccgtggccgcagctgaacccaccacgccattgccgtacgcgcaagatacgccatacgctacgccctccatctccataaatagaagtaggtctcgcggagctgtcgcgcaccagacgtcactgattagagatgtcaatggggacccgatacccgccaacccgtggggaatttccctattaggatacgagtatgggacaaaaattgtacccatgggtatggatatgggacaaaatctacacccattggataaacgggtatgggtttgggaagcaataatccgaacccgattactcatgggtatttcatacgtgtacacctgttgtgtttgtatgaatgagttgaggccgagccgaccatcaagcctagcacggcagcgcaccaggcccaggtcctagcccaataaggcaacatggcaagtcatggttcatggatgagtgtttgctgatgtggtgatgtctgaaatctagattatttgtgctacctgttagtacctagttatctcttaattggggatggggacccattggggacccgaaacccgaatgaggatgggtatcggatgagttttgcacctatgatgggtatggggatgggtatggggatggatcaaacatgatggggatgggtatgggatgctataacccggtggggaattccccattgacatctctatcactgatcgcggccgccggccggggaggggacgggttagataatttcgtcagtttaggaacggccggggcttcaattcttggccgggacccgttccgtgcgagctgggcaggctggggagcgccaaatccccgagccgatttttggcgcgcctacactctttttttttccagaaagactactactccctccgtttcttaatatatgttgtccgttagtacaaatttgaactattgggcgacaaataaagtgaaaccgagggagtacgtactcataaactggtcagttgtttgaaaagagtaacctgatgattgacgtgagcctgtaataacagcaggctttgtcagcagcaggacctttgctttgaagcagtggtccagacgccgcctgcgctagctgcgcctaatctgatccgtgctgaatgctgagcagacgacatggcagcagcaggatgataaagctggagctggcgaaggaggccggggacatgcacggccgctgcatcccgcggaaggcccaagcgcaaggacgacgacggatacctggtcatctcctgcagcgcgcaggggaataacaagggatgacgcggggccgtcttggttcgttggtagctagcgcatggccatcatcatgcggcgcggcgacgagcttaggctagctagctggtcccccggcggccggcgagaacggcgacctggcgagcgtgcatgtgtgcctttctttcttgcgtcgggaacagtaagtagatgagtgtccaccactgctactccagtttggtgtcgtctgctttctttagatgctctgatagcgattggtgaaatgcctgtgattttacgtgtgagctagcaccttcatgtcgatacgtgttactgcgtgtctgcctcgtgctcgttcgtggtctgagctgtttagtgcctactgcctagtcatcatctcattctctctttttgtgctactgggtttcaaaaggctattcttcacgtgttcacggactgtaccgtacaggcgtgcgtgatgagcccgcccaggccgtgctgctgcgtgaatccgtgaccgtgatggatgtagtgcaatctgcaatggtagcacggcgccgacgcgttatgctatcattacttacctcccgtcctcagattcctcccagcagtccccagttctttgatacgtagaatctggatgctcgattgcgtcagttcattcccctctgatctgaggtgaggttcttgatcgagtgtaaaaataaaataaaaaatgaagcctgaccagacagttcggtccctactattactgcttcaccttacaatttgtctgcctccaaaccagcacggtccccaacgatgggatcagctccctcctcctgaacctgaagcctgatccaatttctctcacaccagtctctttccagactgatgttagcgactactgtacagtgtttttttttagcttgcaaaggtggcaatctcggggaagatgtggcaaattgagtgacgagttga

SEQ ID NO: 148254 - DNA, 1940 bp, Zea Mays
ttggcaagcatggcggtggtggtggcgggcagcagggcgagagcggagcaggcgaggcggcagtggcgggagcaggagcccagaagccccgagatggccgcgccaccgccaaggtcgaccatgccgcggccggcgagggcggcggcggtcgtctactacctggccaggaacgggcacctcgagcacccgcacttcatggaggtcgcgctttcctgccccgacggcctccacctccgagatgtgatggatcggctcgacgcgctgagaggcaaagggatggcgcgcatgtactcgtgggcgtccaagaggagctaccggaacggcttcgtgtggcacgacctggcggaggacgattacatccacccggtggtcgcccgggagtacgtgctcaagggcaccgagcgcctgcacccggcgctgctcgacgcggcggccgcgtcctcctcgtcctccgccggctcgcaggagacgcccaccacgtcgtcctccgccaggtgggaggcgcaccggatgacgatgaagggcgcgtgcggcggggctgaccttggcgagtacgtggcggcgtacatgggcgaggagcgcggcgcggacgccgcgacgcagaccgaggacgacggccgcggccgccagaggcgcgtccagtcccccgccgcgcaggaggagctgagcagggcggagacgtcgccgccgacggcgtcgacgagccccgaggcgctggccaaggcggacgggcgcgccgtgctggagggcgccgtcagcggaagcggccgggccagggcgtcctccgtgctgatgcagctcatctcgtgcgggtccgtatccgtgcgggacgcgcgcgcctccccggtgatgccgcgcgcgcaccaccaccaccgcccaccccggccgccggccgtggaggcaccgtcgtaccgccgcgccaagctcgtggtggaggacaaggagtacttcagcgggagcatcgtggagaccgcgacgaagcgctcgccggccgacggtgtgacgtcccgggacgacctggccgttctccggcggtcggcgtcgtacaacgcggaaaggtaaaggaacaaaacaacccgtccctctcgcaatcattgacgcgagcggcaggcgccggaaactgacccgtcgcttacgcgggacgccctctgtcgctcgctctcgctcctagtatgccagcaggaaggatgagctgctgccactgttacattgagccaggctgtcctagtcgggagttaaaggctctggctcgcccgtggccgcagctgaacccaccacgccattgccgtacgcgcaagatacgccatacgctacgccctccatctccataaatagaagtaggtctcgcggagctgtcgcgcaccagacgtcactgattagagatgtcaatggggacccgatacccgccaacccgtggggaatttccctattaggatacgagtatgggacaaaaattgtacccatgggtatggatatgggacaaaatctacacccattggataaacgggtatgggtttgggaagcaataatccgaacccgattactcatgggtatttcatacgtgtacacctgttgtgtttgtatgaatgagttgaggccgagccgaccatcaagcctagcacggcagcgcaccaggcccaggtcctagcccaataaggcaacatggcaagtcatggttcatggatgagtgtttgctgatgtggtgatgtctgaaatctagattatttgtgctacctgttagtacctagttatctcttaattggggatggggacccattggggacccgaaacccgaatgaggatgggtatcggatgagttttgcacctatgatgggtatggggatgggtatggggatggatcaaacatgatggggatgggtatgggatgctataacccggtggggaattccccattgacatctctatcactgatcgcggcc

SEQ ID NO: 148255 - DNA, 314 bp, Zea Mays
gatcatttacagatagctagctagatcattcacaaaagctccagagatgatcagtcacaaaagcaccacagcgacatcactccagcttgaagcagttcaaaagcccacaactacatcactaatgtttaatatcactccagctattgttcaaaagcccacaactacatcactctagctgctccagagctgatcagtcacaaaagcaaaaaagctacactaatgcttcaagcagttcaaaagccttcagacaaccattccagcttcttgtatcctcctgttttaaagtacaagctttctttgtccagaacacccta

SEQ ID NO: 148256 - DNA, 642 bp, Zea Mays
cagccgatgatggcggccaagagggacagggcggcgtgggaagcggaggcggccgcggccggcgtcgcggacacggcccgcctgcgcctgctcgggctcctcgcgcaggcgcagcggcagcatctcctgcacctgcggcgcgcccaccacgggatgccgccgctccccacgggccgcgtgttccagtgcaagacgtgcagccggcagttccccacgttccaggcgctcggcggccaccgcgccagccacaagcgcccgagggtgctccaacatcagcagcagccagtcgtcgctgatcacgcggggctctgcctcgggcgccagcagccgccgcagccgccgccgacgcccaagccgagggtgcacgcgtgccccgtctgcgggctggagttcgccatcggccaggcgctcggcggccacatgcgccggcaccgcgccgacgccgacgccgacgccgaggcgtctaacaagttgcgcccgccgctcgacaaggccgcctgcgacgtcgccggcgggatctgcctggacctcaacctcacgccgttggagaactgcgccaagtgccggggcgtgttggtgctaggcgccgccgggcagggtggtgtacataagacgctcgccatgttagattgctcgctgtag

SEQ ID NO: 148257 - DNA, 753 bp, Zea Mays
cctacatctgcctgccctcttcgccacctaaaccaaaaatcctttcaggcaccacttaaacacgctccaaccagacgcaaaaacacacacgcacggccccggccgggcccgaagatgcacgcgcaatctcgcactcgcatcctcaagcaagcctgcgccgccgctctcgcgctcctgctcgcggtgacgagcacggcagccagcgcccgtccggcacgccgcggttcctcgccgtcgccgccgtcccgcagctccgcccaaacgatcacgctgtacaccaccggcaccggcgtcgcgtcgcccaaacccacagctccttccacgcggcgcccggtcttcacggacgaggggccaatcggcagccgctggctgcgcgccttgacgaggccggacgcgctccggcctgccgcggtcaccgtggtcgacgagcggctccgcggcagcaaggagttcgggctgcctctggatgggaggctgcagggcgtcctcgtcaccggcgtggctgacaacggcagccatatggtggccgtgaaggcctcgttcgccggcgacggcgcgggcgacagcatcagcttcttcggcgtccgccgcgacgaccaggaggagtctcacgtcgcggtcgtcggagggacggggcggtacagtggcgcctccggctttgccgttgtcagagctgctggtggtgtaccagaaacgggtgggaataatgtcagcctgagcagagtgctgagtttcagtgtgcatctcaagtag

SEQ ID NO: 148258 - DNA, 639 bp, Zea Mays
atgcacgcgcaatctcgcactcgcatcctcaagcaagcctgcgccgccgctctcgcgctcctgctcgcggtgacgagcacggcagccagcgcccgtccggcacgccgcggttcctcgccgtcgccgccgtcccgcagctccgcccaaacgatcacgctgtacaccaccggcaccggcgtcgcgtcgcccaaacccacagctccttccacgcggcgcccggtcttcacggacgaggggccaatcggcagccgctggctgcgcgccttgacgaggccggacgcgctccggcctgccgcggtcaccgtggtcgacgagcggctccgcggcagcaaggagttcgggctgcctctggatgggaggctgcagggcgtcctcgtcaccggcgtggctgacaacggcagccatatggtggccgtgaaggcctcgttcgccggcgacggcgcgggcgacagcatcagcttcttcggcgtccgccgcgacgaccaggaggagtctcacgtcgcggtcgtcggagggacggggcggtacagtggcgcctccggctttgccgttgtcagagctgctggtggtgtaccagaaacgggtgggaataatgtcagcctgagcagagtgctgagtttcagtgtgcatctcaagtag

SEQ ID NO: 148259 - DNA, 577 bp, Zea Mays
gcgtcaccgactcaccgtgctgttgctcgccggtcgccgcccggttcaactctgccgcgcgcgccttcggccgacccccgccgagtggcgctgtccacgactgccatccacaggtcgcccagtcgtccagctccagtccctgaaggccgtactcccaactaacaccaatcctcgggtagtcggacgagtaggcgaccgccagcgccggtcagccggtgagcccgaccctgcgccccggtcacaagatgcctaccagatcttgtgtaagggtcaccgtcgacgaggaggcgtcttccagatcgtgggatacatcaatgtgcaggaccacatcatcgctgagagtgagaggaaaggggcaaggggcaggagaagatcaacaagcttcatcaagttctccaccgtcatccgtggtctcaagaaggccatgatccaaattactaattgagtcccctgcatttcttctactaccactactacataattttttgtctaaatttatgtattactaatcgaagagggcatgggaaatgtgaatgtaccaaaccatcactaagtatttatttgtgtatcaactatt

SEQ ID NO: 148260 - DNA, 110 bp, Zea Mays
gttattttgcttcctgtttatattcgggaacctgttcagtcttaatgttgaacaaagaactttctgcacaactagtcaatgcaatgcaacactgaagtgtactgggctac

SEQ ID NO: 148261 - DNA, 214 bp, Zea Mays
tttttcagtgtgcaccctaatacttagaacaactccactattatagagataaacgatgaaactttaccaacatggccattctaccgctgcccaaacagtggaatgaacatatgttcacaattcatatgacgacagaaatagatcagggaccaaataatcttatcaagatggccattttacatctgtctaaaggacaaaatgggcacattttcag

SEQ ID NO: 148262 - DNA, 1822 bp, Zea Mays
ggcattgccctgactcccaaaacccagaagaaaagggaaaagtctccaccccgaccccgtccgtccggctagatctcgactccgctccgcttccccccatctcccacctagatctcgccgcgatgggcctcgccgctgccgcccgcgcggtccttctcctcctcgccgtcgccggggtcctcctccgtccggcggcggcggagatcaagcaggagtccttcaaggacgactcccgcggttccattctcttcgagaagttcggcttcggcccccacggcatggtgtcaatctccgtcaccggcgccaaggcctcctccgcgctcgctaagcccgatccggcacagctcggcttcttccttctctccgacgagtcgctcttcgaggccatctacgatcagccggcacccacggatctgaaccccaacccggagtcctccccgacctgcgtcctctccagcccctacgtgaagccgctcttcaccttcgcagagctcgatgacaagggtttccacaaccagactttccccatcacccatcccgacgagtacagcctctttttcgccaactgcgcgccggagaccagcgtcaccatggaggtccgcaccgacatgtacaacaccaacctggacggcaccaaggactacctctccgtcggcatggcctccgtcccggcgatctacgccttcttcgccgtctgctatgtcgtgttcctggccggttggctctacgtcaccctctaccgcaaccgcctctccgcgcagcgcatccaccacctcatgtcgggcctgctcgttgcgcggatgctctactgcatctcggcggccgaggaccagcactacatccgcaccgccgggacaccgcacgggtgggacatcatgttctacctgttccagctcgtgaagggtgtcatcttgttcgctgtgattgcgctgattgggactggatggtcattcctgaagcctttcctgcaggacaaggagaagaaagtgctcatgttggtgatccctcttcaggttgcagctaacattgctgctgctgtagttggcgagaccggaccattcttgcagggatgggtgacatggaaccagatcttcttgtttgttgatgtcgcttgctgttgtgccgtgctcttcccagttgtgtggtcgatgcgttcgctgcgggagtcatccaagacagacggcaaggcggccagaacccttgccaagctcatgctcttccgccagttctatgttgtcgtgattggatatctgtacttcaccaggatcattgtgtatgctctcaggacaattactaactacaagtacagatgggtgagcgttgcagccgaggaggtgtccaccatggcattctacatgttcatgttctacatgttcaggccagctgagaggaaccagtactttgcacttgacgaggatgacgaggaagccgcagagatggtgctccgtgagcaggagtttgagctctagacggacacatggatgtccaatgacgtgggaatacagccatctcccattcattttctcctcgatgtgctgttgatcatactatacagattcagggtttagctaatgtttgtttatgtgttttggtaaatcttctccagttcctttttagtttcggaagctgccaatgagatttgtgattaatagatttcttgtgttacaaaagcaagggggaattcaataccattatgaatagatgattttattggtgtaggaactggggatgtcattgataagcattgcgttgccatgtcttgtgaagccttgtcattgctggaagcaggttctgaatttcatatggttgttgacacttctgc

SEQ ID NO: 148263 - DNA, 870 bp, Zea Mays
gtctatttaaccgtaaatcatgtaagccatggcagaatcaactcatttgcgattagcggcaaacccagcccttatgtttaaggtgtgccaggaaaaaaataaaaaagaaacaaaaatcagggttcaaacggtgactagctgcttcaaaacacaacacttaaaccactaattaggtgacagaatagttattgcacactaaagataatttctctttcgttttttaggcgaattaacccgatgtccataagattatgatatattagaagttcgaaacacggaaatgcggtactcatatattactgtttgacagtggcttagagtggtcgaacccaacaaccgctaacaataagcactagtgataataatactacgaaactaagcacgtcatccagaatactctcgatttcttgaccgcgacccaagacttttgccacggccaccagcggcggtagcgcctctcagccgccgaatccgtagagggtgcgaccctggcgcttgagggcgtagacgacgtccatggcggtgacggtcttgcggcgggcgtgctccgtgtaggttacggcgtcgcggatgacgttctcgaggaagatcttgagcacgccgcgggtctcctcgtagatgagccccgagatgcgcttcacgccgcccctcctcgccagcctccggatcgccggcttcgtgatgccctggatgttgtcgcggagaaccttgcggtgacgcttggcgccgcctttgcccagacccttcccgcccttgccacgccccgacatggtcgctcgaactcggaggaattggggatttgctggtgggatttggaagagatgatgtgtacctttggagtttggacgaagggggaggggttatatagaa

SEQ ID NO: 148264 - DNA, 2577 bp, Zea Mays
atgctacggcgcgcggcaagcaatgcttattcgtggtggtgggctagccacatccgcagcacacaatccaaatggctcgacaacaatcttcaagagatggaaacgagggtgaagtccatgatcaaactcatagaaataaatgctgacactttcgcaaaaagggcagagttatacttcaagaacaggcctgagctagtaaacctagtcgaggagacatatagatcttaccaggcgctcgttgatcgatgcgatcggatatcaggggagctccacaagtcaaatcacaccatagcaactgcatttccggagcaagttcaactctcactagaaaatgacaatgatgacgggttcccaatgggcatcacagggatcaatatcagcagaggaactatcccagctccaaagaggacacagacacacgtgacgattacctctcagatgagcaaagaaaaggcacaagaaaagatcgagaggctccagaaggaaattttgctattacagaccgagaaagagttcttcaagagctcatatgaatcttcactagataagtacttggatattgaacaaagggcgacagagatgcaagaggaggtatggagcttgcaagagacttttaataccagtgtagttatcgaagacaatgaagctcgagctttgatggctgcacgagcccttatttcctgtgaggatacactgattaacttgcaagatcaacaaaagagatcatctcaagaggcaaaaatagagttccaacgagtcatagatgcaaaaaagaagctaaaagatttcaagagtgagtgtgggcatcctaataatcaaaaggagctaagtgatgagcaatatgtagtgatcagctccacacatccacctatagagaataatgtctccatcctgcaagaccataggctccagccgcaagaattgagccaaaagatcaaactgcagtttgagtcatgctcagaggcatctgtagtgcatctagcaggaattgttgatggattcgtggataaggtgatcgcaatagaaattgcagctacatcacaaaatgctaaaatcaatagaatgaaagctgaggcagatgaactacacaagcatctaaatagtttggaggaagagaaggttggtttagttggagattccagcaagttgcccgagaggttgaggcaagttgagaaagtgctacaaataattcagcggtttgagaagtctgtgcacattgaaaatggaaatattcacagtcaattaactgaagcatgcaatggtcttactgattttgtggagaaggtggatgctcctttgagcgaagaaacaatagattcatctgaagggtctaaaggaattgcttccgaagaagatccagataagcctggcacactctctaatccatttcaagccaatttaggcactgcaggtaaatcaatggatgaagactcattggattcatttgatatctctagtgaggcacaggaagacgaggcagatggcacctcagggcggcggcaagtagttttggatgggttagagggtaaggataaaatcctcttaaaagattatgcatccatccttcagaactatagagacacaaagaagcagctttctgagatagagaggaaaaatcgagaatatcatcttgaggctatgtcagaaatgagagagttaaagagtgccaacataacaaaagatgatgagattcattctcttaaacgaatgttgagctctttacagtccaagatcagcaccaatccaattcagtgtgttgagaagtctgaagaatcatccaaagaaaacaaggatccttgtctagaagagaaagagattggtgagatagaagaatacatgaagaattgccaaaatgaagaaccacatgtttcttcattagagaagaaattcggagaagaaattagcaaagtattagaggaaagcttggacttctggttgaggttcagtacatcatatcgttatatccagaaattccaaaagacatttgataaagcgaaagctgagctggatagacttactgatgcaaaagttcaggagggcttagacactggttctgctggtcagtctgttagaaaacaagactcggttgtccttgaaaagaaacttcgtgacttgagtactgatctacaagtttggttggaaaataatgttctgttacagggggagcttgagagtagattttcattgttgtgcagcatacaagaggagatatctaaggtcacaacattagatcaaaccgataaagctcacttcactcctttccaggctgcaaagttccaaggcgaggtcagtaatatgaaacaagagaataacaaggtcaccaaagagctacaggctgggcttgaccatgtaaggggcctccaagtggaaattgggagggctgttttgaagctcagagacaatattgaactatccattgggagaagcaaccgagcacagaagaactttagatctctatcaaaggccagagtacctctacgaaatttcttatttggttcgaaaccgaaaaagggatcgttattttcatgtatgcctgtgatgccaaaaccggtttctgacatgaggcaaggcccttga

SEQ ID NO: 148265 - DNA, 912 bp, Zea Mays
atgttccgtcgatcctccccctccccctcctacagcgacgctctcatgcacaaccacgccgcgagcttctccgcgccgctgcccgtcaccgtcccgccccctcgcggcgccgcggccggcgggtacctcgacggtaatgtcggcgccttctcgtcgcctccgtcgtcgtactacaactacaacaacatccagaggagcgtcagctcgcactcgctcccgatgcgccttcagccgggcgacgtgtccctcggcggccgtggcttgtactcgccgtcttcgccgtccgcgcaccagctgacgccgacgctgccgccgctctcgtcttccccgtcctcctcctccggcgaactcttcgagttcacctcgccgtgccccgtccgccgcgtattcagcaccggcgatctccaggggatgaacgggtcgtcgccgccgcgcccggtgctgtcggccgacgcctgcggccacgagggtggcgggacgttctctcagaaggtcgtccggtacagcgccgtggagaggaaagagcggatcgagcgctaccgtgtgaaacggcaccagagaaacttcaacaagaagatcacttacgcctgcagaaagacgctggcggacagccgcccgcgggtgaagggccgcttcgcgaggaacggcgaggccgaagccgatgccgacgaccgcgagacgtccgataacagctacgagtacggccgcagccacaacgagctcggcaacggcagcgcctacagcaccacggggagctgctacgatggcgacaacggcgagtggtggtggcgggcgcccggtgcctccgccgcgggggacgacgatgctcagcggcaggtccgcttcgacgacgacgacgacgagctctgggcgaccctcggcgacatgatgtcgatgcacctggtctcgtag

SEQ ID NO: 148266 - DNA, 150 bp, Zea Mays
atggagcacgggtacccctgcaacggctgcggcaaggagaagcggccgccgctcaagaggggccagctcaagctgcagatcgccaggaccctgctcggcagcctcgcggcgccggtcgccaagaaccgggaccgcggcttcgggagatag

SEQ ID NO: 148267 - DNA, 246 bp, Zea Mays
atggcaactggtggctgggaggctgctccggtcgacagacctcgcctcgtcaagacgccgtcggggaacccgctgccccggcggaggggccaggtcaaggagaggatcgtcagggacattgcggaggccctggccacggcggcggccctcgcctgcggcgacaggacgggcgtgggcaagagaggcgaaggagggagggcggccgccgcgaccgcgtcgccgtcacccggtgccaagaagaaatga

SEQ ID NO: 148268 - DNA, 1868 bp, Zea Mays
agttgctttgcgcgcgtgcagagagcgagctacctaccctatagagtgtacatagcaagctccgccgccgtcgccattcctagacacaccttagctcgctctcgcccatgtccgtgacaacaagggagccggagctatagctgacacccgctttcgtcctttgtcctttcgcggcattcctcttggccttggatggaggggtgcccgtgcctctgagctccggcctccgggaattaataaagcaagataggaggatatcgccatgcaggcggcggccaaggccaagacaagaaaaggaggccaccgacgacgaagctgtcggagctggagtcccagctgtcgcagctgcaagaggagctcaagaaggccagggagcaactacactcctctgaactctccaggaagcgggccctgcaggaggccgacgacgccaaggcgcaggcgcgcgactccaaggcgcagctcgccgagctctcgtcggccgaggagacccgactcctggagctgcgacgtctatcgcaggagcgcgaccgctcgtggcagtcggaactggaggccatgcagaagcagcacgccgcggactcgaccgctctggccgcggcgatgggcgaggtgcaccgcctccgcgttcagctcgccgccgcggcgcgcgccgaccgccggcaggacgtggtggaggcgttggccactatcgacgagctcagggcgaagctcgaggcgagcgaggaggccgaggcgcaggcgcgcgccatgcacgaggagtgcaagcagcagctggaggcgagccgggccaccatcgattcgctgctcaccgacgggtccaagctgatggactcgttcagcctcgtggtgaaggagctcgaggagtcgcgtgccaaggtcaaggccctcgaggacgagatcgcggagacgtcgtcgagggccgcaggcgaccactgcagttgctcgggctcggagtcagaggcctccgagctgagggcggagctagaggccgcggaggccaggtaccaagaagagaagatccttagcactgtcgagacgcagtgcgcgtacgagctcatggaccagataaagacagagtccgacctgcggcacggcaagctcgcggcggcgctcgagggcgccaagtccgaggtcatcttcctcaaggcgagtctgttcgacaaggaatccgagctacgtagtgccctggacgcgatcaagaagctacaagcggagacgagagcagacggctcggccgacgcgctgaagcagcagctgcagtgcgcgctgcacgagaacgggcagctgaagcaggagttgcaccagtacgagtccgagaagggctccgcgaccgcgaggacggcggaggccgacgcgtcggaagcggcgaagaagggtgagatggaaaccgagctgcgccgcctgcgggtacaggccgagcagtggcggaaggccgcggagacagccatggcgctgctgacggttggcaagggcgggaacggcaagttcgtggagcggagcgagtcgtgggagggcgttaagtacgcgggcctctgcgaggaattggacgacgacgcggctgtcaggaagaacggcaacgtgctcaggaggatcagcggcatgtggaagaaatgagtgcgatcgggcagctgagcggcggacgcggcgagggctgtactgatctgtagccttgggtctctctggtgtaattgttttttttaaaaggaggatgaccctatggttttagaaaaagaaaggtaacaaatataatacatgagttgccagtgacaaaagagcacaaaccagtactgacagatttaagctagcaacaaaagaacacagactactatacactctgaaactatgataaactctgaaactatgat

SEQ ID NO: 148269 - DNA, 2007 bp, Zea Mays
agttgctttgcgcgcgtgcagagagcgagctacctaccctatagagtgtacatagcaagctccgccgccgtcgccattcctagacacaccttagctcgctctcgcccatgtccgtgacaacaagggagccggagctatagctgacacccgctttcgtcctttgtcctttcgcggcattcctcttggccttggatggaggggtgcccgtgcctctgagctccggcctccgggaattaataaagcaagataggaggatatcgccatgcaggcggcggccaaggccaagacaaggaatggctcctcggaacaccccgcccggacgtcctcccagggcagcaacaaggccgggcggacggcgaggatggccgagtctcccaccggcctcagccccaaggtggaccgccgcacggcggtgagcgccgagagagagaaaaggaggccaccgacgacgaagctgtcggagctggagtcccagctgtcgcagctgcaagaggagctcaagaaggccagggagcaactacactcctctgaactctccaggaagcgggccctgcaggaggccgacgacgccaaggcgcaggcgcgcgactccaaggcgcagctcgccgagctctcgtcggccgaggagacccgactcctggagctgcgacgtctatcgcaggagcgcgaccgctcgtggcagtcggaactggaggccatgcagaagcagcacgccgcggactcgaccgctctggccgcggcgatgggcgaggtgcaccgcctccgcgttcagctcgccgccgcggcgcgcgccgaccgccggcaggacgtggtggaggcgttggccactatcgacgagctcagggcgaagctcgaggcgagcgaggaggccgaggcgcaggcgcgcgccatgcacgaggagtgcaagcagcagctggaggcgagccgggccaccatcgattcgctgctcaccgacgggtccaagctgatggactcgttcagcctcgtggtgaaggagctcgaggagtcgcgtgccaaggtcaaggccctcgaggacgagatcgcggagacgtcgtcgagggccgcaggcgaccactgcagttgctcgggctcggagtcagaggcctccgagctgagggcggagctagaggccgcggaggccaggtaccaagaagagaagatccttagcactgtcgagacgcagtgcgcgtacgagctcatggaccagataaagacagagtccgacctgcggcacggcaagctcgcggcggcgctcgagggcgccaagtccgaggtcatcttcctcaaggcgagtctgttcgacaaggaatccgagctacgtagtgccctggacgcgatcaagaagctacaagcggagacgagagcagacggctcggccgacgcgctgaagcagcagctgcagtgcgcgctgcacgagaacgggcagctgaagcaggagttgcaccagtacgagtccgagaagggctccgcgaccgcgaggacggcggaggccgacgcgtcggaagcggcgaagaagggtgagatggaaaccgagctgcgccgcctgcgggtacaggccgagcagtggcggaaggccgcggagacagccatggcgctgctgacggttggcaagggcgggaacggcaagttcgtggagcggagcgagtcgtgggagggcgttaagtacgcgggcctctgcgaggaattggacgacgacgcggctgtcaggaagaacggcaacgtgctcaggaggatcagcggcatgtggaagaaatgagtgcgatcgggcagctgagcggcggacgcggcgagggctgtactgatctgtagccttgggtctctctggtgtaattgttttttttaaaaggaggatgaccctatggttttagaaaaagaaaggtaacaaatataatacatgagttgccagtgacaaaagagcacaaaccagtactgacagatttaagctagcaacaaaagaacacagactactatacactctgaaactatgataaactctgaaactatgat

SEQ ID NO: 148270 - DNA, 711 bp, Zea Mays
agttgctttgcgcgcgtgcagagagcgagctacctaccctatagagtgtacatagcaagctccgccgccgtcgccattcctagacacaccttagctcgctctcgcccatgtccgtgacaacaagggagccggagctatagctgacacccgctttcgtcctttgtcctttcgcggcattcctcttggccttggatggaggggtgcccgtgcctctgagctccggcctccgggaattaataaagcaagataggaggatatcgccatgcaggcggcggccaaggccaagacaaggactgcaggctgcaacgttcatccgtgctgcgttgtttgggctagggcgctgggctgtgggcgttcggctctcaccctttctgctctctctgctctcacatctatgctgtctgctctctctgcctgcgaacaatagaagtattaccacttactagcagtccagcaatttgttttgctttttaaatgatgaatgtgagtgacagtaatgactgatgaggcgaacgaggaagatggagaagagaatcctcctacatttcatgatgagtttgacgatggttattgagatgggagtgttatctactactatctattgctagttatgttgaactttaagtctattatgttggtttatattaaacttgtactcctatttgctactataatattattatcactatctatttgagactgtattctatt

SEQ ID NO: 148271 - DNA, 2331 bp, Zea Mays
agttgctttgcgcgcgtgcagagagcgagctacctaccctatagagtgtacatagcaagctccgccgccgtcgccattcctagacacaccttagctcgctctcgcccatgtccgtgacaacaagggagccggagctatagctgacacccgctttcgtcctttgtcctttcgcggcattcctcttggccttggatggaggggtgcccgtgcctctgagctccggcctccgggaattaataaagcaagataggaggatatcgccatgcaggcggcggccaaggccaagacaaggactgcaggctgcaacgttcatccgtgctgcgttgtttgggctagggcgctgggctgtgggcgttcggctctcaccctttctgctctctctgctctcacatctatgctgtctgctctctctgcctgcgaacaatagaagtattaccacttactagcagtccagcaatttgttttgctttttaaatgatgaatgtgagtgacagtaatgactgatgaggcgaacgaggaagatggagaagagaatcctcctacatttcatgatgagtttgacgatggttattgagatgggagtgttatctactactatctattgctagttatgttgaactttaagtctattatgttggtttatattaaacttgtactcctatttgctactataatattattatcactatctatttgagactgtattctatttttattgcctacttttatatattactaaggtgtcgtcttgccttacgtcttatcgcttaaaagataaaaaggggttggtcacctcgccttgccgccttaacaactatggtaattatcaaccagctacttctttattgggttggtatcctagcttgctctggatatcttttttttcagtgttataacccctctgatcttctagcagagttagagtggttgtttgtaagggtcagtaaggaaccatttccttcatctctctttaatataaaatacacagttctaatgcatgttcaaaaaaatatcaaccaactacttaagctgtacttagttagcatttcacacaaaactgaaattttgacaaacgtatagcaaagtagattataatgtacatttttacctatccaaccgaaacatatcctgaatatgctcatgtatagtaacactagcagatttagtaatgtgcaaggaaaaattggtacaacttgtatttgtagttaactaaacaacccagttgtaagcaaagatggaatctcctaagtcacactaaagtcataaacaatgagtccacatcatctagtgcttaaaaagaacactaaaggataaatcacatttgatgaagaggtaacacgtttttcagcaagcatttttctatgagatgaattcaactaacattactgtactcaacaaaccaaaacgcacacttaatgttgcaaatcagttcttaattaacctgcaagaaatagaaatacacaatcctggatcataatgcattttgtttcaacaacctgcattgtgacagggtgctgttggaatatttgccttcaatctagggaaatatttatctaaattcgccgttgaattacattaaactgtccaaatgttctaaaatggttggctgagttagagccttagagattgctccttccatcttccaagttctaaatactccgattttcatgtaatctctttgctttcagcgcactgaacttttgccaacagaactgaatcagctcttgcattcatactatttttctacttaattttaaactgatttagtaaaactaggaacctatttcctaacaagaaatactcggctagagctcatataacataaacaagaaaaatatcagataccatattgcaattttcagacttcttaggaaacatcaacaagtttccgttcccaccgtgatttgggaacttacagttctgaagctcaataagggcttgtttgggaggcagtggaatccattccccctggtcccaaacatgccctaaaaatgtaatcaacacactatttgtttggatacctttcgtagacatcagtggcgaagcgggatccgttgaagcagatgaaccagagcaggatcagcaccagtatgtctactctagttaaaggatgaacataaaatccagttacttcgaaaggaacaccggatcagaaacattgcccaacaaattcgaagaaatgctggcgccgaacgcggaatcaacggattgcctggccgacaaaacgtttccccaaagaacggatccaacaagtgcctacccaaacctaagccctgccgggacagaggcaaagataccccgccagaatcagacggggatctaacataagcc

SEQ ID NO: 148272 - DNA, 2245 bp, Zea Mays
cggccttttgatcccctccacgcccgtgctcgcctacgcggcggagattatgttaagctaatgctcctatcccagttcggcctcggagttgctcttgctcctcccctccacttcctgtcggcctcttgcgctttccggcctcggattctttgtgtgcccaccattgcatctagctgcggcttctctccttcgctctgcatctgagtcgagcactcgagctggagcatcgatccgcctcgtccttccagacgcggcttcagctagaatccatcgctctttttttagttcggtttccatttcccatcagagcttccaaccggttctactcgatttggatttttggagctggagtctcccagagcaaaacttcccctccccttccctcctcctccccccttgcatttgacatgaggaggagaagagacgctgcaatctcccccatgttataaggctaaggcatgctgtcgttgaacaaaatgcatttcctcaagttatattccagcaccagcagcaacagcaacagcttcaggaatggctcctcggaacaccccgcccggacgtcctcccagggcagcaacaaggccgggcggacggcgaggatggccgagtctcccaccggcctcagccccaaggtggaccgccgcacggcggtgagcgccgagagagagaaaaggaggccaccgacgacgaagctgtcggagctggagtcccagctgtcgcagctgcaagaggagctcaagaaggccagggagcaactacactcctctgaactctccaggaagcgggccctgcaggaggccgacgacgccaaggcgcaggcgcgcgactccaaggcgcagctcgccgagctctcgtcggccgaggagacccgactcctggagctgcgacgtctatcgcaggagcgcgaccgctcgtggcagtcggaactggaggccatgcagaagcagcacgccgcggactcgaccgctctggccgcggcgatgggcgaggtgcaccgcctccgcgttcagctcgccgccgcggcgcgcgccgaccgccggcaggacgtggtggaggcgttggccactatcgacgagctcagggcgaagctcgaggcgagcgaggaggccgaggcgcaggcgcgcgccatgcacgaggagtgcaagcagcagctggaggcgagccgggccaccatcgattcgctgctcaccgacgggtccaagctgatggactcgttcagcctcgtggtgaaggagctcgaggagtcgcgtgccaaggtcaaggccctcgaggacgagatcgcggagacgtcgtcgagggccgcaggcgaccactgcagttgctcgggctcggagtcagaggcctccgagctgagggcggagctagaggccgcggaggccaggtaccaagaagagaagatccttagcactgtcgagacgcagtgcgcgtacgagctcatggaccagataaagacagagtccgacctgcggcacggcaagctcgcggcggcgctcgagggcgccaagtccgaggtcatcttcctcaaggcgagtctgttcgacaaggaatccgagctacgtagtgccctggacgcgatcaagaagctacaagcggagacgagagcagacggctcggccgacgcgctgaagcagcagctgcagtgcgcgctgcacgagaacgggcagctgaagcaggagttgcaccagtacgagtccgagaagggctccgcgaccgcgaggacggcggaggccgacgcgtcggaagcggcgaagaagggtgagatggaaaccgagctgcgccgcctgcgggtacaggccgagcagtggcggaaggccgcggagacagccatggcgctgctgacggttggcaagggcgggaacggcaagttcgtggagcggagcgagtcgtgggagggcgttaagtacgcgggcctctgcgaggaattggacgacgacgcggctgtcaggaagaacggcaacgtgctcaggaggatcagcggcatgtggaagaaatgagtgcgatcgggcagctgagcggcggacgcggcgagggctgtactgatctgtagccttgggtctctctggtgtaattgttttttttaaaaggaggatgaccctatggttttagaaaaagaaaggtaacaaatataatacatgagttgccagtgacaaaagagcacaaaccagtactgacagatttaagctagcaacaaaagaacacagactactatacactctgaaactatgataaactctgaaactatgat

SEQ ID NO: 148273 - DNA, 1088 bp, Zea Mays
cggccttttgatcccctccacgcccgtgctcgcctacgcggcggagattatgttaagctaatgctcctatcccagttcggcctcggagttgctcttgctcctcccctccacttcctgtcggcctcttgcgctttccggcctcggattctttgtgtgcccaccattgcatctagctgcggcttctctccttcgctctgcatctgagtcgagcactcgagctggagcatcgatccgcctcgtccttccagacgcggcttcagctagaatccatcgctctttttttagttcggtttccatttcccatcagagcttccaaccggttctactcgatttggatttttggagctggagtctcccagagcaaaacttcccctccccttccctcctcctccccccttgcatttgacatgaggaggagaagagacgctgcaatctcccccatgttataaggctaaggcatgctgtcgttgaacaaaatgcatttcctcaagttatattccagcaccagcagcaacagcaacagcttcaggaatggctcctcggaacaccccgcccggacgtcctcccagggcagcaacaaggccgggcggacggcgaggatggccgagtctcccaccggcctcagccccaaggtggaccgccgcacggcggtgagcgccgagagagaggactgcaggctgcaacgttcatccgtgctgcgttgtttgggctagggcgctgggctgtgggcgttcggctctcaccctttctgctctctctgctctcacatctatgctgtctgctctctctgcctgcgaacaatagaagtattaccacttactagcagtccagcaatttgttttgctttttaaatgatgaatgtgagtgacagtaatgactgatgaggcgaacgaggaagatggagaagagaatcctcctacatttcatgatgagtttgacgatggttattgagatgggagtgttatctactactatctattgctagttatgttgaactttaagtctattatgttggtttatattaaacttgtactcctatttgctactataatattattatcactatctatttgagactgtattctatt

SEQ ID NO: 148274 - DNA, 1040 bp, Zea Mays
tctatgacataatacaaacgctatagaaccaatcggaatacacaaacctttaatcattttcccgacaccaaccaaaatttcaaaaaccatgttgctctatacttaccaatgtacagaggaaacacagaggcattacaaacagcaagatgactgaaagcagcatgcagctgatcaaacctctgaaaagtctagacacgccaagaaatatcttcccttgctccacttcgtcctcctgcagtccatcgccatcccaggttacagcaaattcaaattcatccaggctggaagaagaacacggcacaccaactcgacacctgcaatgcatcatcgatgcgtgaagggaacgacagcagagtcatccgacgacggctgcagcgcgctgatcctgaccacgtagctcttctggctcgacgcgacgctgctgcggcccgagccggagctcgggcgcgtgtcgtccgaggagccgtcaccgccgaagaggctggaggagctggagtcctcctcctcctccttcccgtaggcgctgccgatgtgccccccgcactttcggcagagcaggcgcgaccgcctcctgaagaggccccaggagcgggcggagcggaagtagggcgtgcaggtgagctcgtgggccagcgtgaaccggctctcgtcgaccgcgacgaaggcgacgacgcccttcctgatctgcttgcggtacttgggcccgatgccctccgtgtcccgcgccgaggagctcaggttcagcgcgtacccgcagtacccgcagctgccagtgacgtccttgatggaggagtagctgtcgagagacctctccatggccgacgattagggacggtgttcgcttcgctggcgcatccacttttctctcctgctgatcagagagcagacgggacgggagagaggagacgtggggcgagtgcgggtgggggagagagagcgggggtcaggaattcaggaacgcgagcggtttgcttaaaaggaagttgtttggtcgggttgcgccaccgaccggacacggaggattggcctccggccgaggc

SEQ ID NO: 148275 - DNA, 1645 bp, Zea Mays
atgttttcatcgcagcaaagagaaattgagaatcaacacagactgaacatcaagcctgtactagaaatagagaaatgcggaaaaaaaaaaagaaatactgaaattgcaaaaaaaaaaaaaactgaaagctgcgcgcgtacgataattgccactcgcggcaactctcctgtccagctgtactaaccctgacaggtggggactacagaaactacacctatcaccaataccctattccgctagggtcacgcgcccacaaaaacaccacgtacacgggcgcggcgcggagaccgaccaccacctcttcctccggttgcctccgccctcgggcctcgccttcgctccatcgtccccgtctccatcctccaggaccggcaaccccacgtagcgcgacagctcgtcgccgtagtccatggcggctacggaggtgtactcgccgaccacggcggcggcagcgcagcagcagcgggggaaggcggcatcgcaggcgtggcgagcggtggtagggtggatcggcttcttcctccaagtcctgcttcagatcctccggggcacgccctcctgcgcacagctcctctccttcgttggtttccgctatccgctcctctccggacctgcggcctcggagccgttgccggaggtggccttcatgccgctccactccgagatccctgctgacgcggcgcctgccccgaaacctgcgtctgagcccctgggccgcctcacggtagtgcttgacttggatgagactttagtttctgcatatgaatcatctagtcttcctgccattgtgcgcacacaagctgttgaagcaggattacattgctttgatatggaatgtatatcgtctgataaggatgttgaaggcaaacaaaaggtgaatcatgtgactgtttttgagcgccctggtttgcatgagttcttgcggaaaactagtgaatttgcagatcttatcctttttacagcaggtttagaaggttatgctagacctttagttgaccgaatagatgttcacaatagattcagaattcgtctctatcgcccatcaactgttaccacggaatatagagaacatgtgaaagatcttactcgcgtgtcaaaagattttggcaggattgtcattgtcgacaacaatccgttcagtttcattcttcagcctttgaatggaataccttgtgttccattttcagctggacaacattctgatgatcagctcatgacggttatatttccactcctgaagcatctttccctccagaaagacgtcagacccgtattgcgtgaaagatttcatatgccagaatggttccaaaaccatgggatcccccaaattagtcaggctgtgtaagttttgctgccgcacaatggaattgttttgatgaaggctggagtgcctactatgctataagccccttaagggagagcacttgtacattattatcaatattcacttagggttcttgataaaaccgagtcgctgttcatatggagttgtcacacccgaagataagaagattgtaatctagcatgacctcagatttaaatctgtgtagtggagcattttatatcaattaattgttgtatatcagcctctgttgtaaaattttattgttgacaagatagtctaatgaatagttcgtgatccatg

SEQ ID NO: 148276 - DNA, 1173 bp, Zea Mays
ctctctctccctctctcctctgacttcgctgcctccctcctcgtccgtctcgcccggtcgtctcacccaaagactcctcccgcttcgcttccaagttcacgcaccccaccccaccccaccccaatggcgacgcagccgcttccgcttacagcaccacgccgcgtgccgcgcgcctgagcgagagcccgcaagagcacccacacgccacaccagccgcgcgcctacgcggcgcatggcggcgccggggctggaccaggtcatggcgttcctcaccgaccacggcttcgccggcgcggcctccgcgctccgtgacgacgtccttgcgcgcaccgccgccggggacgaaggtcacgacgctgcattaggtccccgtctccccccgctccggatgcccgccgccggtaccggctccggctctggcgctggctctggcacgccggcgcccgcgagccccggctccagctccggttcggcgtcctcgtcagctttcgtcagcatgcgctccacgccctcagggctgttgaatccgtatgggctatggtcgccgaggcactcgcagtcggacgtgtcttcatcggagatggagtttggtacagcgcgccagtacgacaccaccgacctcttcttccaggaggactggctctacgacgatcacctcttccctagcaagctggacgatgaggacgacgaacgcgaggaggaggacaagtttgtactggatgctcacggtggtgcctcagcgcagacagagataggcaagctcggtgcaggccataaccaccgtcatgaacacatcggtggtgaccgatgtgagggttgcgctgaggtgtacacatgctcatcgccactctgcggttgctgtggagggggactcaagaatgacgggcttcatgtggccaggagctcaagctctactgtgtatgggagataccagatcatggatgaccggacagagacaatggatgattgtgcgcaggatgggtttcaattgaagcagagtggagatattatgtttgaatgtggtatgcagagggatcctggacgaggagatgatgattcagacctgagtgttgtggagaaggagcttcaaatgctcagttcatttgatactgatgctgttacgagtaagtacttctccagccttacaatgtagttcgtctcttcaattggttc

SEQ ID NO: 148277 - DNA, 2376 bp, Zea Mays
ctctctctccctctctcctctgacttcgctgcctccctcctcgtccgtctcgcccggtcgtctcacccaaagactcctcccgcttcgcttccaagttcacgcaccccaccccaccccaccccaatggcgacgcagccgcttccgcttacagcaccacgccgcgtgccgcgcgcctgagcgagagcccgcaagagcacccacacgccacaccagccgcgcgcctacgcggcgcatggcggcgccggggctggaccaggtcatggcgttcctcaccgaccacggcttcgccggcgcggcctccgcgctccgtgacgacgtccttgcgcgcaccgccgccggggacgaaggtcacgacgctgcattaggtccccgtctccccccgctccggatgcccgccgccggtaccggctccggctctggcgctggctctggcacgccggcgcccgcgagccccggctccagctccggttcggcgtcctcgtcagctttcgtcagcatgcgctccacgccctcagggctgttgaatccgtatgggctatggtcgccgaggcactcgcagtcggacgtgtcttcatcggagatggagtttggtacagcgcgccagtacgacaccaccgacctcttcttccaggaggactggctctacgacgatcacctcttccctagcaagctggacgatgaggacgacgaacgcgaggaggaggacaagtttgtactggatgctcacggtggtgcctcagcgcagacagagataggcaagctcggtgcaggccataaccaccgtcatgaacacatcggtggtgaccgatgtgagggttgcgctgaggtgtacacatgctcatcgccactctgcggttgctgtggagggggactcaagaatgacgggcttcatgtggccaggagctcaagctctactgtgtatgggagataccagatcatggatgaccggacagagacaatggatgattgtgcgcaggatgggtttcaattgaagcagagtggagatattatgtttgaatgtggtatgcagagggatcctggacgaggagatgatgattcagacctgagtgttgtggagaaggagcttcaaatgctcagttcatttgatactgatgctgttacgaatcacggtgtacatgatttcacggacaacggtgacctcaatggcatctgtgacaaaaatccgaaaatcagcattgataaagaatatctgaaaggtcataggatacagccattccctgaaattggtgatcctgatgaagcatatgagtttcgaaatgtaggatcattaaatgcagatgttcaacattctactgctcttgaagctgaggaagatgcggagacaaatattgatcttgctctctctgattttcacagagaatatgaggtatttgaattgagaattatccaccgcaagaacaggactggctttgaagaaaacaaagattttcccattgtgctaaattcggttgttgctggaaggtattgtatcactgaatatctaggctcagctgcattcagcaaggttgtgcaagcacatgatcttcagacaggaatggatgtttgccttaaaataattaaaaatgataaggatttcttcgaccagagcttggatgagataaaacttctgaagttcgtgaacaaatatgatccactagacgagcaccatgtgttgcgcctttatgactacttctaccatcaggaacacctttttattgttactgaactattgcgagcaaatctatatgagtttcagaaatataatcaggaatcgggtggtgaggtatattttactttgcctaggatacaggttatagctcggcaatgtttagaggccttggtttacttgcaccatttaaggatcattcattgtgacttaaagccagaaaatattcttatcaagagctacagtagatgtgaaattaaagtcattgatctgggaagtagttgcttcttgacagacaacttatgcctctatgtccaatctcgttcttatcgagctcctgaggtcattcttggcctaccttacgatcagaggattgacatttggtctcttggttgcatcatttctgaactgtacactggtgaagtattatttcctaacgagcctgtgtccatgatgcttgctcaaatgattggcataatcggcccagttgacatggaaatgctagaattgggacaggagacacagaagtatttcactgatgattatgacctttttaccaaaaatgagatagtaaggctaaatgaatattctttaattgcaaaatctatattgcacgagctgcttctgattgtttccttcgccttcataaaattcattagctaccagttgcctctcggaagttatttatttcctacggtttgttataaaag

SEQ ID NO: 148278 - DNA, 1086 bp, Zea Mays
cagcatcggccttcccgtgtcaccctcactcagcccggcccgactcgtcaaggattcctatcttcctatggtcgtcgtcgtcgtcgtcgtcggagacgtcctcgagtccccctcccctcccctcccccccggccccgccgaagaggagcagcgcagccgcgatggaccgcgtccagctcgtgctcctcggcctccccatcctcctcttctgctccgacgtcgttaccctcttcgcgcctctcccgccgccgggccccgggcccgacaggggcccccacgcttttcagcccggcgccgaatcctcctccgccgccgacgcttccgcacatgtggagccacaggtggacggaactggctccggcaccaccgtcgacttcaagttctgcgcctcctgctcgtacaggggaactgcaatgaccatgaaacggatgctggaaacctcctttcctgggatccatgttgtcttggaaaattatcctccgccgttccccaaacgcgctctcagtaaagctgtaccccttcttcagttcggcgcgatggcaacattaatggccggtgatcagatcttccccaggtttggaatggtcccgcctccttggtactactcactccgcgctaatagatttgggaccatggcgtcaatctggctgtttggcaatttcgcccattcatttctacagagttctggtgcctttgaagtttattgcaacgggcaactggttttctccaaactgtctgagcagaggtttcctagtgaacttgagctacaggagctcattggcagtaggataccggattctcagattgtagaaaatctggaaaaagatctggtcctagaaaaagatctggtcttagatgatgttgatgccgatgatgccatgagagactagcttcgcctgtttgtttgttactaaatagacagaacttgagagtttcacaacttaattgtcaaaaacatattgccttataatttgcactttattttcctcaattatgtacatatttataccatagttatgtaatatctattgaagtcgtcaagtcagaactttcacagattgcaatagctcattaaaaaggggcaaa

SEQ ID NO: 148279 - DNA, 1194 bp, Zea Mays
cccgatctaactgtccgagctgatgcggttcttgtgctttgcttccgccttttctcctttgcaggagccacaggtggacggaactggctccggcaccaccgtcgacttcaagttctgcgcctcctgctcgtacaggggaactgcaatgaccatgaaacggatgctggaaacctcctttcctgggatccatgttgtcttggaaaattatcctccgccgttccccaaacgcgctctcagtaaagctgtaccccttcttcagttcggcgcgatggcaacattaatggccggtgatcagatcttccccaggtttggaatggtcccgcctccttggtactactcactccgcgctaatagatttgggaccatggcgtcaatctggctgtttggcaatttcgcccattcatttctacagagttctggtgcctttgaagtttattgcaacgggcaactggtaggttcctgtgaacacctagttttgctgcaatgttgttctcaagtacttttacttttgtttgcaacattatatttttttcgaaatcatttcatttcttgccgaatgttttctgggcactgaagctccctgagttatctgatttacttcattgagctattcgtatttcctctttgatagaagctagtaacattttggaaccctaggtaaactagtttcttttcctggatctctgaactgaaatgtggaggtcaggtcacgtttatgcatacaattcttcatatggtggtagaattatcaattgttggtcgcgaagctttggaaaaagagcaagttattctagaacagtatgagagagcagggtttgttatgtttgcttgtatggcatctgtgcttttctttctcttggtggagtcaaagtactaatatgtccaaattcataattactgaagtgcgtattagttgtacttatgctgcatagtactgtggcaatagccaaacaatgagactgaaagtggtactgtaaatgcaacaaaccaagtaggggaaattgtggtaatagtagacaactatgcagggcaggccgttccaaaatgacaagtggtcggtgtttgtaaaagtagcctgggatctaggtctttccttcatatggaactgcaagcttcaaacatcttgttttcttatatatgcagtccatatggatcattcattcaaatggtaaatatgatgagcaatcatagttc

SEQ ID NO: 148280 - DNA, 881 bp, Zea Mays
ggctgaagtcaaagggctgcctgtattttaaaatgtgcctttttgtgtgcagaaactcagcaggaagcttgttcatataagcgttgggctggtattcatgctcttttggcctctttttagctctggatggtatactcctttccttgctgcgctagcaccaggggttaacattataaggatgcttctactggggctgggacttatgaaaaacgaggctatggttaaatcaatgagccgctctggagattacagggaacttctcaagggcccactgtattatgctgctactataacttttgccacgtctcttttatggagaacctcaccagttgctatagcacttatatgcaacttatgtgctggggatggtatagccgatgttgttgggagacgcctaggtaaagaaaagcttccatacaatcccaacaaatcatatgctggaagcatagcaatggcggtggctggttttctggcctcagttgggtatatgcattacttccacactttcggttttattgaggaaacatggtacatggctttaagcttcctcgtggtctctgtagctgcagcactcgttgaatcgcaccccatcagcacagaacttgatgacaatttgactgttcctttgacatcattcctagttggtagcctcatcttttgatgtttaggcgcaaggacgtatgagatgtttctccgtcatgctgtaatcttctgatgtttaggctcaaggacatatgagatgtttctccgtcatgctgtattttatgtaaaacgtttctaaaatactactataattgtgagaatctgtacctagagtttggagaatatgttcggtttgtttatcataatacaagagtgtgtttggttagggagttgactgg

SEQ ID NO: 148281 - DNA, 843 bp, Zea Mays
gatcgccccagtcattgtatatcaacattttggtgtcagatactgaaatttattgcagctctggatggtatactcctttccttgctgcgctagcaccaggggttaacattataaggatgcttctactggggctgggacttatgaaaaacgaggctatggttaaatcaatgagccgctctggagattacagggaacttctcaagggcccactgtattatgctgctactataacttttgccacgtctcttttatggagaacctcaccagttgctatagcacttatatgcaacttatgtgctggggatggtatagccgatgttgttgggagacgcctaggtaaagaaaagcttccatacaatcccaacaaatcatatgctggaagcatagcaatggcggtggctggttttctggcctcagttgggtatatgcattacttccacactttcggttttattgaggaaacatggtacatggctttaagcttcctcgtggtctctgtagctgcagcactcgttgaatcgcaccccatcagcacagaacttgatgacaatttgactgttcctttgacatcattcctagttggtagcctcatcttttgatgtttaggcgcaaggacgtatgagatgtttctccgtcatgctgtaatcttctgatgtttaggctcaaggacatatgagatgtttctccgtcatgctgtattttatgtaaaacgtttctaaaatactactataattgtgagaatctgtacctagagtttggagaatatgttcggtttgtttatcataatacaagagtgtgtttggttagggagttgactggaatgaagcagttccattccggttc

SEQ ID NO: 148282 - DNA, 2255 bp, Zea Mays
cagccctagttttttctgagaccgcttgccgcaaacctcctgaccgcgcgtccgctagaccgctatcccaatcgccgccaccgctcccctcatcgccggcgccgcaccctgcgtccctgacgctcggtaattctcgcgacagaggcagctagggcatcccagatcctccgcccatgacccggaccctggcgccgtgtccgtgcgcctagatagggtttgcttcttgcggcccccggcctcgctgaggtgcgcgccaagtcggcggggcgggggtgggactgtgggggcgcggttcgccgtcggatggacgccgatgaggccgtggggagcagtgggaggatggatctgaacctttacctcggtcccccccgcaccccgcgcccgcgccgctctgacctcggctccgatctcgccctcagcaccccgatgccttcctctccttcgtcctccgcagcgtccgtcgacgcaccgccgccgccgcctgagtccatgcacccgccgtacacccactcccgcgccgacctctcccctccgccgcttccgctggaggtgtactttccctacaaccccgaagactcgcctgttccggatgcgcatatgtcgtacatgcagcctccggaactgctcatccctgggccgcggaacatgccgcctccggattcgcttatctcggggctccgagagggaattcgggaacttcggtacgccttccatccgccgcccccgcccccgcccccgctggtgcgggccaacgaactgctgggctgggaagagcgtccttcctcgtcaacggcctcttcatctttcttcccagacaccgccgctcggtgcgggctgctgctcgagcagactggaagccggtggcttcgcacgaggcggttcaggtctgaccttccacccctcagctccgaggctcgcccttctgggcaggacgccaccgagccagtgccccagcatgagcctgcagctgatgctaatgaattaaacaaggtggctcccaatggcttagaattaggtgccccggagaattcctctgaggaacgcagcaagactgccaccgcattcgagtgtaacatatgctttgagatggctagtgagccggtagtcacttcctgtggccatctcttctgctggtcgtgcttgtatcaatggttgaatgtttactccagccacaaggaatgcccagtctgcaaaggcgaggtaactgaggcaaatattactccaatatatggtcgagggaattctgatgcagagaagactgtggaggactggaagtcaccaggtcctacaatcccgccgaggccacatggacatcgccttgaaagcttctggcagcaattccaccatattcgacctatctcaagaaggcttggtgaggcgcatgggatactgtcatcatggaggcgtcttctggatcagcagatcctgggcagcgtgagtaggcttgaagggccatctgaatcagccacgcaagaaataaatgacattcgtcaacatgatcacctaagtggattggcattggcctcaaggatgagggcaaggcggtttcaaatagaagctttgagccgtcctgatggttcttccactagcccccctgataatggtctgacaggaaacaatccatcagaaattctgacaggaaacaatgcattgttggaacgtctggcaggaagcaattcaagacgacttgaattgttggaacgtcttgcttttggcattgcaaacacagctggtgccatgagtgatgactttagaagaatcgcttcaccaaaccaatatagaggatctgcttcatcatcgaatcttcaaaataatgagccagcagtcgatggagctcgcattgcgggtgcaccttctgcagaccaagcgtctaattcaagcactgttgctgtgatacaaggggatggtggtatctctgaaagtgcaggagagcctagcaatgcaggttcttcgggatccctgaggaggagagggaggagcaatgcatcaggttcattggatgtggatggtggaagcctccaacagaacaagagacacaggatgaactgaatcctctttgacatgtgtgtttgtcccaaaccaaacttggcctctttcgctgcattgtagcatgttgtagtttcgtctcttttatgtgttcactgaaacagtttacagttccttcaggttgcttaaatttggatcttcaaacatattatgtgtcctgaagttattttcattatgatatcggaaatggactgcctttgttattttca

SEQ ID NO: 148283 - DNA, 2183 bp, Zea Mays
cggttccccggtctcggactctcggtctcgcacgctccctccccatccccaattcggtttcgctccgccccggctgccgcacccatggcctcctcctcctcgctcttctcgccgtgcgccctcaccgccaagctcgggatagggcacgcgtcctatggctccggacgccgcgccaacttgcgccggcgcggccgcctctcggttgtggccgtacagacgggcccgcagaagccgtctccgtcgtcgtcccaggccgccgcggcggaggatgaggcggatgcgctgcagaagcttctgaagagggagtacaagtacgggttcgtatccgacttcgagtccttctccatccccaaggggctgtcggaggccaccgtccgccgcatctcggagcttaaggcggagccggcgtggatgctggacttccgcctcgccgcctaccgccgcttcctcaccatggtcgagcccacctggagcgacaacgagtacgcgcccgtggacctgcagtccatttgctactactccgcgcccaaaaccaagcccaagctcaatagcctcgacgaggtcgacccggagctgctcaagaccttcgaccgcctcggcatcccgctcaccgagcagaagcgcctctccaacgtcgccgttgacgccgtcatcgactccacctccatcgccaccacccaccgcgaagcgctcatggccaagggcgtcatcttctgctccatctccgaggccatccgcgagtacccggaccttatcaggcgttacctgggcagcgtcgtaccgccaggcgacaactactatgccgctctcaactcagcggtgttcagcgacgggtccttctgcttcgtgcccaaagacacagtctgccccatggaaatctcgacctacttcaggatcaacgacaaggagaccggtcagtttgagaggactctgattgtggccgatgagagaagcacagttagctatttggaaggctgcactgcaccagcttacgactcgaatcagctccatgctgcggttgtggagcttgtgtgtgaggagggggcagagatcaagtactccacggtgcagaattggtactctggtgatgaggagggcaaaggaggcatttataactttgtgacaaagaggggacggtgcaaagggcatggttcgaagatctcatggacacaggttgagactggatctgctattacatggaagtacccaagcgtcgagctcatcggggacgatagtgttggagaattctactcggttgcgcttacaaaggattgccaacaagcagacacagggacaaaaatgatccacaaggggaagaattcacgcagccggatcatatccaagggcatatctgcagggaagtcaaggaattgctaccgcggcttggtcctgatgaaccctagtgcggagaatgcttataattcttcacagtgtgactcattgctgatcggggataatgcggctgcgaacacctatcccaccattcaggtgggttgcactagtggccgtgttgagcacgaggcaagcacttccaaaatcggagaggatcagctattttatttccagcaaagaggggtagatcatgaaaaggctgttgccgccatgattggtggattctgcagatcggttttcgagcaccttccctatgaattcgcacaggaggtggacgcactcatgaaccttaaacttgaggggtcagttggctaatttgttggctcagcgactgcgtgcaaaactccatgacagccagttacctagaaaatccatgtgtacagcagtacgagaagaatgaagtgcacgatagatatacatatacatttcctggcttgtaatactgaatgttcacattatgcctatggcaattggcaacgaagatagcagttgtgcctgcttgtcttctgtttgcccagtttttgctaatgttgtaagccagctcacatggctcggctagacaagaatgaaatcaatgcgattgtgttggcgttatagatgtagggcatgtttggtttactgcctcaacagtcacagcttaaagttaggcgaggtaagcatttgggtactcttagaccgtgttcagcagagagaatttgatatttgccatcacccccatatttgtcatcacctcgaaacacatcctaaagttgccatcagacttacattttatagattttatagacggatgg

SEQ ID NO: 148284 - DNA, 2109 bp, Zea Mays
ccgcgaagcaggaggatggagtcggtcggcgacccgcgggagggcccgtcgacggagcgggcgttcgaggtgaagccgatcccgccgtggccggagcaagtgacggggcgcgccctggcggcgagcctcgcgctgggcgcggcgctcagcggcgtgatgatgaacctggtgttcacgtcgggggtcatcccgtcgctcaacatctcggcggccctgctggggttcttcctcctcaaggcgtggacgggcctgctgggccagatgggcgtgccgcaccgccccttcacccgccaggagaacgccgtggtgcagacctgcgtcgtcgcctgcgccagcatgacatacagcggcggcttcgggtcgtatcttctcgggatggaccgggagacggcggagaagacgagcaccgcgaacagccccggtgcgaacatcagcgagccgacgctcggtcggacgatggccttcttcttcctcgtcagcttcgccggcctcctcgtcatcgtgcccatgaggaagaccatgatcatccgccaccggctgacgttcccgagcgggtccgccacggcgcacctcatcaacagcttccacagcccccacggtttcatgcaggcaaagaggcaggtgtcgctcatcgtccggtcgtgcctagggagcttgctctggtccgtcttccagtggttctacaccggaggacccaactgcggcttcactgcgttcccgacgttcgggctcaccgcgtacaaacacggcttctacatcaatatgaatggaacttacgttggtgtgggcatgatcagcccttacctgataaacatctcgatgctggtcggctccatcatctcctgggggatcatgtggccctacctcctaaccaagaaaggcatctggtacgacgccaatctccaagagaccagcctaaaaggcctcaacggctacaaggtgtttagcgcgataggtatgattctcggcgacggcatcctccagctcgtcgtgatctcgctgaagaccgtacacaccatgcgccaccaccagctagccgccgagacgatcaggtccttctccaacgtggactccatgccgcggccggtcctcagcttcgacgaccgccgcaggacgcaggtgttcctccgggagcacatacccagcacgttcgccatcagcggctacgtcgtgctggcggcgctctcctccgccgccatcccgctcatctacaagcaggtgcgcttctaccacgtcgccgcggcgtacgcgttcgcgccgctcctggccttctgcaacgcctacggcactggcgtcgccgagaccaacttctcggcgcagtacaacaagctggtcatcctgctcttcgcgtcgtggatcggggccaggaacggcgggatcgtcgggagcctcgtcatctgcggcgtcgtgtcggccgtcgtgtccacggcctccgacttcatgtcggacttcaagacggggtacctcaccctcacctcgccgcgggccacgctcctgagccaggtgctcggcaccgcgatgggctgcgtcgtcaacccgctcgtcttcaccgtcttccaccacttctacgagtccaacgccaacaaggtgtacgacgcgcccatggccagggtgtaccgcgccatcgccgtgctgggcgccggggaccagcagctgcccgaccactgcctcgctatcagcgtcgccttcttcgtgctggcgctgaccgtgagcgcgctccgggagctggcctcgcacaacaagtggcccgcgcagcattacatccccagcgtcaccggcatggccgtctcgttcctgctggtcccggccgtgtccatcgacatgtgcgtggggagcttgatcctcttcatgtggaacagggcggacagggaggacgcgcaggtgttcgcgccggtgcttgcgtccggtctcatatgcggggacgggctcttctccataccatacgcgctgctcgccaggtacgacgtcacgccgcccatctgcgtaaggttcatcggcagagtgcagaacaagatgctggacgactacatggagaaagtcgcagcatcccgatgatcgccctctcaacatgcttggtctgtacattctttcctgctgtcaggttttagt

SEQ ID NO: 148285 - DNA, 435 bp, Zea Mays
acacttcgcatacactcgtccacaacaatgaaccggttcgtagattccaatatttttcttaggatggcgcaagacatggaagttgaagaccatgagctcgaggttgcgacgtaccaacatcgtaggcgtcatgcacttaacgagcgtcggtatgctggttccattctcggtcgtgttcgaatccatcgtgaccatatgagtggtgatgcaagaatccgagccgactatttttgcgcgcaaccggtttacacggaagcacaattccggaggaggtttcgcatgcgtcgccatgtgttcgagcgcctcgttcttgctgtgcaacaagtggatccctacttcgttcaacgtccaaactgtgccggtgagctaggtctatctgcccttcagaaagttgttgctgtcgtacgtatccttgcatacgatgttcctgcggat

SEQ ID NO: 148286 - DNA, 342 bp, Zea Mays
atgggggtcgtcgatacgaagcctttctcgccggcgagagtgggccgtagtccgcccaacgctgtgccttggagcgcccgggctctgagagacgacccagcagcagcggacgacgaagaaataggaccaggcgcgcagggagaagaggaggccgccgggaagggagcggcggccgggaaggtggtcaccgaacccggggtgggtgtcggcgagaggctctggggagggcaatgggcggcgccggcgaaggagggggtggaagacgaagcgtggggggtggaggccgaagcggcctgggcgggagccgacgcggccatccttaccatgataaagatatggtga

SEQ ID NO: 148287 - DNA, 362 bp, Zea Mays
aagccgctgcgttccttattggacccgtccagttcgatcgattcgtccacgctaccttgtttctttgcgccatggaggccacgaggaagcccgcggtgtgccgtgcccttcttgtgctgctcatcgtcgtctccagcgcggcggtgtcgactgcccaggacgagagctgctggaaggacgacgaccaccaccctatctgcttgcccgaggactgcgtggcgacctgccgggatcacggccacgcggacggccgctgcagctgggcatggtcgtggaggccgtattgccagtgcttgctggcggactgccaatagacgcgaaaggctgcgttgcatggcgttctggctgcctcgccgtcgccg

SEQ ID NO: 148288 - DNA, 1586 bp, Zea Mays
ctttccaatgtcacatctcgatccaccccgtcgcggccccagatctgtctctgctttagcgcacctcgcgcccctgtgcgcgtccactcatcgcgatcgcctgctcgatcgatagttcaagctgctagcctgctacatgagacgagacacgagagagaagactagctctcgcagttgcgcttcttgcttccttccttcttgctcactctcagtctctcgttcgctcatcagctctttcccacctgcatggatccctccgggcctggcccgtcgtcagtcataggggcagctggaggcgatgaggcagcggccgtggcgctgcagcggccggcgcagctgagtagatacgagtcgcagaagcggagagactggaacacgttcctgcagtacctgcggaaccaccggccgccgctgacgctggcgcggtgcagcggcgcgcacgtgatcgagttcctcaggtacctggaccagttcggcaagaccaaggtgcacgcagccgggtgcgcctactacggccagcgcgcgccgccggggccctgcccgtgcccgctgcgccaggcgtgggggtcgctcgacgcgctcatcggccgcctgcgcgcggcgtacgaggagagcggcaggacgcccgagtccaaccccttggcggcgcgcgccgtgcggatctacctccgcgaagtgcgcgactcccaggccaaggcgcgcggtatcccctacgaaaagaagacgaagcgcaagcgcgcgcagcagcaggccacggagccttcgacgagctcgtctgatgctgccgccgggagtggcagggctagagcagcagctgctgcggcgtccgctgctcaggctggagggagtagcgctgcaccgagctccacttgagagtacagtagacctgcagatctttgtttaattatattaccatgttcgcgtgtatcgtaagattaatttgggctttgattctagttttgctccacatatgcttcttgcttctttcttctctcggcagtttcattctctttgtagcttgtttttggatctttttttctttccgatttattagataggtcagtatatatatggctagaatttgtagtaggctaaggatcggaggtggaatgggctgatttaattaatcagtgcaactatgtgttcatgatctgatacgtatacgtatatatcctaataagcaaaacaagggcgatttgaggccatggtgatggtttcctagcttgctacaataaggctacccgcagtcacggacttcagaggtcactctatccgtttacagtccacgatcgagtgtgtaatcagctgcagcgggtaacgctttcacctacgctaaaatacaggcggacagcaaaaaccccatttacagagtacccgtgcctttactctatctctctctctcctctcctcggcgcaaactaccgcacgcgcatacaggtagcaccaacacgtacagctcgcatgctggtgcatacaggtagcacaaataggtacaggagcaccaatccgtgaagcatgcactgtggcgaggtagttgggtggcagttgagtagagaatgaaagagaattagaaaaataatattata

SEQ ID NO: 148289 - DNA, 3958 bp, Zea Mays
aggcaggtcaacgaggcctccgcgtgtaggtgcacacaactctaagagccagtttggaagacacaaaatcggagaggattagagagtacaaaatcctctttttattaaaatctaaataaaaaggggattctggcccctctaattccatccgattttatgactcccaaactagccctaagcgagtgggagacatggttagagaagctgcatgcaagttaaaagtccgagcagagcaagacaagattcgggatggaggaaacgcatccaaggattgaaaattatcgggtcatcctaataagcggtgtcatgccttgctaattgacttattgggatgacctaaaagttaattagctagaattatctccattaaaattattaccaaaactctagctaattgacttcaaggggtgatacctagactcaattcataataatcactatggttctaccaaacacatatgtacaaaattgtattgcttggtccttagagtatcctaacatgtgccatcattcaaaacaagaactagtcattttgaagctttattttgagaaagcctctgataaggtaaagcacaagctgatgttacaaatcattgaaagcagagggtttcctccaaagtggcgatcatggacgaactactcaattttgaatttggaacctctgttgtcatcctcaatggtgtgtctagaaacttctttcatcgtcttagagctagcatactcttctaaattctgccatacattggtgcattgaaccttctgtttccccttattagagacaatgatttgccacctttaaattatatatatggcactttgatcttcatgcaaggtgatgttaattagctatcctatataaaggatttactcgtcttctttggtgaatcaacaaggctcaaagtgaactttgaaaagtttatgatggtcccaattcataccaacactttaagttcttcaataggcactcttccttttacctatctaaggctctctctaagtttgaccaagaacatagtggctgacttttggcctttcatcaccaaatgtgatagaagacttgtgtgcatttatacttttctaagtcatgctagtaggttggaactcaccaatgcattcttctctactttcctagcctttgttatgtgcaactttcttcttcccaagactatcatcaagcacattgataagtttagaaaacatttcttatggcgaggtttagatgttaacaacaaacaacccctaaaggcaacttgacagatgatctgtctcctcaaagtggaaggtcccactaaacttttgaacctcaaaagtcaatatgaaagcttgatttttcgagcctctacatatattctataatgaaatagatattccctaggttcaacagtttgggggaagatattatagttgagagcacttaccacatcccaatattacttttacaggatctttttggtggtgtgatattctcaactacaaaaccattttaaaggaatagtaattgtctcttcaaaggatagtgcattttgttttttctttgatatgtgggatgacaatgattggagtcactcttttctagaactctactatttttgtaaagattggaatatttctcttcatggggcaacttctactcctttactacactcttatttacctctatctattgaggtatacaaataatttcaagttttctccactaccctccttatagtacatctacaaatagacaatgatttggagatacatttggggatcacaaattttctcctcaagaacagtttataaattgcttatatgatatcaacacattcatcaagccttcaagcggtcatggaagtttgcttgaaaaaataaaaaaaatcttcttttgccttattctaaaaaattagttgagtaatatagcgcttcttaaatataaaaacatgcatttagattgttgcaattgcatcatttgctcactagatgttgaagtggatctttttcaccttatgttggactacccttttgctttggattgtttgtcttctctgaatctatttatactccctaatagtggttatttggaagtgttagagatcaacttcatctttctttcttcatggagattctaatcgagatgtgttgggccattttggataatgcgtaatgacaacattttcaacaatattgtgctttcaattccaaagtgcaaggtagttttcaggaaagagtttgctctagttattcttagagcaaaaacacgttataatccaagtatcgatttatggctacaagcctttttgtaattccttaggttttcattttgacttttttgtgtcttgaactatgcacttttatgctctagttttttaaataatttttagtagcccatgtcctcctatttaatcaaaataataggagaaatgttttcaacttggagctagcaatgactaccatgtgtgacatattaatgaaatatgagcttaaaatatattcatgagtgcataatgttttatgcatacatgaggtatttaatcacatggctaggtagataaatgattgataactacatatgcatctagtaagataaaaacaatgcctttagagcaccatatatactattgtcttgattgtggtgcttatatcatactacaccatctgatgagtaatattgactgtgaaaatagaagcaaatggaggcggagagaatatatacatccaattgatgtcaaaattattaaaaggttgcaaggtggagaggtaggtgacttctctcacatatagcaggagattgattttgatgaaaacatgcttagcatactggtccatgtacctttgatctttcatcaagtttctcaagtggacaatttagcttatcaattcctacatggatcactagttgtagtttgaatttgaaggtcatggggtttaccatcttgttaactggatgactatttatcttagaaaagagtatggtcagcttggtgtccctgacttgagacatcgtaatattattccattagcttcttgggtaaaaaggtacgatttggagatgaccaactatggaaacaaatcatagacctcaaatatagtactacaatccctaatgccttacatgtaaagatactaacaactatcatcttttggaagggttttgtttggatgtctaggtagctaaaatagggtacaaatagaagattggaaatggaaaaggatgagattttgggaagacaattattggctagactcatctaaccttggtataagtttttgggacccttacttttgtactaatgcatgggcagattgctactattgtggagttgtggaatgggtctagacttagatgtacttttaaggtatgtcaagagagtatcttgttataaattaggaggatgtcatccaaattgatcccattatctattttaataaggaagagatgaactagtatatgctctatttaagggtatgtatccattgaaagaacctggatgtatgagagagagaaaatcacagttaggaacatgttatgctcttttataagatgaagcttgtggaaattcaaataactcaattctttctatgcaagaaattaagctctttgcagtaactatggtgatctatattcaaactgttggagcaattgtgccccttgggacacatgcaacaatacaaggccatctctagaatagaggaactcgcaagatggcatggatgactcctaatgaatggaccatgaccaaagacatgtttgggagcttggtcagcactaacacaatacataatagaagaaagattggctaacctgcaattatggcctctagcacaatgtcatgatctgatatctttgtaatcattctatactactagagggagattcttttgaaagtttgaactataatgctttactagaaccatttcttggtcatgataagtaatttaatggaccaggggtgccccttcaaattctaaaaactgg

SEQ ID NO: 148290 - DNA, 1299 bp, Zea Mays
ggcaagcagatcgtcctgactcctgatggcacaggcacaccaccctcttctcctactaattcttttgctcttcctctcctccactgccattccttcctccaagagaacccagccgaagttctctgccgtcttctacttcggcgactcggttctcgacaccggcaacaacaaccatctccccacggtagctgtggcgaaccatgctccttacggaagggacttcccagggaagaaaccgacggggaggttttccgacggccggcttatcccagacctcctcaacgagaggctgcagctcaaagagttctcgccgccgtttctggacgcaaggcttccgaacagcgacgtcgcgacgggggtgaacttcgcttcggctgggtcaggattcaacgaccagacgtcgcggctgtccaacactctgccgatgtcgaaacaggtggacctcttcgaggactacctgctccggctcagaggcatcgttggggacaaggaggcttccaggatcgttgccagatctctgatctttatcagctcggggaccaacgatttctcacactactaccgttcgccaaagaagaggaagatggagattggtgactaccaggatattgttctccagatggtacaggtttatgtcaaggaactgtatgaccttggggggcgacagttctgtttggcaggccttccgccgtttggctgcacacctatccaaatcacgttgagcggagaccctgacagggcatgtgtggatgagcaaaactgggatgctcatgtctacaactctaaacttcaaagacttcttgcaaagttgcaaggctcactccatggaagcagaattgtgtacgtggatgcatacagagctctcatggaaatcctggagaacccggccaaatatggatttacagagacaacacgaggatgttgtgggactgggctcagagaggttgctctgttgtgcaatgcattcactcctacctgcaaaaatatctcatcctatgtattttacgatgctgtgcacccaacagagagggtttacatgttagtaaatgattacatagtcaacgatgttattccacagttttagttaatcaaatacccaaataatgttttcttcttgtactaatatacgcaactaattgttttgccttcatacttaagtccaggatacaagagcttatcgtatgtcatctatcaatctatcatgctatgcatgatgtattgatgtgttattggattactgaacaatggaattaataacaataacgcagcctccccaggatggcaggtaagcatttttac

SEQ ID NO: 148291 - DNA, 1288 bp, Zea Mays
atcgtcctgactcctgatggcacaggcacaccaccctcttctcctactaattcttttgctcttcctctcctccactgccattccttcctccaagagaacccagccgaagttctctgccgtcttctacttcggcgactcggttctcgacaccggcaacaacaaccatctccccacggtagctgtggcgaaccatgctccttacggaagggacttcccagggaagaaaccgacggggaggttttccgacggccggcttatcccagacctcctcaacgagaggctgcagctcaaagagttctcgccgccgtttctggacgcaaggcttccgaacagcgacgtcgcgacgggggtgaacttcgcttcggctgggtcaggattcaacgaccagacgtcgcggctgtccaacactctgccgatgtcgaaacaggtggacctcttcgaggactacctgctccggctcagaggcatcgttggggacaaggaggcttccaggatcgttgccagatctctgatctttatcagctcggggaccaacgatttctcacactactaccgttcgccaaagaagaggaagatggagattggtgactaccaggatattgttctccagatggtacaggtttatgtcaaggtaaaaataggcatttcctccttctgagttatcttatctctactgaattcttatactacacttcagaaactaggcataactttaccttcgattccctactgtaactctgaatgcaggaactgtatgaccttggggggcgacagttctgtttggcaggccttccgccgtttggctgcacacctatccaaatcacgttgagcggagaccctgacagggcatgtgtggatgagcaaaactgggatgctcatgtctacaactctaaacttcaaagacttcttgcaaagttgcaaggctcactccatggaagcagaattgtgtacgtggatgcatacagagctctcatggaaatcctggagaacccggccaaatatggatttacagagacaacacgaggatgttgtgggactgggctcagagaggttgctctgttgtgcaatgcattcactcctacctgcaaaaatatctcatcctatgtattttacgatgctgtgcacccaacagagagggtttacatgttagtaaatgattacatagtcaacgatgttattccacagttttagttaatcaaatacccaaataatgttttcttcttgtactaatatacgcaactaattgttttgccttcatacttaagtccaggatacaagagcttatcgt

SEQ ID NO: 148292 - DNA, 2345 bp, Zea Mays
atcgtcctgactcctgatggcacaggcacaccaccctcttctcctactaattcttttgctcttcctctcctccactgccattccttcctccaagagaacccagccgaagttctctgccgtcttctacttcggcgactcggttctcgacaccggcaacaacaaccatctccccacggtagctgtggcgaaccatgctccttacggaagggacttcccagggaagaaaccgacggggaggttttccgacggccggcttatcccagacctcctcaacgagaggctgcagctcaaagagttctcgccgccgtttctggacgcaaggcttccgaacagcgacgtcgcgacgggggtgaacttcgcttcggctgggtcaggattcaacgaccagacgtcgcggctgtccaacactctgccgatgtcgaaacaggtggacctcttcgaggactacctgctccggctcagaggcatcgttggggacaaggaggcttccaggatcgttgccagatctctgatctttatcagctcggggaccaacgatttctcacactactaccgttcgccaaagaagaggaagatggagattggtgactaccaggatattgttctccagatggtacaggtttatgtcaaggaactgtatgaccttggggggcgacagttctgtttggcaggccttccgccgtttggctgcacacctatccaaatcacgttgagcggagaccctgacagggcatgtgtggatgagcaaaactgggatgctcatgtctacaactctaaacttcaaagacttcttgcaaagttgcaaggctcactccatggaagcagaattgtgtacgtggatgcatacagagctctcatggaaatcctggagaacccggccaaatatggatttacagagacaacacgaggatgttgtgggactgggctcagagaggttgctctgttgtgcaatgcattcactcctacctgcaaaaatatctcatcctatgtattttacgatgctgtgcacccaacagagagggtttacatgatacaagagcttatcgtatgtcatctatcaatctatcatgctatgcatgatgtattgatgtgttattggattactgaacaatggaattaataacaataacgcagcctccccaggatggcaggtaagcatttttacaagtgaagttaaagcaaaacagagatgcaatggttgaacacaaatattataggctcggctccaaatgcaaaacgaatcctctgtcggctcagtatgaagaggatataaaaccaagtagttaggaataacattgtcagacccactttttgctagcaatgggttatattagttgcaatccctccatcaaagattgtccttcataggtattgaataatggttctgaattttcttgtacgtcatgcttgcgttcatcagtcttgaatctgtcttaaagaacagtgtttaaatttgctgttgcacatctcagattggttgtttcagtaattgatcatacacaaaaagaaataatttattctctaataatatgctgaatgtcattgaaaattacatagatttacaggggaaaacttcaaaacaagctggaagcgtgaacatgctttcgattcctcaacacagttgcttctggtcagcattagcacatgggaagatcaactgggggcggctccagggactgcagctctccatacccgtcctccactaggaaagccattgccaggccccaggtgatgtgcacgtccaggtggcagtgcatgagccacacacctgggttgtcggcgacgaactggatgaccgcccacccgttgacgggcaccgccacggtgttccgctgcggcgggacgacgtagttgaacttgtcgacgtccttctcggggtcgaagttgccaaagccctcagcgaggatgaagaaatcgtagccatggatgtggatggggtggttctcgggcgtgacgatgctggtgtcctgcaggacgagctgcaccacggagccgaacctgagcgggtacagcttggtcgcggggaccggctgccacagggcctggctgacgttctgcgccgtgtagtcgaactgcaccggcgggtgcgccgggaagtcggtggtgaagacgccgggggtcttgaagtagtgcgcgtggaggagggagtcggtccgcgggaagacgaaggagacgttgttcatgctggccgtgaagcgggtgctgttgttgggcccggcgcagagctggcccggctcgcagttgaacaggccgaggccgacggtgaagaagaggtgctcgtcgacgctctcgtggaccctgaccctgccggggctcttgatccccgcggcgaaggcggcggcggc

SEQ ID NO: 148293 - DNA, 926 bp, Zea Mays
cgcgcggcgaatcacggcgttcaccttccatccggactccgctccgcccgcgggttccccgccaaatctaatttctcgacccaaccctaacttccgcgacgtcgtggcgcctgccgaccgcctcgcggagacgggagacccaacgcggcctcttcgtgccggcgcggcccgacaagagcatcgtcgaggggcagatcatgcagcggcacgactttgtgaaccagcggtgcgccacgctccagcgctacctccgccgcctcgccgtcgtcggccatagccccgttctccacgcctccctcaccgccaccgggcccaacggcatacccacttccgacggtgggtctcctaggtggagccctccgatgagtgctgccacgtgcatggctgctgccgctccaatgacgcctacggagagtgggagtctgggcgagacttttttcgggtgttcaacgacctgaagcagacagtggcaaatgggttggtggcggtagcggtaagaccgcctccagtggaggaggagattgacacaaagtaccttgtgcacaaggccaagcttgaggacctggagaaacatctggtgacagcatctcagcaggtctcttgaaaatgtcattcgtcaaactggctaagtttgaaaaggagcaagctgcatgtagctcagaaaagacaagctgctggcatcagtaattttgccagtgctgttgttagagttaacagatcacaggcaaaactaaatgctgaaattctaaaacatctggtaagtggagtgacttgagcgaatgaatatttgcttggtcatatacttttaggattattggtttaccccttttattttgatatgttctgtgcttttgcaaggcattatccatgagtacatggactcatggagacaatggcttctgttcataatgcttttactgatcgtt

SEQ ID NO: 148294 - DNA, 1117 bp, Zea Mays
gcaaaaccgagggcaccatcttaaaaaacacgactaatgcaggaaaacaacatgaatgaaattaaaagatttaacaaggaaagacgccaggatttgttggagatgctgaaaggctttgtatccgatcaggccacatactcggaccattttgctagcatatggacaaaggtagcagaagaaacaaaaggatatgcaaaaagcagcagttgaagtacgatgttcatatacaggtgaatttgagctgttattgtgcagcgtgaaaatagctacaccattgagaatcatgcgaccggcgtatagactgacaggaccacactctccattaccgaagggacacatttctatggacttttctgggaattggtatctccagcaatggatcgaatcttgcacgagctacaggcgtacaaagtactaaaaagaaagagctggcttctcccgaggctttgagcgcatctgaaatttcactgctagaatgtggcacgaaagaagtacagaatgtggacgacagcagtaaccaatcaaatgacttgacatagtcatcgcgcagtggcctaaatttgttgtgtccatacgaaacgcagagcagcttccttccatggcacgccatacactaatacaaccgtataggcatataaaatgagatgacttcttagagccagattgaagcttcgccaacgctttttacaccataaagctgaagagcgcccagcattgaagattttctgagttgttatgatcacagccatttttacaccatcatgggggtgaataccgtttgtgcattcagagaggagacggtcgaagaattctttgaaacctgcacagcattttacacgtgaagtttgatccaaagcattactggagattgtcatacggtcgggaaggatcaggattgtcgctggtgatacacaccttgtgcgcacttgaatccagagtgcattcaagagacggtctgatgtttcctgtggtactggtgctaccaaacgggctaactgtttgcacctttgcctttccaacgctggtgcagactagaggaatgtgggaagaatccatcgcagagatatttgttttgtgttagaatcatcaggtcgctatatctatgctcaaaagcctg

SEQ ID NO: 148295 - DNA, 921 bp, Zea Mays
catcaggactcatccccaccagttgcaatcaatcagctagcgcctagcaggagcagcaaaccaatcaagaagcccccacgtccaccaccgacgacgaagacgacagcgtcatgggcaacagcttgcggtgctgcctggcctgcatggtcccctgcggcgccctggacgtggtccgcgtcgtgcacctcagcgggcgcgtcgacgagttcagctgcccggtggccgcggcaaccgtgctcgccgcgaaccccgcccacacgctcaccacggcgtggtccccctccggcgcgccagggtgcggctcccggaagctcgccatcgtgtcgcccgactccgacctcaagcgcggccgcatctacttcctcatcccgtccgcgaccctgcccgccgaccggaggagcaagaagcagagcagcaagcggccgagccagagccagagccagagccagagccgcctccgccaccacgccaagaagcagagcgccggtggcacggcggagcaggacaactacctgagggagctgctctccgaaaaggccgcgtcgggcggcggtcaccggaggcggcgcagcggcgcccgcgtcggcgtgtggaggccgcggctcgagagcatcgtcgaggaggcctccgactagatcgacggcggctccaagagctctcggtcttatattcttttggttttccttctgatctgccgatgcgaacaccacgacgatcggtcgaggaccgagtctccggcaggctctcgcctcacgatcccccctcgacactgtgttgcgttgtgtccagggatgagcggtcttagctcgggagatgagggggaaaactgtgacaaaaataactgcttatagcagcaccaacctgtacaggaagattttgttcagttcatccaaaatttcaaacacatttctcggttgtcca

SEQ ID NO: 148296 - DNA, 2008 bp, Zea Mays
catatactatactagtaccattcttcttccctcaccacggaagagtaaaacagtaatttcagagctggtaccagtcgcgtgctattttaacgactggttcccgctcgttcgtcggcgagcgccacccacacgccacgcccgagagcgcccgcgaaaatgacgccgccggcgagaacatcaggcaaacgcgcggacgccggcgccagcgcgggcgcgatagacgagccgctgctgccggagtcctcggcgggtgggcggcacggcggcggggcgtcggtctcgggcgccgtgttcaacgtgtcgacgagcatcgtcggcgccggcatcatgtcgatcccggcagcgatgcgggtgctcggggtggtccccgcggcgctcctcatcgccgccgtcgccgcgctcgccgacgtctccgtggagttcatgctgcggtacacggggcgggggtggggcggcggcggcaaggacgaggcggccacgtcgtacgcggggaccatgggcgacgccttcggccgcgccggcgccgcattgctcaacgtcttcgtcgcccttaccaccacgggcacgctcgtcgtctacctcatcatcatcggggacgtgatgtctgggagcgtcggcggaggcgacgagcacgccggggtgctgcaggagctgttcggcgcgcggtggtggacggggaggcagttcgtgctgctcgtcaccgccgtcttcgttctgctgccgctcgtgctccgccgccgtgtcgattcgctgagattcacgtcggccatttccatcctactggcggtagtgttcatgctcatcagctcggggatcgcgctatacgctctcttcaagggcaccgcgaccatgccgcggatgtttcctgacttctccagactctcctcgccgttcgagctcttcaccgccgtccccgtcatcgtagtcgccttcaccttccacttcaacgtgcacccgatccgcgcggagctgagcaagacgtcggacatgaaggtggcagtgcgcgtctcgctcgtgctctgcgcggccatctacgccgccgtgggcttcttcggcttcctcctcttcggggacgccaccatggccgacgtcctcgccaacttcgaccgcagctctggggccggtgtcccgcaggcgctcaacgacgcggcgcgcctcagctacgcgctgcacctcgtgctcgtgttcccgctcctcctcttctcgctccgggtcaacgtcgacgagctcctcttcccgggccgccggccgctcgccgcggacacgcgccggttcgtgtccctgacagccgtgctcatggcggtgctctacgtcctggccatcgcaatccccagcatctggacgctcttcgagtactccgggtccacgttcgcggtcaccatctcgttgatcttccctggcgccatagttctcagggatgttcatggaatagcgaagcgcaaggacaaggcattggcggcaacgatgatcgttctggcagtggtcacgagcagcatcgccattgcctcgaacatcatgagctccatcagtgacgaagacagaggaggtcatgtagctggtagacgataatggctcagatcgaatcaaattaaaatgtggtttccaggccaaccgcgcgtgaagattgctgctcgtgtcatgcgttcctcctgggtattctttctttgcagcgagattgcttcggcccctgagatgcaagtttagtctgtgccccctcatggtgtagatgtttgtggttgagaggagatacgttggtacatggtaaggaaattaccagttggccaatgctgtatacttgtttcggtgatacattacagtgtaaaatagaaaacggtcatattttctttttcaggggtttataaaccgtagcaaataattgcaggccacttgttagccatctcccattacaacagaaagatagtccaccttagccttacccttaccattctaaatgccagacgtaagagccattgatgaaattgctttaaaggttttactcagtttaagc

SEQ ID NO: 148297 - DNA, 1816 bp, Zea Mays
ccattccccacccatcgttttctcgcccactcgccacgcctacacgctctcgagctgccgaatcccagatatacgcacgcgcaccaaacagtcccagcagtccaaacacgccgctgttctcagcgatgcccagcgccggcagggacaacgcgacagcggcggagggggccgcgcaggcgctgctgctcccggagcacgccggggacgacgacgccccgtgcgcgggcggctccgcttcggtgctgggcgcggtgtgcaacgtgtcgacgagcgtggtgggcgccgggatcatgtcgatcccggcggccatgcgcgtgctgggcgtggcgccggcggtggcgctgatcgccggcgtcgcggtcctggccagggtcgccgtcgacttcatgctccggtacacccgcggcgcgccgtcgtacgcggcgctcatgggcgacgcgttcggctccgccggggccgcgctgctcaacgtcttcgtcgccctcaacggcttcgggacactcaccgtctacctcatcatcatcggtgacgtggtgtcgggcacggcgagcggcggggtggcgcacccgggggtgctgcaggagtggttcgggcgccaatggtggaccagccgggaggtggtgctggtggcagccgcggcgattctcctgccccttgtgctccggaagcgtgtcgattcgctgagattcacgtcggccatttccatcctactggcggtagtgttcatgctcatcagctcggggatcgcgctatacgctctcttcaagggcaccgcgaccatgccgcggatgtttcctgacttctccagactctcctcgccgttcgagctcttcaccgccgtccccgtcatcgtagtcgccttcaccttccacttcaacgtgcacccgatccgcgcggagctgagcaagacgtcggacatgaaggtggcagtgcgcgtctcgctcgtgctctgcgcggccatctacgccgccgtgggcttcttcggcttcctcctcttcggggacgccaccatggccgacgtcctcgccaacttcgaccgcagctctggggccggtgtcccgcaggcgctcaacgacgcggcgcgcctcagctacgcgctgcacctcgtgctcgtgttcccgctcctcctcttctcgctccgggtcaacgtcgacgagctcctcttcccgggccgccggccgctcgccgcggacacgcgccggttcgtgtccctgacagccgtgctcatggcggtgctctacgtcctggccatcgcaatccccagcatctggacgctcttcgagtactccgggtccacgttcgcggtcaccatctcgttgatcttccctggcgccatagttctcagggatgttcatggaatagcgaagcgcaaggacaaggcattggcggcaacgatgatcgttctggcagtggtcacgagcagcatcgccattgcctcgaacatcatgagctccatcagtgacgaagacagaggaggtcatgtagctggtagacgataatggctcagatcgaatcaaattaaaatgtggtttccaggccaaccgcgcgtgaagattgctgctcgtgtcatgcgttcctcctgggtattctttctttgcagcgagattgcttcggcccctgagatgcaagtttagtctgtgccccctcatggtgtagatgtttgtggttgagaggagatacgttggtacatggtaaggaaattaccagttggccaatgctgtatacttgtttcggtgatacattacagtgtaaaatagaaaacggtcatattttctttttcaggggtttataaaccgtagcaaataattgcaggcca

SEQ ID NO: 148298 - DNA, 557 bp, Zea Mays
cgccgctgttctcagcgatgcccagcgccggcagggacaacgcgacagcggcggagggggccgcgcaggcgctgctgctcccggagcacgccggggacgacgacgccccgtgcgcgggcggctccgcttcggtgctgggcgcggtgtgcaacgtgtcgacgagcgtggtgggcgccgggatcatgtcgatcccggcggccatgcgcgtgctgggcgtggcgccggcggtggcgctgatcgccggcgtcgcggtcctggccagggtcgccgtcgacttcatgctccggtacacccgcggcgcgccgtcgtacgcggcgctcatgggcgacgcgttcggctccgccggggccgcgctgctcaacgtcttcgtcgccctcaacggcttcgggacactcaccgtctacctcatcatcatcggtaacgccgcgagacccacaccggccattccagcgcgctagctaactgctagcgaacgaacgtgccatccggttccgccccggccgtgcgagtgactagacacgccatatgcatgttgtcgccgcgcgtgcaggtgacgt

SEQ ID NO: 148299 - DNA, 1328 bp, Zea Mays
gtttcaaaacaaaactgaatcgccaataatattgcggatgtcgctggtagcctggtactcacaaagcttcccttcaacatccagattcgctgagattcacgtcggccatttccatcctactggcggtagtgttcatgctcatcagctcggggatcgcgctatacgctctcttcaagggcaccgcgaccatgccgcggatgtttcctgacttctccagactctcctcgccgttcgagctcttcaccgccgtccccgtcatcgtagtcgccttcaccttccacttcaacggtactggtttcttcatccttctgcaacaaccatgcatgcagaaagctgagctcgacttttgcttttaccccattcgaacgtcgctcgaaattaaactgatgcagtgcacccgatccgcgcggagctgagcaagacgtcggacatgaaggtggcagtgcgcgtctcgctcgtgctctgcgcggccatctacgccgccgtgggcttcttcggcttcctcctcttcggggacgccaccatggccgacgtcctcgccaacttcgaccgcagctctggggccggtgtcccgcaggcgctcaacgacgcggcgcgcctcagctacgcgctgcacctcgtgctcgtgttcccgctcctcctcttctcgctccgggtcaacgtcgacgagctcctcttcccgggccgccggccgctcgccgcggacacgcgccggttcgtgtccctgacagccgtgctcatggcggtgctctacgtcctggccatcgcaatccccagcatctggacgctcttcgagtactccgggtccacgttcgcggtcaccatctcgttgatcttccctggcgccatagttctcagggatgttcatggaatagcgaagcgcaaggacaaggcattggcggcaacgatgatcgttctggcagtggtcacgagcagcatcgccattgcctcgaacatcatgagctccatcagtgacgaagacagaggaggtcatgtagctggtagacgataatggctcagatcgaatcaaattaaaatgtggtttccaggccaaccgcgcgtgaagattgctgctcgtgtcatgcgttcctcctgggtattctttctttgcagcgagattgcttcggcccctgagatgcaagtttagtctgtgccccctcatggtgtagatgtttgtggttgagaggagatacgttggtacatggtaaggaaattaccagttggccaatgctgtatacttgtttcggtgatacattacagtgtaaaatagaaaacggtcatattttctttttcaggggtttataaaccgtagcaaataattgcaggcc

SEQ ID NO: 148300 - DNA, 2066 bp, Zea Mays
agctctgaagtggcagcaccaccggagaaggacacgatgccttccccttcctccgcccactggctgagcctcgtcgggagcatctggctgcagaccgtcaacgggccgaacgcggacttccccgtgtactcgtcgcagctcaaggagctgaagcacatcacgcaggtgcagctcaacttcctggcgttcgcgtcggacgcgggcaagctcttcgggtggttctccggggtggcggcgctgtacctgccgctgtggctcgtggccttcgtcggcgccgcgttcggcctcgtcggctacggggtccagtacctgttcctggacagcgccggcctccggtactggcacctgttcctgctcacctccctggccgggaacggcatctgctggatcaacaccgtctgctacctcctctgcatgcgcaacttcggctccagcagccgcgtcgcggtgagcctcgccaccagctacctgggcctcagcgccaaggtgtacaccagcctggcggactcggtacccggcctggtggccagcggctccaaggccaagacctacctcctcctcaacgccgccgtgccgatgctcgtcgccgtcgcggtggcgccgtcgctcagggtggtccagctcaggagcgaggcgagcacggagtcggacgcggcattcctcgtaatgttcgccatcacgctcgccacgggagcctgcgccgtggtaggcagcatcgggtccacgtccggcagcggggggctgtcgtcgagggagcacgtgatcagcctcggcgtgctgctggccacccccgtactcatcccgctggcgctcagggtgcgagagagcctcaacaagatacgggccaccaagcgggagaacaggatccacgatctcggcgccgacgacgacgcgggcgctggcgcaggcgtcgtcgtcgacgtgggcggtgccggccccgagagcaaggagggagagggagacggcggcgtctcggagaaaccacgggaggagatcggcggcctccggctgctgaggaagctggacttctggctctacttcttcagctacatgttcagtggcaccctgggcctggtgttcctgaacaaccttggacagatagccgagtcgcgacggctcgggcagacttccacgctggtctcgctgtcgtcctcgtttggattcttcggtcgcctgctcccgtccttcttggactactactccgccaagagtgggtactccatctcaaggacgggatccatggcgtcgctgatggcgcccatggcgggcgccttcttcctgctgctgaactcgagcgacttcttcctgtacctgagcacggccgtgatcggcacgtgcacgggcgccatcgcgtcggtggccgtgtcggcgacgagcgagctgttcggggccgagaacttcggcgtgaaccacaacgtggtggtgagcaacatccccgtgggctccctgtgcttcggctacctcgcggcctacctgtaccagcgcgcggcggggggcagcagcagccaccagtgcatcggcgccgcctgctacagggacacgttcgcggtgtggggcgccacgtgcgccgtcggcacgctgctctgcgccgtcctctacgcgcgcggtcgtcgtcgccgcgcagctccgccgggagaagtaataaggacggcacgagcctcgcccgcttagctatagctgcctcgtgtctgccatcgtaggtgcatggtactacgtagcagggctagctagctgcagaagtttctgatcgatctgagggcttcagaagaagtttctgatctgagggcctgattaatcacacaccacccatcgatcgaccaagcatcatctgcctgtagggctctacagatgatgatgcttttgatctttgcttcttctctttttttagtgtgtgtgtgtgtgtgtgtgttcttggagtttctcttgactgatcccgatgccttgggcgaggaggctgatcatgagtagatattgtgcagcaggttggccacctttttcacttgttattagtgcgtgtcgtatatatgatcggtacacttaattaacttgaaagaaattcaggtcta

SEQ ID NO: 148301 - DNA, 2514 bp, Zea Mays
ccgtccatccctcacccaactgcacacgcctcgccgcccgtcatttataagccgccaactctctctttgtcttcgccgctccgccatcgtacaccatccccactaaaaccagccgtttctgtaggtgttagttataccgccgctgttccaatggccatgcccaacccaagaacggtgttgacatccgcgccgtcaccgcccggctcctcctcctcctcctcctcctcctcctcctggtcggcggcggagttcatggcgccagcgcctccgtcgccctccgacggggagctgctgcgctcgctgcaccgcctggcgcgggacctgtccgctgcggccgagacgccggccccgttcctgcgcggcgcgctcgcgtccatcaccaggcgttccaagctcctggccgcggcgttcgacgacctggtcccgtgcgccgcggccgaggacatgccgcggtccgcgtcgctgtgcctgcgcgaggtgctcctcgtgctgcagcgcttcaaagccctggccgccgactgcgccgcgcggagccggatgcggctgctgctgcggtcggacgagatcgaggaggaggtgcgggagctgcaccaggacctggccacgctgctcgacctcctgccggtcgtcgagctgggccttgccgaggacgtcatggacctgctcgacctcgcgtcgcgccagtgcaggcggttcgcgctgtctgtccaggcggagcaggcgctcaaggctagagtgctcgcgctgatacaggaaattgagcgggagatcgtgccggagcgggagacgctgcaggagatcctggaggaggtgggcatcaacgacccggccagctgcagcgaagagatcgagagcctcgagcgagagatcagcgaccgcgcctcggagaggtggacggacgccatgatcgcgctcgtcggtctgctgcggtacgcaaagtgcgtcctgttcagcgccacgccccggccaacggattccaggccggaccctgagatcgatgaagagcgcgagcccccggcgccgccgccggacttccgctgccccatcgctctcgatgtcatgcgcgatcccgtcgtcgtcgccagcggccagacatacgaccgcgagtccatcttccggtggttcgactccggcaagtcaacgtgccccaagacagggcaggtccttaccattctggagctcgtgcccaacacggcgctcaagaacctaatctctaagtggtgccgggacaacggcgtcgccatggaaatcggcgaggcgagcaagagcgagccagcccaggcggtggccgcgaacaaggcagcgctggaggcggcgcgcatgacggcgtcgttcctcgtgaagaagctcgccgtctccttctcccccgacgcggccaaccgcgtcgtgcacgagatccggctgctgtccaagtccggcgccgacagccgcgcgttcgtcggggaggccggagccgtgccgctgctggttccgctgctctactccgaggacgccgggctccagctcaacgccgtcacggcgctgctcaacctctccatcctcgaggccaacaagaagcgcatcatgcacgccgagggcgccgtggaggcggtcgcccacaccatgagcgccggcgtgacgtggcgcgccaaggagaatgcggcggccgccgtgctcagcctggcatccgtccatacctaccggcgccgtctcggccggaacctatccatcgtggagaaactggtgcatctggcccgcaccggcccgacgagcaccaagaaggacgcgctggccgcgctgctgtcgctggccagcgagagggagaacgtgggaaagctcgtggacgccggcgtcgcgcaggtggccctgtccgcgatcagcgaagaggagaccgccgcggcagtgctggccgctctggcgaagcgcggcggcgcggaggccatcgtgggcatcgacggcgccgtggcaaggctggtggccgagatgcggcgcggcacggagtgggccagggagaacgcgacggcggcgctggtgctcctgtgccggcggctgggcgcgcgggcggtgacgcaggtgatggccgtgcccggcgtggagtgggccatctgggagctgatgggcaccggcacggagcgcgcgcgtcgaaaggccgcgtcgctcggcaggatatgccgccggtgggccgccgcctcgaccgccgacggcgagcggggtagcgtgtgcccggccgccagcgtcgtgccgccggccatgatggcgtcataaactcgtaataaagtacgtatacccaagggcaatgccagataggccaagactcaaattaaacgattccccccttctcatgtacagtacaaagtttgcttaggctgtcacgattcttttggtcagagagtgataatggtgagtggttgatcaactgtgcatacggagctctttctgtgccaatgtagtctcctccgtctccaccaaaattatttattcttcattcatcagcggctctagataaagaatggaaatggctctagtatttaactc

SEQ ID NO: 148302 - DNA, 148 bp, Zea Mays
cccaattggtacatgtgttgttcctttgaagtccttcacgacatcaatctagccatctggctttgccgaatccgagcgcagacgcaacagcaacatctcctaatctcttttctcttcctccccacatcaacggctccaccccggccga

SEQ ID NO: 148303 - DNA, 1086 bp, Zea Mays
atggggcggcacaagttccggctgtcagacatgatgccgaacgcgtggttcttcaagctccgggacatgcacgcacggggcggcggcgcggcggcgaccagcccccgcgtggccgcgtcgcggccgcccccgagcacgccgagggccgcggcctggctcccgcacagggcgtctcactactacacgcctcgggcaggggacctcggcggcctgggctcgccgctgcaccccagggcctccgacacgcacttcccgccgctgcagctgtcgccgccgcgccggtccaggcggcgccaccggaggcggtccgtcaagctggcgccgccgccctcggccagcagcagcagcagcagcggcgtcgcgtcctcgccggcctcagccgcctgccgctgccggcaagagctcgtggtggtcgaggcgcccgacaccccgccgtgccgccgcgacatttttgccggttacagtagcgacggcgacgacgagtgcgtgaagaaaccgacggtcgccgtccgcgctcaccacaggctcgacggcaaggtgatcacttccgccacggatatcatcttcgacctgcggaccaagaagaggcccgcaaagtctctcccgccgatcgcgaccaagccggcgacgaagagggagcccgacgtgtgccagctcgaggacaagcacatcgacgtcctcacacacgcggcccgacgcacctcgccagctgtccccgagcagagcacgctgaagccacggcggcggtccgtgtcgtcggcgcgccgcctcaagacgcgcgcgaacaccccgcgcttagcgtcgccgtcgtccaagaagtgcaagtcacccacgaccacgacggccgcgcgctccccgccgcctcctctggccaagagcttcgcggtggtgaagtcgtcgcgggacccgaggcgggacttccgggagtccatggaggagatgatcgcggagaacggcatccgcgccgccgccgacctcgaggacctcctcgcgtgctacctgtccctcaacgccgccgagtaccacgacctcatcgtcgaggtgttcgagcacatctgggtcacgctctctgacgtcaaggtgtag

SEQ ID NO: 148304 - DNA, 892 bp, Zea Mays
ccgccgccgaggagcagcgctgcgtctcagagctccccggcgagtcgtccatcaccatcaaaaaggccgcaccacactaatcacaagcatcgaacttcctaaagcgctctggtcgcagactcgcagtggccgcagctgcagcgtcccctcccttttcgccatcgagcgtcaactgtgctggccgccggcgcgtaactgcaccagggtcactgcttacgaggaagaggaggcacaacagtgttgttggggtgtctcgtcgtgcggtgccggtgccggtgaccatgggcgtgcacgccagggcgatgagctggtacacgagcccgccggggtcgccggcgccggggagcgccgccgaggcggagcacgcgctgagcagcagcccccggggcggcgacaccaacatggtcatcgtcctcgccgcgctgctgttcgcgctcctcttcgcgctgggcatcaactcgctcgcgcgctgcctcatccgctgggcgcgccgcgcgccggcagcggagggcggcggcgccggcgggctcgagaagcgcgtgctccggagcatgcccgtcgaggtgtacggcgccgcggccgtcaccgtcgccgacgtctgcgccatctgcctcggcgagttcgcggacggcgagaaggtgcgcgtgctgccgcgctgcgcccacggcttccatgtccgctgcgtcgacacctggctcctgtcgcacgactcctgccccacgtgccggggctccgtgctcgacggcgcaaaggccgccactcccgccggtgggggcagccggtggcagggcagcgaggctgctgccatcgccgttgtcattggatgacgtggacaggaagggcccgcgtgcccattggtggtggtggtggagctaggtctgcaataatacag

SEQ ID NO: 148305 - DNA, 1524 bp, Zea Mays
acacaattgccccaaaagtaaatgtcataataggagaaaacaactgtcttgcatcaccacgagcgtgggctctctctctcctttctcgacgacgactgggccaccgtcgctgccgcctgccgccctacgccaggtgccaagcagccaggtgttcttggggcccttcgccggcgacgagcaccaccagctgaaatatggcgaggataccgtctctgaagagcctcaatgcgtttccacatgcggaagagcacttgttgaagaagacttactctggcgctgttgtgacaatttttgggctacttataatgattacactgtttgtgcatgagctgcagttttatcttaccacctacacggtgcatcagatgtctgtagatctgaaacgaggagaaactctgccaatccatatcaatatgtcatttccttctttgccatgtgaagtattgagtgtggatgcaattgacatgtctgggaaacatgaagttgatttgcatacaaatatttggaagcttcgcttggataagtatggccatataatcggtacagagtacttgtctgacctagttgaaaaggggcatggggcacatcatgatcatgaccatgatcatgaccatcacgatgaacaaaagaagcatgaacaaaccttcaacgaagaagcagaaaaaatgatcaagagtgtgaaacaagcactcggaaatggtgaaggctgccgagtctatgggatgttggatgtgcagagagtggctggtaacttccatatctcagtgcatggtttgaacatttttgttgctgaaaagatttttgaagggtcaaaccatgtgaacgtcagtcatgttatccacgagctgtcatttggcccaaagtatccaggaattcataacccactggatgaaacttcaaggatacttcatgacacaagtggaaccttcaaatactatattaaggttgttccgactgagtacaaatatctgtcaaagaaagtattgccaacaaatcagttttctgtcactgagtattttcttcccatccgtccaactgacagggcctggccagcggtttacttcctgtatgatctgtcaccaattacagtcaccatcaaagaggaaagaaggaacttccttcattttgtaactcgtctatgtgcagttcttggtggcacatttgccatgacaggaatgcttgaccggtggatgtaccagcttatcaagacagtcaccaactcaaagaccagaagtgtactgcggtaattgcacaagtcatgatggatggaaaaccgttggtagtgtggtacccgtggctaatggagcccatagatctttgcccgaagctaactgatcaagccatgttgatttttgcatgttttattttcttcttacatggttaacttataatacgtcgttgttttttttttcatcaactatgttagattaacacagtccacggactacattgttaactatgttggtagtggaactgaaatgccaagccgatcttgatcaaccctatagtcccatcgtgccaaaa

SEQ ID NO: 148306 - DNA, 2084 bp, Zea Mays
acacaattgccccaaaagtaaatgtcataataggagaaaacaactgtcttgcatcaccacgagcgtgggctctctctctcctttctcgacgacgactgggccaccgtcgctgccgcctgccgccctacgccaggtgccaagcagccaggtgttcttggggcccttcgccggcgacgagcaccaccagctgaaatatggcgaggataccgtctctgaagagcctcaatgcgtttccacatgcggaagagcacttgttgaagaagacttactctggcgctgttggtatggtctacggggaccctattgttctgtaattgttcccaatggttgcttaaatatatggtttcgaggcttgtctttaatttccacgtcatcgatgtcttggcagtgacaatttttgggctacttataatgattacactgtttgtgcatgagctgcagttttatcttaccacctacacggtgcatcaggtatgattggccacagcttatatcttcatgtttgactgctcactgctatatgcaacttttcaatgtaatattcacagagacttttgttctccccttcaaatatattttagtttttttccgaggcactgtgaatatgcctgtagaaaacagggccttatccaaagtaaatgcttatatttcctttttcaagataattctagttggcatgttgggggctgagttcaagcgtcgtccagcaacctgatcaaattatcattttgatggcaattcctttatttgatatgaaacatgattataaatcaatttcattgttcaattattcatgcgttttctgatgttgtagtttctgttaattgtccttgatgagattgtggcaaagtcattttcctttcattgagcttatccttcccaacatctgtatcatgaacccttcaccagttattacggtctgcagatgtctgtagatctgaaacgaggagaaactctgccaatccatatcaatatgtcatttccttctttgccatgtgaagtattgagtgtggatgcaattgacatgtctgggaaacatgaagttgatttgcatacaaatatttggaagcttcgcttggataagtatggccatataatcggtacagagtacttgtctgacctagttgaaaaggggcatggggcacatcatgatcatgaccatgatcatgaccatcacgatgaacaaaagaagcatgaacaaaccttcaacgaagaagcagaaaaaatgatcaagagtgtgaaacaagcactcggaaatggtgaaggctgccgagtctatgggatgttggatgtgcagagagtggctggtaacttccatatctcagtgcatggtttgaacatttttgttgctgaaaagatttttgaagggtcaaaccatgtgaacgtcagtcatgttatccacgagctgtcatttggcccaaagtatccaggaattcataacccactggatgaaacttcaaggatacttcatgacacaagtggaaccttcaaatactatattaaggttgttccgactgagtacaaatatctgtcaaagaaagtattgccaacaaatcagttttctgtcactgagtattttcttcccatccgtccaactgacagggcctggccagcggtttacttcctgtatgatctgtcaccaattacagtcaccatcaaagaggaaagaaggaacttccttcattttgtaactcgtctatgtgcagttcttggtggcacatttgccatgacaggaatgcttgaccggtggatgtaccagcttatcaagacagtcaccaactcaaagaccagaagtgtactgcggtaattgcacaagtcatgatggatggaaaaccgttggtagtgtggtacccgtggctaatggagcccatagatctttgcccgaagctaactgatcaagccatgttgatttttgcatgttttattttcttcttacatggttaacttataatacgtcgttgttttttttttcatcaactatgttagattaacacagtccacggactacattgttaactatgttggtagtggaactgaaatgccaagccgatcttgatcaaccctatagtcccatcgtgccaaaa

SEQ ID NO: 148307 - DNA, 1793 bp, Zea Mays
cttttgttgacgtggtgacactagaaatagtgtgacgaaactatcatagagaatacccttagcatagaactcaaaaaaacatcttgcatgtattaaattatgtgttggtatgtcaaaagatgttagaaagaaaaaaaatagaaaaaatagatggtatggatttttatttgatgacctatttagaagcccactgattcagcaaccaggttacaccacacctacatgtttctttaccctaacggcctaacctttctgctctagcgaaggcacagccgccgctgtttcttcatcttccttgcagcgccggcgctccatcttactctccctcccttactagcgcttgacacgcaggtgacggcggcagcgacggcgctcagactcgggcttttagtgacggcatcagcggtttcccctcccgcctcttgccagtcccatcgcgccctcgcctcgggtcctctgcacaccgtccagtgaccttgcgtgatggactggataaagttttgcagcgattttaccgcaagtgatgggaaacagcatgcattgcttgataatcttaatcaggaattgtcccagaagtctgtactattgggtgatggttttaaactgtcagctgctgataatgatgtgtttgcaactgttcatccttttgtgatccgtgttagtgacagcgagttgcagaaatatccacatgtactgcggtggatggactacattcagaacactgttggtgctggtacaactttgcaaaagataaatgtgaccaagtctgactttgatccaccttctcatccaaggaaagctgataaaaaagatgctgaatcaagttcaaagaaagccatttccgtacagaagactgctgacaagtcaaatggaagtgctgactcaaagaaatccacaagagagcctcctgaaaataaggagaatcctactgctgcggggaacagcaaaacctctggggagaaaaagaaagtgcaagagaagtcagcaggaaaaacaacagagaaagctccagagaaaattgcagacaaggaatcagagtgcgatatcagtatcctgaatatacaggttggccttatccgtaaagcatggaagcatccatctgctgacagccttttagttgaggagatagatttgggagatggtaatgtgcgtcaagttgttagtggtcttgcaaagtattgcagcccagatgatcttactaatcggcatgttgtcttgatcacgaatgtgaagcctggaaagctgcgagatgtaatgtctgctggattggtatgtcctatctattataattgcatttgtgtagcccaggtaaacaaatttggtttattatgctatttggtttatcgaaatttcccaaaatactactccgtccatttgatgttataaggcattttacacaaaaaccaataaaaaaattcagaatgactaccctacctcattattatctaaaaagacaatttagtgtatggatgtaagcatgatgtaacttagaagcaaagtaattatctggggtaatatgtggggaaagaactcatgcattttgcattggaataagaaaaatttcttgtatttttttctagaacacagaagagagccgtgtatcactaaataagaaggtagtcttctaagaagactcaaacaatcccattaggtcatggttttacatgaatgattaaccggtagcaatactccttgtattgtgaacataatatatgccctagtaatttctattggcaggaatgccatggtggacaacgtgtttcatttaagtctaactgttgaaataggtaact

SEQ ID NO: 148308 - DNA, 1526 bp, Zea Mays
cttttgttgacgtggtgacactagaaatagtgtgacgaaactatcatagagaatacccttagcatagaactcaaaaaaacatcttgcatgtattaaattatgtgttggtatgtcaaaagatgttagaaagaaaaaaaatagaaaaaatagatggtatggatttttatttgatgacctatttagaagcccactgattcagcaaccaggttacaccacacctacatgtttctttaccctaacggcctaacctttctgctctagcgaaggcacagccgccgctgtttcttcatcttccttgcagcgccggcgctccatcttactctccctcccttactagcgcttgacacgcaggtgacggcggcagcgacggcgctcagactcgggcttttagtgacggcatcagcggtttcccctcccgcctcttgccagtcccatcgcgccctcgcctcgggtcctctgcacaccgtccagtgaccttgcgtgatggactggataaagttttgcagcgattttaccgcaagtgatgggaaacagcatgcattgcttgataatcttaatcaggaattgtcccagaagtctgtactattgggtgatggttttaaactgtcagctgctgataatgatgtgtttgcaactgttcatccttttgtgatccgtgttagtgacagcgagttgcagaaatatccacatgtactgcggtggatggactacattcagaacactgttggtgctggtacaactttgcaaaagataaatgtgaccaagtctgactttgatccaccttctcatccaaggaaagctgataaaaaagatgctgaatcaagttcaaagaaagccatttccgtacagaagactgctgacaagtcaaatggaagtgctgactcaaagaaatccacaagagagcctcctgaaaataaggagaatcctactgctgcggggaacagcaaaacctctggggagaaaaagaaagtgcaagagaagtcagcaggaaaaacaacagagaaagctccagagaaaattgcagacaaggaatcagagtgcgatatcagtatcctgaatatacaggttggccttatccgtaaagcatggaagcatccatctgctgacagccttttagttgaggagatagatttgggagatggtaatgtgcgtcaagttgttagtggtcttgcaaagtattgcagcccagatgatcttactaatcggcatgttgtcttgatcacgaatgtgaagcctggaaagctgcgagatgtaatgtctgctggattggtcctttgtgcttcaactgaagatcatgctgctgtggagcctttgattcctccagaaggagccaagattggagaacgcatttcatttgctgggtttgatgggaagcctgaagatgttctaaatccaaagaaaaagcagctggacaagattaccccggtacacttcagtggcctgtttgatatgatgtaacatcattgtcatggaatgttcttggctaacataacatactcaattatcagatcctgaattgaaacacc

SEQ ID NO: 148309 - DNA, 1728 bp, Zea Mays
cttttgttgacgtggtgacactagaaatagtgtgacgaaactatcatagagaatacccttagcatagaactcaaaaaaacatcttgcatgtattaaattatgtgttggtatgtcaaaagatgttagaaagaaaaaaaatagaaaaaatagatggtatggatttttatttgatgacctatttagaagcccactgattcagcaaccaggttacaccacacctacatgtttctttaccctaacggcctaacctttctgctctagcgaaggcacagccgccgctgtttcttcatcttccttgcagcgccggcgctccatcttactctccctcccttactagcgcttgacacgcaggtgacggcggcagcgacggcgctcagactcgggcttttagtgacggcatcagcggtttcccctcccgcctcttgccagtcccatcgcgccctcgcctcgggtcctctgcacaccgtccagtgaccttgcgtgatggactggataaagttttgcagcgattttaccgcaagtgatgggaaacagcatgcattgcttgataatcttaatcaggaattgtcccagaagtctgtactattgggtgatggttttaaactgtcagctgctgataatgatgtgtttgcaactgttcatccttttgtgatccgtgttagtgacagcgagttgcagaaatatccacatgtactgcggtggatggactacattcagaacactgttggtgctggtacaactttgcaaaagataaatgtgaccaagtctgactttgatccaccttctcatccaaggaaagctgataaaaaagatgctgaatcaagttcaaagaaagccatttccgtacagaagactgctgacaagtcaaatggaagtgctgactcaaagaaatccacaagagagcctcctgaaaataaggagaatcctactgctgcggggaacagcaaaacctctggggagaaaaagaaagtgcaagagaagtcagcaggaaaaacaacagagaaagctccagagaaaattgcagacaaggaatcagagtgcgatatcagtatcctgaatatacaggttggccttatccgtaaagcatggaagcatccatctgctgacagccttttagttgaggagatagatttgggagatggtaatgtgcgtcaagttgttagtggtcttgcaaagtattgcagcccagatgatcttactaatcggcatgttgtcttgatcacgaatgtgaagcctggaaagctgcgagatgtaatgtctgctggattggtcctttgtgcttcaactgaagatcatgctgctgtggagcctttgattcctccagaaggagccaagattggagaacgcatttcatttgctgggtttgatgggaagcctgaagatgttctaaatccaaagaaaaagcagctggacaagattaccccgcatcttcgtaccgacgagaatggaattgcaatgttcaaaggtgttccctttactacatcagctggcccatgtagatcttcgattcacaacggaaatgttaagtgagcagctcattagacatggttgcatagattgacatcaaacttatgcaggctgtctgtgtaccattttgtcatacatcatgttttgcccatatttagcgttgcaaaatttgaacagagttacactatctgtaagcaattttctactaatggttggcccagagtttgcttttgagaaaaaaaaataaaatagaaccaatac

SEQ ID NO: 148310 - DNA, 1851 bp, Zea Mays
cttttgttgacgtggtgacactagaaatagtgtgacgaaactatcatagagaatacccttagcatagaactcaaaaaaacatcttgcatgtattaaattatgtgttggtatgtcaaaagatgttagaaagaaaaaaaatagaaaaaatagatggtatggatttttatttgatgacctatttagaagcccactgattcagcaaccaggttacaccacacctacatgtttctttaccctaacggcctaacctttctgctctagcgaaggcacagccgccgctgtttcttcatcttccttgcagcgccggcgctccatcttactctccctcccttactagcgcttgacacgcaggtgacggcggcagcgacggcgctcagactcgggcttttagtgacggcatcagcggtttcccctcccgcctcttgccagtcccatcgcgccctcgcctcgggtcctctgcacaccgtccagtgaccttgcgtgatggactggataaagttttgcagcgattttaccgcaagtgatgggaaacagcatgcattgcttgataatcttaatcaggaattgtcccagaagtctgtactattgggtgatggttttaaactgtcagctgctgataatgatgtgtttgcaactgttcatccttttgtgatccgtgttagtgacagcgagttgcagaaatatccacatgtactgcggtggatggactacattcagaacactgttggtgctggtacaactttgcaaaagataaatgtgaccaagtctgactttgatccaccttctcatccaaggaaagctgataaaaaagatgctgaatcaagttcaaagaaagccatttccgtacagaagactgctgacaagtcaaatggaagtgctgactcaaagaaatccacaagagagcctcctgaaaataaggagaatcctactgctgcggggaacagcaaaacctctggggagaaaaagaaagtgcaagagaagtcagcaggaaaaacaacagagaaagctccagagaaaattgcagacaaggaatcagagtgcgatatcagtatcctgaatatacaggttggccttatccgtaaagcatggaagcatccatctgctggttgttagtggtcttgcaaagtattgcagcccagatgatcttactaatcggcatgttgtcttgatcacgaatgtgaagcctggaaagctgcgagatgtaatgtctgctggattggtcctttgtgcttcaactgaagatcatgctgctgtggagcctttgattcctccagaaggagccaagattggagaacgcatttcatttgctgggtttgatgggaagcctgaagatgttctaaatccaaagaaaaagcagctggacaagattaccccgcatcttcgtaccgacgagaatggaattgcaatgttcaaaggtgttccctttactacatcagctggcccatgtagatcttcgattcacaacggaaatgttaagtgagcagctcattagacatggttgcatagattgacatcaaacttatgcaggctgtctgtgtaccattttgtcatacatcatgttttgcccatatttagcgttgcaaaatttgaacagagttacactatctgtaagcaattttctactaatggttggcccagagtttgcttttgagtatgctatcacagacaaatcaaatatccttaagtctacacaggtgtggtcctgtgttgagcaagacatctgggaccgcaaattttcataccatttgtgtctgttagccaaagatgctttggttggcgtatgagttagtagttacaagtggttttcaggaaaaaaaaataaaatagaaccaataccttgcttggttggag

SEQ ID NO: 148311 - DNA, 1596 bp, Zea Mays
acccgaaagcccccaagaaaccccacaaaactcaccgtttcccctcgcggccactctccttcgagccgtccgccgctcccacccccaccagtgccaccactcgccacttcctcccgtctcctcccttgcagaggcggcgcgtaaaccccgatggccgcctctctcctccacgcctccgccgccgccgcctcgctcctgagctccacccagcacgcccgcgcgggtgccgccgcctttcaccccctcgcgtgtgccccatccctacgccttacgcgctcctcgttctcgaccaatcgccacctcgagatttcactccgggcgatctcggccagtcgccgtttcgcggggaggggggcaccccgggaccgccgcgttgtcgccgccctagcgggggagcaaacctcgcttgaatgctggtgctggatgcaggagggttcagaggtgggggatgacagaaacggggagataaagcccgaggaagctcaggaaatttggaaggtaatgctggagcagttcaaggctgaggccctgcggatgcaggccctgtcaatgcaggcttatgatgtctactccgagaggacgagggaggtcttgctggaagcatcagagaagctgaagatacaggcagacaaagcacagaaggacctgagcgtggtagctaccgaaattggtcaggagggacaggaatatctgatgatggcagctcggaactccccagactcgatcaaggatatcacaacaacgttcagggctcttggaaaattgaattggccatcagagtatgaggattatcatgtgggcattccgtttggtacctttcttaccgtagggggtttcctcaacttcatgttggccggaagtacctctgcccttcgttttggtatcattcttggccttgcactgttggctctgggaatctcaagtttgagatcacaaagagatggcggccgtcggcctcgtcttctggtgaaagggcaagctgcaatagccagtgtcatcttcttcagggagttttcagttcttctccagaatggctggtttccaaaaatcttcatggttctcctcagtggagtagtggcaggcttttacttctatcgcattgcagctggtagccccaaagagctgagcagcaacagtgattcagtgaactaatgcacttggatgaatcagatgatcatgggggaacgcagacccagaaggctatggcctgtttgctttcgatttccttcatcatccttcaattcaggcaaagctcggttgtaaggtgtccgcatgatgaccacatggattcagaagaattgcttgtttactcggccctcttcccgcactcctttgttcctttgctcatgtagtatagatgatagacttgaacaacatcaataaacgacattcaaaggccatgcagttagctcttcagtttgtctgctgtttgtttttcatggggacagcccgaaaggtcggtgaagcgttcaatgtttcgtgaagtgtccgaaaacagtcagtgttattactctgtagattccagctcgctcaaaactattcaaggccgatgacaagttgataacaattagtggcactgtgatttgttcctattcg

SEQ ID NO: 148312 - DNA, 1590 bp, Zea Mays
acccgaaagcccccaagaaaccccacaaaactcaccgtttcccctcgcggccactctccttcgagccgtccgccgctcccacccccaccagtgccaccactcgccacttcctcccgtctcctcccttgcagaggcggcgcgtaaaccccgatggccgcctctctcctccacgcctccgccgccgccgcctcgctcctgagctccacccagcacgcccgcgcgggtgccgccgcctttcaccccctcgcgtgtgccccatccctacgccttacgcgctcctcgttctcgaccaatcgccacctcgagatttcactccgggcgatctcggccagtcgccgtttcgcggggaggggggcaccccgggaccgccgcgttgtcgccgccctagcgggggagcaaaccgagggttcagaggtgggggatgacagaaacggggagataaagcccgaggaagctcaggaaatttggaaggtaatgctggagcagttcaaggctgaggccctgcggatgcaggccctgtcaatgcaggcttatgatgtctactccgagaggacgagggaggtcttgctggaagcatcagagaagctgaagatacaggcagacaaagcacagaaggacctgagcgtggtagctaccgaaattggtcaggagggacaggaatatctgatgatggcagctcggaactccccagactcgatcaaggatatcacaacaacgttcagggctcttggaaaattgaattggccatcagagtatgaggattatcatgtgggcattccgtttggtacctttcttaccgtagggggtttcctcaacttcatgttggccggaagtacctctgcccttcgttttggtatcattcttggccttgcactgttggctctgggaatctcaagtttgagatcacaaagagatggcggccgtcggcctcgtcttctggtgaaagggcaagctgcaatagccagtgtcatcttcttcagggagttttcagttcttctccagaatggctggtttccaaaaatcttcatggttctcctcagtggagtagtggcaggcttttacttctatcgcattgcagctggtagccccaaagagctgagcagcaacagtgattcagtgaactaatgtttaaatcatgtaccatgcagcacttggatgaatcagatgatcatgggggaacgcagacccagaaggctatggcctgtttgctttcgatttccttcatcatccttcaattcaggcaaagctcggttgtaaggtgtccgcatgatgaccacatggattcagaagaattgcttgtttactcggccctcttcccgcactcctttgttcctttgctcatgtagtatagatgatagacttgaacaacatcaataaacgacattcaaaggccatgcagttagctcttcagtttgtctgctgtttgtttttcatggggacagcccgaaaggtcggtgaagcgttcaatgtttcgtgaagtgtccgaaaacagtcagtgttattactctgtagattccagctcgctcaaaactattcaaggccgatgacaagttgataacaattagtggcactgtgatttgttcctattcg

SEQ ID NO: 148313 - DNA, 1569 bp, Zea Mays
acccgaaagcccccaagaaaccccacaaaactcaccgtttcccctcgcggccactctccttcgagccgtccgccgctcccacccccaccagtgccaccactcgccacttcctcccgtctcctcccttgcagaggcggcgcgtaaaccccgatggccgcctctctcctccacgcctccgccgccgccgcctcgctcctgagctccacccagcacgcccgcgcgggtgccgccgcctttcaccccctcgcgtgtgccccatccctacgccttacgcgctcctcgttctcgaccaatcgccacctcgagatttcactccgggcgatctcggccagtcgccgtttcgcggggaggggggcaccccgggaccgccgcgttgtcgccgccctagcgggggagcaaaccgagggttcagaggtgggggatgacagaaacggggagataaagcccgaggaagctcaggaaatttggaaggtaatgctggagcagttcaaggctgaggccctgcggatgcaggccctgtcaatgcaggcttatgatgtctactccgagaggacgagggaggtcttgctggaagcatcagagaagctgaagatacaggcagacaaagcacagaaggacctgagcgtggtagctaccgaaattggtcaggagggacaggaatatctgatgatggcagctcggaactccccagactcgatcaaggatatcacaacaacgttcagggctcttggaaaattgaattggccatcagagtatgaggattatcatgtgggcattccgtttggtacctttcttaccgtagggggtttcctcaacttcatgttggccggaagtacctctgcccttcgttttggtatcattcttggccttgcactgttggctctgggaatctcaagtttgagatcacaaagagatggcggccgtcggcctcgtcttctggtgaaagggcaagctgcaatagccagtgtcatcttcttcagggagttttcagttcttctccagaatggctggtttccaaaaatcttcatggttctcctcagtggagtagtggcaggcttttacttctatcgcattgcagctggtagccccaaagagctgagcagcaacagtgattcagtgaactaatgcacttggatgaatcagatgatcatgggggaacgcagacccagaaggctatggcctgtttgctttcgatttccttcatcatccttcaattcaggcaaagctcggttgtaaggtgtccgcatgatgaccacatggattcagaagaattgcttgtttactcggccctcttcccgcactcctttgttcctttgctcatgtagtatagatgatagacttgaacaacatcaataaacgacattcaaaggccatgcagttagctcttcagtttgtctgctgtttgtttttcatggggacagcccgaaaggtcggtgaagcgttcaatgtttcgtgaagtgtccgaaaacagtcagtgttattactctgtagattccagctcgctcaaaactattcaaggccgatgacaagttgataacaattagtggcactgtgatttgttcctattcg

SEQ ID NO: 148314 - DNA, 1305 bp, Zea Mays
atgaaccggcgagcccccctcgacgatatcgacaaccttgttagtgtccgcccagtcgaaggaataggaaactgtgatgcgatcaactggcaatcaattgcatctatcaggtggagacgtggtggttctatatatgcctctatctacaaggatgtccccatgatggttagcctgtctggtcggtttcatctggagagaggcattgaagagcgcctaggcaaagagtttatggatagaataaacaaagaaggctacatcgatgtcacaagcaaatcagactttattcccaggttctttacaattcatggttcagctgacttgatcatacgagtggaagatgcgtacgagtttgcatggcttataccaaactacatgttgcatgtcatcgagggagcaaatcactgctacactgctcactgtagagaacattctgatgacgtagtagaagccatcacatccagtgagataattgaactactctctgtccgtcctcctattgatgcaaagttgaaactgatgaaagaaatagctgaggaacatattcctgctggtcagttgcatcttgtgaaaccatatatggttgcagttcagagtaacaatgtctctgccgtgaatgaagccttgaatgaactttatgtcgaagatgaggactacgagagactccgtgaatcagttgacatgcatgacaactttgaccagattggtcttgcccagaagcttgagaagcatgaattgctggagatgaggaggatcgccgcctacatttacaagaaggctggcaggtggaagcagtcgattgctctatcgaagaaagacaacatgtacaaggactgcatggagacatgctcacaatctggcgaccgtgaactgtcagaggacttgctcgtgtatttcattaagcagggtaagaaagaatgttttgcttcttgcctcttcatttgctacgacctgatccggccggatgtcgctcttgagcttgcatggatgaacaacatggtggactttgccttcccgtacctgttacagttcattcgtgaatacactagcaaggtggatgatttagtgaaggacaagatcgagtcgcagaaggaagaaagagctaaggagaaggaggagaaagaccttgcgactcagcagaacatgtatgcacagctgcttcctctcgctttgccagcgccgccaatgcctggcatgggtggccctccacctccgatgggtggaatgggcatgcctcccatggccgggatgggtatgccgccgatgggccctggtccgatgccagcattcggaatgggaggctactga

SEQ ID NO: 148315 - DNA, 138 bp, Zea Mays
ataaaaccgtgaccacaaacataaatatccatcacaaacataagtgttcaacacaagtattaaacacaaacataagtctcaaacgtcgcaagctctcacataagtatcaaacagaaacataagtattatacataagtt

SEQ ID NO: 148316 - DNA, 2113 bp, Zea Mays
gttctgtcttttcttccgcttagtcatgccctcaaaatcgtagaggccgcatattcacgtacctccgccacgtctggcctacacgtacacatcgacccatcaaagtcgaggcccaaccaaccaaagagcactgacactcaccgccggcgacgcccaaccgctactgtggactcaccaacgaccaaaaccttcgccggctctccggtccctccacgacggttctacgccccctacctactgcatgtccatcaattttaccgccaactccccatcccgccgtttctcctatatatatgcgcacggacatgtccgttgagatctccaggaaggcaggaagaaccgccgccacgccacacaaaaagcagtgactcagtgagaaaggacagcaagccctccctccatctccgccccgtcgccatggtccttctcttcgtggagaagctcctggtcggcctcttggcgtccgtcatggtcgccatcgcggtgtccaagatccgtggccgcaagctccggctgcctcccggccccgtccccgtgcccgtcttcgggaactggctgcaggtcggcgacgacctcaaccaccgcaacctcgccgcgctgtcccgcaagttcggcgacgtcttcctcctccgcatggggcagcgcaacctggtggtggtctcgtcgccgccgctggcgcgggaggtgctgcacacgcagggcgtggagttcggctcccgcacccgcaacgtggtcttcgacatcttcacggacaaggggcaggacatggtgttcaccgtgtacggcgaccactggcgcaagatgcgccgcatcatgaccgtgcccttcttcaccaacaaggtcgtgcagcagtaccgccacggctgggaggccgaggccgccgccgtcgtcgacgacgtgcgcctcgaccccaaggcggccaccgacggaatcgtgctccgccgacgcctgcagctcatgatgtacaacaacatataccggatcatgttcgaccggcgcttcgagagcatggacgacccgctcttcctccgcctcagggcgctcaacggcgagcgcagccgcctcgcgcagagcttcgagtacaactacggcgacttcatccccatcctccgtccgttcctccgcggctacctcagggtctgcaaggaggtcaaggagacccgcctcaagctcttcaaggatttcttcctcgaggagaggaagaagctggcgagcaccaaggccacggacagcaacgggctcaagtgcgccattgatcacatactggaggcacagcaaaaaggtgagatcaacgaggacaacgtgctcttcatcgtcgagaacattaacgttgcagcgatcgagaccacgctgtggtcgatcgagtgggcggtcgccgagctggtgaaccacccggagatccagcagaagctgcggcaggagctggacacggtgctcgggccgggccaccagatcacggagccggacacgcacaacctcccctacctgcaggcggtgatcaaggagacgctgcggctgcggatggccatcccgctgctggtgccgcacatgaacctccacgacgccaagctcggcggctacgacatccccgccgagagcaagatcctcgtcaacgcctggtacctcgccaacaaccccgacagctggaggcggcccgaggagttccggcccgagcgattcctcgaggaggagaagcacgtcgaggccaacggcaacgacttcaggtacctgcccttcggcgtcggccgcaggagctgccccgggatcatcctcgccctgcccatcctcggcatcaccatcggccgcctcgtccagaacttcgagctgctcccaccgcccgggcaggacaaggtcgacaccaccgagaagggaggccagttcagtctccacatcttgaagcattccaccatcgtgtgcaagccaagaacgctctaagagcagcccacacgtcggttccatgcggagcagtcgaatgttctgctccatcaccatgttattcgggcttaattaagcagtatcattagtagacagtaggagtacaggaagaaaaaaaagctctgggtaatgttatttgcaacaaagggaagggaagggaagaatctgataactattc

SEQ ID NO: 148317 - DNA, 2598 bp, Zea Mays
atgttcaagttcctcaaggaggtggtcgcgggatccggatcgggactcaaggacttcccctacaccatcggcgagccctacgcatcggcttggggctcatggaaacaccaccgcggtacctccaaggatgatgggtcgcctgtgtcaattttttctctgtcagggagcaaccctcaggacagacacatggttgctggtcgcaacggtgttaagagattacgaacagtgcggcatccaaatatcttatcctttttacacagtactgaagcagaagctgcggatggacctgccatgaaatacacaatttatattgtaacagagcctgttatgccactttctgaaaagctcaaggaactgaatcttggtggtacacagagagatgagtactttgcatgggggcttcatcagatatccaaagctgtgagctttctcaataatgactgcaaacttgttcatggtaatgtatgcttggccagtgttgttgttacacaaaccctggattggaagcttcatgcttttgatgttctgtcagaatttgatgctaataatgaagcctctggtagccccatgttgcaatttgaatggttagttggaacacagtacaagccaatggagctgtcaaagtcagattgggcttcaattagaaaatcacccccatgggccattgattcttggggactagggtgtttaatttatgaactattttctggtgcaaagctggctagaacagaggaccttcgaaatactgcttcaatcccaaagtctctacttccagattaccagaggctcttgaattccacaccttctcgtagactaaatccttcaaaacttattgacaacagcgagtttttccagaacaagttagtagagaccatccagttcatggaaattcttaatttgaaagacacctttgagaaagacagtttttttcgtaaactccccaatatagctgaacagcttcctcgtgaaatagttctgaaaaagctgctccctgtattggcttcttctcttgaatttggttcagctgccgctccagccttaactgttttgttaaagatgggttcctggcttcctgctgaccaatttaatatcaaggtcttgccaactattgtcaagctttttgcctccaatgaccgagctatccgagcatgtcttttgcatcacataaatcagtttggggaatcaatgtcagctcaaattgttgacgaacaagtttttcctcatgtagccactggcttctctgatactgatggtactattcgtgaactgacattgaagtcgatgctcgtattagcaccaaaaatgcaggagcgtgcacatacgcacaacaatttgccatggcatgctttgatggaatatttctgggattttagatcctcaatccctcatgcactgatttctatttcctgccaaaagctatacttgcagatgactgattgtctggtggacgaagaacctggtatcaggacaaacacaacaattcttcttggcaatattgcaggctacatgaacgatgggacaaggaagagagtactgatcaatgcattcacagttcgtgcattacgtgataccttccctccggccagagcagctggaatcatggcactgagtgtcactagttcatactatgaaatgacagagattgcaactcgcatcctgcctaacattgttgtgctcacatttgacccaaatagtgatgtccgaacgaaggcttttcaggctaccgatcagttcttgcaaatagcaaaacaacaccatgaaaagattcaagggttctggtacttttcatggtttagatcacagcttaatacaggagacaacagtgtggctgaaagtactggtgttaagttaaagcctggaaatgcaggtttacttgggtgggccatgagttctgttacacaaaagggtaaaccttttgaccatgccccaatatctactgcaaatgccaataattctcaagcatcaacaacctcgactgccactccagacactcaggcttccacactagcgtatgcaccatccacatccacctcgcttgatcaagctgcatcagcatcagcaaggtcgtcagtagatgggtggggtgagcttgaggatggtaatatccatgaggagaatagtagcgataaagatggatgggatgatgtagacccatttgaggacaagccatccccatctcttctatccaacatacaggctgctcaaaaacgtccagtggtgcaaccaaagcaaccggttgcaaactcatctaaaccaaacccactgaaagcgccaaagtcagaagacgatcctttgtggggtcctatagctgctgcaccacctaaaagtgcagtaaaatctgcagacatcaagccatcaacatcacataatgatgaggatgacctctggggttcaatagcagcacctccaaaatcatctgggaagcctttgaagccagctgtagcgaatagtgacgacttatggggtgccatcgcagcacctccaccagcaaccaaagccagacccttagcctcgtcaggtaggggccgaggaacaaagccagcgcaaccaaaacttggtgctcaaagaataggaagaacatcttcaactggaatgtga

SEQ ID NO: 148318 - DNA, 225 bp, Zea Mays
actttaccagaggatgagctgggacggctcactgcacttgtactgcttgaagatgaactggacaaggttcgagaccgagaggttggagttgatgatcttgagcatgacagacgggcttcgacaggtgtagaggaccgtgttggcactggacgtgacgatgcaacagatggctttgatgcaattgaactgcccggcaagagacagatatactccgtgctggcctag

SEQ ID NO: 148319 - DNA, 1437 bp, Zea Mays
cctgcctccaaaaataaaccaaaccccacgcgaagatggccctcccaggcctccctggctggctctcctctcgtcttcgccgcccctccatacttcccgctccgtccctctcccccgctttgaccacctcctccgccatatctctcctccccctcccttccgcccaccacacgcagcatcacaaatagagagagagacaaaaacaaagaggggtcgacaagcactgacacgacccatgtcaatgtggcgcgtctcccgctccctcctccgcgccgcctcggcggtcgggcgcggcgccgcgcccagccggtgggtcccgcagccgtgcgcgctgcagcgctgcggctacgcgttgctgccggaggcggcgaggagggacggggaggaggaggtgacggcggcagaggcgaggcgcctgatgcggctcgccaacgtagaggcgctcaagcgacgcctcgggaacggggaggtgatcccctacgcagacctgctgcgcgcgtgccaggactccggcgcggcccggacgcgcgccgaggccgcggcgctcgccgccgcgctcgacgaggccggcgtcgtcctgctcttccgcgacagggtctacctccaccccgacaagattgtggatcttgtaaggaaagctatgccccttgcactgacacctgagaatgatccggggaaggaagagctcaagcagctccaggtgcagttggaagacatcaacaagcttgcacacaagcaggtccggcgcatcctctggtctggtctgggtttcttgatcacccaggtgggcctcttcttcaggctcacgttctgggagttctcctgggacgtcatggagcccatcacgttcttcacgaccacgacaggcctggttgtgggatacgcatacttcctcatcacatcaagggacccgacctaccgagacttcatggagaggatgtttgagtctcggcagaggaagctgatccagaggcagaacttcaacctggacaagtaccttgagctccagaggcgctgcaaggatcccctggagaaggcctgcggcacgaccaaccctgacacggctcatcttcatgagctctccgttcacaaatgacaaagaattcaccattgcttcactactcattccattctatgggagaaatggtccctgctagcaatagtaagcggtgtttcagataccttttccacggtcttctcctatgcaaatgtgtaggtcagtataatttttttgggggtaaatttgtagcgatgctgaaacacaagctagttaaaagccaaactcatccgcatggctggatgcttactcactacccagaaccgcgcgattctgtggtctctactaatatactgtttcattgtgcctaattagctttattatgaaaactcatttgttggtggctaatattgtcctaattagagacttgtatttgatca

SEQ ID NO: 148320 - DNA, 6497 bp, Zea Mays
tctccaccccctccgtcctccgatccaaactaccgacgaacgccaccacccgaattcgaaaccctaggcggccgctgtagaacacgtgaggctgtagtgcctcttgttcggtggagccggcccgcggcagccggctatgtcgacggaggacgagaagctcctcaaggaggcgaagaagttgccgtgggacgagaggttgcagcataagaactggaaggtgaggaacgacgcaaacatcgacctcgccgctctatgcgactccatcaccgaccctaaggatgcccgcctccgcgagttcgggccgttgtttaggaagacggttgcagattccaatgcgccggtacaggagaaggcgctcgatgcccttctcgcgttccagcgagctgctgacgccgatgcatcaagatacgcgaaggaggtctgtgattcaatcgtggccaagtgcctcactggccgaccaaagactgtcgagaaagctcaagctgcattcctcctatgggtggaactggaggcatcagaggtcttccttgaagctatggagaaggctgtgaagaacaaagtggctaaagcagttgtacctgctattgatgtgatgtttcaagcactaagcgaatttggaactaaggtagtgccacccaaaaagattctgaagatgctacctgagctgtttgaccatccagaccagaatgtccgggcttcttctaagggtttgacactagagctttgtcggtggattggcaaagaccctgtaaagtctattttatttgagaagatgagagatactatgaaaaaggagttggaagcagagttggcaaatgtgtccggacttgctaagccaactcgaaaaataagatccgaacaagaaaaggaacttgaggaggagtctgtgcccgagacaagcggggctaacacttctgaagaggcagcgacagatgcccctgtggagatcgatgaatatgaccttgttgatcctgtagacattttaaccccactagaaaagtctggattctgggacggtgtgaaagcaacaaaatggtctgagagaagggatgctgtggcagaattaaccaagcttggttcggcaaaaaaaattgctcctggtgattttcatgaaatttgccggacactgaagaagctcatcacagatgttaatttggctgtttcggtggaagctactcaggcaattgggaatttagctagaggtttaagagcccaattttctggaaatgcacgaatgctccttccggttttacttgaaaaattgaaagaaaaaaagccaacaatgacagaagcactatctcaaacacttcaagcgatgcacaagtctggttgttttacacttattgatgtgattgaagatgttcgtgcggcagtaaaaaacaaggtgccccttgttcgttctttaacgctgacctgggttgcattttgcattgaaaccagcaataaagcaactgtactaaagttgcacaaggaatatgttcctatctgcatggagtgcttgaatgatggtactccagaagtacgagatgcatccttttctgttttgactgccattgccaagatggttggtatgaaaccattggaacgatccttggagaaattagatgatgtgaggaaaaagaagttatcagatatgattggttcttccagtgacagtgttttgagttcaggaacagctccaatcacaacatcaggagcagccacatctgctcgcggggttgcagatagcatgtcaatgaagagatctgctgcaagcatgcttagtggaaagaagcctgtccaggcagcggctgctaccaagaaatctggaccgtccaaatccactgcagcaaaaaagacagatggtgggtcacagtctaaggcatcagctgctcttgagattgaagacgttgagccggcagaaatgagtttcgaggaaatagaagagaggttaaagtctgttgtgaaagctgagacaatttcccagctaaagagctctgtctggaaagagcgtcttgaagctattggcgtactcaaacaagaggtggaaaatcttacggaacttgataagtctgctgaacttctgattcgtttgttgtgtgctgtgcctggatggagcgaaaagaatgttcaggtacaacagcaagttatagaggtcaacacctatattgcctcgactgtaaacaaatttccaaagcgatgtgtggttttatgccttcttggcgtaagtgaaagggttgctgatataaaaacacggacctctgcaatgaaatgtctcactgccttctgtgaggcagtgggtcctggatttgtgtttgagaggctttacaaaataatgaaggagcacaagaatcccaaggttcttagtgagggtattctttggatggtctctgctgtggaagactttgggatctccaatttaaagctaaaggacatgattgatttttgcaaagacaccggtcttcagtctagtgctgctgtaacaagaaatgctactataaaattaattgggatgctacataagtttgtgggcccagatattaaaggctttttaagtgatgttaaaccagcacttctaagtgccctcgatactgaatatgagaaaaatccttttgagggtgctgctgctgctgctccgaagagaacagttcgagttctggataccgcatcttctgtatctgctggcttgtttgatgggttgccacgagaagacattagtgctaagataacacctactttactaaaaaatctgggcagtccggactggaaggtacgattggagtccatagatgcagtcaccaaaattgtggaggaggctaataaacgtatccagcctacaggaacagctgacctgttcagtgcacttagaggccgtctttatgacagcaacaaaaatttagtaatggcaaccttgtccactattggtggccttgcatatgctatgggaccttctgttgaaaagtcaagcaagggtattttggcagatgtgctgaagtgtcttggtgacaataagaagcacatgcgagaatgcacattgactgctctagattcatggattgctgcagcccaacttgacaaaatggttccatatattatagtgtctttgggtgatcagaaaacaggttcagaagggcgaaaagatctctttgattggttgtctaagcacgtttctaaaatgagtgatccatctgaggctttgcctttgttgaagccatctgcatcttctttgatggataaatcttctgaagtccgcaaagctgctgaatcctttatgaatgaaattctcaggatctgtggccaagaagtggttggaaggaacttgaaagatttgccatcacctactttggctattgtatcagaaaggctgaaactgtctactgtacatgaaggattttctgaatctgttaagatggtgacaacaagcatgagtttgccatcaaaagctggtttgaagaacaataaacatggtcttaatgatcgtggttctaatgtgggcaaacttgtgtcccaaagaggacttcccgccagggcatctgttactatggtttccacccaagaccctgcacaatcccaagcattatttaacataaaggactcaaacaaggaagagcgggagagacgtgttttggtaagaaaattcaagttcgaagaaccacgtcgtgaacagatagatgaactaaagattgatttgtttaagcatttccgagaagatgtaagcctgcgattatggaactcagactttaagaggcaaatcgatggtattgaattgctacaaaaggcacttccttcaagttggaaagaagtgattgaacttcttgacatattattaaggtggtttgtcttacgcttttgtgaatcgaacacaacatgtttgttgaaggttcttgactttcttcctgagctttttgatattttaaaagaccagtcatacatgttgacagaagctgaagctgcaatttttcttccttgcctcatagagaagtctggtcataacattgaaaaagtcagggaaaaaatgggggagctgataaagcaaatgatcaacatttactctcttcccaaactaattccctatatacttgaggggctccgctccaagaataaccggacaaggatagaatgtgttgatattgttggatatttcattgaccatcatgggaccgaggttggtgggttgatgaaaaacttgccatctgttgcagcactgacagcagagcgtgatggtgagattaggaaagctgcccttaatacgcttgcaacagcctacaagaaccttggggatgatgtatggcgatatgttggaaaactctcagatgcccaaagaagcatgctcgatgataggtttaaatggaaggcaagagaaatggataaaaggcgagaaggaaggcctggtgatgcacgagcagctctgaggcgttcagttagggagaatgggtctgatatagcagaacaaagcggagaagtagtgtcccgtccagtggctggatcaatgatctcaagggacttcggatatgcagatgctcatatggataggcacatggtacctaggcagattccaagtacaagtggtcctgtggactggcgcgaagctctcgagatagttgcattaggtttgcctgagcagtccgttgaaggtatgaaagttatatgccatgagctaacacaggcagctgaccctgaaagcacattgcttgaagatcttattaaggaagctgacagattagtgtcatgcttggctgttatggttccgaaaaccttcaattttagcttatctggtgcttcttcaaggtcttgcaaatatgtgttaaacacactcatgcagacatttcagatcaaacgtcttgctcatgctgtgaaggagggtacccttgacaaccttattacggagttacttctttggcttttagatgaaagggttcctcttatggatgatggcagccaattactcaaagcactaaatgttttgatgcttaaaatcttggataatgctgagagaacatcctcgtttgttgtgctgattaatttgctgaggcctttggacccttcaagatggccatcgcctacaccaacggagtctcttgctgtaaaaaatcagaagttttcagacttagttgtcaaatgtttaattaagttgacgaaggttcttcagagtacaatatatgaagttgaccttgatcgaattcttcagagcatccatatttatttacaagaacttgggatggaagaaatacggagaagggctggtgctgatgacaagccattgagaatggtcaaaactgtcttgcatgaacttgtgaagcttcggggaacggcaataaagggtcacctttcaatggttcctatagatgctgaacctcagccaataattctagcatacattgatctcaatctccagacccttgcagccgctagaatgttgacgccatcggggcctatgggtcaaactcactggggtgatgctgcatcgaacaatccaaatccatctactcactcagctgacgcgcaattgaagcaagagcttgctgctattttcaagaaaattggtgacaagcaaacatgtaccattggcctctatgaactgtatcggataactcagctctacccaaaggttgatatatttgctcagcttcagaatgctagtgaagcgtttagaacctatatcagagatggcctagctcaggtggagaagaatgcagcagctggaagaatgccttccagtcttccattatccacgccgcccccaatagcagcaatacccaatccaaaatttgcaccatcccctgttcacacaaaatcaatcggtaaaacagattataacgaagataatgccagtggtgagacacaacccttcagaggtcaaggtgccatcaccgaccaacaaactgatagataccatacctcagcaggcacgttggatgctcttagggaaaggatgaaaagcattcaagcggcagctataggtcattttgacggtgctcaggctcggccgttggcaagtatgaacggaagtaatatggtgcatgggggaactcgattggacggtgaaccccaacaacgaagtaatataccacccatggatgagcgagctctatctgggctgcaagcacgaatggagagactaaagagtgggtctatggaattacaatagatacgataacaattctgagaaataccaactattgtagttctttgtaaatttgaggcatagtgatggtgttctttgtagataggtatttgaatgtcggaagaactatatggcacggggtcaacatttcgtaacccatgtgtcaagccattcttgcagagcctttggatgcagttttagataagaggtagccaaatgttttccttgttgctactccaagggctaattagtgttgacacattttgccgtactgtattggttttcctgtggtgtacagcaatagaatttttcattctaaattaactggaaatgttacttgtgaaatatatggtttttgaaatgcatatccgtatggtttcacatttatttgatt

SEQ ID NO: 148321 - DNA, 1523 bp, Zea Mays
ggagtggacaggacagggtcagagccttttccacgcgggaaccttcgcggcagcgtcgcccccatcctcatccggaggagggcacggggccacgccacgcctggaccgcgcgaggcggcacgagctgggctacgcagcgcagcccatataaacgcgctccgagaccctccattcgccttggtggccaaggaggcaaggaaacaggcagctctccacggacaacgcgattctatttatttatctggctgccagccagccagccgcctttcgaaaccgagcacgagggagccgacgtggtggtctctggaacctggttcgagcgagcgagcgacccatctatccagccgcctgccgggaatttctgtgacgacgacgaggaggaggagggggtatggcaatggtggcggcgcagggaggcggccggagggacgccgaggcggagctcaacctgccgccggggttccggttccatcccaccgatgaggagctggtggtgcactacctctgcaggaaggtggcgtgtcagcagctgcccgtgcccatcatcgccgaggtcgacctttacaaattcgacccgtgggatcttccagagaaggcgctgtttggccgcaaggagtggtacttcttcacgccgcgggaccgcaagtacccaaacggctcgcgccccaaccgcgccgccgggagggggtattggaaggcaacgggcgcggacaagccgatcgcgcccaagggcggtggcggggcggcaggaatcaagaaggctctcgtcttctactccggcaaggcgcccaggggattcaagaccgactggatcatgcatgagtaccgcctcgcggacgcggaccgtgcgccgggcaagaagggctcacggaagttggatgagtgggtgttgtgccggctgtacaacaagaaaaacaattgggagaaggtgaaggctgaggagccggaggcggcggcgccgttccgtcaccagcagggcgcagcggaggattccatgtctgacagcttccagacgcacgactcggacatcgacaacaatgccttcggcatgcagaacggcttcggtaacatggtgcacgggcagaccatgaccatgaggaacggcattggcagcgtggcgaggacggtgaaggaggacaactattggtttaccgacctgaatctggatgatctacaggcaccctacaacgtgacccatgtgttgaatccgaaccctgttcagacgatgaatctggcagctgggcaaggccatggctacttgcagtctatgagctcgccgtcgacgaagatgtggcagaccatcttgcctccgttctgagagttgctgtgatggaagggggaagagatgatcttgggcgtaggagtggttagactggctaggaacagcaggtttaaaatttggagggtctgaattctgcaactgttgctggtagtcttgtaagggttattcatttgttaaattgtgtgcttggtaatataccaaaaggaaaatccatctccctttgcactacttgaagaaacta

SEQ ID NO: 148322 - DNA, 1047 bp, Zea Mays
acaaaacattttcttgttttactaaaagaacaatcttctcgtcgatccattcatccaaaccccggacggaatttctaacttggctctgtgccgctctggttcctttccctccagagaaggcgctgtttggccgcaaggagtggtacttcttcacgccgcgggaccgcaagtacccaaacggctcgcgccccaaccgcgccgccgggagggggtattggaaggcaacgggcgcggacaagccgatcgcgcccaagggcggtggcggggcggcaggaatcaagaaggctctcgtcttctactccggcaaggcgcccaggggattcaagaccgactggatcatgcatgagtaccgcctcgcggacgcggaccgtgcgccgggcaagaagggctcacggaagttggatgagtgggtgttgtgccggctgtacaacaagaaaaacaattgggagaaggtgaaggctgaggagccggaggcggcggcgccgttccgtcaccagcagggcgcagcggaggattccatgtctgacagcttccagacgcacgactcggacatcgacaacaatgccttcggcatgcagaacggcttcggtaacatggtgcacgggcagaccatgaccatgaggaacggcattggcagcgtggcgaggacggtgaaggaggacaactattggtttaccgacctgaatctggatgatctacaggcaccctacaacgtgacccatgtgttgaatccgaaccctgttcagacgatgaatctggcagctgggcaaggccatggctacttgcagtctatgagctcgccgtcgacgaagatgtggcagaccatcttgcctccgttctgagagttgctgtgatggaagggggaagagatgatcttgggcgtaggagtggttagactggctaggaacagcaggtttaaaatttggagggtctgaattctgcaactgttgctggtagtcttgtaagggttattcatttgttaaattgtgtgcttggtaatataccaaaaggaaaatccatctccctttgcactacttgaagaaacta

SEQ ID NO: 148323 - DNA, 357 bp, Zea Mays
atggctccggtcggcggtcgcgctgggccgctcgcgcaggccacaggggcgcagggcgcagaggcggctccggtagcgctcgcgcaggggaggccgcggctccgatctgcggtcgccggtcgcgctcggccgctcgcgcaggccgcactgccgcaggggtgcactgccgcactcgccggtcgcgctccggtcgccggtcgccggtcgcgctggagcagtggagcctggctggccgccttggagatgggagtcaggatggagatgggagtcgccgaggcaggatcgggacacggccacacgagacaggaaagacggcgaccgccggctggtcacggactcacgggagtagggacgtag

SEQ ID NO: 148324 - DNA, 1633 bp, Zea Mays
ccgcccattaggcccgacccaaatgtacacctatagatataagtaagggagacgaagttatttagtgatatgtaacattgattttgatgatgtgttaagtttggatgtaatttgtttgatgaatttagtggaagttataggtgtaaaggtgatttgttaaattggtggattatagaaacatggtaagaaaaagtaaaaaaataataaaaaaccggccaggaggaaaaggggccaaacgaaacacaccaccaccactcgtcgtctcgtccgctcgcgcaccacgcacggcgcggtgccgactgtcgagtaaccccccattcgcattccccagccccaccgatcggatcggcaaaatcccccaccagatcccggcgcccccaccacacagcgctcgcgcctccctgcttcccaattcccgtctgcccggccgcggagcggagctgctcctgccccccgtcgccacgccacgatggcggagtgccgcagcctcatcgagttcctccgcgcgttcgagcaccaccgcagggcggccgacagctccgcctccgcgtgctcccgatccaggcgggcgtccgccgccggtggctccttctgcgacaacaccccgatggccgtgatcgacgcggtcatgctcctcgccgtcgtcatcgcgatcggcttcctcctgatcccgtacctcaagctgctcctcctcgagatgggcgcgatgctccaccccgccgcgtcctgcctcccggccgccgccttcttcggggccgcggtcgccgtcgccgcggtggtcgtcgcgtgggagctgctgggccaccacgctcgcaagtgcggcaagcccaggtgcagggggctcaagaaggccgtcgagttcgacatccagcttgagactgaggagtgcgtgcgcggccgccccggccccacggcgcgatcagcgctgcttgcggcggcgggggcgcgtcctgtggagctaggcgacgagcagcgggagttggaggctgagctgcgaaagatggcgccgcccaacggccgtaccgttctcatcttccgcgccccctgcgggtgccccaagggccgcatggaggtctggggcgccaagaaggtgcgccggatcaaaaagtaaagcggggcaaggatcggatggttactagttagtgcaatagtaccagtgcactcttgttccttcctcaatcctcataagtagctcctgctagaaaaaaatttaaaaaaaatcctcagttagcaataataagtataagtatagggtgattaaataaacggatcacagaaccagttatatcacagatagcttatatagacaatcatatactccttgtattatgaatcatggggaatttcgacagaaatacatgctttttacttgttcattctctaattttcatgggatcctggataactgatattacagtagcaacatagctagtatcttactgaatccttgatttccgtagctgactactcctttgtctgccttttgaatccttgatttccatctgtattatggtgcgggttagttgctacttgtctgtcttgaaatgtttttgctgttgattcaatgttattgaggtgaagttttagctccttgatggtagattgacaaccaactcccattagttgagatttt

SEQ ID NO: 148325 - DNA, 1053 bp, Zea Mays
gccgcaccaacagccaatccggacctctcgcctcctctctcgcgttgtcctcgccgcgccctgctccggttccccaatccttcgccccgcctccgttgcctaccgtctcctccgagccagatcgatacaagcggagccgtgatccggtcaacgcgcggagcgtgttagccggattctctcgccgtcgcctcccctcccctcccgccgccgtcaccgccgtttctggttgcccgggatcagccgagttggatctcgaggcgtgaagcgttgcgggcgcccggcgaggatacgatgcctgcggtgctcgccgcattcgcttgcctccgactccgagcggccgctgccatcgccttcggggactcctccttcctctgctcccatcgtcttaagcatcattttagtagtaattttagtattagtaattgtctttgacctttacgtttcctccgtcacccacacccccctccggtttcgttctggttgtgttcgattcgtggcttctttggctctgtcgcaggatcgaaaggaggcaaggtgttttaacgtggttattactacctacaagataacagaaacttgtatttgtaatttgagatcaagcttgtggatgggcgaaccctcagcggacttcagtgctgaagatgttagtagcatctcaggtccttgccacaacacttgtttaaagccttgttgcgagcatggttgtgcctgttgggaagatgaatatgttgaagcagtaatatcttgtgtgcaagatgatttggcggttgaggaaattggaatcgctcttacagaagtgacgacgatcgatctgttggcggttgacgaagggtcaggtctgcatgaagattctgatgacgattacatcgatgatccaattctttctctggaatctgattcaactgatgatttagtgaacgttgattttatatcacctgcctttcctattggtggtgtaacagaatcatcaattagcaattcagttgctgggaattcttcaattaatgtaggtttctaatttactttatagttggattctttcattttttgcat

SEQ ID NO: 148326 - DNA, 2034 bp, Zea Mays
gccgcaccaacagccaatccggacctctcgcctcctctctcgcgttgtcctcgccgcgccctgctccggttccccaatccttcgccccgcctccgttgcctaccgtctcctccgagccagatcgatacaagcggagccgtgatccggtcaacgcgcggagcgtgttagccggattctctcgccgtcgcctcccctcccctcccgccgccgtcaccgccgtttctggttgcccgggatcagccgagttggatctcgaggcgtgaagcgttgcgggcgcccggcgaggatacgatgcctgcggtgctcgccgcattcgcttgcctccgactccgagcggccgctgccatcgccttcggggactcctccttcctctgctcccatcgtcttaagcatcattttagtagtaattttagtattagtaattgtctttgacctttacgtttcctccgtcacccacacccccctccggtttcgttctggttgtgttcgattcgtggcttctttggctctgtcgcaggatcgaaaggaggcaaggtgttttaacgtggttattactacctacaagataacagaaacttgtatttgtaatttgagatcaagcttgtggatgggcgaaccctcagcggacttcagtgctgaagatgttagtagcatctcaggtccttgccacaacacttgtttaaagccttgttgcgagcatggttgtgcctgttgggaagatgaatatgttgaagcagtaatatcttgtgtgcaagatgatttggcggttgaggaaattggaatcgctcttacagaagtgacgacgatcgatctgttggcggttgacgaagggtcaggtctgcatgaagattctgatgacgattacatcgatgatccaattctttctctggaatctgattcaactgatgatttagtgaacgttgattttatatcacctgcctttcctattggtggtgtaacagaatcatcaattagcaattcagttgctgggaattcttcaattaatggcactccaaggttagtttctgcaatgaaaggaactcgtgccaagaagggaatcaaaacaaagttgagcgtttcatgggccactgatgtatatgacccacctattacttcagactcgcacactgtgaaagggcaccgtaagagttcaactaagggtaactacaaatacaagtgttccaagagcagcagtagcagtaaccacagtaccactggaagcaaaaaggacaagaagcattctaggcaccgtagcagcagtgggggtggcagcaaaagggacaggaaacattcttactgcagtagtgctagcagcaacagtagcagagttgttaccaacggttctctatatggtaacacatgcagtggcggtgggatcagcagcagcagcagaactacgacatgtgttcctgaatctgccaaggtatctacattgatggtagctgaaaatgcgacaccacaagagagagttcctgtattgaagacaccggaaccaatcaaatgtactaccagctacggcaaagagaagccatttgccttgctgtcgcgccagtttccccctgcaagatacaaggggatgttctccttctggagccaaaaccagctggcttcttgataatctgctatacggaaagctgctatacagaaagctcacctggaagtcttggttgctaattaaattgcactgcatctgtgattgttttttggtgtcgttctcttcgttgccatgtttcttttgcctgcgtctgaaacttcagagatcacgttttcgaaaattgctcagcgaagtgcttgtatatttgagtttatgttgttactatttcctcaccgaatcgtgtaattcgcttatcaatttcatcatgtgttttgtattattccatttgagatcatgcactattatttccacacctacactgtagcaagggactggtttagtcttctgtactttggttattatgttggaattgcaacgattacagtaaatgagaatgacatcacctgatgcttaggacataagacatgttgatttattcc

SEQ ID NO: 148327 - DNA, 3154 bp, Zea Mays
atgggtgaaccctcagcggacttcagtgctgaagatgttagtagcatctcaggtccttgccacagcacttgtttaaagccttgttgcgagcatggttgtgcttgttgggaagatgaatatgttgaagctataatatcttgtgggcaagatgatttggcggttgagaaaattggaatcgctcttactgaagtgacgatgaccgatctgttggcggttgacgaagggtcaggtctgcatgaagattctgatgacgattacagcgatgatccaattctttctctggaatctgattcaactgatgatttagtgaatgttgattttatatcacctgcctttcctattggtgatgtaacagaatcatcaattagcaattcagttgctgggaattcttcaattaatggcactccaaggttagtttctgcaatgaaaggaactcgtgcgaagaagggaatcaaaacaaagttgagcgtttcatgggccactgatgtatatgacccacctattacttcagactcgcacactgtgaaagggcaccgtagtagttcaactaaggctgaaaatgcggcaacacaagagatggttcatgtactcaatacaccggaaccaatcaaatgtactaccagctgcggcaaaggaaagccatttgtcttgctgtcgcgccagtttccccctgcaaggttctttagcaaagcgagatttcagagacactgttgtctctgccaccgccatgatgttggcatcaaggatggaggagtgatagtaaatggttcgacgatcggagacaagtttttccaggggaggattttggcgattgatagattgcatattggtgcggctttcatgatagtcggtgaatgggctgtcgaccaaaactttttacagccaaggagaagaaagttgcaaagagcacaaagaatccaggccgccatgctgagaccagaggttaagagcatgcgcctcagccatttccttgcccaatcttctaataacactacaactgaacccatcagaatatttgtttccacctggaatgttggaggaaaaacacctattgctgcactgaacctggatgactttatcccccctgatgacaattccgatatttatgttttgggatgttgtgtttacttgattctagatttgtctcacatattagtactaatacacagccgaaaatgttttcaggaaattgtccctctcaatgctggtaatgtgcttgtaatagaagacaatgaaccagctgctagatggcttgttcttataaaccaatcactaaatcgaccagctgacattgatgccaacgtctttcagcatgaaccatctccctctgttgattcttcttcctctcgagcttcatcaagcatcggcacctcattctccgacctatcaaaaacagcaagtggtgccacaatcttccagaattccttgttaaaagccattagcaaatctttcatgccagtgcgtagaaaacaacttaaggcctgcaattgcccggtagaaatgaccagaacgtcctacagggatgcttgctttggatgtcaaaaagcatatgcagatgagactgattcctctggagaggatgaagagaaagggaaagataaagagaaatcaagggactctgatggctctgtggtcgatggaattacttctggtcctgccactagggatcaactaaaatataatctcatagcgtgcaaacaaatggttggcatttttgttactgtgtgggtgaagaaagagctagtgcagcatattgggcatctaaggaaggcttgcatagggcgcgggattctgggctgtcttggaaacaagggatgtatatcaataagcatgacactgcaccagacaagcttttgtttcgtatgcagccatttggcttcaggtcaaaaagaaggagacgaattcaggaggaactcggatgttctagagataatgaggctcacaatgttttctaggatctgtagaagagctggaagaaaaatcccggagagaatagttgaccatgataaggtgatatggcttggtgatctgaactaccgtattgcactgagctatgcagataccaagaagcttttgatggaaaatgactgggatgctctttttgaaaaggatcagcttaaaattgaacgggacgctgggcgagtatttaagggttggaatgaggggaagatatattttgctccaacatataagtactcctttaactcagatgcttatgctggtgagactgcgacatcaaagaaaaagagaagaactcctgcgtggtgtgacagaatattgtggcgtggtgatgggattgtacaattatcctactaccgcggggagtctagattttctgatcaccgtcctgtttgtggaaccttcgctgttgaggttgaggtgctaaacaagaagacaaacaggcgctcatcaaatgctgacatgagaattgatgctgaagagctcttacccacgggcaagggcaagggtaaaagagatgagaatcatgttgcacgcgaggaggagaggctagtattgcagccggactcgcagatgcccgctcaagatggacggacgattcaccggctcggcccacaacagctcatcaccacccatgtttccctctcaccacccgtgccaaacagccaattcatcgcagccaccggtaccgcgcgccgctgggcagcatttgctaccttgtcgcgtccgtgcgtggatcgtgactccttgaattgtggcccggggcagaggaggaataagccagccatcgagatcgagattgaactgcatgcatacagtgctccgtagtagaaacataccaaacacacgctcatcaaggggaattattacaagctaggaaacaaatccggaagaatctcgtgcctggaacagctagctgtttgtacgtgaattaacgaactagtaccataatgcacaaacatgtgtgtgctgtaagaagaatgatgacgaagaaatcacaaagtctaagacgaccggtagatgctctagaacatgatcccggcggccgcgaccgcgacgggtagcgcggcgagggcgacgaggcctccggcggcggtgacgcgtcccgcgggggacttggctgagcccgtcggcgtgttggctgcagaacacacggcagcggtcggaggcgaagtcgtcagatgagatagcaaag

SEQ ID NO: 148328 - DNA, 189 bp, Zea Mays
atgttgagcaccgcgttgaagcactcgtcgctgatcccgggcgccgggcccggcgcgggcgcggcggccggcccctgcgccgacgccatcccgagcaccagcgccgccgccaccaccaccgctgcgacgagcgctgttggacgcggcagcattgccatggggatcactgctagtgtacgtgttagctag

SEQ ID NO: 148329 - DNA, 1569 bp, Zea Mays
agcagcccctccaaaaaatctcaaacaactcttcagcacgggaaaacccgtacacaccacagcaccgtcgccaatgtccgccgccgcagccgactggcttccgtcagcgtccgtgacggcatccggccgcccggtgctttccgcgggcgaggtggagcggaatctcctcccgctcgtcgacctcgagcccgaggaaaatccgcgccttgctcccctccgcgcctgcctcctcgcgctgacttcccaccgcctcatcttcctccacgagccctcccgctccgcgcgcggcctgccgctcgccaccgtcgtccatgcgtaccctccccaccgcaggcacagccacaaccccctccgctccctcttctccgccccgtcctcatcttcctcgtctcagcatcaccgcatccgcctccagatctccatgccacccgtgcgatcagaggtcatcgccatcgtcgtgacctgcaaggctgacgttgatgtgttcttcgggaggctgctcgaggcgatccgtgcaagggcttgggaggtgacccctgcagctgctccgtcgagtggcacgtcggtggcagagggggccgcgcctacggaggacatcgcgatacggatgccggttgttggggtctcggggatactgcggatggagcaggagtcatgggagaacgccgggcagaacttgcaagatgcgttccaggatctcaatgccctcatgagcaaagctaaggaaatgatgcagttagcagaaaaaatgaggctcaagctattaatgaactcatccactgaatcaaattccaatgatgaagagatgggttctaagcaagacatgcaggatttgctgttgagtgttggcattgtgtctcctgtgacgaaagaaactgctggtgcgttgtatcatcagcagttgtcactacagctggcggactttgtaagaataccacttgagaaagcaggtggtatgatggcactagtcgatgtttattgtctcttcaaccgtgctaggggaacagagttgatctcaccagaggaccttttgcaagcttgttccctgtgggagaaagttgatgtcccagtcatgctcaggaaatttgatagtggagtgaaggtgatccagaccaaaacacatagtgatgaagaggtatttgcaagaatctcatcacttgcacagaagccagatgctcttcagaaagggattagcccaagtgatgctgcattcacactgggaattgctccagctttagcaaaggagcatcttctaaatgcagaaaacaaaggcctgttgtgcagagatgttagtccagatggattccgcttttttagcaatttatttaatgacattgatccccaaaatattcactcgtaagaaaatcacagccctgccctcctgcaagtttcttttcagatattaccctggatccctgcaagttccttttcagatattacccctttattgattgtgaactttgcaggcaaaaaccccatgggatgtacaaggcgtggatctccgttgcgatggcgtctcactgaaaaagttcgactgggatatattgagatactggttgatcaagctgg

SEQ ID NO: 148330 - DNA, 1970 bp, Zea Mays
agcagcccctccaaaaaatctcaaacaactcttcagcacgggaaaacccgtacacaccacagcaccgtcgccaatgtccgccgccgcagccgactggcttccgtcagcgtccgtgacggcatccggccgcccggtgctttccgcgggcgaggtggagcggaatctcctcccgctcgtcgacctcgagcccgaggaaaatccgcgccttgctcccctccgcgcctgcctcctcgcgctgacttcccaccgcctcatcttcctccacgagccctcccgctccgcgcgcggcctgccgctcgccaccgtcgtccatgcgtaccctccccaccgcaggcacagccacaaccccctccgctccctcttctccgccccgtcctcatcttcctcgtctcagcatcaccgcatccgcctccagatctccatgccacccgtgcgatcagaggtcatcgccatcgtcgtgacctgcaaggctgacgttgatgtgttcttcgggaggctgctcgaggcgatccgtgcaagggcttgggaggtgacccctgcagctgctccgtcgagtggcacgtcggtggcagagggggccgcgcctacggaggacatcgcgatacggatgccggttgttggggtctcggggatactgcggatggagcaggagtcatgggagaacgccgggcagaacttgcaagatgcgttccaggatctcaatgccctcatgagcaaagctaaggaaatgatgcagttagcagaaaaaatgaggctcaagctattaatgaactcatccactgaatcaaattccaatgatgaagagatgggttctaagcaagacatgcaggatttgctgttgagtgttggcattgtgtctcctgtgacgaaagaaactgctggtgcgttgtatcatcagcagttgtcactacagctggcggactttgtaagaataccacttgagaaagcaggtggtatgatggcactagtcgatgtttattgtctcttcaaccgtgctaggggaacagagttgatctcaccagaggaccttttgcaagcttgttccctgtgggagaaagttgatgtcccagtcatgctcaggaaatttgatagtggagtgaaggtgatccagaccaaaacacatagtgatgaagaggtatttgcaagaatctcatcacttgcacagaagccagatgctcttcagaaagggattagcccaagtgatgctgcattcacactgggaattgctccagctttagcaaaggagcatcttctaaatgcagaaaacaaaggcctgttgtgcagagatgttagtccagatggattccgcttttttagcaatttatttaatgacattgatccccaaaatattcactcgcaaaaaccccatgggatgtacaaggcgtggatctccgttgcgatggcgtctcactgaaaaagttcgactgggatatattgagatactggttgatcaagctggacatcgatgcaattatagtgtactctttgaaaacgtccgatcaagccagtcattggtgcgatcacaatgtatcctttgaaaacgttagtctgcatatctcgccattatgtaccataacaccaaaagatgtgatatagcaattagcaagcccatttgttctgttgaatgaagagcgtttgagtacgatgtatgaggattcgggctacattggtaaccgtattagcatgcgaccagattaacttttctgtactgactccatccaaaaataatgcaactctggtatagtcctaagctgtactacctcaattttcatcaaaattataagacgagttatgatactaaaaagtactgctagatatatatatttttgataaatataatttaacaatgggtctctgtcctttggagatgctcacaagaataaggataagatgtgtgtgtgtgtgttcataggtgtaaatgtatggacatgtatgagcatctatgttggagtgtgatttcaaaataaaaa

SEQ ID NO: 148331 - DNA, 1594 bp, Zea Mays
cgcccgcgctcggcttcggtcggggcacacaagttagtgccttccgccttgttgcctcactcctgttcgttcgaagcagacccagaccgacgccaggctagtggtcgacgcccgtggcgagctgagagtcggtgtcgtcaccggcgccggcgagggttgggcttatcgcgtgtaattaaggttgtgatgtttcttcccgtagatgtgcgatttttcttcgcttgatttgagtgacagtaaagtggagaccggctagcgtcgttcttgaaatctgtcgattcatggggagtcagacaatgacatcacaggctggggggagtggaggagacgtgggtggcagtgccggtgccggtgccggtgcagggcaacacgggcagatgcagagcctggcaagacaagggtctctgtataacctcacccttgatgaggtgcagagccatttgggagaacccctacacagcatggaccttgaggagctgctgaagagtgtctttcctgatggcctggaccctgatggtggcactaccagccagtatgagcagagttcgggcctcttgcgacaagggagcatcacaatgccgcttgagctcagcaagaggactgtggacgaggtgtggaagggcatccaggatgtgccaaaaagaaatgtcggggagggtgatcagcagagccaggagcgggagcggcagccgacccttgagaagatgacgcttgaggatttcttggtgaaagctggggttgtggccgaaggatatcttaaggacttgaatgatgtaggcaatgtggatcaggtcagtagcgctggggctgcaggtttgaccgctgggggacaatggttagaccattatcagtagcgggttacagctatcgagccccatcagcacgggcaacatagtttgccaggtgcttacatgccgggtcggttagcccttcagcctctgaatgtagggccaggtgctattctggagtcatactctgatggccacattacttcaccaatgatgggtgcgctttctgattctccgacgcctggtagaaagcgtggttccccaggagatgtgacagataagttgatggagagaaggcaaaagaggatggtcaagaatagggagtcagctgctcgttcaactgttcaagggctaggaagcagcttgctcgagctagcaaggatttccttgtctggacaggcgagccaaatccactctctagcacaggcaaggttccctcagtcaatgggagctcaggcagcacaagcgtcggcatggctagcatagctaggaaccaacattagctattttcttccctgcctttgctgctcaaggttaggcaatccttgtctacctactacctagcctttgttggtgaagggtccagacatgcccttggtagttgttctacatcctgatgaccacttgatgtcggtaagtcaatagtttatacagccacccgttcgttgttcagttagtatgtggagcctcaatcccaaacttaatttctagccatgtgatcttgtttagttggtcgcaactttttgatcttttatttggtgattatggtattagatggctattatgctactaaggaatccgtcttt

SEQ ID NO: 148332 - DNA, 1292 bp, Zea Mays
cctaaccaagcaacgctgcacttcactacaccaccccaaaccaacgctcgctagtcacctaccggctaccgcaccgccgccgccgccgcgcccatctcgcacgcgcagcacaggacgcgcgcgatcccctcgcgtccggatcgccatggcctccacggcgttcgccgccgccaagtacttccccgcgcacctcgactcctccccgcgcatcgcgccccgccgcgccgcgcccaccgcgagcctctccttctccccgctctccgccagcccgtcgtccctgctccgcctccggaccccctgcccgtccggcccggggggcaggctgcctccgccgccgccgccgccgccgcgatcgtacggcggcggcggcggatctggtggcgacgccgcgaactccggcggcggccgccgcggcgggggcatcctcgggctcttcctcgccgggtgggccgcccgcgtcgccgcggacccgcagttccctttcaaggtgctcatggaggagctcgtcggcgtcaccgcatgcgtgctgggcgacatggcctcccgccccaacttcggcctcaacgagctggacttcgtcttctccaccctcgtcgtcggctccatcctcaacttcgtcctcatgtacctcctcgcccccaccgccgccgcgtcgtccgccgcctccgcgctccccagccacatgttcgagcccggcgccttctcgctcggctcccgcgtcgccacgctcgtgtccaagggcgccaccttcgcggtggtcggcttcgcagccgggctcgcgggaaccgcgctctccaacggccttatggcgatgcggaagcgcatggacccggcgttcgagacgcccaacaagccgccgcccacgctgctcaacgcggccacctgggcgctccacatggccggcagcagcaacctgcggtaccagacgctgaatggggtcgagtacatgctcggcaaggtcgcaccggcgccggtgttcaaggcgtccgtcgttgttctccgctgcttgaacaacgtgcttggtggggtgtccttcgtgctgcttgctaggttgactggggcgcaaaaatcagataagccggcgacggtcgcggaagagaaggataggttgatagctgtgggcaatgctgcagcagatgccatcggtgaggcgagagatggagaggagggtaagtaagtggtagaggagaggaacagtaagatgatggtgcatcgtcccacgctcttttgcaagaaacctgtagagttggttggaatggaataaggagtgaggctcaacttcttttcttaaa

SEQ ID NO: 148333 - DNA, 309 bp, Zea Mays
atggggggactgggaggagctaccactaccagcgtctgcgctctcagcctcctctccgccctgctgcttctgcactactgcctcctcctggcaccttctgccgctgtggtctccaaggagaggacgcagtcgagaaagctcttgcagagcctcgtcgtagtagcacgcgtcagctcagactcggagaaggcgcgaccagaggtggtccgggcagcggccaagccggcagccatgggtcccggcggcgccgcggtgtccgagaacctgaagaagcagacgccgagcaggtccaacccgatacaaaactag

SEQ ID NO: 148334 - DNA, 757 bp, Zea Mays
actcggttgggacttggtcgcctatttcgcctcgctgacttgctctgtggtaacttggtcggccgctttgctcgggcagaagttttataatcttcacttcgagtgcatgttcataggacttctcattggagagtacagcagattacccaaagctaacggctggtataggggtggataagtctaagaactctaaacaaccgcagcggtatcactatgacccacagttgacacgagatttcggggtaaaggcaagagagaaaaggtaggttccgtctgccaaagttcacagatcaaagcactaatgccgtgaacagcactccccgcgtccggagaacggcaattctcggaggttcagacaggattggaacggagaagggtgaggaggaggccaaaatccagcatccccacccccctcagatcacacctggacgcccaaaccaaatggaaattcagcggtgtacctggcggaatctcgcagcagcggtggagactagtcgaactcctccaatggactcatctgctattgtgagctgaccaacggattgcagggaagtagtcgactactacgatacagcagttgagtgggaacccgaggagggggatctcgccataccagagtatttggataactctcaggtcagcgagagagagatttcaggagagagagagagagaaagagaaagagatactggctgcgggatttgcttggagggcagattatataaagatgaaaggtacagagaagccatgctattgg

SEQ ID NO: 148335 - DNA, 534 bp, Zea Mays
atggaccacgagcagcggcgccagcggcagcagcacagtcccagaggcaatgctcctgggagcgggaggtgcggctcctcgtcgaggaagcacaagggcgggggcaagaaacccatcaaagtggtgtacatctccaaccccgtgcgcgtcaagactagcgccgctggtttccgcgccctcgtccaagagctcaccggccgcgacgctgacccctccaagtacagccccgaggacctcgccggcgccgccgtggcggcgggcgaccctgactgcggcgccgcccaggggctcagccccggggacacgacggctgcgtcgtccgataccatcgtcgccatccccagccctgccgcggtggaccacctgcacgagcacgacgcctcgcccgcggccgcgccggccgacggcggggactactactacgacgacgaggaggacgagggtggattcgggtcgcagctgctggagaaatactacacggtattctcgccgccgacgctgctctacgactacgaccaccacccgcacaacaag

SEQ ID NO: 148336 - DNA, 1647 bp, Zea Mays
gaaacctagtgtctattttacatttaaccacttccatataaaaccgttggatctagactggatgctctggatagtttgattgcacgcttgcaccaaaatgagtgattgcacaggatatgtcctcaagattaaccactgggtccggcctctcctgaaaccgtcactgttcgaaaaactctaccaccacttctcatctaataggtctgaatctaatgccatgccattataatttctttggaactacttggtacacctatgacctatcggtttcattgttggcaacagaaaattcgaattcgaaataaaaaaaacaatgttgacctgggctaggagcccacaggccacgctcgaaacagattcagcccagcaaccgccaaaaattgggcccgcaaggtggtcggactttcggagttcggctgggctccgaccagttggacatccccggaccctgaaccctagcggctgatttattttctcctttcctcccggcggccggcgctgctctctccttcgacatccgcggcagcgaagactaggccacaaaatcgcggtagcaagcagcagacaggtggggaagatgtcgtcgctgcggaatgcgatcccgcggcgcgctcacaaggagcgcgcccagccggaggcgaggaagaagtttgggcttttggagaaacacaaggactatgtcgtccgggcgcgagcttaccacatcaaggaggcaaccatcgctaaactgaaggaaaaggcggcattcaggaatccggatgagttctattttaaaatgatcaacagtaggactgttggtggaattcatagacctaagcctgaagataataagtatactgaagaggaacttcttctgttgaaaaataaagatatgggatatatccttcagagcgttcaaagtgaaaaaaagaaaatcgaaaagctaagctcaacactccatgaacttgataacaagcctcaaaacaagcatgtttattttgctgaagacagagaagaagcaaaagaaatacaatcaaggataggacaaagcagcaacatgcctgatcttgacaacatcccttctcgtataaagaagaaaatagcctcttcgtacagggagttagaagagaggaagcagcggcttcaaaagcttgagaaattgtatgcagacatggccttgcaaaaagaattgaagaaacctggacgcaagaggaaactgaaactccatgaagatgaagagacggacaatcaaacatcacggcctgtttataagtggcgagcacagaggaaacgatgagatgatatgaatgggctatggagggagtaaaaggcaacatgttagtagtggaagtactggtcagtggaaccgctccttcggaccttaaaatacttccctgtagaagtagccctccacaagaactgtgtctttgtcaaactattgggcttaaagatcagattctgtatgattcaatcatgtgcatcatatatcaattcattgttctgtattatgttgaattcgcctagggatgggctatttttgtgatccattttgagatcagcaagtaatgccagatacaataggatagatccaacacaatgtatccctatacaatgtatccctatacaataggatagatcagcaagtaatgcctagcgttgggcttgacc

SEQ ID NO: 148337 - DNA, 841 bp, Zea Mays
cggaccctgaaccctagcggctgatttattttctcctttcctcccggcggccggcgctgctctctccttcgacatccgcggcagcgaagactaggccacaaaatcgcggtagcaagcagcagacaggtggggaagatgtcgtcgctgcggaatgcgatcccgcggcgcgctcacaaggagcgcgcccagccggaggcgaggaagaagtttgggcttttggagaaacacaaggactatgtcgtccgggcgcgagcttaccacatcaaggaggcaaccatcgctaaactgaaggaaaaggcggcattcaggaatccggatgagttctattttaaaatgatcaacagtaggactgttggtggaattcatagacctaagcctgaagataataagtatactgaagaggaacttcttctgttgaaaaataaagatatgggatatatccttcagagcgttcaaagtgaaaaaaagaaaatcgaaaagctaagctcaacactccatgaacttgataacaagcctcaaaacaagcatgtttattttgctgaagacagagaagaagcaaaagaaatacaatcaaggataggacaaagcagcaacatgttagtagtggaagtactggtcagtggaaccgctccttcggaccttaaaatacttccctgtagaagtagccctccacaagaactgtgtctttgtcaaactattgggcttaaagatcagattctgtatgattcaatcatgtgcatcatatatcaattcattgttctgtattatgttgaattcgcctagggatgggctatttttgtgatccattttgagatcagcaagtaatgccagatacaatagg

SEQ ID NO: 148338 - DNA, 1265 bp, Zea Mays
gtaatttatctttacaaagcatgcaataagatagaaactggcaatgaaacttacttgctcagaggaatatgctcaaatggtccagacgtgggaatcgtcccgcacaaatcattacttgaaacatcactgaaataataaggtgggtagattgtaaaattgagtattagtgtggaaagaatagaattctaaacatttgaggctgacgtgtactcacacaactttgagactagatattccagcgagttcccttgggatgggcccagtcaaatgattgccattgagacgcaagaatacaagggacttcaactttccaagggcaggaggtattgtccccgaaatgttgttcttgtacaagtcgaagcttattagattcttcaaattgccaagctcagaagggattgttccttgaatgttattcttataaagttccctatactgaagatgctccagtttcccaagctcaggcaccagatgaccagataagttcaaattaccaagatctctgcgggtgacgcggttgtcgcggtcgcaggtgacgtggaaccaggtgcaggggttgacgagcgtggggtcccagctctgcagaacgccgccggggtccctgaggctccggcgcagcgccgagagcgcgtcgccctccgagttggcccccgcgagcgcgagcacgagcgccagagccagggctcccgccgccttcgcccccgcccccgccatgctggagggcgccggatcggttggtggcgggatctggacgcggacggagggcagcagcgggcgggagaactgaggaagaaggggaacggcagcaggggcagggaggaggacggaacgcgagaggtctcgtctggtctgctttttctctgcctgcccggtccgtcgctggtgctgtggtagtggtaggagttgaaccacggaaccagccacacccacccagtccaccttttgtaccgctccgcgtctcgcgtcgcgtcgtgtcgcgtggctgctgctggcggcgaggctgttggtgttggtgctagtgaaagtggagtggggtggagcagaggccccacctggtggtgcgttgggtacttgggccacgcacgcacgcacgcctgctggaatcgagtggaaagcgagcgagaggggcagtgtcgacagccgttttcgaaaggacacgcagggcatggcggatcaggtcgcaaggtgcagccatggaggaggaggaggaggaagtgcaggtgctgcgcaggggggggggggggggggggggggggggggggggg

SEQ ID NO: 148339 - DNA, 465 bp, Zea Mays
atgcatcgatcatatgaccagagagtagatatcctctggaggcatctgccttggaaagctttagatgtcttctatttgtcccatgtctttttcccggtccctgctgttgggcatatcggagcggggcatgccgtcagccttcttcgcgtggcggtcgcagcacgggacgtcgctggtgggcatcctcttctctgcgttgggcgtccttggcgtagacagggaagtagctcggcgcgacttccgcccgacgtccttgggccaccgcgaggcccgtgtgccctgggactgcctcacatggagctcggccaggttcgcgctctcctatctcgcaccgacacctgggagcagcagggcctgccgtcgcacgtgatgctcagcgggacgatgcggccaaatcctcaccaggttatgcaaggacaagcacagcgtgtggttcaacgcacacgtcgaggtggagcgtcttag

SEQ ID NO: 148340 - DNA, 1879 bp, Zea Mays
aacacaaccggctgctttgctttctcaacccaccagtcctcaatcacctcacaacacagcccctgtcagatcgtcccactgatcgggccgtgcaaaaccccccaaccttttcgacaggaccctgctggcgctacagtcttctcccggaggcagaaactctttgcttccgcctggctcgcgatgcttgtttgggtgcgcgggcctgcggcgaggtgaggcgacggcggcgccgggcggttgcatggtggccgatggagagtagacggggagggtcgggggcggcggcggaagatgcgggcggggcgatgccgagctttgggccaacgcagcacgccattcgcgcaggcgcagatgtgaacagcatgcaaccttctcgagttactgactttggggcacttgcacagtctgctggattccgaatagaagatcttgctaaccttaatgcaaatgccttgttcaatctgaagccaaattctcatacgattgacaacagtcctcttcagtttggaaattacggaaagtctatttctcctcatataaatactacagaagcaacaacagctgcaacaagaattgaccctcagctgtcagcacagcaaacaggagcacaaccaattctggtggcgttaccaactggtaacatggagaattggggagagtcagctatggctggtagccctatgactgacacatctacagatccagacactgatgagaggaaccagatgtttgaacaaggacttgttgctgtccccacagcatctgattctagcgacaaatcaagggacaaactagatcagaagacacttcggcgtcttgcccaaaatcgtgaagctgccaggaaaagccgattacgaaaaaaggcatacatccaaaaccttgagagtagcagactgaaacttactcagttagagcaagagcttcagcgggctcgtcaacagggtatttttatttcgacatcaggagatcaacctcaatcaacaagtggaaatggagctttggcatttgacatggagtatgcacgctggttggaggagcacaataaacatgtaaatgagttgagggctgcagtcaatgcacatgctggtgataatgatcttcgttgtattgttgatagcattatggtacattacgacgaaattttcaagctcaagggtgtggcagctaaagcagatgtttttcatgtgctgtctgggatgtggaagacccctgctgagagatgtttcatgtggttaggtggcttccgatcatctgagcttcttaagttactggcaggtcacctagagcctcttactgatcagcagcttgttggtatatccaacctgcagcagtcctcccaacaagctgaagatgctctttctcaagggatggaagcattgcaacagtcgcttgcagaaactctagcatctggatccttgggccctgctggaccttctggcaatgttgcaaattacatgggacaaatggcgatggctatgggaaaacttggcactcttgagaactttctacgacaggctgataatctacggctgcaaacacttcaacaaatgcaacgcatcttaactacccgacaatcagcacgagccctactcgcaataagtgactacttctctcggctgcgtgctttgagttctctttggcttgcccgtccaagggaataaattcaattaattcataactaggataatttttttttgtactgtttctagtatgcccattagtttcttcagaatgctcatgtgtcagtgagatatttggatcatattgtaggccatcatggtttactggacaagtttgtaacaattttggaggaaaaaaactgagttgtaaatacatctggaataatctaagatcttatgaagggatgatatgggaggat

SEQ ID NO: 148341 - DNA, 913 bp, Zea Mays
actggtgcggcgcggagcgaggacgacgtcaccttctccaccccccgcccctgcccctgtgtgggagtaggtgtagccgcgtaagcggcagcggcgtaggcctcagctcggctcagctgccgcctcgctcgaaccagaggagccaagcagaggaagcgaggcggagatgtcggcggggctggtgaccgacgaggccaccgtggggcggctgtaccggatccggcgcacggtgatgcagatgctgcgtgaccgtggctacctggtggtggaccacgagctcgccaccagccgccgcgacttcctccgcaagttcggcgagtccttccaccgcgaggacctcctcatcaacaagtacaagaagaacgacccatccgaccaggtcagtccaggctcagctcccgatccaatccgaatccactccgccgcgggtcaacggcctcccctgctttgcttcctgccgctcctgatcggatcggacagcacggacgtctgtctgtggatagccgctcgatccagctcccttcgcctttgccgggccttttctcatgcatcggtgcttctctcccgctgattgctggctcttgcttgatcgaacggttcggtgtccgaatcgccatggggtgtcgaagctagctgctccccgtgaaaaacacaagcttcaaatcactgagaacgggacgagcctatcgtcagctaacaaattactagatcattccaaaccagcaagttcagagtcttcagactaaatacaactgtactggactgttgaactgtgaacctaccgcagtgtcactatgcttaatgcttgggcatatatagttcgacgtaggtttatgcttacttgtaagaacgaacaatcttgaaactcgagagacatccaacgactgaactacttacagcctgctaatttgac

SEQ ID NO: 148342 - DNA, 1088 bp, Zea Mays
actggtgcggcgcggagcgaggacgacgtcaccttctccaccccccgcccctgcccctgtgtgggagtaggtgtagccgcgtaagcggcagcggcgtaggcctcagctcggctcagctgccgcctcgctcgaaccagaggagccaagcagaggaagcgaggcggagatgtcggcggggctggtgaccgacgaggccaccgtggggcggctgtaccggatccggcgcacggtgatgcagatgctgcgtgaccgtggctacctggtggtggaccacgagctcgccaccagccgccgcgacttcctccgcaagttcggcgagtccttccaccgcgaggacctcctcatcaacaagtacaagaagaacgacccatccgaccagatatatgtcttcttccccaacgatgacaaggtagggatgaagcacatcaagaagtacgtcgaaatgatgacgcacgagaacgtctccagagctgtgctggttctccagcagaacctaactccgtttgcgaagtcgtttctcatagagctggagccgaagatccatctggaaattttccaggaggccgagatgcttataaacatcaaggaacatgtccttgttcctgagcatcaggtgctcacaaacgaggagaagaagacgcttctggagcggtacaccttgaaggaaactcagcttccaagaatacagatcacggatcctattgctaggtactacggcctgaggcgaggccaggtcgtgaagatcatcaggcccagcgagacggcgggcagatacgttacataccggtacgttgtatgacagaacgtcagaacactgaagaagaagagaaccacagatatgtcaaaaaaaattcaagctacacataccccacgtgcttgcagacatctgtatcgctttgtagcagcagccactggtaacgatcggtggctgatgtgtaagtgtaagtggattgaataagctgagtcagagcatacgagaattctcatgttgtacacttgtgttttatgaaccgcataaacactcacgacgataaaagaagcctgtttttcggagcgacagaagctcctgcgatcaggatttcggattt

SEQ ID NO: 148343 - DNA, 1053 bp, Zea Mays
actggtgcggcgcggagcgaggacgacgtcaccttctccaccccccgcccctgcccctgtgtgggagtaggtgtagccgcgtaagcggcagcggcgtaggcctcagctcggctcagctgccgcctcgctcgaaccagaggagccaagcagaggaagcgaggcggagatgtcggcggggctggtgaccgacgaggccaccgtggggcggctgtaccggatccggcgcacggtgatgcagatgctgcgtgaccgtggctacctggtggtggaccacgagctcgccaccagccgccgcgacttcctccgcaagttcggcgagtccttccaccgcgaggacctcctcatcaacaagtacaagaagaacgacccatccgaccagatatatgtcttcttccccaacgatgacaaggtagggatgaagcacatcaagaagtacgtcgaaatgatgacgcacgagaacgtctccagagctgtgctggttctccagcagaacctaactccgtttgcgaagtcgtttctcatagagctggagccgaagatccatctggaaattttccaggaggccgagatgcttataaacatcaaggaacatgtccttgttcctgagcatcaggtgctcacaaacgaggagaagaagacgcttctggagcggtacaccttgaaggaaactcaggtactacggcctgaggcgaggccaggtcgtgaagatcatcaggcccagcgagacggcgggcagatacgttacataccggtacgttgtatgacagaacgtcagaacactgaagaagaagagaaccacagatatgtcaaaaaaaattcaagctacacataccccacgtgcttgcagacatctgtatcgctttgtagcagcagccactggtaacgatcggtggctgatgtgtaagtgtaagtggattgaataagctgagtcagagcatacgagaattctcatgttgtacacttgtgttttatgaaccgcataaacactcacgacgataaaagaagcctgtttttcggagcgacagaagctcctgcgatcaggatttcggattt

SEQ ID NO: 148344 - DNA, 102 bp, Zea Mays
gatgttgttgcctgcgaaactcaggatgtgaatgtgacagtcttgccagtgattggtctttttggagaaaaccatgttttcgcaaaagaaatgtggaatacc

SEQ ID NO: 148345 - DNA, 2256 bp, Zea Mays
cttccgtcgtctcccttctttccccttcgctcgcttctcttctttgccgtccagtcgtcgtcgtctcctcgtgggctcgcggccgtggcgcattaaggattcgaacccactcgtcaaagagaatccatccgcaaaatcgaaagcaacagcagctgattattaaagccccgctttttcaaaagccgcaagggctatacccctagttgtaaattggcggaaaggaaattcgcctcctcttctccaattgcagctgcagttgcgtgctcgagaggggtgaagaacctagaagccctgccagcgcgcggcgccggcgccttgtttactctgcgacggcacgctgattgcattggtactgttcttctcctgatcaccacacatgacaagggtcatccatgactccggagatgacatgcagaaggaggcacttgatttggtctcatctgacgttaatttccccaagggccatttcccagactataggattggaccaaacaaccaaatcattgatccagaggagacacatgaggctgtacctctcaaggagattgttgcaaaggaaacagcgcagctgctagagcagcacaagcgtctttctgtgcgtgatctcaaggagaaatttgagaagggtctatctggcgcttccaagctttctgaagaggccaagcggcgagaagccgcttcattagacaggcaggttcttcttaagaagctcagagatgttttagacacactgaaaggccgtgtggctggtcgaaacagagacgatgctgaggaagctatctcactggtggaggcactagctgtccagttgacacaacgagaaggggagttaatttatgagaaggctgaagtaaaaaaattggctaacttccttaagcaggctactgaagatgcacgcaaagtggctgaagaggaaagggcccttgcactggctgaaattgaaaaggctagagctgcgatcgaaaaagttgagaaagcatggcgtgtacatgattttgcgtcaagtagcagagagaaggcggaaatagaggaacttaggaaagaggtccgagaggctaggagaataaaaatgctacaccagccaagcaaggtcatggacatggagtttgagcttcaggcactgcggactctcatctcagagaagactcagctatgcaatcagctaaagaaagagcttgccatgatcaagaggttagaagacgatagttctggcctctttgagcttgaaggttctaatacccttggatcacagctttgtattatcccgcgagttgatggtgcttcaaacatcacgaactgtccaattcagtggtatcgtgtaatttctggaggcactagagaactcatatcaggagcaacaaaatttatgtatgccccagaaccgtttgatgttggccgattgttgcaagcagagatagttttgaatgcagacaaaattatagttcagacagatggccctgtagataacgctgcaggacttgaacgttatgtggactcactaatgaaaaggacggatattgagttcaatgtagtagtaacccaaatgaatgggaaggattactcgtcgaattctgttcatgtatttcacattggaaagctgagaataaaacttcgaaaaggatggtccacaaaagcaagagagtcgtattccactacgatgaagttatgcgggagccgtggtggtggtaatgctgcagctagggcagttttctggcaccctaggaaaggctcgtcctacactctagccttcgaaacagacagggacaggaatgctgcgattatgattgctcgcaagttcgcttcgaattgcaatatcgctctcgctggcccaggcgaccaaggcacctgatgaagtgatcacgctatgttttgacggcgacaacagtacataattagggcgtggattggctgattgggtggcgtgcttgtcttagttttgtcgatttgtgcttgtgagggtagaggttgtacacggcgtgaggcattgtttttgtttgcctgccaggcagcactggcgacattcttgaaatatggtgtacgaattgaccactgttcttgtgcgttactgcatgggtaatatttgaaccaaaaagattggtcatgtataagtttttctcaggaagacgacctgttgagagccataagtaatgtacaggcagctagtctcgtggagtcatctattgatgatatttagcgggtctgtgatagaaactaaaaataagaacaagttattacagttttgcttgatttttgaac

SEQ ID NO: 148346 - DNA, 3241 bp, Zea Mays
acgctgattgcattggtactgttcttctcctgatcaccacacatgacaagggtcatccatgactccggagatgacatgcagaaggaggcacttgatttggtctcatctgacgttaatttccccaagggccatttcccagactataggattggaccaaacaaccaaatcattgatccagaggagacacatgaggctgtacctctcaaggagattgttgcaaaggaaacagcgcagctgctagagcagcacaagcgtctttctgtgcgtgatctcaaggagaaatttgagaagggtctatctggcgcttccaagctttctgaagaggccaagcggcgagaagccgcttcattagacaggcaggttcttcttaagaagctcagagatgttttagacacactgaaaggccgtgtggctggtcgaaacagagacgatgctgaggaagctatctcactggtggaggcactagctgtccagttgacacaacgagaaggggagttaatttatgagaaggctgaagtaaaaaaattggctaacttccttaagcaggctactgaagatgcacgcaaagtggctgaagaggaaagggcccttgcactggctgaaattgaaaaggctagagctgcgatcgaaaaagttgagaaagcatggcgtgtacatgattttgcgtcaagtagcagagagaaggcggaaatagaggaacttaggaaagaggtccgagaggctaggagaataaaaatgctacaccagccaagcaaggtcatggacatggagtttgagcttcaggcactgcggactctcatctcagagaagactcagctatgcaatcagctaaagaaagagcttgccatgatcaagaggttagaagacgatagttctggcctctttgagcttgaaggttctaatacccttggatcacagctttgtattatcccgcgagttgatggtgcttcaaacatcacgaactgtccaattcagtggtatcgtgtaatttctggaggcactagagaactcatatcaggagcaacaaaatttatgtatgccccagaaccgtttgatgttggccgattgttgcaagcagagatagttttgaatgcagacaaaattatagttcagacagatggccctgtagataacgctgcaggacttgaacgttatgtggactcactaatgaaaaggacggatattgagttcaatgtagtagtaacccaaatgaatgggaaggattactcgtcgaattctgttcatgtatttcacattggaaagctgagaataaaacttcgaaaaggatggtccacaaaagcaagagagtcgtattccactacgatgaagttatgcgggagccgtggtggtggtaatgctgcagctagggcagttttctggcaccctaggaaaggctcgtcctacactctagccttcgaaacagacagggacaggaatgctgcgattatgattgctcgcaagttcgcttcgaattgcaatatcgctctcgctggcccaggcgaccaagtccatgtcaacatcatcggatccgcggtggctgcgcacgccggcggggaagaggagtcgcgggcggcgcgcctccagtcttttttcgcctccgtgctctccgggctcttcggccaggccgaggccgaggacgaggacgaggacgaagagatgcccacgcgcaaccacaacgctgccgcggctgccgctccgcagcatcaccatcacaaccgaggtggtgctcccgctcttggaaagagcaaggccgtgcccggccgagctgatgccatgaaccggcgagcccccctcggcgatattggcaacctcgtcagcgtccgcccagccgaagggaaacctcagctgcaggagcagatcaatcgccccatcacgcgaagcttcggcgctcagctcgtgaagaacgtgcaggcgaatgccgcaatcaagaatgccgcaatcctacccgcgaggcatgcgccgaggcaggaaaggaaggctcctgccaagcagccgcctcctgaggatgtcatagtactcagctccgactctgaacagagcaggacgcagttggagagcagcgctagctccgtccggtcgaggaagaaggtcatcaacaccctttcttctgtgctctcggctcgctcaaaggctgcctgtggaatcactgataagagacggcaagtagcagtgatcgaagacatcgacaagttggacgtcaacaatgagctcgcagttgtggaatacattgaggacatctacacgttctacaagattgctcagcatgacagacggccatgtgattatatagacacccaagtcgagatcaaccctaagatgagggctatcctggctggttggataattgaagtacaccacaagttcgagctgatgccggaaactctctacttgaccatgtacatcatcgatcagtacctctcgctgcaaccagtcctgcgaagggagctgcagctggtcggtgtttcagctatgctgatcgcctgcaagtacgaggagatttgggccccagaggtgaacgatttcattcttatatcagacagtgcatacagcagggagcagatcctttcgatggagaagggaatcctgaatagcctggagtggaacctcactgtccctacagtatacatgttccttgttcgttttctgaaggcggcagccttgggcaacaaagttgagaaagagatggagaatatggtcttcttcttcgctgaactggcgctgatgcagtacggcttggtgacgcggctgccttcgctggtcgctgcttcggttgtctacgcagccaggctcactctcaagagggctcccctctggaccgacaccctcaagcaccacacgggcttcagagagtcagagacagagctaatcgagtgcacgaagttgctggtcagcgcacactcgtccgccgctgacagcaagctgaggtctgtatacaagaagtattccagtgagcagttcggaggtgtcgcgcttcgcccacccgcagccgcagtggagatcaagtaaacgaagataacttcgtgctagtgtttgttagtataatgtaatggaaggcgagcctgacattcgctagggtctatccgtctatgtttgcttgtcggggtagtcaagaaagtttgaatgcttgaggcagccgtttgtttggtaggctgttctcagagtccaggtgttatctgacttgtgatggcatgttgtgtttcatgtgatggatatcattagaatcctaatctagtacgatatc

SEQ ID NO: 148347 - DNA, 2187 bp, Zea Mays
acgacacgcgccgtaaaagaaagcgttagtccctttccagctcgtaggcgaatcccactcgccgtcgccgcaacggctagtgttgaaaccggctcctcccgactgttgcgatacgaactctttctgagtcccgaccgttggaaccgctcctctcgcctcctcgacccactccgccttgcctggcagcagcagcgctcgcccgcgcgctcgtttatattatatctgtgcgactgtgcctcccctccccgagccatagcctcctcgtcccctcgagaactgtaccatcacgcgccgcctttgattgagcagggactgggagagaggagaagagagggtgaaagggggcaagaaaacgcttcttgttgcctttgtgcttcagcggatccgcggtggctgcgcacgccggcggggaagaggagtcgcgggcggcgcgcctccagtcttttttcgcctccgtgctctccgggctcttcggccaggccgaggccgaggacgaggacgaggacgaagagatgcccacgcgcaaccacaacgctgccgcggctgccgctccgcagcatcaccatcacaaccgaggtggtgctcccgctcttggaaagagcaaggccgtgcccggccgagctgatgccatgaaccggcgagcccccctcggcgatattggcaacctcgtcagcgtccgcccagccgaagggaaacctcagctgcaggagcagatcaatcgccccatcacgcgaagcttcggcgctcagctcgtgaagaacgtgcaggcgaatgccgcaatcaagaatgccgcaatcctacccgcgaggcatgcgccgaggcaggaaaggaaggctcctgccaagcagccgcctcctgaggatgtcatagtactcagctccgactctgaacagagcaggacgcagttggagagcagcgctagctccgtccggtcgaggaagaaggtcatcaacaccctttcttctgtgctctcggctcgctcaaaggctgcctgtggaatcactgataagagacggcaagtagcagtgatcgaagacatcgacaagttggacgtcaacaatgagctcgcagttgtggaatacattgaggacatctacacgttctacaagattgctcagcatgacagacggccatgtgattatatagacacccaagtcgagatcaaccctaagatgagggctatcctggctggttggataattgaagtacaccacaagttcgagctgatgccggaaactctctacttgaccatgtacatcatcgatcagtacctctcgctgcaaccagtcctgcgaagggagctgcagctggtcggtgtttcagctatgctgatcgcctgcaagtacgaggagatttgggccccagaggtgaacgatttcattcttatatcagacagtgcatacagcagggagcagatcctttcgatggagaagggaatcctgaatagcctggagtggaacctcactgtccctacagtatacatgttccttgttcgttttctgaaggcggcagccttgggcaacaaagttgagaaagagatggagaatatggtcttcttcttcgctgaactggcgctgatgcagtacggcttggtgacgcggctgccttcgctggtcgctgcttcggttgtctacgcagccaggctcactctcaagagggctcccctctggaccgacaccctcaagcaccacacgggcttcagagagtcagagacagagctaatcgagtgcacgaagttgctggtcagcgcacactcgtccgccgctgacagcaagctgaggtctgtatacaagaagtattccagtgagcagttcggaggtgtcgcgcttcgcccacccgcagccgcagtggagatcaagtaaacgaagataacttcgtgctagtgtttgttagtataatgtaatggaaggcgagcctgacattcgctagggtctatccgtctatgtttgcttgtcggggtagtcaagaaagtttgaatgcttgaggcagccgtttgtttggtaggctgttctcagagtccaggtgttatctgacttgtgatggcatgttgtgtttcatgtgatggatatcattagaatcctaatctagtacgatatctattcatgaatataaatggtatttattcatttgttcataaatctgaattgaaaatggccctacacttttgaaaactaaaatagaataaaa

SEQ ID NO: 148348 - DNA, 650 bp, Zea Mays
agtacaccacaagttcgagctgatgccggaaactctctacttgaccatgtacatcatcgatcagtacctctcgctggtcgctgcttcggttgtctacgcagccaggctcactctcaagagggctcccctctggaccgacaccctcaagcaccacacgggcttcagagagtcagagacagagctaatcgagtgcacgaagttgctggtcagcgcacactcgtccgccgctgacagcaagctgaggtctgtatacaagaagtattccagtgagcagttcggaggtgtcgcgcttcgcccacccgcagccgcagtggagatcaagtaaacgaagataacttcgtgctagtgtttgttagtataatgtaatggaaggcgagcctgacattcgctagggtctatccgtctatgtttgcttgtcggggtagtcaagaaagtttgaatgcttgaggcagccgtttgtttggtaggctgttctcagagtccaggtgttatctgacttgtgatggcatgttgtgtttcatgtgatggatatcattagaatcctaatctagtacgatatctattcatgaatataaatggtatttattcatttgttcataaatctgaattgaaaatggccctacacttttgaaaactaaaatagaataaaa

SEQ ID NO: 148349 - DNA, 1083 bp, Zea Mays
atgggcaaggaaggggccagcggcggcggcggcgacggcggcatgtcggcgtcggtgatccgcaaggtcctggtctcgtacatgtacgtggcggtgtggatcttcctctccttctccgtgatcgtctacaacaagtacatcctggaccccaagatgtacaactggcccttccccatctccctgaccatggtgcacatggccttctgctcgtccctcgccgtggcgctcgtccgcgtcctccgcgtcgtggacctcccgtcctcgcccgccatgacgtcgcagctctacctctcctccgtggtgcccatcggcgccctctactcgctctcgctctggttctccaactccgcgtacatctacctctccgtctccttcatccagatgctcaaggcgctcatgcccgtcgccgtctactccatcggggtgctcttcaagaaggagaccttcaggtcctccgccatgctcaacatgctctccatctcgttcggcgtcgccatcgccgcgtacggcgaggcccgcttcgacgcgcgcggcgtggccctgcagctcgccgccgtcgccttcgaggccacgcgcctcgtcctcatccagatcctcctcacctccaagggcatctcgctcaaccccatcacctcgctctactacgtcgcgccctgctgcctcgccttcctcgtcgtgccctgggtcttcgtcgagctgcccaggctgcgcgccgtcgccggcggcttccagccggacctcttcgtcttcggcaccaactccctctgcgccttcgcgctcaacctcgccgtcttcctgctcgtcggcaagacgtcggccctcaccatgaacgtcgccggcgtcgtcaaggactggctgctcatcgccttctcctggtccgtcatccgcgacaccgtcacccccgtcaacctcttcggctacgggatcgccttcctcggggtgggatactacaaccacgtcaagctgcaggcgctcaaggccaaggaggcgcagaagaaggcggcgcaggccgacgaggaggccgggtcgctgctgcaggagcgcgactcgcacggcgaccgcaagactgacgaccaggcctag

SEQ ID NO: 148350 - DNA, 824 bp, Zea Mays
ggattaaaaaattcacctccccattccacccgctcaccatccgtctccgacccttaggctgttctgcaattctgctgcccgaccccgaataatggcggcagaggcccaggccgagggacgcgcgctgccccgagcgcctcctccgcccctggcgcgcgggggctcttccgcttccccggagaagcgcgggctcccgatcccggggttcgacggcgtggccgaggaggaggaggagcgggtgcccgagccaaagcggcgccgcgcgtgggtcgccgcgctcgacagtgcggtggcgggctgcggcggggacggggatggcgggtcgttctcgttccagcacgcgccgggctgcttcgtggcgccggaggccacgcccaagttcgggtccttcaacccgccaggggaccaagccgagctagcgggcctagatccgaagcccgtggggcgcgaagctgacgcggaagactcgccggaggcgggcgacgaggtctccgctgcgtcggcgcctggggcggaggccaaagacgagaggttgatggcatgaactgtgacctcgattttgaccagccacggaagctgcctgttagattgcttgtggtagcattacgtttctgctcgggttgaggcttcctagtttgccagttcgcaatcacttgtatttacattgttaacagttgacaagtgcagtccatttgatgctcacgctgtcaaaccaagaaacttcacctggagctattcggctcttgttgacagaaacaagtaaccgtcagtaatgttacgcagaaatcatggttgccatgcttgagaaaacaataagcctttca

SEQ ID NO: 148351 - DNA, 864 bp, Zea Mays
ggattaaaaaattcacctccccattccacccgctcaccatccgtctccgacccttaggctgttctgcaattctgctgcccgaccccgaataatggcggcagaggcccaggccgagggacgcgcgctgccccgagcgcctcctccgcccctggcgcgcgggggctcttccgcttccccggagaagcgcgggctcccgatcccggggttcgacggcgtggccgaggaggaggaggagcgggtgcccgagccaaagcggcgccgcgcgtgggtcgccgcgctcgacagtgcggtggcgggctgcggcggggacggggatggcgggtcgttctcgttccagcacgcgccgggctgcttcgtggcgccggaggccacgcccaagttcgggtccttcaacccgccaggggaccaagccgagctagcgggcctagatccgaagcccgtggggcgcgaagctgacgcggaagactcgccggaggcgggcgacgaggtctccgctgcgtcggcgcctggggcggaggccaaagacgagaggttgatggcatgaactgtgacctcgattttgaccagccacggaagctgcctgttagattgcttgtggtagcattacgtttctgctcgggttgaggcttcctagtttgccagttcgcaatcacttgtatttacattgttaacagttgacaagtgcagtccatttgatgctcacgctgtcaaaccaagaaacttcacctggagctattcggctcttgttgacagaaacaagtaaccgtcagtaatgttacgcagaaatcatggttgccatgcttgagaaaacaataagcctttcacgggatcagattttgtaatgaacaaagctggatttctgtg

SEQ ID NO: 148352 - DNA, 2115 bp, Zea Mays
caactcgctttcgcacggccgcgtcactgttctctctgcctcgtgggcactgggcagcaggcgccaatctggccgagctgatcgagagcccgaggcgacgtgtactggcgcaccaacccaaccggcaaccgcgacagggccggcgggccggcagcaagccccgactccctcgggctctccggccgtcgcggccgacgcttcgcctcgctgcgattcggcggccaaacccacccgaattcgcgtcgatccgagctcgtttcggccaaaagaaaagccgtccgctcctttctctctccccgagttagttattatagctttgctgccgtcgcttaatccagccttccccgtctctcctcttctgccgaacgagacagaccgggttatgtagcctgcctcgttttcggcgagagaggaagaggcggaggagatcagggcaatgggcggggcggaggcgctgggccagccggacggccatgcgaacggggccgtggtggaggagaagctggacttgctgcggcggcagctggggaaggcggacggcgacccgctccggatcgtcggcgtcggggcgggcgcctggggcagcgtcttctgcgcgctgctgcaggacgcgtacggccacctccgcgacaaggcgcaggtccgcatctggcgccgcccgggccgcgccgtcgaccgcgccaccgccgagcacctcttcgacgtcatcaacgcgcgcgaggacgtcctgcgccgcctgatccgccgctgcgcctacctcaagtacgtcgaggcgcgcctcggcgaccgcacgctctacgccgacgagatactcagggacggcttctgcctcaacatgatcgacacgccgctctgcccgctcaaggtcgtcaccaacctgcaggaggccgtctgggacgctgacattgtcgtcaacggcctgccttccaccgacaccagggaggtgttcggggagatcaggaggtactggaaggagaggattactgcccccatcatcatctccctcgccaaaggaattgaggcctcgctggatccactcccacggatcataactcccacgcagatgattagcaatgcaactggagttccatcagagaatattctttatcttggcggacctaatattgcttctgaaatttacaacaaagaatatgcaaatgcacgtatttgtggagctgacaaatggagaaagccccttgcaaagtttttgaggcagcctcattttattgtgtgggataacagtgatctcatcactcatgaagtcatgggtggcttaaaaaatgtctatgctattggtgctggtatggtagctgcactaaccaacgagagtgcaaccagcaaatctgtttactttgcactttgcacatctgagatgatctacatcacacaccttctggaagaagaacctgaaaaacttgctggacccttattagctgacacttatgtcacattgttgaaaggtcgtaatgcatggtatgggcagaagttagctaaaggtgaattgacattagaaatgggtgacagtattaaaggaaaagggaccattcagggtgtctctgcagttgatgcgttttatgagcttcttagtcaggatagcttaagtgtcatgcatccagaagccaacagatctgttgcgccggttgagatgtgcccgatcctaaaagcactacataggattctgatcacgagggaccgtcctgctgattcgattcttcaggctataagagatgagacaatgtatgatccacgcgaaagaattgagatggcacaaggccattcactctaccgaccatctcttcttggtcaaccaaaaggagacgtgaaaacctagaagtcattttctttccctttcctttgttggctaggacttggagcatcttctaagttgctgtatgtttatgcacggtgtgcttgttgttgtaacttgtaacattagtggaatctgagaacatatttatttagcttgttcaatattagtagtcagtcttgtatgatgtagtgtagagcatgattttagggaaaaaaaaactaatccgatctctctctttttgagttaaaacaagatttctatgattttgcttagataaaatcagatttcagtattttcaagtgttc

SEQ ID NO: 148353 - DNA, 2001 bp, Zea Mays
ggccgcgtcactgttctctctgcctcgtgggcactgggcagcaggcgccaatctggccgagctgatcgagagcccgaggcgacgtgtactggcgcaccaacccaaccggcaaccgcgacagggccggcgggccggcagcaagccccgactccctcgggctctccggccgtcgcggccgacgcttcgcctcgctgcgattcggcggccaaacccacccgaattcgcgtcgatccgagctcgtttcggccaaaagaaaagccaccgggttatgtagcctgcctcgttttcggcgagagaggaagaggcggaggagatcagggcaatgggcggggcggaggcgctgggccagccggacggccatgcgaacggggccgtggtggaggagaagctggacttgctgcggcggcagctggggaaggcggacggcgacccgctccggatcgtcggcgtcggggcgggcgcctggggcagcgtcttctgcgcgctgctgcaggacgcgtacggccacctccgcgacaaggcgcaggtccgcatctggcgccgcccgggccgcgccgtcgaccgcgccaccgccgagcacctcttcgacgtcatcaacgcgcgcgaggacgtcctgcgccgcctgatccgccgctgcgcctacctcaagtacgtcgaggcgcgcctcggcgaccgcacgctctacgccgacgagatactcagggacggcttctgcctcaacatgatcgacacgccgctctgcccgctcaaggtcgtcaccaacctgcaggaggccgtctgggacgctgacattgtcgtcaacggcctgccttccaccgacaccagggaggtgttcggggagatcaggaggtactggaaggagaggattactgcccccatcatcatctccctcgccaaaggaattgaggcctcgctggatccactcccacggatcataactcccacgcagatgattagcaatgcaactggagttccatcagagaatattctttatcttggcggacctaatattgcttctgaaatttacaacaaagaatatgcaaatgcacgtatttgtggagctgacaaatggagaaagccccttgcaaagtttttgaggcagcctcattttattgtgtgggataacagtgatctcatcactcatgaagtcatgggtggcttaaaaaatgtctatgctattggtgctggtatggtagctgcactaaccaacgagagtgcaaccagcaaatctgtttactttgcactttgcacatctgagatgatctacatcacacaccttctggaagaagaacctgaaaaacttgctggacccttattagctgacacttatgtcacattgttgaaaggtcgtaatgcatggtatgggcagaagttagctaaaggtgaattgacattagaaatgggtgacagtattaaaggaaaagggaccattcagggtgtctctgcagttgatgcgttttatgagcttcttagtcaggatagcttaagtgtcatgcatccagaagccaacagatctgttgcgccggttgagatgtgcccgatcctaaaagcactacataggattctgatcacgagggaccgtcctgctgattcgattcttcaggctataagagatgagacaatgtatgatccacgcgaaagaattgagatggcacaaggccattcactctaccgaccatctcttcttggtcaaccaaaaggagacgtgaaaacctagaagtcattttctttccctttcctttgttggctaggacttggagcatcttctaagttgctgtatgtttatgcacggtgtgcttgttgttgtaacttgtaacattagtggaatctgagaacatatttatttagcttgttcaatattagtagtcagtcttgtatgatgtagtgtagagcatgattttagggaaaaaaaaactaatccgatctctctctttttgagttaaaacaagatttctatgattttgcttagataaaatcagatttcagtattttcaagtgttc

SEQ ID NO: 148354 - DNA, 1468 bp, Zea Mays
gttcccacttccgactttaaccgggcgcgccgttttctggtgctcggcagtctgcgcggtgcgccttttgggtcgctctgtgagttgcgtccgcgggtgcgctggagtggaggggagggagtctgggcgccttttctctcgtgttccgcctaggggttgggccgtgggaggaccggaggagaggagaggtccgcagcgtccgtccatggcggagaggcggccgatctacagggagcccggcaagccccggcggcggccccgctctcagggcagtgtaaatttgtcagttccgatgtgggaaaagaaattttgcactgatgcttgtgctgtcccctgggctaaactgtgtgaggccaagagattgatgactctgtacaaaagtgtggttgattgggatgactcggctgcattagaagccttcaacgatgcaaaggcgcgcttctgcgctgtatatcatggtcaacattatgatatccctttgcctgacccggacatgtttattgatataatcaacccagatgagtatgttgatcttgaattggtagctgatctggagaagtcacgtcgtcgcgttcccagaaaagatgatggtgttcctgatgtatgggactcttttattttatctgacaagccagttccagttacaggatggggtgacacggataccagcttcactcacggccagcagctctctgtaaattgggactatcagctaaaacactcagttgaagcaaatcataaacatatgtcagcaaattgggattattctatcaagcgacctgctcaaatagtttgtcagcaaaactcagggaaacagcaggatcaaaccagcagccagggggagcagacgaattcttgcattagccactggatcatgaggggtggctcccaggatgcttggaagcatgattccggctggggtcctgcagctattcagaccgatctatgggacaaccgtcaaggtagctatgaggtgcctgacagcacgggtatgccatatggacactggactcactgcagaaggcgaaacgatgactcgggtagaagaaacaccaggaatagaggaggccccattagctcaaagccaatgaaatcgaagtatcaaacggatgaacacaacgttgcaatcaatgggtggtggaactgccgaataaggaatgatgtgtattattacccacatgggcaggctgattataccaagcagtcacacgcaatgtgagtaagaagctaggggggtttcggcattgggagaagacgggaagttcccctctctgccgtccgctactccaacagttgtaatggtggaggtcttcagttagtagatcttctgcaggttgtgtccccctacccctggccccccccttaagctgctgtagtctgtagatagtgctaattattagcctaatgattgctttgtttagcaattggcaatgtacatctgtctcggtaataaagagctaaatattat

SEQ ID NO: 148355 - DNA, 2253 bp, Zea Mays
atgtgcatgtcctcactaatcgctcccacgcggccacgccgcttgtcatttgagaacagcaagcgtctcgaggaagcgtcgacggactacatggacgcggagagagacatcaagcccttcgtcttccctaccgtgcccaccaccattcagcggaacttccacggccccggcgctcgtcagccaacggcacggccattggagcgctgtggcactcgagtgctaccgcaaactcatcgaccttgctctgcgccacggcttagtaggaagttctggggcgccggcgattatgacgcggtggcggggaggtctgcgccacagcctccgagtctacagaatcgcatgtgcgtccacccggaatttctccactccaacgcgacctcgcataaatggccgtttggagtatgtcttactttctttcccattgctatagccgtggcagagttgttggacaatgcggtggatgagatagaaactggtggtgctacaacgatattgctggacaaactcatcgacaaacggaatggatcaccagcattactaattcaagatgatggtggaggcatggatcctgattctttgaggcggtgcatgagctttggattttcagagaaacaatcagggtcttcgattggacaatacggaaatggattcaagactagcacaatgcggctcggggcagatgctattgttttcagtcgctgctgcaccaggagcagtgggcctacacaatccattggtctcctctcttacactttcttggtggaaacaggacatacaaatgttgtagttccaatgcggttggagcgtcatggttcgaaacagttcttctcaaatttgtcggcgttgttgaaatggtccccttttgcaacagaagaagagctgatgcagaatttctgtgacattggtccacatggcaccaagattatagtgttcaatctgtggtccaacgacgatggtaatttggagctcgacttcgacacgaatccggaggatattatgatcagtggagcgccaaacccagaacaaatcagcaactctgttaggagggctaacgagaaccatctggcaaatcgactacgctattctcttagggtctatgcttctgtactgtatctacagctaccagattactttaggatcatgcttcgagggcgagaagttgagcgtcatcacattgcctctgacttgatatatcctgaacgcatcagttatagaccacaaagttgcggaataataagagaggctgaggttcttacaacaattgggttcttaaagggtgccccaaccattagcgtgcacggattcaacatctatcacaaaaaccgccttatcttgccattccatagagtgctgagtaccgcgagcagcaaaggcagaagcgtctctggagtgttggaggtagacttcatcaagcccacccatgacaaacaggactttgagaagtcgcagctgtttcagcggctgatgaaccgcctcaaggagatgactaacgagtactgcaccgatgcttacttcgcctcaaatgtcaccacgcaaatgtctcggtccttccacagggatctttacagtaacaagatcggatacgtgaaagtgccacgcgtgagagcagctcccactcctgctcctccagtgatgctggcaatagagaatggccccgccgaaccatcagaaaggagcgcgcctgctccgacgcaacccttgagatggcagcacggcaactccagctgcgtgaacgcagttccaatcgccatggcgccccctgcttttcacccagctcctgtcaaaacagagactgatgcaccaggagcgcctacgggctacgcctactcctactccccgtcctggccaagcgtgcaagccatgcaaatcgagaagataaaggaggaaccttccatggcggcgcctggcaccgattgggtagagacaagaaaaaggacgaacgacgatggcgccacgacggttgcgttattcaaaaggaggaaggctccgcaggagttggctggcagtggcagcagatccgctactgatcaggtatcccggtacgtgggagagggagagctgaatgaattctgcttcctgaagatggagaaccggatgctccgtggagagtgctcagaatttgagatggcagagaaggaactacgagtcaaggaacagaatctacggctcgagattgagatggcgcaggagcagttcaagagactactgggcgaatacgtctcgttctcatctatgccgacgcgtaaaccatag

SEQ ID NO: 148356 - DNA, 1281 bp, Zea Mays
gcaaatcgccccccaaaccaaccggggccggccgacacaagcagcatcccgtcggcggcgatggacctggcgtcgagcgacctcgcggcgctgggcgcggcggagctgatccgcgtctcggcgtcgatcccgcgcgcggctccgcgcaccttcgcgctgctcaccgcctgcctcgtcttcccgctctccttcgccgtgctcgcgcactccctcttcacccaccccatcctgctccgcatccggggcgccgcccactcggggttcgcgccgtggctcggcctcttcgcgtaccagttcatctacctcatcgtcctcttcaccttctccctcctctccaccgccgccgccgtcttcaccgtcgcctccctctacaccgggaagcccgcgtccgtctcctcctcgctcagcgcgctgcgccccatcctgccccgcctcctccgcaccttcctctgggtctccctcctcatgctcgcctaccacctcgccttcgcgctcgccgtcctcctgctcatcgtcgtcttcgcccccaacgcgtccgagtccgcgccgccctccctcgccttcgtcctcttcctcctcctcgtcgtcctcgtcttcctcgggatccacgtctacatctccgcgctgtggcacctcgccagcgtcgtctccgtgctcgagccgctctgcgggctcgctgccatggccaagagcaggcagctgctccagggccgcaccggcaccgcagccacgcttgtcgtctcctacttcgcggtctgtggcgcgacctcgttgctgttccgtgccgctgtcgttaagggacgcaccgaggaggggagcttcggcctggccttgcctggccggctgcttgtcggcgccgtgctggtgtgcgttcttgtctctgtcaatctgctaggactgctcgtgcagagtgtcttctactacgcctgcaaggccttccacagccagcagattgaccgcactgcattgtatgagcaccttggaggctaccttggggagtacgtgccactcaagagcaatatccagatggagaacctttgagagttggagcataggacaagggtaatcttctcacctctcgttgctacatactagcagttttctatggatctttctcgaaagatgactatggtttacttggagctatatatctggtcttgttgattctaatatcctgtagtagtttagtttagaatctgtacaagtgaaaatgcgcagtatggaaccaatctacgaaatggaacgtagatgcatgaacaaggttgtctttcgtctcacaaa

SEQ ID NO: 148357 - DNA, 113 bp, Zea Mays
aaacaggaacgaaccgctgtagtagtatcgtttgctccctattttgcataatcaagttatttaggtgctcgatccaagatttaataaagcactaggctaggctaatttttaat

SEQ ID NO: 148358 - DNA, 195 bp, Zea Mays
atggcgaaccacagcctccgtgcgttcctggttctcctcgtcgcgaaggtctgcttcgtcatggcgatggtggcgacggcggtgcagggcaggcctgggcctggacccacggccctggagtctgttcccgcgtgctgcttctaccaccccgagtgctgctacgacgctgccggccctccggctgatctagggtga

SEQ ID NO: 148359 - DNA, 916 bp, Zea Mays
ctccaccaggtgtctctcctcttctccgccgtgctgagtctgattctatagctggcctacctgctcactgcttcgagcgcacccaccgcatccaggccttctgggcaccattcctcctccacctcggcggccaggacaccatcaccgcctgccttctccgccgaagacaacgacgtgccctggaagcgccacctgctcagcctcctcgcccaggtacgcaacgggccatgccacatgcacgcacgcacgcttccattttgtaatgatctgcttccaatttttttttcctgtgccctgctccggccggcagacacaaactaacgaggcttcgatcagtcattccgtctcttggctggtacgcacgccaatgactatcagccgtgtatgtctttaccaagtcgcaccctttgtcaccatgctgcatgggcaatctgcggatcagcattgtcacgacgccggagccagggcaccttccttcgtctcacgccagagcaggcctacaaggccatcgagatcgagctgtctgtcatgtacgacagagaaccttcactccaagtccaaggcggcagtgatacgcacctggtacggccgcctgttcagatgtcagagtccgacggtcctcccgaattctacggcctgcgtcctcttcaacgtgcttgacaagggcagatgtttccgaccggaaagcttggcgaagtggaccaatttgatggcccaacataatctcaccaacttctgcctcctggagaaaccaaccatgctcgccaaggttttgagcgtcctcggggcccaaagtacactgggacagttggctgtacatccggcacaacgacgtgtcgtcggagctcaagatagtctgcaggggcctaggccctaggggggagctcaagagtaagacggtgagcatcgtggacgc

SEQ ID NO: 148360 - DNA, 750 bp, Zea Mays
gccatgtccggagcggcgcccgacgccgagcccggccgagagggcttcacctgcagcgcgctgctcatgtgcctctacctgccgggcctcctctccaagaagaaaccggaggaggcgatcagcacgagcccgccgccgacagcacacgcggcaccggcaccggaccagccagccgagcatattcaagagaccccaccgcacgcgccgagccgccgtgccgcgtcgctggacaagtccgagtgcgcgtcgctctgctcccgcagcaacatcgtcttcgacttcgtcgcggaggaatgggaccagggccaggcgtcagcccaggcgatcctccacgggtactgcccgtcgccgtgcttcgacctgcccgtggagctgataagggccggcgaacggtttggcgccgtcgccgctgtcagcgagccgacgaagccggtgccggtcacggcggcgttcgtgtccgtcgacgacggccagcgaggggccactttgaagaaggtggcgtcgtgcctggcgcccggggtcgacgacggcaggagcgagccgcggccgccgcgcctcgcgaggttcttgtctgcgtccggccgtcgttctagcgtgccgcggcctctcgtcatgccttcccgagctgcgccgccgggtcaggcagttggcggggactgcgaactcggtggatcggcggtggtgccagcgtgcaatgcaatgcaatataacgagcgacggcagcctgtcgggacagcgtcgtgtgactga

SEQ ID NO: 148361 - DNA, 675 bp, Zea Mays
gcaggcagcagcagcgcagcgtagcgggcggcgccggcgataacatcgactgagcaagcaggacgtgctgcgcgtatccgattccgatccatgggcaactgcgccgtggcgcagcacgcggtgacctcgtgggcggacgacggcgagtgggacgtgccgtcggcggcggaggacgaggccggaggagcggcggggaccagcgggtgggagtgggacaaggaccgcgcggcggcggaggtgacgatcaggatccccaggaggcagctgcaggagctgatggagaagagggcgcccgccgccggtgggctcctccgcggcctcgcgagccgcggggccgccgcgcaggcgcagctgctgctggcggacgtcatgaacgccgggcacgtctacctccaccgctgcagggcggcgcactggaagcccgcgctgcagagcatcccggaggctgctgtggagtcatgatcacgcgacgcacggtgctgctgccatgccggttttttttttttttttttgcctgcctggttcctctctttgctccttcgcagtttcaggcttgcattcccatcgggacactcaccgtgtcattctttttagtttggatgcattacgcaacgaacggtgtacaaaaacaaaagtagggttaggaaggacgcgtacacactctgtccagatata

SEQ ID NO: 148362 - DNA, 108 bp, Zea Mays
tcaaattacgcacatggttaagctcaatggcaaaatcgaatgtttgaacatgacagaacatccgaattttgaagcgaatgttacctgttccacctagtcaaagaaaac

SEQ ID NO: 148363 - DNA, 1295 bp, Zea Mays
atggcctccaaagaagtgctcgcgatcgtcttcctttcgatcctcctccacggggcagtgacgacgaaggtcgtcgacggcgcgaacgtcatcgaccggtgctggcgcgggcagcccaactgggccgcgaaccggcagcggctggccgcgtgctcggtgggcttcgccgggaagatgcggcagaaccgcgggcccggggtcatcccgtacacggtgacggaccccggggacgacccggtgcggccgcgcccgggcacgctgcggtacggcgcgacggtgctgggcgggaaggtgtggatcaccttccagagggacatgcacatcaggctggcgcagccgctgttcgtgaagagcttcacggccatcgacgggcgcggcgccgacgtgcacatcgccggcggggcgggcatcgtgctgcaccgggtgagcagcgtcatcatccacgggctgcacatccacggctgccgctcgcagccggagggcctggccgtcaggcccggcggcgccgtgcagccggccggcggcatggacggcgacgccatccggctggtgtcgagcgccaaggtgtggatcgaccacaactcgctgtcgcggtgcgaggacgggctgctggacgtgacggtcggatccaccgacgtgaccatctccaacaactggttcttcaaccacgacaaggtcatgctgctcggccacgacgacggccacgccgaggaccgacggatgcgcgtcactgtcgcgttcaaccggttcgggccgagcgtcaaccagcgcatgccgaggattaggcatggctacgctcacgttgtgaacaatgtatacttgggatggaaagactacgccattggaggaagcatgggaccaagcgtcaagagccagggcaacctgttcgtggcctccgccgcagcagataacaagaaggtgacgagaaggatgccggtcgcggggagggaatgggactgggcctccatcggggactccttcctgaacggcgctgtcttcaagcagacgggtagcagggtgcggccgaattacaacaagcaccaggccttcgcggcagccagctccaaccaagtgaagtcgctgaccaaggatgccggcgttctcaggtgctctgtcggctctgcttgctgatcagatggagacaaccaaatgcgcccgccactatcagagtttactcagttatatgtctcctccctctcgctgttgtgtctcgatgcatatcctttgtaaccaggggcgcgcggcacccagcatggtgtggcagaacaacatgaagctctatcagagattccagt

SEQ ID NO: 148364 - DNA, 2150 bp, Zea Mays
aagcaacaaatacatttgcgtagcagacatcgctgcccgtgtctgtgtctccattcacctcgctgctcagtctgacacggaaccgagcggaaaacccaggccagctcccgataagaaatcctcgagtcgaccagtcccccataggccgtagaccagagcagtagaccgccatggcgaaccgcagcaagcagctcgttaccaccgcactgccgctcgcggcggcagcagcagcctcgctcgccgtcgtgctcctgctctgctccacgggctcatcggaagccgacggatacctcgggcgcgtgggtgcgccgtggggccgtaccctcacggtcctcccattcagccccgcggacctgctgcccctcctgccgcggggcgtcgccatggccgcgctccgggcgctccgcggcgtctcggacatcttcccggtgttcgtcggcgccgcgtcggccggcgggtcgggctcggtgcccggcagcggggggacggtgagatggaagggggcctgcttctacgagaacgaggcgtggctggtgttccacaacgagagcgggtccaagtacggcggcggcacactccatatcaagacatccaaagcacacagctggacttgcatagatctgtatgtatttgcaacaccatacagagttacatgggattactactttctggggcgagagcacactcttgatatcaaagaatgggaaagcgaggctgagtatgagtatgtgaaacgtaatggtgtgtccatcttcctcatgccatctggaacaattggcacacttcgagcactctgggatgtcttccctctgttcacaaatactgcatggggtgagaacgcgaatcttgcttttctcgagaagcatatgggtgccacctttgaggaacgcccaaaaccttgggtctcagagttaaatcctgatgatatccagtcgggagatttcttggttttatcgaagattcgcgggcgttggggtggttttgaaacactggagaagtgggttactggcgcttatgctggccatactgcggtttgcctgagggactccgatggaaagctttgggttggggaatctggtaatgaaaatgaacagggagaagatgttattgctatcctgccctgggaggaatggtgggagtttgaagtgacaaaggatgactcaaatcctcagattgcactgcttcctttgcatccagatctgcgggcaaaatttaatgagacagcagcttggatttatgcaaaaagcatggaggggaaaccttatgggtatcacaatatgatatttagctggattgataccatcagtgataattatccaccaccattagatgctcatgtggttgcttctgttatgactgtatggagcaagcttcaaccagagtatgctgctaatatgtggaaagaagcccttaacaaacggcttggaactaagggtcttgacctttctgaaatcatagtggaatcagagaaacgtgggataacatttgacaagttactatctgttcctgagaacgatagctgggtctatgaagatggtcagtcagcatcttgtgtggctttcgtccttatgatgtacaaggaggctggactctttgaccctattaccagctctattgaagttactgaattcacaataaaagatgcttatatcctcaacttttttgaggacaactcgacccgacttccggagtggtgcaacaaggatgacgatgtgaagcttcccttttgccagatcaagggcaagtaccggatggagctgcctggatacaacaccatgaaaccctatgcccacatgaacgagagatgtccatccctgcctccagattacaacaggactaagggctgctagtgctaaccagatatgcgtgtgcattttattcacgctcccttgtagccattgcttcagctgtaaatattatacatttatactagtataatagtactatgggggtatgtactgcttgcccttgagaagcgtgtattgattgtaggcaacttatgtgagacttcctcgaataaggaagaacatgaatcacacaaatgtacagtaaccatgcttgatctttttatcagtgtttacttatgtaacagtaaaaaatgtataatgtatgtgcgcctttggactgagctgattacatgatccccatgc

SEQ ID NO: 148365 - DNA, 661 bp, Zea Mays
atacatttgcgtagcagacatcgctgcccgtgtctgtgtctccattcacctcgctgctcagtctgacacggaaccgagcggaaaacccaggccagctcccgataagaaatcctcgagtcgaccagtcccccataggccgtagaccagagcagtagaccgccatggcgaaccgcagcaagcagctcgttaccaccgcactgccgctcgcggcggcagcagcagcctcgctcgccgtcgtgctcctgctctgctccacgggctcatcggaagccgacggatacctcgggcgcgtgggtgcgccgtggggccgtaccctcacggtcctcccattcagccccgcggacctgctgcccctcctgccgcggggcgtcgccatggccgcgctccgggcgctccgcggcgtctcggacatcttcccggtgttcgtcggcgccgcgtcggccggcgggtcgggctcggtgcccggcagcggggggacggtgagatggaagggggcctgcttctacgagaacgaggcgtggctggtgttccacaacgagagcgggtccaagtacggcggcggcacactccatatcaaggtacgggcctcctcccccgaccgaagctgagcacaattttgcagtaacacggtgtgcttgtgctgccgaacaaattaagatgg

SEQ ID NO: 148366 - DNA, 2054 bp, Zea Mays
ctcggatctggccaattcggatttccatatccccctatcttcgcccgcgagctcctcaccgctcccccgagattagggggggagcgcaagtgcctgaagtaagcctaatcctaaccgccgccgtcatgacggcgcccaagctcaagctcctagctcttcctactctgctggtcctcatcctcctcctcctcctctccgccgcccggcggcgcgtccttctggagacgctcctcctccgcgccccggtcctcccgggcgacctcctcccgctcctgccctggcccgtggcgcagccgctgctccgccgcctcgcgctgcggggccccgccgacctgctcccggctttcgtcggggccgcgcgcgcgccggggtccgacgacgcctacccggtcgccgagtggaagggcgcctgcttctacgagaacagggcgtgggtggagttccgcaacgggaccggcggggggctcggaggcggcgtagtccatgtggagacatccaaagcacacagctggacttgcatagatctgtatgtatttgcaacaccatacagagttacatgggattactactttctggggcgagagcacactcttgatatcaaagaatgggaaagcgaggctgagtatgagtatgtgaaacgtaatggtgtgtccatcttcctcatgccatctggaacaattggcacacttcgagcactctgggatgtcttccctctgttcacaaatactgcatggggtgagaacgcgaatcttgcttttctcgagaagcatatgggtgccacctttgaggaacgcccaaaaccttgggtctcagagttaaatcctgatgatatccagtcgggagatttcttggttttatcgaagattcgcgggcgttggggtggttttgaaacactggagaagtgggttactggcgcttatgctggccatactgcggtttgcctgagggactccgatggaaagctttgggttggggaatctggtaatgaaaatgaacagggagaagatgttattgctatcctgccctgggaggaatggtgggagtttgaagtgacaaaggatgactcaaatcctcagattgcactgcttcctttgcatccagatctgcgggcaaaatttaatgagacagcagcttggatttatgcaaaaagcatggaggggaaaccttatgggtatcacaatatgatatttagctggattgataccatcagtgataattatccaccaccattagatgctcatgtggttgcttctgttatgactgtatggagcaagcttcaaccagagtatgctgctaatatgtggaaagaagcccttaacaaacggcttggaactaagggtcttgacctttctgaaatcatagtggaatcagagaaacgtgggataacatttgacaagttactatctgttcctgagaacgatagctgggtctatgaagatggtcagtcagcatcttgtgtggctttcgtccttatgatgtacaaggaggctggactctttgaccctattaccagctctattgaagttactgaattcacaataaaagatgcttatatcctcaacttttttgaggacaactcgacccgacttccggagtggtgcaacaaggatgacgatgtgaagcttcccttttgccagatcaagggcaagtaccggatggagctgcctggatacaacaccatgaaaccctatgcccacatgaacgagagatgtccatccctgcctccagattacaacaggactaagggctgctagtgctaaccagatatgcgtgtgcattttattcacgctcccttgtagccattgcttcagctgtaaatattatacatttatactagtataatagtactatgggggtatgtactgcttgcccttgagaagcgtgtattgattgtaggcaacttatgtgagacttcctcgaataaggaagaacatgaatcacacaaatgtacagtaaccatgcttgatctttttatcagtgtttacttatgtaacagtaaaaaatgtataatgtatgtgcgcctttggactgagctgattacatgatccccatgc

SEQ ID NO: 148367 - DNA, 1633 bp, Zea Mays
caaacatattagacactccaaactgatcttatattatatactccctccaaaggtttcattaccctgaggcgctcagataggatggatggggtgatctgcttgtacttgggcacctcggagagcagcttatcgtaggtggcctggtcgaagagcacagcgttgttgaccttctccttctgcttacccttgctccacttcttcttcttctgcttcccgcctccggacttggccggcttggacgatggcggcggggccttctccttcttcggggcctgagagaacaatcgaaacggtcagcaacagacggccaggccgcaggtgcgtggagaggagaggcgagattgcgagaaatgcaccatggtggaggtggcgccggaggcgtgaggcgagcgacggagcggaagcggcggcggcgggagtcgatgcgtgtcggggccagcagctggtatatgagttggaggctagggttttgagctggctatgcgtgctctccaccgtctgatccgatcggagggctgggactacgttttcgccttttcggggaggcatatactcgtttacacccccgtgtctgcaaaaattgaagcaccactatgcatgcatgcagagcactccatgttttatttagttattacgtaacactccctaagaaggactggacaagtgctcatgcaaatgttttaggagggtcaaaattaaaacgtaggagtaggtaggacagctttattccgttccaacttccaaggtccgagggctccagaaaccggcaaggggatcgaagcggagagcaagggagcggtcgagcgggtgacatcatcgtcatccagggtttctcaatcggcagcgatggcgaccagggcggcggcgaggttcctgcagcgcaggtttctgtcttccggcggcaaggtcctcagcgaggaggagaaggccgccgagaacgtgtacatcaagaaagtggaacaagagaagctggagaagctcgcacgcaagggccccagctcaggagagcaaccctcgtcaaccacaggctctgcagcaagtgatgtgaaggccgatgctgggccaacggagtcagcatctgcaagtgtgtcgacggacaagaacaagaactatgctgttctggcaggcgcagttgctgccctgggtggcttgggttggtatctattgttaaagcctaagaagtcggaggaggttgtggactgaagagggaggttgtgaatgcggatggtcggccttatatctcaccatggttttactttctgcgcatagacctgcaacttctgaaaataattgttgaaatttactctgcactacttgttcttaggcctgttgcatcacagaaccttgaagtatgcactcgagttgttcagtagttctctccctcgcttggcaggttgcaatgttgagtgatgcttgtagtgctgcctacatcgttgctggataggtttttggatagtttggtttagaaggtgaggcactaaaccaggcctcaatctacttcaattcctttctcccaaacaatctttctgattcaattccaaacgtacgctctactttcctatatagattattacatgtactttcctatatagattattacatgtgttacgtatgttgtgggattcacaatttt

SEQ ID NO: 148368 - DNA, 1687 bp, Zea Mays
caaacatattagacactccaaactgatcttatattatatactccctccaaaggtttcattaccctgaggcgctcagataggatggatggggtgatctgcttgtacttgggcacctcggagagcagcttatcgtaggtggcctggtcgaagagcacagcgttgttgaccttctccttctgcttacccttgctccacttcttcttcttctgcttcccgcctccggacttggccggcttggacgatggcggcggggccttctccttcttcggggcctgagagaacaatcgaaacggtcagcaacagacggccaggccgcaggtgcgtggagaggagaggcgagattgcgagaaatgcaccatggtggaggtggcgccggaggcgtgaggcgagcgacggagcggaagcggcggcggcgggagtcgatgcgtgtcggggccagcagctggtatatgagttggaggctagggttttgagctggctatgcgtgctctccaccgtctgatccgatcggagggctgggactacgttttcgccttttcggggaggcatatactcgtttacacccccgtgtctgcaaaaattgaagcaccactatgcatgcatgcagagcactccatgttttatttagttattacgtaacactccctaagaaggactggacaagtgctcatgcaaatgttttaggagggtcaaaattaaaacgtaggagtaggtaggacagctttattccgttccaacttccaaggtccgagggctccagaaaccggcaaggggatcgaagcggagagcaagggagcggtcgagcgggtgacatcatcgtcatccagggtttctcaatcggcagcgatggcgaccagggcggcggcgaggttcctgcagcgcaggtttctgtcttccggcggcaaggtcctcagcgaggaggagaaggccgccgagaacgtgtacatcaagagtggagtttgaaataggggatgtgataggggatctgctggagatagccttaggaaagtggaacaagagaagctggagaagctcgcacgcaagggccccagctcaggagagcaaccctcgtcaaccacaggctctgcagcaagtgatgtgaaggccgatgctgggccaacggagtcagcatctgcaagtgtgtcgacggacaagaacaagaactatgctgttctggcaggcgcagttgctgccctgggtggcttgggttggtatctattgttaaagcctaagaagtcggaggaggttgtggactgaagagggaggttgtgaatgcggatggtcggccttatatctcaccatggttttactttctgcgcatagacctgcaacttctgaaaataattgttgaaatttactctgcactacttgttcttaggcctgttgcatcacagaaccttgaagtatgcactcgagttgttcagtagttctctccctcgcttggcaggttgcaatgttgagtgatgcttgtagtgctgcctacatcgttgctggataggtttttggatagtttggtttagaaggtgaggcactaaaccaggcctcaatctacttcaattcctttctcccaaacaatctttctgattcaattccaaacgtacgctctactttcctatatagattattacatgtactttcctatatagattattacatgtgttacgtatgttgtgggattcacaatttt

SEQ ID NO: 148369 - DNA, 1056 bp, Zea Mays
aagcctccgcctcgtctcgacgccttacacccagtgccaaccgccgtgccctcaccctctctatctgcgccgtctctcactctctaccgccgccgccgccgccctacgccacgcaaaaagcgccacaagattcgcccctgctgaaaacgcactcgatggcgtccgcgacgggggtttcctcctcggagatggcggtggaccacgcgacggggccgggcgccgtggacaagccgcggttcgatgctctgacgccgaatgagatgagcggcgggaggccccagttccggaaagtgcccgtcccgcagcaccggttcgcgccgctcaagcgatgctggatggaaatctacacacccgtatacgagcatatgaagatcgatatacgcatgaatctcaaggcaaggagggtggagctaaagacaaggcaagacacaccggacgtgagcaaccttcagaaatgtgcggactttgtgcatgcttttatgcttgggttcgacattgctgatgccgtcgccttgctgcgtcttgatgacctgtatgtggactccttcgaaatcaaggacgtgaagaccctgcgaggggagcatctgtcgcgtgctattggccgcctatcagggaaaggaggcaagaccaagtacgccattgagaactctaccaggacccgcatcgttatcgctgatacaaagatccatatacttggatcctttgttaacatcaaggtcgcgcgggattcgctttgcagtctcatcttgggttcacctgctggcaaagtgtattctaagctaagggctgtatcagctaggttggcggaaaggtattaaattagattggttttgcttgtaccatgtaacggttgcagttttgctgacagtatgttttactagcggatttgtgtgctcggggatgctgggagatttaaattggtgtgtacatgtgctcttgtgccaccacaatctatgtggtggggttgattttgatgaaaattagttattttcttatcctaacccactataaatcgataatatatgtattgaggtgggtatgagtgtagccaaacaa

SEQ ID NO: 148370 - DNA, 1008 bp, Zea Mays
ccaaccgccgtgccctcaccctctctatctgcgccgtctctcactctctaccgccgccgccgccgccctacgccacgcaaaaagcgccacaaggtattaccacaatttttcttccctgtatgatgtgcgataccgagttcccaaactctaacctcaaatttgatgcctgtatcatgtccggatgtccctttactagattcgcccctgctgaaaacgcactcgatggcgtccgcgacgggggtttcctcctcggagatggcggtggaccacgcgacggggccgggcgccgtggacaagccgcggttcgatgctctgacgccgaatgagatgagcggcgggaggccccagttccggaaagtgcccgtcccgcagcaccggttcgcgccgctcaagcgatgctggatggaaatctacacacccgtatacgagcatatgaagatcgatatacgcatgaatctcaaggcaaggagggtggagctaaagacaaggcaagacacaccggacgtgagcaaccttcagaaatgtgcggactttgtgcatgcttttatgcttgggttcgacattgctgatgccgtcgccttgctgcgtcttgatgacctgtatgtggactccttcgaaatcaaggacgtgaagaccctgcgaggggagcatctgtcgcgtgctattggccgcctatcagggaaaggaggcaagaccaagtacgccattgagaactctaccaggacccgcatcgttatcgctgatacaaagatccatatacttggatcctttgttaacatcaaggtcgcgcgggattcgctttgcagtctcatcttgggttcacctgctggcaaagtgtattctaagctaagggctgtatcagctaggttggcggaaaggtattaaattagattggttttgcttgtaccatgtaacggttgcagttttgctgacagtatgttttactagcggatttgtgtgctcggggatgctgggagatttaaattggtgtgtacatgtgctcttgtg

SEQ ID NO: 148371 - DNA, 350 bp, Zea Mays
ccaaataatcagacatacccttcactcatcaatggttatgtctcatctgagaaatactttagtgtgctcatactgtggagtgtggacagaagtgaggaggaagggaactgaattcaaccatgagttagttgatgcttctctttatgctttggtgaaaggagggttctttggtatggctatgcaggtgactgaaaaggcacaagaattcaaaatatttgttgataaatagaggtataagcaagcattcatggagacacaagaaaatgaaagtggcatagctaagaaagcgaaacttcaggaaaatggaagccctggtagcttccaaaaattgggctggtatcgatacatga

SEQ ID NO: 148372 - DNA, 1667 bp, Zea Mays
cgcgccgcgatgggcgagaggaggaggcgtgcgagcactgcttccctcgggggtggaggtggagctggaggtagcggtgctgtgcccgcgcggaacgaggaggacaaggccgcggagccgcctccaccgacgttgtggttcgcgctcaagcggtcgctgcactgccgctccgagctgtcggaggtccacgtgccgcgcgccaacaaggcctccggtccagtcgtcgcgagcggtggccacctgtcgtcgatcgtcaccaagcgcgcctccgcgcggtcggggtgctcgcgctccatcgccaacctgcgggacgtcatccacgggagcaagcgccacccggggcagccgcccagctgcagcccgcggtccatcggcagcagcgagttcctcaaccccatcgcgcacgaggtcgtgctcagcaccaactcccgctgcgagctcaagatcaccggcttcgggggctgcggcgggctggcggccgtggggaccggcgccgcggccgcgcacgacgcctgcggcgggggcgacggcggcgtggtgtcgtcgttcgtcggcacgctccgccccggcacgccgggccccgcgtgggccggagccgggcacggcctgccgtgcagcggctccgtgcggggcggggtgcgctgcacgccgccgcggtccccgtgcgtgctgctcgagaggaacggttccgtggtcagcggccaccgcgcgtcctcctgcgaggagaccgcaaaggacggcggcgccggcaagggttccggcgggctcagctgccacaggtgcggcgagcagttcagcaagtgggaggcgctggaggagcaccacctctccaggcatgcagtgacggagctggtggaaggggactcgtcgcggaagatcgtggagatcatctgccggacgagcctgctaaagtcggagagcagctgcgtccggatcgagcgggtgttcaaggtgcacaacacgcagcggacgctgtcccgcttcgaggagtaccgcgaggccgtgaagctgagggcgagcaagctgcccaagaagcacccgcgctgcctcgccgacggcaacgagctgctgcgcttccacggcaccacgctctcgtgcgcgctcggcggcggcggcggcggcggcggcggttcgtcccgcctctgcgcctccgacaagtgcgccgtgtgccgcatcatccggcacggcttctccggcaggaaggagggcaagaccggcgtgggcgtgttcaccacgtccaccagcggccgcgctttcgagtccatcgaggctgccggcgccgacggggctggcgctggcagtgtcagtggcaccacgcgcagggcgctgctggtgtgcagggtgatcgccggccgcgtgcacaagccgctggacaacctcaaggagttcgcggggcagacgatgggcttcgactcgctcgccggcaaggtcggcccctactccaacatcgaggagctgtacctgctgaacccgagggcgctgctcccgtgcttcgtggtcatctgcaaaccctagcctactagtacttgcttaattaaacacaccgtctcattgttagtgctggtaaattaaccaaccaaccattcttctctcctttcgactgctgctgctctgtttgtgtgagtgagctacacgttgggtcggatgtatttgtccgtccatgtttc

SEQ ID NO: 148373 - DNA, 1763 bp, Zea Mays
cggcaaggagaaacagaggtgtcggacttcgccggacaactcagttccgccgatgagcccgtcgtggaccttctcgtccaggtcccaacggaacagcgtcgcgccctcggggaggcacgggtagcgcggtgatccgctgcggtcgacattcgagtcgagcatcgcatcgggatcgagcggcgcatggacggggatagcgcctgaatcatcgtcaaccgcgttggcgctcgcggcgtcctcgtccaacacgtcgaactcctggaggaggtcgtcgtcgtagagtggtgggatgtagcggtcgaataccgagccggcgaggagcgtggtcgacgaaggcaactcgtcggatcccaggaacgcaagcaccgtggcgatctgctgcaggccaacgtcgtttcccgaatccaaggacgccaccttcgcagcgttgtcgtggatgagaggtggaaggcttgcctcgtcgcggtactgaggcacggatccgtcgaaggaggaagcgcgctcgcgtgcggactgctcgccgcagcgaccagccagcgcatcggtcaagcgtgcctccgtgcgcgctagtgcgtccagaatactctgcatcgtggcctccatcgagtcctagtctgataccaaatgttagcgtcggtagtgggaagcttctagaagagagcaggaaggagtgaggattggggaagaagacttggaaacgaggaaagcagggaggaaggcgaggctgagaactagtgtctttgtctgttcattaattgttcgataccttcttacaatactagagagagcttataaactaccacccagtccggccaaatacacgacccattcggacccaaatactcatgtgttgtctcgcctctaccgctccgtcgttgtggcaacgtcagtatcgttggtcagctttttcatcttcagtgctccatcttcagtgctgtgacggagctggtggaaggggactcgtcgcggaagatcgtggagatcatctgccggacgagcctgctaaagtcggagagcagctgcgtccggatcgagcgggtgttcaaggtgcacaacacgcagcggacgctgtcccgcttcgaggagtaccgcgaggccgtgaagctgagggcgagcaagctgcccaagaagcacccgcgctgcctcgccgacggcaacgagctgctgcgcttccacggcaccacgctctcgtgcgcgctcggcggcggcggcggcggcggcggcggttcgtcccgcctctgcgcctccgacaagtgcgccgtgtgccgcatcatccggcacggcttctccggcaggaaggagggcaagaccggcgtgggcgtgttcaccacgtccaccagcggccgcgctttcgagtccatcgaggctgccggcgccgacggggctggcgctggcagtgtcagtggcaccacgcgcagggcgctgctggtgtgcagggtgatcgccggccgcgtgcacaagccgctggacaacctcaaggagttcgcggggcagacgatgggcttcgactcgctcgccggcaaggtcggcccctactccaacatcgaggagctgtacctgctgaacccgagggcgctgctcccgtgcttcgtggtcatctgcaaaccctagcctactagtacttgcttaattaaacacaccgtctcattgttagtgctggtaaattaaccaaccaaccattcttctctcctttcgactgctgctgctctgtttgtgtgagtgagctacacgttgggtcggatgtatttgtccgtccatgtttc

SEQ ID NO: 148374 - DNA, 3433 bp, Zea Mays
acatgcaacagtgttgcagcgtggattgttctcatcaatcatcacatggcaaaaggcgccttgggctccttgtcaagtgtccagataagcagccactccacgccacgctccactgcgacattcaccaccagcctatccctgcaaaacccgtcaaaagcgccagcgtgcatgaaagacgccactcgcggtaccagcgcggtggaggaggcactggcggcccatcgtccgcgccgagcgatggcgtccccgctcctgtgcgtcctcctctacctactccgccaccttacggcctgccacgccgccagggacatcatcacgccggaccgcccgctggcgggcaacgagacgctggtctcgggcggcgagggcaacttcgcgctcggcttcttcaccccgccgggcgccaacagcacctacctcggcgtgtggtacaacaaggtctccctccgcaccgtggtgtgggtggccaaccgcgaggccccgatcgcgggcgccgtcggggacaaccccggcgccacgctctccgtctccgccggcggcacgctcgccattgccgcggggaacaggaccgtcgtgtggtccgtggagccggcgtccaggctggcgagcccggccgcccagatcctggacaacggcaacctggtgctcaaggacggtgccggcggcgtggcgtgggaggggttcgactacccgacggacacgctgctcccggagatgaagctggggatcgactacgtgaaagggaagaacaggacgctgacgtcgtggaaaagcccgtcggacccctccccgggccccgtggccatggtgatggacaccagcggcgacccgcaggtgttcatctggaacggcggcgagaaggtctggcggtccgggccctgggacggcgtccagttcaccggcgtgccggacacggccacctactccggcttcaccttcagcttcgtaaacagcgcgcgggaggtgacgtacagcttccaggtgcacaacgtgtccatcatctcgcacctgggcgtcgtgagcacggggaactacgggctgctgcagcgctcgacgtgggtggaggcggcgcgggcgtggaacctgtactggtacgcccccaaggaccagtgcgacgcggtgtcgccgtgcgggcccaacggcgtgtgcgacaccaacaacatgccggtctgctcctgcctccgcggcttcaccccgaggacccccgccgcgtgggcgctgcgggacggccgcgacgggtgcgtgcggtccacgccgctggactgccgcaacggcaccgacggcttcgtcacggtgcgccacgccaaggtgcccgacacggagcggagcgcggtggactggagcctgacgctggaccagtgccggcaggcgtgcctccgcaactgctcctgcaccgcgtacgccagcgccaacgtcagcggcggcgccggcggtgggcgccgcgccggcgccggctcgggctgcgtcatgtggaccacggggctcaccgacctgcgcgtgtaccccgacttcggccaggacctcttcgtccgcctcgccgccgtggatctcgatgtagaagctaaatcaagggaggcgcgcatcaaaatcgcagtcggcgccagcgtctcggcgctggcgcttcttctagcagtcgctggtctcctcatctggtcatggaggagaaggctaacaagaacagacggatcaagtaaatggagtagctcccgccccaccggccgccggtacgagggaagcagccacggtgacgacctggagctgccaatatttgatgtggggacgattgcagctgccacggatggttactcgatcgaaaacaagcttggcgagggtggatttggaccagtgtacaagggtaagctcgaggacggaatggaaatcgcagtgaagacactctcgaagacgtctgcacaagggcttgacgagttcaagaacgaggtcttgttgatagccaagctccagcatcgcaatcttgtccggcttcttgggtgcagcgtcagtgggcaagaaaggatgcttgtttacgagtacatggcaaacaagagcctggactatttcctgtttgagaaggacaacgttgtgctcgattggcaagtgcggtaccgtataatagaaggcattactcgaggtctactctacctccaccaggactcgagatacaggatcatccacagagatctgaaggcagctaatgtccttctggacaaggagatgacgcccaaaatctcagactttggcatggcgaggatatttggcaacgaagagacagaaatcaatacccgaaaagtggtcggcacgtacggttatatgtctccggagtatgcaatggatgggatcttctctgtcaagtcggacgtattcagctatggagtattgctgctggaaatcgtcagcggtaggaggaacagaggagtgtattcctattcaaacaaccaaagccttctaggccatgcatggagcttgtggaacgaggagaagagcatagagctagcagacgaaagaatgaatgggtcgttcaactcggacgaagtgcacaagtgcatcagagttgggctcttgtgcgtgcaggagaacccagacgaccgtccgctgatgtctcaggtgcttctgatgctggctagtaccgatgccacctcactgccaactcctaagcagcctggcttcgccgctaggagagttctgatggaaacagacacgtcgtcaaccaagccagactgcagcatatttgacagtgcaacaattaccatgcttgaaggtcgatagtagtagttatgagttatgactgaaatgaaacttaaactgctagggaaatgtgtattgtagagtaaatttggcggcctcttcagtatcttgtgtgcttaagcagcagaaaattatatgaatattgaataatagcaggcagcagctggtagaaactttgttgcttttagcgccgattagtgatacataatgctggacactaagaaatttataaattttgctaatgttacaaagcacttctgttatgatcggacgccactgcaggcggcggacaacaggagaggcggcggcgaccaacaataagtatgcagattagtctgataaggattagaagatttaggagataaggtttgttagaaagaaaagagaagatctcatacagattagttagatgatgtttaggagattaaagacataaagtttgttagagagaaaagagaggatcttagatttaatctctttagaaaaggactagaaggaagtataaatacttgtaaacaccactctatatgaattaagtagaaaattatttagcatatttcctctaaaggaagcacgtgtgttttcctctcctaaaaccgttgatcagtgtccaccgaagaatagcgcggtcacagtgcccttgtccgccgcgcccccgtcctgcgccagcccgcaatgccctatccctaca

SEQ ID NO: 148375 - DNA, 1919 bp, Zea Mays
caaaaaagttagcaaaccattggatcgtattcctctagatgtagaagctaaatcaagggaggcgcgcatcaaaatcgcagtcggcgccagcgtctcggcgctggcgcttcttctagcagtcgctggtctcctcatctggtcatggaggagaaggctaacaagaacagacggatcaagtaaatggagtagctcccgccccaccggccgccggtacgagggaagcagccacggtgacgacctggagctgccaatatttgatgtggggacgattgcagctgccacggatggttactcgatcgaaaacaagcttggcgagggtggatttggaccagtgtacaagggtaagctcgaggacggaatggaaatcgcagtgaagacactctcgaagacgtctgcacaagggcttgacgagttcaagaacgaggtcttgttgatagccaagctccagcatcgcaatcttgtccggcttcttgggtgcagcgtcagtgggcaagaaaggatgcttgtttacgagtacatggcaaacaagagcctggactatttcctgtttgagaaggacaacgttgtgctcgattggcaagtgcggtaccgtataatagaaggcattactcgaggtctactctacctccaccaggactcgagatacaggatcatccacagagatctgaaggcagctaatgtccttctggacaaggagatgacgcccaaaatctcagactttggcatggcgaggatatttggcaacgaagagacagaaatcaatacccgaaaagtggtcggcacgtacggttatatgtctccggagtatgcaatggatgggatcttctctgtcaagtcggacgtattcagctatggagtattgctgctggaaatcgtcagcggtaggaggaacagaggagtgtattcctattcaaacaaccaaagccttctaggccatgcatggagcttgtggaacgaggagaagagcatagagctagcagacgaaagaatgaatgggtcgttcaactcggacgaagtgcacaagtgcatcagagttgggctcttgtgcgtgcaggagaacccagacgaccgtccgctgatgtctcaggtgcttctgatgctggctagtaccgatgccacctcactgccaactcctaagcagcctggcttcgccgctaggagagttctgatggaaacagacacgtcgtcaaccaagccagactgcagcatatttgacagtgcaacaattaccatgcttgaaggtcgatagtagtagttatgagttatgactgaaatgaaacttaaactgctagggaaatgtgtattgtagagtaaatttggcggcctcttcagtatcttgtgtgcttaagcagcagaaaattatatgaatattgaataatagcaggcagcagctggtagaaactttgttgcttttagcgccgattagtgatacataatgctggacactaagaaatttataaattttgctaatgttacaaagcacttctgttatgatcggacgccactgcaggcggcggacaacaggagaggcggcggcgaccaacaataagtatgcagattagtctgataaggattagaagatttaggagataaggtttgttagaaagaaaagagaagatctcatacagattagttagatgatgtttaggagattaaagacataaagtttgttagagagaaaagagaggatcttagatttaatctctttagaaaaggactagaaggaagtataaatacttgtaaacaccactctatatgaattaagtagaaaattatttagcatatttcctctaaaggaagcacgtgtgttttcctctcctaaaaccgttgatcagtgtccaccgaagaatagcgcggtcacagtgcccttgtccgccgcgcccccgtcctgcgccagcccgcaatgccctatccctaca

SEQ ID NO: 148376 - DNA, 1455 bp, Zea Mays
tcgggagtacccgcactttcgcccatttcatttcaaaccaaaaccctctctccccttgccttccaccacaccccggatcaaatcgccacagaaaattcccagaaaaataacaagcacttgttcatcatcaaagtaaacgccgcagaaccctagcgaggcgttcctccaacgactcacctcccacccactcacccaccccatggcgaccaacccctccaacggcgccggcgccgacgtccctgcagccccggcggcggtgcggctctcggttgcggcgcaggcggccgcgatccagccctcttccccgcgcttcttcttctcctcgcttgccgggaccaacccggcctccccgcaccgtcgcatcgccatcgccgttgatctctccgacgagtccgccttcgcagtcaagtgggccgtgcagaactacctccgccccggggacgccgtcgtgctgctccacgtgcgccccacttccgtcctctacggcgccgactggggctccatcccggtctccgtcgctgacgaggacgacgctgccgaggacgccgccgccgccgccgagggcggtccctcggaggaggagctgcagaagaaacgggaggaggactacgacgccttcacctccaccaaggcgcaggacctcgcgcaaccgctggtcgacgcccagatccccttcaagatccacgtcgtcaaggaccacgacatgaaggagcgcctctgcctcgaggctgagcgccttggcctctccgccatgatcatggggagccgcggtttcggggcctcccggaaaggcagcaaggggcggcttgggagtgttagtgattactgcgtacaccactgtgtatgtcctgttgtggttgttcgctaccctgatgatgctgcagatgccggtggagatgcatcaggggtgacagatgagttgcacactgtaccagaggacgaacctgtttatcacgatgcacctgaggtgcagaaagaaaactgaggcaacggccacatgcggctgaagaacgaaggaaaacatgaggcttgtagtgaggcaatcctgtgtatctggaagatgggaccggctgtttatctttgcttctatatatcaactgcgtatcatgatcagctgtctgcttcccgttgagtttcatatcggagtcgtagatcatctgagttttttgttggtttgcttgtgagatgtagagtactcttcccgtgggtcgaaggtgtcttgcagatgcttgaactttatgttgtcgaacggtagttatctacacggtatcatcttctctgttaagcctgtttagtgtttactgtattggatactcgttaatagagaaccgctacttttcagtatttattatcacctgtatattggataaaattattgcttagcttatgcttgcatgctccatatttgtattctgtaagacttgtttgagaagaattcgtttgaaataaatttgt

SEQ ID NO: 148377 - DNA, 934 bp, Zea Mays
ggagacggcgaggtgagttctggagacttggagaggcattccgcatcggtatcccgtatccagcaaaggcggcaagccatggaggagggtctggtatcagtggacaagttctccggtggcagccaggcgtactttctgacgcacctccaccaggaccacacccgtggcctcggcgcggtgggcgggtggcgccacggcccgctctactgctctccgaccacggcgcgcctcctccccatccgcttcccgggaatcgacgcctccctcctccgcccgctagccccaggtgcctctgcctccatctatctgttctctccctcctcgggccagtccctctcccttcacgtcactgccatccccgcgctgcactgccccggtacgtcacccctcccgattcgcttgcttcactcttttctctgcacggctggcacggaactactgatcttcggctggtttttgcggctgacgcgtgcctccgcgcaggatcgctcatgtacctcttccgcggagacctcgggtgcatgctgtacacgggggacttccggtgggagctcggatgcgatgaagcgcggcgagcgaagcaggatttactggacgcgcttgacggggataccattgatgtgctctatctggacaacacctactgccacccatcgctcaacttccctccacgccccgtcgtcgctgagcaggtgattgatattattcggtcacatcctgatcacgaagttatcattggtgttgacactcttggaaaagaagacctcttgcttcatatatctagagcactacaaacgaagatctgggtttggccccagcgcctacagacaatacacctcctagggattgatgaaaaccgtgatatttttaccacacagaccagtttgactaggatccgtgctgttccaaggtacagtgtcaccattgataatct

SEQ ID NO: 148378 - DNA, 1387 bp, Zea Mays
cgaggtgagttctggagacttggagaggcattccgcatcggtatcccgtatccagcaaaggcggcaagccatggaggagggtctggtatcagtggacaagttctccggtggcagccaggcgtactttctgacgcacctccaccaggaccacacccgtggcctcggcgcggtgggcgggtggcgccacggcccgctctactgctctccgaccacggcgcgcctcctccccatccgcttcccgggaatcgacgcctccctcctccgcccgctagccccaggtgcctctgcctccatctatctgttctctccctcctcgggccagtccctctcccttcacgtcactgccatccccgcgctgcactgccccggatcgctcatgtacctcttccgcggagacctcgggtgcatgctgtacacgggggacttccggtgggagctcggatgcgatgaagcgcggcgagcgaagcaggatttactggacgcgcttgacggggataccattgatgtgctctatctggacaacacctactgccacccatcgctcaacttccctccacgccccgtcgtcgctgagcaggtgattgatattattcggtcacatcctgatcacgaagttatcattggtgttgacactcttggaaaagaagacctcttgcttcatatatctagagcactacaaacgaagatctgggtttggccccagcgcctacagacaatacacctcctagggattgatgaaaaccgtgatatttttaccacacagaccagtttgactaggatccgtgctgttccaaggtacagtgtcaccattgataatcttgaagctctaaacacagtgtgccccactatagggatcttgccttctgctattccttgtctttggaagagcagtgaaggaaaggccaaatccaagggtaggtcatcagtgaagtctatcaggagctcagggagaggtgaaggcctaacagaaatggattgcaatcccttgtcaccaccaaagctgtttgacaaggattcttatactttgccatattctgagcatgcttgcttttcagagctggaggattttatgcatacagtgcgtccatggacagtcagcggcatcgtcagctcatcgttctgctatgtgaatccccgtcaccacttcagacatctttgtttagacaataatgttaatgatgaaactgacatgacgcccataaaaaataagggcagggataatgataagctgacaccaaagagatggcgaaatggttctgtgactccaaaagaaaggaaggtcaggatctccagttcaagtctgtatagaagcaaagttacaatgaaacggaaggagtgctgcggtgcaaggatcaatgacactgaagaacacattggtgttacctga

SEQ ID NO: 148379 - DNA, 1595 bp, Zea Mays
cgaggtgagttctggagacttggagaggcattccgcatcggtatcccgtatccagcaaaggcggcaagccatggaggagggtctggtatcagtggacaagttctccggtggcagccaggcgtactttctgacgcacctccaccaggaccacacccgtggcctcggcgcggtgggcgggtggcgccacggcccgctctactgctctccgaccacggcgcgcctcctccccatccgcttcccgggaatcgacgcctccctcctccgcccgctagccccaggatcgctcatgtacctcttccgcggagacctcgggtgcatgctgtacacgggggacttccggtgggagctcggatgcgatgaagcgcggcgagcgaagcaggatttactggacgcgcttgacggggataccattgatgtgctctatctggacaacacctactgccacccatcgctcaacttccctccacgccccgtcgtcgctgagcaggtgattgatattattcggtcacatcctgatcacgaagttatcattggtgttgacactcttggaaaagaagacctcttgcttcatatatctagagcactacaaacgaagatctgggtttggccccagcgcctacagacaatacacctcctagggattgatgaaaaccgtgatatttttaccacacagaccagtttgactaggatccgtgctgttccaaggtacagtgtcaccattgataatcttgaagctctaaacacagtgtgccccactatagggatcttgccttctgctattccttgtctttggaagagcagtgaaggaaaggccaaatccaagggtaggtcatcagtgaagtctatcaggagctcagggagagagctggaggattttatgcatacagtgcgtccatggacagtcagcggcatcgtcagctcatcgttctgctatgtgaatccccgtcaccacttcagacatctttgtttagacaataatgttaatgatgaaactgacatgacgcccataaaaaataagggcagggataatgataagctgacaccaaagagatggcgaaatggttctgtgactccaaaagaaaggaaggtcaggatctccagttcaagtctgtatagaagcaaagttacaatgaaacggaaggagtgctgcggtgcaaggatcaatgacactgaagaacacattggtgttacctgactttgtcccttcccaagtaatgttatgttttcttttgtaaagattaacaactggatggtggaagtcttgaagcaatgagatgggatatgttgttccaagccaaacttcagcttgctggtattcaggaatctggacgtggtctttggctctctgctatctgttccttagaaccctgtcgtgctagcaagatgcattttggtccagattcggtttgggttgtacagtgctgttccttttgcgatggtgttcagcatttagattgctgaaacctttgatgcatgttagttgctactgatacatctatttgtagtattttcatatgtctgacatgatgtcgctactgcttcaaatatatataatgttcttacaacaatgcactatttggtccattgtttgtccc

SEQ ID NO: 148380 - DNA, 1409 bp, Zea Mays
gttctggagacttggagaggcattccgcatcggtatcccgtatccagcaaaggcggcaagccatggaggagggtctggtatcagtggacaagttctccggtggcagccaggcgtactttctgacgcacctccaccaggaccacacccgtggcctcggcgcggtgggcgggtggcgccacggcccgctctactgctctccgaccacggcgcgcctcctccccatccgcttcccgggaatcgacgcctccctcctccgcccgctagccccaggtgcctctgcctccatctatctgttctctccctcctcgggccagtccctctcccttcacgtcactgccatccccgcgctgcactgccccggatcgctcatgtacctcttccgcggagacctcgggtgcatgctgtacacgggggacttccggtgggagctcggatgcgatgaagcgcggcgagcgaagcaggatttactggacgcgcttgacggggataccattgatgtgctctatctggacaacacctactgccacccatcgctcaacttccctccacgccccgtcgtcgctgagcaggtgattgatattattcggtcacatcctgatcacgaagttatcattggtgttgacactcttggaaaagaagacctcttgcttcatatatctagagcactacaaacgaagagctggaggattttatgcatacagtgcgtccatggacagtcagcggcatcgtcagctcatcgttctgctatgtgaatccccgtcaccacttcagacatctttgtttagacaataatgttaatgatgaaactgacatgacgcccataaaaaataagggcagggataatgataagctgacaccaaagagatggcgaaatggttctgtgactccaaaagaaaggaaggtcaggatctccagttcaagtctgtatagaagcaaagttacaatgaaacggaaggagtgctgcggtgcaaggatcaatgacactgaagaacacattggtgttacctgactttgtcccttcccaagtaatgttatgttttcttttgtaaagattaacaactggatggtggaagtcttgaagcaatgagatgggatatgttgttccaagccaaacttcagcttgctggtattcaggaatctggacgtggtctttggctctctgctatctgttccttagaaccctgtcgtgctagcaagatgcattttggtccagattcggtttgggttgtacagtgctgttccttttgcgatggtgttcagcatttagattgctgaaacctttgatgcatgttagttgctactgatacatctatttgtagtattttcatatgtctgacatgatgtcgctactgcttcaaatatatataatgttcttacaacaatgcactatttggtccattgtttgtccc

SEQ ID NO: 148381 - DNA, 697 bp, Zea Mays
accaagccagccagccatccatcccagcataggagtattatttagctcgatcgagctcaatctactatctgcttaattacacggtttctgatcgtcgcaattaatggcgaaccacggcgccgcggccctcctcctgatcgcgtccgtcctcgcggcggccgccctctccggggcggacgcgcggctgacggtgcggcccaacatggcggcggccctccgcgcggccaacgggaggttcgccgtgcgccccggcacgaaggtcaccctgcggcgcgacgcgcatggagggtacgtggtggacgtcgcggcggtgccggacctgacgtgcaacacggtgcgcggggtgcaggcggacgagacgtgcttctccgtggcgcagggcgcggggctgacccaggaccagttcctcgccttcaaccccaacatcaactgcgccaagatcttcgtcggccagtgggtctgcctcgacgctactacatccgcctgagtgctatgccatgcctgcctcttgctagctttgaataaggagctcgatcggtttcgttctctatctgtcgttgcgttcctctccagatcgtcggctggttttgtctgccgcaacttttctgtattcccgcagtgatagatgcgtgtcgtcgtcaatctgtccctgcaacatattttccatgaaaaaaaaactggtttcatcggtttcttg

SEQ ID NO: 148382 - DNA, 1879 bp, Zea Mays
aatcaatgcagatttgaacgtccttccaaggacgcccaaacgatctctgtaccacgcctgcacggctgcacctaccccacttggaactgtggacgcctgctcatcttttttcatcagtagtaccatatgtcatcagtcagtcagtcatgcatgccgcgtgcgtgaccatttctgtgcgttcgcaggtggtcgtctgggtggcgacgccggcgatgatacgcgccgggtcgacgaccgacgtcatgatcgtgctgctgacggcgttcctgctggagtacctgcccaagatctaccacgccgtccgcgtcctgcgccggatgcagggcgtctccggctacctcttcggcaccatctggtgggggatcgcgctcaacctcatggcctacttcgtcgccgctcacgcggtgggcgcgtgctggtacctgctcggcgcgcagcgggccaccaagtgcctcagggagcagtgcgcccaggccgggagcgggtgcgcgccctgggcgctggcgtgcgcggagccgctctactacggcgccaccgccagcagcgtgggggcggccaggctcgcctgggccggcaacgccacggccaggggcacgtgcctcgacagcgccgacaactaccagtacggggcctaccagtggactgtcatgctggtggccaaccccagcagggtcgagagggttctgctccccatcttctgggggctaatgactctcagcacctttgggaatctggagagcacgacggagtggctggagatcgtgttcaacatcgtcaccatcaccggcgggctgattctcgtgacgatgctcatagggaacatcaaggtgttcctgaacgcgacgacgtcgaagaagcaggcgatgcacacgcggctgcgcagcgtggagctgtggatgaagcgcaaggacctgcccaggagctaccggcaccgggtgcgccagtacgagcggcagcggtgggcggccacgcgcggcgtcgacgagtgccgcatcgtccgtgaccttccggaggggctccgccgggacatcaagtaccacctctgcctcggcctcgtgcgccaggtgccgctgttccaacacatggacgacctggtgctcgagaacatctgcgacagggtcaagtccctcattttccccaaaggagaagttattgtcagagaaggggacccagtgaagaggatgctgttcatcgtgcgtggccacctgcagagcagccaggtgctccgcaacggcgccgagagctgctgcatgctggggccgggcaacttcagcggcgacgagctcctgtcgtggtgcctgcgccggccgttcctggagcggctgccggggtcgtcttccacgctggccacgctggagagcacggaggccttcgggctggacgccgcggacgtcaagtacgtcacgcagcacttccggtacaccttcaccaacgacaaggtgcggcgcagcgcgcgctactactcgcccgggtggcgcacgtgggcggccgtggcggtgcagctcgcgtggcgccgctacaagcaccgcaagacgctcgcgtcgctgtcgttcatccgcccgcgccgcccgctctcgcggtgctcgtcgctcggcgaggagaagctacgcctctataccgcgctgctcacgtcgcccaagcccaaccaggacgacctgctgtgactgagatgcatgcctgcagtctgaacaacgcgcgtctgttcagcggagttgaagcaaaatgcagcgagatggaagaagctggttctctatagtaaaagtgcatgtcagaaagaacttgttgggccgtgtccctccgtgtatgtagagcccaagagacatgtatatttatgtgtactgtatcagctgcaatagagagggttctagagacttcaaaa

SEQ ID NO: 148383 - DNA, 1843 bp, Zea Mays
tcttttttcatcagtagtaccatatgtcatcagtcagtcagtcatgcatgccgcgtgcgtgaccatttctgtgcgttcgcaggtggtcgtctgggtggcgacgccggcgatgatacgcgccgggtcgacgaccgacgtcatgatcgtgctgctgacggcgttcctgctggagtacctgcccaagatctaccacgccgtccgcgtcctgcgccggatgcagggcgtctccggctacctcttcggcaccatctggtgggggatcgcgctcaacctcatggcctacttcgtcgccgctcacgcggtgggcgcgtgctggtacctgctcggcgcgcagcgggccaccaagtgcctcagggagcagtgcgcccaggccgggagcgggtgcgcgccctgggcgctggcgtgcgcggagccgctctactacggcgccaccgccagcagcgtgggggcggccaggctcgcctgggccggcaacgccacggccaggggcacgtgcctcgacagcgccgacaactaccagtacggggcctaccagtggactgtcatgctggtggccaaccccagcagggtcgagagggttctgctccccatcttctgggggctaatgactctcagcacctttgggaatctggagagcacgacggagtggctggagatcgtgttcaacatcgtcaccatcaccggcgggctgattctcgtgacgatgctcatagggaacatcaaggtgttcctgaacgcgacgacgtcgaagaagcaggcgatgcacacgcggctgcgcagcgtggagctgtggatgaagcgcaaggacctgcccaggagctaccggcaccgggtgcgccagtacgagcggcagcggtgggcggccacgcgcggcgtcgacgagtgccgcatcgtccgtgaccttccggaggggctccgccgggacatcaagtaccacctctgcctcggcctcgtgcgccaggtacgcgcgccgtgtcgtggcgtgacgtcccgtagcgcccgtaactgatgcggccgcacaaccgcgtgcaggtgccgctgttccaacacatggacgacctggtgctcgagaacatctgcgacagggtcaagtccctcattttccccaaaggagaagttattgtcagagaaggggacccagtgaagaggatgctgttcatcgtgcgtggccacctgcagagcagccaggtgctccgcaacggcgccgagagctgctgcatgctggggccgggcaacttcagcggcgacgagctcctgtcgtggtgcctgcgccggccgttcctggagcggctgccggggtcgtcttccacgctggccacgctggagagcacggaggccttcgggctggacgccgcggacgtcaagtacgtcacgcagcacttccggtacaccttcaccaacgacaaggtgcggcgcagcgcgcgctactactcgcccgggtggcgcacgtgggcggccgtggcggtgcagctcgcgtggcgccgctacaagcaccgcaagacgctcgcgtcgctgtcgttcatccgcccgcgccgcccgctctcgcggtgctcgtcgctcggcgaggagaagctacgcctctataccgcgctgctcacgtcgcccaagcccaaccaggacgacctgctgtgactgagatgcatgcctgcagtctgaacaacgcgcgtctgttcagcggagttgaagcaaaatgcagcgagatggaagaagctggttctctatagtaaaagtgcatgtcagaaagaacttgttgggccgtgtccctccgtgtatgtagagcccaagagacatgtatatttatgtgtactgtatcagctgcaatagagagggttctagagacttc

SEQ ID NO: 148384 - DNA, 230 bp, Zea Mays
acggtgctgcaggtgagatcttttcgattatcaccaggccagcttgttgagaaccccaaaaggggtggcatcgtagacgtggacggcgaggtaattgctagaggagaaggaacgtacggcaaaaaccaacatcaagatgtgatggcttatggccgtcctattcagctgacggtgcaccaagcatacagtgccaccgttggccttagatgcattccaactgccgccctttc

SEQ ID NO: 148385 - DNA, 1387 bp, Zea Mays
ctacctctctctccctttcgaaaccccatctacgtcggcgtagggcgcgggggttgcagttggagaggaagcattcgtgaagactctggggcaacttatctagatcggcagatccgtatttctgggcgatacacctccgaagtagttgttggcttgttgcagaaagcagccgctttttgcgtcgctcctgcggtcctgactcctcctgtctggctgtctcacagtgcccctgttgtgctcgtcgttcttggccacggccctcggctcaggaaaaaggggcaactttgcatttatcctttggccccttagaagattgcccgcgtcaagatttggtgggaacccaattcgctgctattccctgtggaaaggcgacgctttggttcctgtttccccacagctcccaactctatatattccaatctcttcttcacctactcgcctaactttcgtttacttcgatccgccagtttgtgcttcccacccctcggcattcggctgtttgttactttgttgctttgtcgcaagtcagatcaatctgtggccgggagttgttgtgttttgtcctgttcttgcccggagacggagacgggagacatggccgcggcgaacggagctgccgctgtcggtgccggtgcggggctgttcagcgaggaggagctgcgggaggtgagcggggtgcgctggggggaggacttcgtcgaggtgacgtgcggatgcaccagccaccgctacggcgacgccgtaggccgccttcgcgtctgcgcgtctggcgacctggagatcaactgcgagtgtacgcccggctgccgcgaagacaagctgacaccggctgcctttgagaagcactctggaaaggagacagccggaaagtggaggaactccgtctgggtgatggttgagggagaaaaggtacccctgtccaagacggttctgctcaaatactactacctggcgcgcaaatccggcagcggcggcggcggcggctgcggtcgtcgtaacggacggccgtctcaccgcgacgagttcgtctgctgcacgagatgtggcaagggtaggaggtttcggctccggtcaaaagaagagtgccgtgcttaccatgacgcccttgccaaagctcactggacatgcacggatttgacaaatgatggggtcagctgtgccgacgaagaggagcgcgcaagccgcaaggtcctgcggggctgctcccgctcaccgtcgtgcaccggctgcatgaagtgcgtctgcttcgggtgcgagacctgccgcttcgtggactgcgactgccagacctgcgtcgacttctaccgcaactcaaaggaataggatagggtttaggaactgtaggccaggccgctattctattttaaacattttccattagcctagt

SEQ ID NO: 148386 - DNA, 1252 bp, Zea Mays
cgccacgctcccatcgccatcacccaggaccccgtgctgcctggtgcctggactccaagaacccgccctcgaggcccaagcaccgcttctccccctctcactgtcactggtcaccacacgccacactacagagtccagatcacggccaccgcgatggctgcttagtgcgtccgcggcagctggagcctggagaatgggctgctgcttcagcaagaacccgaggacccgcccggtggccggagcctctgacttcccgcgccggtgcggacccgaggaccgcgacccgccgtcgccggaggaggaaacggtcaaggaggtactctcggagacaccgagcgctaaacccagggccaatcccaagctcgtcggcaatgccgtcgtccccgccgccgcggacgagcggaaagcggagaaggcgaagaagcaggacagcgtcgatgccgcggcgagcgacgtcggcagctgcgtgtcgctctcactcgccaccgacgaacggtccgaggcggcgtcggagtcgtcggtcgcgaccagctcggtggccgggccggagcgctcaccaaggacgaaaccggccaggaggcgcccagcgtccgccgatctggggccagcgcggcgcgagcgggaccgcgccgtcgcggcctcctacggcgtccgctcccgcagcgcgcgggcgtcggcgtccccgccgccgaggcacgtgccgcgggaccgctccgtccggcgttcgccctcgccggcagcgaagcggcgggcgtcgtctgagccccgccgcgccgccagcccaactccgtccgtgcagcgcaagccgcctgtcccggcaaggccggccggccgcgtctcgccgcggcggcgggcacaagaagcgactcctcgtcccgcctccccgccgccgccctcgcagctggaagacgacgccgtcaccgcggcaagtgagcccagcatccccgacggtagcgacggtggcgatgttcaaagtggccgcggcggcgacgacggcaaagagtcgttggagaacccgctggtgtcattggaatgtttcatctttctgtagcgctgtgctgatgcagtgatgttgtaatctcgcgctattttccttcgaaagtattgggctaatgatccactttagatgctggtgctgtggtgcagcagtcagttgtttgtactgccgctgccaccttccgttaactttgtcaagtccaagagaaatgccagtagcttttggcttttcagaggcgtgcggtgtgcctgacaa

SEQ ID NO: 148387 - DNA, 828 bp, Zea Mays
atggacatgaacagcttcaacaagatgggggatgatcccatctgcagcgggtggaagggcacagacggcatgagaggcggcaaaatggacggcaatgagatggccgacaggtcacagcttgatggaaattacagcgcattcgtagagaaagagcatgtgttcagcctgcgcgctacgattccagcctatacggctattcttgaagatggcagtaaggttgagatggaggataaaaaccatgttttgtccgtgaatgttgtgggtggctacttagtcaaacatttaatggatgatcttgcaagcagaacaatttgggggagttgtcaagagccgatatgctggttttgggatcgagaaaataagtatctacaacagattatcacaaacactgatcttgacaacgcatttcagatgtattggacaagttatgtaaggagcatatcagtggaggagaaattgttggggaaattgccatgcaccaaaaatgcaagtcaatatgtgggggatgtcgatcctactatgatgcatgatgctgatatttttgttggtgatgagcaattttatgctgccttgggatttagggatggcgctcaggaagctcctcaggtggaacaggttactgaggctgagatctgtgaggcgcaaattttagttgatgatgatgcagattgtgaagctagcatagtggttgacaaggaaaatcccaaaattgaggttggtgaatcttttcctacaatgcatgattttaggatggctttgagacaacacgcaatcaagaaagagtttgaggtacacaatgtggtgactaataagacaagatttcaatga

SEQ ID NO: 148388 - DNA, 878 bp, Zea Mays
cagatattcttgatctttcttgcattgagtccaacatgggtgagagaacggaaagcattcgcaatggcaacagtagttgccttactatgcaggaagaacatttacaggcagaatgtggaggatatcctcatccagattatatatctgttgatatgattgatgaaagatcactgcatgatttgccacatgggttatcacaaaacaatgagcagtatgagatggagcagctcccacagaatatatgtgaaagtggttctatgcagatggcctctccggaccaatattgttcctctccggaccaatattgtgatgatacatctttatcagatttttacatggatgtatcctccccagagtcaatatcctgtgagcagaaccagcctgaagatatttttttcaagagcgagtctagcactgactcttctccagtaccctctagcagaaattccaccacagaggatgctgataaatacttaggtcaaccatcaaaacagttgctggactccaaaatcgttcctttcagcaaccaacacacgtttaagaacatggaatatcaaaaacctctggtattggataaacaatatgcatatagaagcaacaactcttctattcacaattcaacaaaaggttgcttcagtagagatggggacatggtttctgatttatgtgtgctagagggtaataggaatcctgctcctgctcacctatggccttatcaggggaagttccatcataattttcagcaacctgtgtatggtaattccatcattcctgcatttggtggtacgagatacaaaccacacgatgaaagaaccactctgcgccttgcattgcaggtcatatagttctctaggctgttgcttgcttatttttccatg

SEQ ID NO: 148389 - DNA, 306 bp, Zea Mays
cttcggacagaaaattgccttgtcatggatggtgaaaaaggagactagtatctcgctttgctatggtggaattcttgcagatgatcaggtataactagctaacaccttccatgttgccaagacaaatggtcaattgtgtcttaaggtcatttggtatttttcagggccttggtaaaactgtatcagccatatcactgattcttactgagcgcccaccagttccacagtcatctactaagaacgagccatgtgaagctgtaactctagatgaagacgatgactgtattggacctcattcggaaaagc

SEQ ID NO: 148390 - DNA, 685 bp, Zea Mays
gaagtaccaaaacaatcaaatcctgatagtgatggagaagagaaagggaagcctgacccgtatggtgcacctgtgtcctcttcagggagcaaaaagagaaaggcatcctcttctaagaaaacaaaaaataaaagtgttgcagagagttgcttgcctgaaaaacctcttgcgaaagttgcttggtttagggttattcttgatgaagcacaaagcattaagaactaccgaactcaggttgccagggcttgctggggtttgcgagccaaaagaagatggtgtttgtctgggacacctatacagaatgctgttgaggatctctatagctacttcagatttctcagatacaatcccttacgctgtatataagcagttttgcactctgataaagattccaatcagtaggaacccaaataacggttacaagaagcttcaagctgttttaaagccggtaatgctacgccggactaaagcaaccatgcttgatggggaaccgatcatatccttaccacccaagactgtttcacttaagacggtggacttcactagcgaggagcgtggtttttataacactttagaagttgaatcacgagaacagttcaaggaatatgcagctgctggtactgtaaagcaaaattatgtcaacattctattgatgcttttgcggctaagacaggcatgcgatcac

SEQ ID NO: 148391 - DNA, 928 bp, Zea Mays
ctcaatggactagaatgctagacttgcttgaagtccatttgaaagcttctcatgtgacatatcgaaggcttgatggaacaatgtctgttgctgcacgggataaagctgtgaacgacttcaatatggttccagaggttactgttatgatcatgtcactcaaagctgcaagtcttggcttgaatatggttgctgcctgccacgtacttatgctagatctttggtggaacccaaccaccgaggaccaagctgtggatagggcacaccgtattggtcaaaaacggcctgtcacggtatcaagattaactataaaagacaccgtggaagatcgtattcttgctctccaggagaaaaagcgggagatggttgcttctgcgtttggagaagacaaatctggttcccgacagactcgattgaccgttgaagacctgaattatctgtttatggtgtagaatcgctcctgagagtgaacagttttgctcattggattggtgttagacgtggtagataaaaatgttctctgaaaaaataacaaaatgctttcatttagggattattagttcttgtagcttgtacagttgcagagatttaggggttgctagcgacgtgtcttccaattctttttgcacgggaagcagtaagatgctgaactaggtgaattcttcagatagctgctatagtgcctgttaacttggggggtgttttctatgtactaatttctagttcctccattttattttcttttacttcctaaattgtcaaacacagatactaaaatagagataatctctcttttagtctatgtgtttagcaatttaggggctaaaagggactaaaatagagagactaaagacaccccttaatgtaatgaagataacgacaatgaagctcagatgatatatatgtacatattcttctcgtatccgataaa

SEQ ID NO: 148392 - DNA, 201 bp, Zea Mays
atgtgccatccaggactgccgccgagctgcgcggtcaggcggcgggagcagcaggcggccgtggcaccgtcgctctcaccgtctgtgccatgggcgcgccacggtgcgccgcaccactactgcgtgtgctcgcccacggcgcaccggggctcgttcaggtgccgatggcaccgcagcggcttcgagtgggggcgccggcgg

SEQ ID NO: 148393 - DNA, 702 bp, Zea Mays
aatggcaaatattcgactaaagccgcttatgaggggctcttcattggatctgtggagtttgaaccttttgagcggatttggaaaacttgggctccgcccaaatgtcgattcttcttgtggctggtggctcacaagaaatgttggacaacagatagacttgagaagcgggggctggatcatccggaaaaatgtcctttatgtgagcaggaaagggagacaattgaccatctgcttgtgaattgtgttttctcaagagaatgttggttcctccttctaaggcaattcgggctgcagggtttggccccccaaccaacggatattaattttatggagtggtggcatcaaacaaatgaagctattcaggggtccttcagagatggcctaaactccctcattatgctgggcgcttggattttgtggaatcaccggaacagatgcatctttgatggcctttcccctaatgttgctaatttcctaatccatgtgggggatgagcgccgtctgtgggagactgccggggccaaggggttgacatcccttgttgcctccctatctcatgtagcctagagtttttatagatgagtcagtctatgctagtttcgttcaggccgccgtaaggcgtcagttgtaccccggtctatgttagaccttgtttatttcttcctttaatataatgatacgcagctctcctgcgtgttcgag

SEQ ID NO: 148394 - DNA, 214 bp, Zea Mays
ggcatttcgaggagagaccggcacggattccatgtgcacatgttgggtggattttgtagtagtacgattagagaagaagacaacaggaatgcgattagtttatgcaccacaggcgaagtattctgagtcttcttagctctgttgtaaaacgcgagttgtagttttatcagaagttaagctgctttgtgttttaatctatatttagaaaaaaaaa

SEQ ID NO: 148395 - DNA, 147 bp, Zea Mays
tatgaatcatatcgagctccagatgtgaaagaagagaaaaacccagctgctggtccaggaaggatgtcacttagcttaccaacctgtccatcagagagcatggaaccccatctcgatgtgttctccccaaatttggtccccacctga

SEQ ID NO: 148396 - DNA, 1105 bp, Zea Mays
tttcggaccgacaattcaaccccacacgcagtgataaccccgcggttaataaaagaatccctccccacactctctcccgtctctcgcctcgcctccccgacgcgagcgagcccaacacgcaaaacggaacgcttcctcctcgcacctccgccttatccgatggcgtccctcaccaccaccacgtcctcaccggccgccctcccggcggctaccaccgccacagcggcatcgtccatatccccccacgccggttcgaagcggccgctcctcgcgggggacgacgcgccctggcgcgccaccgctgccaccgccgcggggcaggggatccgacccgtcccgcgcatccaccatgcccccgtcctcagcgttgctacgcaggaagactacgccgcctacgccctcgacatcatgaagcatccgaatccgataggggaggggctggccatggaggcgttcgcggaagccgccgggccggagtgcatcgtgcccggacagcaagcgcctctaaggctcatggggctcaaggtttggccccttgatatagatatgaagttcctagagccatttggacgggagttacattcaatgaaaaaattcatggacaagtcgtgcagtgttatggactcatctatggctaacaagtaggcacatggcacatcagttccgaccaatacggctattgttgtatccatctgcttgctgaagttacaagacccgaaaaataggaaattggaagaagggccatggagggaagccgcagtgttttgcatatattgcccaccttcacctgagagaagatatcgggcgcgcaataatgattagtgagcagtcctgtatggagcctgggtgcagcctctgccagtattaagtgatctacgtgttatacattttttatgttcatgaaacattgatccattgataaaatatatcgtcaggtggcaaggggtcgatttgggggaaaatatcttacgcaatttatttatttgttctgttgctaggtcaatttatttatttgttctcgggcgcaggccaccacaacatgtggtgacgaagtctgaattccttcgagttagcatttgtgaagcgtgtttggttctgcgggaaa

SEQ ID NO: 148397 - DNA, 890 bp, Zea Mays
catatcaggcaggcaatgaactagccattgtgccagttcaggtcctcgtagagttaatggcgatggagaggggatttggctcttgttgggcccatggtctctggtctcgtagcttttgaatagtatatgcagatgcaaatgcaatagctgtttttgctaactaattgtgcaatggttgaattgtttagatcatacatgttcttatgctctgctcaaaaagagaagatagtttcattgttacaatggtagttactctgtactgatttgaagaccgaattgtcgattctcttcttcattattgccttccttagaaagttacttgggtaaatatcatgcttcctattctaatattactgttctgcaatctgcacttccgcagttcatggacaagtcgtgcagtgttatggactcatctatggctaacaagtaggcacatggcacatcagttccgaccaatacggctattgttgtatccatctgcttgctgaagttacaagacccgaaaaataggaaattggaagaagggccatggagggaagccgcagtgttttgcatatattgcccaccttcacctgagagaagatatcgggcgcgcaataatgattagtgagcagtcctgtatggagcctgggtgcagcctctgccagtattaagtgatctacgtgttatacattttttatgttcatgaaacattgatccattgataaaatatatcgtcaggtggcaaggggtcgatttgggggaaaatatcttacgcaatttatttatttgttctgttgctaggtcaatttatttatttgttctcgggcgcaggccaccacaacatgtggtgacgaagtctgaattccttcgagttagcatttgtgaagcgtgtttggttctgcgggaaa

SEQ ID NO: 148398 - DNA, 1132 bp, Zea Mays
gcgtcggcgccgccctcctcccttctcttctgctgctgatggaactggatcctcgcctctacgagaacgtctctgtcagcgacaatgatgtccgaaacatagttctatcttatcttatgcacaactgttttaaagagacggcagaggcattcctatctagcaccgggttgaatttacctgtcgactatagtgtggatgtggataagcgtaaaggtatttatttgcagcaatttttaattttgtgctagaagggaatgcccttaaagccatagagctgacagaagaaatggcacctaacttgctagagaatgatatggatctacattttgatcttcttagtctccacttcattgagctagttcgctccaaaaaattcacagaagctcttgactttggccagaaaaaattgacatcatttcagaaggttaccaagtatattgagaaactagaggactttatggccctcctggcttatgaagagccggagaagtcacctatgtttcatctactaagcccagagcacaggcagaatgttgcagagggcttgaatcgggctgtccttgcacatgctaatcttccagcatattcatcgttggagagggtggtccagcaagcgactgtggttagacaatacctacagcaggaagttggcaaggattcttacccaccattttctttgaaggcctttctgagcaagtaaatgtgcaaatggtcacttcttcagaacagggtaaccacctctccaggccatcatgtacatgtacccttgtggagtgcatacacgatgaagtagtttatacagttgaggtgttgttgacaccacttatacagttgcaatggtgttgtactttgaaaaggagggtgctgtatgctgtctgcttccttgatttacattctgttttacttgtctctctgccttagacatggcgaaagcatgtatgtatgacctgttgagctattctgtgcgttcgttcggtgaactcagttcgagtcggtttgtaattggtcttttttattactaccgccatgtgcagaggctaaaggtccgaactctggatgcgtaagcgtaacgggttattctgtccatggtactcctatttgcgatttccatatataagggactgtgaattct

SEQ ID NO: 148399 - DNA, 1091 bp, Zea Mays
gcgtcggcgccgccctcctcccttctcttctgctgctgatggaactggatcctcgcctctacgagaacgtctctgtcagcgacaatgatgtccgaaacatagttctatcttatcttatgcacaactgttttaaagagacggcagaggcattcctatctagcaccgggttgaatttacctgtcgactatagtgtggatgtggataagcgtaaagcaatttttaattttgtgctagaagggaatgcccttaaagccatagagctgacagaagaaatggcacctaacttgctagagaatgatatggatctacattttgatcttcttagtctccacttcattgagctagttcgctccaaaaaattcacagaagctcttgactttggccagaaaaaattgacatcatttcagaaggttaccaagtatattgagaaactagaggactttatggccctcctggcttatgaagagccggagaagtcacctatgtttcatctactaagcccagagcacaggcagaatgttgcagagggcttgaatcgggctgtccttgcacatgctaatcttccagcatattcatcgttggagagggtggtccagcaagcgactgtggttagacaatacctacagcaggaagttggcaaggcctttctgagcaagtaaatgtgcaaatggtcacttcttcagaacagggtaaccacctctccaggccatcatgtacatgtacccttgtggagtgcatacacgatgaagtagtttatacagttgaggtgttgttgacaccacttatacagttgcaatggtgttgtactttgaaaaggagggtgctgtatgctgtctgcttccttgatttacattctgttttacttgtctctctgccttagacatggcgaaagcatgtatgtatgacctgttgagctattctgtgcgttcgttcggtgaactcagttcgagtcggtttgtaattggtcttttttattactaccgccatgtgcagaggctaaaggtccgaactctggatgcgtaagcgtaacgggttattctgtccatggtactcctatttgcgatttccatatataagggactgtgaattct

SEQ ID NO: 148400 - DNA, 1118 bp, Zea Mays
gcgtcggcgccgccctcctcccttctcttctgctgctgatggaactggatcctcgcctctacgagaacgtctctgtcagcgacaatgatgtccgaaacatagttctatcttatcttatgcacaactgttttaaagagacggcagaggcattcctatctagcaccgggttgaatttacctgtcgactatagtgtggatgtggataagcgtaaagcaatttttaattttgtgctagaagggaatgcccttaaagccatagagctgacagaagaaatggcacctaacttgctagagaatgatatggatctacattttgatcttcttagtctccacttcattgagctagttcgctccaaaaaattcacagaagctcttgactttggccagaaaaaattgacatcatttcagaaggttaccaagtatattgagaaactagaggactttatggccctcctggcttatgaagagccggagaagtcacctatgtttcatctactaagcccagagcacaggcagaatgttgcagagggcttgaatcgggctgtccttgcacatgctaatcttccagcatattcatcgttggagagggtggtccagcaagcgactgtggttagacaatacctacagcaggaagttggcaaggattcttacccaccattttctttgaaggcctttctgagcaagtaaatgtgcaaatggtcacttcttcagaacagggtaaccacctctccaggccatcatgtacatgtacccttgtggagtgcatacacgatgaagtagtttatacagttgaggtgttgttgacaccacttatacagttgcaatggtgttgtactttgaaaaggagggtgctgtatgctgtctgcttccttgatttacattctgttttacttgtctctctgccttagacatggcgaaagcatgtatgtatgacctgttgagctattctgtgcgttcgttcggtgaactcagttcgagtcggtttgtaattggtcttttttattactaccgccatgtgcagaggctaaaggtccgaactctggatgcgtaagcgtaacgggttattctgtccatggtactcctatttgcgatttccatatataagggactgtgaattct

SEQ ID NO: 148401 - DNA, 1805 bp, Zea Mays
atgacgcggtgcctcatgttcatgccgccgctgttcctcgtgtcctccctcatctccaccgtggggctgccggtggagccgcccgcggagctcctgcagctcggaggcgacgtcagcggcgggcgcctcagcgtggacgcgtccgacatcgcggaggcgtcgcgggacttcgggggcctctcccgcgccgagcccatggcggtgttccagccgcgcgcggccggcgacgtggcgggcctggtccgcgccgcgttcgggtcggcgcgcgggttccgcgtgtcggcgcggggccacggccactccatcagcggccaggcgcaggcgcccggcggcgtggtcgtggacatgggccacggcggcgccgtggcgcgggcgcttcccgtgcactcgccggcgctgggcgggcactacgtggacgtctggggcggcgagctgtgggtggacgtgctcaactggacgctgtcgcacggcgggctcgcgccgcggtcgtggacggactacctgtacctgtccgtgggcggcaccctctccaacgccggcatcagcgggcaggcgttccaccacgggccccagatcagcaatgtctacgagctcgacgtcgtcacagggaagggagaggtggtgacctgctcggagacggagaacccggacctattcttcggcgtgctgggcgggctgggccagttcggcatcatcacaagggcgcgcatcgccctggaacgtgctccccaaagggttcggtggatccgggcgctctactccaacttcaccgagttcacggcggaccaggagcgcctcatctccctgggcagccgccggttcgactacgtggagggcttcgtcgtcgccgccgagggcctcatcaacaactggaggtcctccttcttctcgccgcagaacccggtgaagctcagctcgctcaagcaccactccggcgtcctctactgcctcgaggtcaccaagaactacgacgacgccaccgccgggtcggtcgagcaggatgtggatgcgctgttgggcgagctgaacttcatcccaggcacggtgttcacgacggacctgccgtacgtggacttcctggaccgcgtgcacaaggcggagctgaagctgcgcgccaaggggatgtgggaggtgccgcacccgtggctgaacctcttcgtgccggcgtcccgcatcgccgacttcgaccgcggcgtcttccgtggcgtgctggggggcggcaccgccggcgccggcggtcccatcctcatctaccccatgaacaagcacaggtgggacccgaggagctcggtggtgaccccggacgaggacgtgttctacctggtggcgttcctgcggtcggcgctgccgggcgcgccggagagcctggaggcgctggcgcggcagaaccggcgggtcctcgacttctgcgcggaggccggcatcggcgccaagcagtacctgcccaaccacaaggcgccgggcgagtgggcggagcacttcggcgccgcgcggtgggagcggttcgccaggctcaaggcccagttcgacccgcgggccatcctggccgccgggcagggcatcttccggccgccgggctcgccgccgctcgtcgccgactcgtgatcggtactactgactgattattaggcgcgttttagtgtaggtagtagctacagcggtaaccgtacaggattatttagtttgttgttattattattattattatttagctccggttgatgtacaaatgtgggtcacgtgattctgtacatgtacatgggagtcaaatatgaatgtcgccaagtgatgctcttctcttctaa

SEQ ID NO: 148402 - DNA, 1886 bp, Zea Mays
atggcgcacctcgcacacgactacttcacgcttccacccgaggacaagcctccgcttggcccctacatcgacacggctccatctccagcttcctttatcccgcagttggtggagaccgaggaagaggatgaggttttccacacctcgcccagcacgtgttcgacgatggtccccaaccgcaatgccaccaccagcatgctcgccatggtcgaggccacctggagcgacgagtacgcgctcgtggacctgcagtccgtctgctactactccacgtccaacgccaagcccaagctcaatagcctcgacgaggtcgatccgaagctgctcaagaccttcattccgctcaccgagcagaagcacctctccgacgtcgccatcgacgccgtcatcgactccgcctccatcaccatcacccaccacgaggcgctgatggccaagggtgtcatcttctactccatccccaagtccatatgtgagtacctagaccttgtcaggcactacctgagcagcatcatactgccaggcgacaactactatgccgccctcaattcagcggtgttcagcgacgggtccttttgctttgttcccaaggacacagtctgtcccatggaaatctcgacctactttaggatcaacaacaaggagaccaaccagttcgagaggactctgattgtggccgatgagagatgcacctatgtcttgctcattgagttgtgtcttcaggttgatggtgttaaagttcggcttccgccttggccaccacctatttggacattctggctgccttatgatgtgtgcagcgacatgcattacaactgcagatactgtgcctggttcaagggaatccattgcttgtctctgcgccttactgatgaatactcctcaaatgcccatgcacggaaccggttactgccaccagaactattatttttgctttctgatacgaaaacacattctcggatgcattcgtggattgctctcaattccatttctcctgcaatagtcgaagtaaaaggtgttcaccagtttgactggctgacaagagaaaatgtctcagtactagaggctatagaaagccaccgaggagtcagaaatcactatcatggagatcatggaacagtttctagtgcaagtgacaatcctagtattattgcttcaaagttgcaggctcgaagccccaaatacatatccctgctgaaccatcttcgcatttatttgcctgagcttttccccaacctcaacaaggtggtcttcctcgatgatgacattgttgttcagcttgacttgtcttccctttgggctatcaatcttgaagggaaggtaaatgaagctgtggaaacatgcagaagggaagacaactgggtgatgtgtaagcgtttcaggacatatttcaacttctcacatcccatgatagctcagagacttgaccctgatgtatgtgattgggcatatggtacgaatatatttgatctggcagtttggaggaagaaaaacatcagggatacataccatttatggttgaacaagaatctaaaatctggtcttacagtctagaaatttggtactttatcaccaacccttcatacttgtctacactatcaacggcttgggggcaagccgtatttcaagcggtggggaatgtcagcaacacactacaagagaagggaagcaagcaagtgcaagcgcaggttcagtcggcgaccttggagcacaaagacggcaaccagcgagagacgcgtatgaggcgcaagaatgtgagtgtccggtccggagtgggccgtgtaatgggctgcgcagtgtcgcgtgtatgggctgaacccaagaaataagtagccggaagtctgtacgagacagttggacttgaacagaaaggaaaaacacacgca

SEQ ID NO: 148403 - DNA, 570 bp, Zea Mays
gaatgtacgccctgtaatatattctatctgaaagtaaatatcaatttccgatgttgaagctggcaagatactggaatcgtctaccagacattttgcttgcttgctaacttgttctgcattcggcaagccattgaccctgaagattccacagaaatgggttgctacatgagcaaagggtcagctgatatcttggactcaacactgtgagcaacctcttcatcttttgtcctgtctagaggtgccctatatgtcgtccataagttcttccgagttcattccgggagagccaacagtattatcacggcttgtggaatcagaatcagaatcagaagttacaacaatatttgcatgatcttgacttccagactcgctctcaaaagcctcatcctgttggcttgcgactgggtgagagatcaatataatagaacttgattggtcttggacgctagattctatggcagattcaccatgatgatcaagactctcagaagtctgctctataaagttatcctcttcatcagagtatgatatcccaaatttctgcgcatgagtcaatcctggacaaactcc

SEQ ID NO: 148404 - DNA, 1648 bp, Zea Mays
cacttgacgcttggacagatcagccagaaacgctgcggggagccggggactggacatgggcatgatctccgtgccgtgcgcaagtgcgtaaccaatccggcgataacaccacgcttaaaaaaatccgacaacgcgtaggagcctccaggcgcaccgcgcaaagcgagccagcggcgacggcgtgactcgtgaaaatcctccgtagtacggtagtaggcagtaggcaccaagccaccaaccgaaaccaacagcccaggccaccacgccttcccttcgcctcgcggctcggcgtcccgtcccgtccatcctatactgcccccaaatccggcttgccccgcaaaccaagagctccagttcctcttcctcacgcctctctgccgtgccaatccctcctccggccctctctccaggctccagcgctttctccggcgacgccggcaccgcccctagacgcttcccgaatctagggttcccctttcccgccgttgacggccggatcgcgcccagaggagcctccgcgatgctgccgtgcgcgaggtcggtgcttcggaggagggggctggcgtcttccctcctgcggatgtgcggcggggagggccagtgctccaccggcacgggggagctggtcgccaatgccaggtgtgcgagcacgctggccgcgctcggcggcggcgggcgcgtgctcgagcgcggcgccaggtgggcatatctgcagaccggcgtgattggcgcggggcggatggcgcgcacgcagaccaggtgttttctcggctgcggcgacggggaggaggggggcgtactctccaaggtctacgaggagaggcgtgtgatggggtactcgccagagcagatgtttgccgttgtcgcggcagtggacctctacgaggactttgtgccgtggtgccagcgatccaggattgttaggcggcatgacgatggctcatttgatgctgagctcgagattggattcaagttccttgttgaaagctatgtctcccgtgtggagatggagaagcccaggtatatcaagacgacagcatctgaaagtggactttttgatcatttgataaacgtttgggaatttaagcctggtcctgttccagggacatgtgacctctacttcttagttgattttaagtttcaatcaccactgtatcgtcaggttgcatcaatgttcttcaaggaagttgtttctcgactagtgagctcatttagtgaccgttgttttagaatatatggccctgctgttccagtgctggaaaacacttatggacaaggaagatgaagccgttatgattcaatttcgaaggatgaatcctttgtggatctctgggaattccttgtagtcaaagcataatccttctataattggtggtagtgccatttagggcgccatcagtcaaggaaatcggtcacttttgagttctcactcatggctatttctgaggttattttttcgtctatttctaaattcggttcacatgtatacaacgaaatggccatttcttacgattatttaccaagccattcagtcaatcagattctgatgttctgtttgttgaagcatatgcattcaagactctgtttgcaagtgtgcgtgttacacctcgtcaagaaaaaaaaatggtatctagaggccaagtttatg

SEQ ID NO: 148405 - DNA, 1705 bp, Zea Mays
tcaatcatttctgaatttcttccgttccccgccggccggctcccgtccgtccttggacgcacgtcctccactacgcgtctccatgtgcgccgcgcgtagcgcagcaacagaaaaaacaagtgataaaaaaaatgatactatcaatgatgcgtcagggcttatgtttgctcctccatccgagttcggttgccagctcgagcgttgacacttgcaggttttaccagtagcaggagccgccccccgcgtatcgcacggtcttcccacccaacccaaggaataggatcccaagctctcgatcggcgtccaccatgggtgcctcttggatcacgacatgctccccgtggtccgcgttcgcgacgctggccgccctcacgaccagcgctctggtgctcggctacgtgtccagctccttgctcggccaacaggccgcgtacgagtacgacgacgcgtacagcccggacgccgagccgtccgggccggcggcgccgcctaggcggggggccggatacccgccggtgttcgcgtactacatcacgggcgggcgcggggactgcctccggatgacgcggctgctcaaggccgcgtaccaccccaggaaccggtacctgctgcacctggacgccggggccggcgcctacgagcgcgcgaggctggccaggtacgtccggtcggagcaggtcttcctcgagtacgccaacgtgcacgtcgtcggcaagggggacgcgctcgacggccgcggcccgtccgccgtcgccgcggtgctacgcggcgcggccgtcctgctgagggtcggcgcggagtgggactggctcgtcacgcttagcgccgcggactaccctctcgtcacgcaggacgacctgctctacgccttctcctccgtgccgagggacctcagcttcatcgatcacaggcccgattctgaaacccatcacgtggttgttctcgaccagaatcttctgcagagcacgaacgccgagatctccatcgcgtcggggcaccgggagaagcccgacgcgttcgacctcttccgaggttctccctggccgatactgagccgggcgttcacggagcactgcgtggccgcgccggacaacctgccccggacgctgctcatgtacttcagcaactcgctcgaggccaaggagttctacttccagacggtcatggccaactccccacgcttcaggaacagcactgtcaaccacagcctccgggtcaacgtgccgccgccgccgccgcagagcgcgggccagcaggcgcggtacgacgcactggtcgccggcggcgcggccttcgccgggcggttcggagacgacgaggcgctgctgcagaggatagacgaggaggtgctgcggcgcccgctggacggcatcacgccgggcgagtggtgcgcggtgggtggcggcgaggacggcgcgggcgagtgctcggtcgggggcgacatcgatgctgtcaggcagggcgcggcggggaggaagctggcaagcttgatggccggcctcgtgggtactgcgccgtgcggcggatgcaacagctagctaggttaggcgcgccggcagccgatagaggagaaatctcatacatttgcttgcttattgtggacaagccggctgacagttcgattaattctttgtgtttccacatcaattcccttgtgctattttgtacctaacgaatgaacgattcaacggctggctacaaaaac

SEQ ID NO: 148406 - DNA, 2974 bp, Zea Mays
atgcacgttatccatggcgcctcgaggagaccccggcgaatgctggcccttggatccaaccgagctagcatgcatgcgcattcgctgccttccaaacggaggaaggggaaattaacaacgcgattacgcgaagccttcaaaaagccagccccctcctctcccttccaggcaacccaaccacaggccacagcgcagcggtgtgtgtgggtgtgtgtctgcgccagagaccaaacaccaacctccccccaccctcgacccatccccacctcgccgccgccgccgccgccgcacggtctccttccccgagatttgaatgcgttaggaagtgcatggggagaaaggatgccagagttgcgtagtggagtccggcagtctcggttgagggcaaagaaggttgaggatcttgtggttcaagaccctactgacaacttggttgtggcggcacctacggtggcaggaagacgtggtagaggaaggggtgggaggggtggagggagaggagcaggacggggaaggggaggaagaggaagaggtgttccagtgattaacttggatcctgaccagcctcttgaggttcttccaggagctggtgttggtgcccgcgctgcaggtggggcgcagcccattgaagacattgctaataaggtattgaagatggatggtgggagtgctgagaagattgctggaggtgaagatgaagggactacatctccagtcccagagaaggttcaagtaggccattctccacagtacaaggttgaacgcaagttggggaaaggtggttttgggcaagtatatgttggcagaaggatttctgggggaacagagcgcactggacctgatgcttacgaggttgctttgaaatttgagcaccgaaacagcaagggctgcaattatggccctccatatgagtggcaagtttatagtgctctgaacgggtgttatggtgtaccatgggttcattacaaaggtcgacaaggagattattatgttctggtgatggatattctagggcccagcctttgggatgtctggaattcatttgggcagttgatgacacctaatatggttgcttgcattgctgtagaggcaatttctatacttgagaaacttcatgcaaaagggtttgttcatggagacgttaaacccgagaattttctacttggccagcctggatcccctgacgagaaaaaactttttctgattgatcttgggttagcatctagatggaaggaatcagggtcatctggacaacatgttgaatatgatcagaaaccagatattttcagaggtacaataagatacgctagtgtccatgcacatttaggacgtactggtagcagaagggatgatctggaatcattagcatatacattgatatttcttcttagaggaaggttgccgtggcaaggttatcagggcgagaacaagagttttcttgtttgcaagaagaaaatggctacctctccagatctattatgctgtttttgcccaactccattcaaacttttcctggagactgtgacaaacatgaaatttgatgaagaaccaaattactcaaagcttatttcccttttcgatgaattgattgagccccagcatttgaggcctattagaattgatggtgcattgaaggctggacaaaaacgtggaagattacatgtaaatccagaagaagatgagcaaccgaagaagaaagttcgacttggaagcccagcaaatcagtggatttcagtttataatgctagaaggcccatgaagcagagataccattacaatgtagcagatgccaggcttcatcaacacatagagaagggtaatgaagatggattgttcattagttcagtagcatcttcagccaatctttgggctctcattatggatgcagggactggtttcacatcccaagtatatgaactgtcacccatattccttcataaggattggattatggagcagtgggaaaataactactacatcagtgccatagctggtgcaatgaatgggagttccttggtggtcatgtcaaaaggaactccttacactcagcagtcttacaaagttagtgaatcattcccctacaagtggatcaacaagaaatggaaagaaggttttcatgttacatcaatgacaactgcaggaagccgctggggtgtagttatgtcaaggaactctggatactctgaacaggtagtggagttggattttctttatcctagtgaaggtattcaccgacgatgggagaacggatatagaataacttctacagcagctactggcgatcaagctgctttcatattgagtatacctaaaagaaagttaatggatgagacacaagaaactcttagaacatctgcttttccaagcaaccatgtgaaggagaaatgggccaagaacctttacattgcttcaatatgctatggccggacagtgtcatgaggcttgctcggctgcatccctagttgggaagagcatgttctgatgagtatatattgggaaaaaagcagcaatctttgttgctgctctctattaatctctgtatgtgtaggtaacccgttcaagatgaagcaccttacagtggccagagtaggagctcaagaaagaaccgagaggaaggtggaaagcaatcggccaataagcagacgaggagtatgtgatctggctagtagcgggtacaggcgctaatggcgtcaaatgttttgtatcagcatgttttgcttttgcttcgctcctgaccgctgtgcaaagagtagacagcttgtttctttcggaggcaagtcatctgagaaccatcgtgtatagcgtatgatgtcattgtattttctttagtggaggccaagttccatctttccggaactcccaaaatgctaagttattatgcgaggaaacaagtgtactgataaaatcggtgtatcaattccattattcgacaattctcacctgcattaattaatgcaatgctgcattacttatc

SEQ ID NO: 148407 - DNA, 2037 bp, Zea Mays
gccatttctcacccttcaccttgattcatcattcacgccagtacgccacgcctccgcgttccacgttccttctcgtctctacgtcaccgtaacctcctccacccatccccgttctcacgcggctcgctcagggctcgagcgtctccccatcggaaccctaatcctctctttccctactcgcggaagccaactccaccggcaggggaagcggaagggaagcacctcggccccggcaagatggtgctcgcacagctgggcgggagcatctcccgcgccctggcgcagatgagcaacgccacggtgatcgatgagaaggtgctcaacgagtgcctcaacgagatctcgcgcgcgctcctacaggccgatgtccagttcaagatggtccgcgacatgcaggctaacatcaagcgcatcgtcaacctcgaggcgcttgccgcaggcaccaacaagcgccgcatcatgcagcaggctgtcttcacggaactctgcaccatgttagatcccgggaagccttctttcactcccaaaaagggcaagccaagcgtagtcatgttcgttggtctgcaaggttctggtaaaactactacttgtacaaaatatgcttattatcatcagaagaaaggattcaaaccagcactggtttgtgctgatacatttagggctggtgcttttgatcagttaaagcaaaatgcaacgaaggccaagattcccttttatggaagctacatggaatctgatccagtgaaaattgctgttgagggtgtggagaggttcaagaaagaaaactgtgatctcatcattgtggacacaagtggaaggcacaaacaagaagcagcactctttgaagaaatgcggcaagtttcggaagcaacaaaaccagacctggtgatttttgtgatggacagtagtattggtcaggctgcatttgatcaagcacaggcatttaaacaaagtgtttctgttggtgctgtgattattacaaaaatggatggtcacgcaaaaggcggtggtgcccttagcgcggtcgcagcaacaaaaagtcctgttatattcattggaactggcgagcacattgacgagtttgaagtttttgatgtgaagccatttgttagtcgcctgttaggaatgggagattgggcaggctttatggacaagattcatgaagtcgtacctacggatcaacaacctgagcttctgcagaaactgtctgaaggaagctttactctcaggcttatgtatgagcagttccaaaacattctgaaaatgggtcctattggacaggtcttctctatgttgcctgggtttagcgccgaactaatgccaaaaggacatgagaaggaaagccaggctaagattaagcgctacatgacaatgatggattccatgactgatgcagagcttgacagcacaaatcctaagctgatgactgaatcacggatcattcggattgcacgggggtctggtcgtcctgtcagggatgtcatcgacatgctggaagagtataagcggcttgctaaaatctggggcaagatgaagggtctcaagatcccaaagaaaggggagatgagtgcactgtcccgcaacatgaatgttcagcacatgagcaaggtccttcctccgcagatgcttaaacagattggtggcatgggcggtctgcagtctctgatgaaacagatgggatcgaaggagatgagcggaatgtttggaggcatgggtggcgagcggtaattttacgtcctgtttttggtggatcgtcgctgtgaacttgtgatgctaaattgagagggtttagtgctgcggtctgatcatcgtcagaggtttccatgaagatcagcctgcgccatgttatggaacaggcttgctgtagctccccatgcctgaaatttaatttatatgattatgaacagtacatttgtcctcgaaaaaatgtataagatataatatttgacaaatggaatatgcttatgtagtcttccagtcttgttatgccgttgggttggcaaggatgcgccatgaagcttcgtgccagggcgagcc

SEQ ID NO: 148408 - DNA, 2863 bp, Zea Mays
gtagtccgatcaaaacctccccaaacccaacgcaccggctagtcgctccgctcgcacgtcgcgcccgacgccccgacctcggctgctcgtccagtcgtccttcgtttcccttcccttcccttcccttccgccagaagtctccacgctccctttctcccgtttaaaaccttcgcttggtctcgactctacttggccggccatttcttcgtctcgcccaatcctcgctcacctcaaatcctagggccccgcttctcctactcgggaggctcagatccaatgggcgcggcgccgtcgacgccgacgttggacgtggcaccgttgacgccgaggttgggcgcggcaggcgcgccaccgtcgcccagcgcggcggagcagatgttcgcggcgctggtcggcgaaaaggcctacccaatctcctccgagttctggaaccagctgctcgagctgcccctcaccctgcagtggccgcgcgaccgcgtgctgcaggcgtgccacgcctttgccgagaataactacaaaacaaagcatcttgcaaagattttgatccatttggtttgttgcttgcaagagtgcacctcaacaacttctgtatcttctgtcgtatatcagagggcaatcaacgcggcatacatatcatccatatttctcaagttcatcattgaaaatgcaaaaactgacagttggcaagagctatgccttgacattgacaggagtgagaaggggttggaaaaaattccagcagaaaacacggtggagtattttctgatgagaggtgtgctggactatattggtagtgtggatgtaagtccggagttatgctacctacatcatgaactcctgaacttgatgctagttcttatgtcaactcagttgtgttctggaccatctccagagccaaaggatgtgcatcctttcattgatgcagctatgcttcaggacagctccatcgtggcttcagtggtgcaaaaattgttgctcaattttgttacacgtccaaaaattcctctaaatgcttcgcaccctgttttctctgatgatggtaggcctggtgttctccaacgagttggctcagcagctgcaaactttgtcttgttgccatattactacctcgtaagctcaactcctgagggtgcgacaagtcaattggcagataacagtttacttgttcttcttatcatgatccactaccgaaagtgcatttcaactaatgagtccattccaaccaacaatgtatacacgatggactcaaataccaatgacaaggatgctccagtttttcatgataacccttactgcaaggcattaaacagtgctaaggacatacaatatgatcgtgctgatgttgaaggaaatgctcaagatcgacctgttgtcaggttgtcttttgcatcgttgtttgatgcttttggaaggtgcttaaatgatgagagctcggttctgttgctctattctttggtctatgggaactgcgactttcaggaatatgtcctggttagaacagacttggacactttgctgatgcctatcttggaaatgctctacaatgcatcaaggaagacttcaaatcagatttacatgctgttgattattctccttatcctcagtcaagattcaaccttcaatgctagtgtgcaccaattggtgcttcctgcagttccttggtaccatgagcgcctgatgcatcaaacgtcactgggatctttgatggttgtaatactaattcggaccattaagtacaacctctccaagctaaaggatgtctaccttcacacaaactgtcttgctattttagcaaacatggctcctcatgtgcataggctgagtgcttatgcatcacaaaggctagttagtctcttcgacatgctttctcgcaagtatgccaaactagctgagctaaaaaacgacaagtctctgaaagttatatatgatcagatggaagcagacatagcagatgatatgtctatagagcttcacatatatacagatttcttaagaattgttctggagataattattgccatccttacatatgcattgcccagaaatcctgaggttgtgtatgctgtattgcatcgacaagaggtgtttgagccatttaaaaaccatccacgtttcagtgaactgcttgagaacatatacacagtattggatttcttcaatagccgaatggacatgcaacaattagatggggaatggtctgtggataaggtgcttgaagtcatcaacaaaacttgccgttcatggcgtggagaagggatgaagatgtttacccagttacggtttacatatgagcaagaaagccaccctgaggagttcttcatcccatatgcatggcgccttgtcctatcacggggattctccttcaatcccgatgccataaatctcttccctgtggagattcaccttgaagaggcaccggccggtggacaaaaggtttaatatgaatggtccgaaccagagttctgacaagaacataaaggcatatttttgtttcattgtggcaaagagcacgatgtaaataggccgcatataccatataccaggtagtcaaatgtacacattcttttgtattaaatcattatatgtgtaagacgaaagggggtggacggattgcgcaagggtgcagagattgtgctagttataggggggagattactatgtagggtatatgcaattctttcgtaagttatcgttgtattgtacccttagttcaaaaggcttgtaaccacttatttattgaaaagttgtagagtctgcgatctaagggcatgtacagtggagagacaccaaaacggttctccaagcacaggagacaactaagagactctattgtacaatggagtgtctataaacgtagtctatt

SEQ ID NO: 148409 - DNA, 465 bp, Zea Mays
atgcttcagagtgtacacaccacaaccaacaacaaaaaaatcctagtcaaaggtaagctccacctccatggctccatgcagttaagtcaccactgcatacgctggctggatcagtcaggccctggtctgcattgcatttgcatccactgcatcagctcggctcatcagtcgtcaggaactgtacacagccttggagatcacagagaatgggatgatcgccctgtggcccttgtcaccatagaaaccgacgttcccaaagcttgcgctggagctgttcatggtggcgttcacaacgaaggtcacaagctgcttctgcccgcttggaataagaaaatgcatcggtaccacggagattgcagttccatagggagcgctgtaactgacggtgtagctctcgtcggccgccacgttggtcaccgttctcgttatgcttcttgtctggttgagcacggctatggtgattga

SEQ ID NO: 148410 - DNA, 270 bp, Zea Mays
atggaagagtgtattgtggccgcgtctgccaccggagtgggagaagaagagagcagagcggaggcagagagtgtgccggaaagccacagcgaccgcccgaactcgtacgagcaactggaggtggcgcgcaagatcacggccgtggccgtggcgacccggccctcgcgcctcgagctcgagaacgcgcggctacagaagaggctggccgccaaggaccgcctccgcggctccgcgcctcgctcgccgaaagggccgctacgctcaagctag

SEQ ID NO: 148411 - DNA, 1066 bp, Zea Mays
gagcggcgaagaggtcgtagaagaagtcgctgcgtgcggcaaggatgcagcggtggatgggtacgggcggcccaccgtcgggcacatcgacgtcggcgtcgctgcagtctaggtccgggtcgaggagcagccgctcgaggtttttgctgagccggttcaggctcacggcctccacgctgcctccgctccctgcggcagcgactccaccaccccacccctggccggcaggcaacgggggagtctggggcggccctggcggcggcagcgcgacggaacaggggctcgagccgttggacaggtacgacgacgacgacgcgaacgtgatggacgacgacggctccatggcttcccacaactgccaagcgcaagacgcgagcccctacttgtgccggacccggaccactacgaccatgagatggtggtcgcctcaagcggtttcggcagccaaaccgagaactttctggctttgcacggccaaacacccccaattctgcgctctgcttggctggctccaggcaaatccgcgtcggcaaaagcctcctcgacgtgacccttcctagagcggcacggaagtcggcgtaaatcacacgcgagtcctcccagcgttgccgatcccggactgaaatctcaccggcgctgcgtcaggccaggaacagaaaatatggtgcttccccttcttcttcctaccgggcggtggctaaatctcagacaagtgaaaaagggatccaagagggcagcatagtagctacagggaataacgtgagggattgttggccggtgctgggaggggcgaggactgactgaggagcggtaggggtccaacggaatcgtggaagaagagtccgggggaaacgcagttgcgtggaaagtagggagatagggatgggggaaagagtggatcgaagaagacgacgactcgacgaggaaggagaatagactagagaggcgccggaaggagaatagaataaacaagtaaaaaaatccaagaaatctcgagtatttcggcgcaatttgaaggaaaacctgagccctgtgcccctgtatacgtcgtcaagtgacgcctgac

SEQ ID NO: 148412 - DNA, 1096 bp, Zea Mays
gagcggcgaagaggtcgtagaagaagtcgctgcgtgcggcaaggatgcagcggtggatgggtacgggcggcccaccgtcgggcacatcgacgtcggcgtcgctgcagtctaggtccgggtcgaggagcagccgctcgaggtttttgctgagccggttcaggctcacggcctccacgctgcctccgctccctgcggcagcgactccaccaccccacccctggccggcaggcaacgggggagtctggggcggccctggcggcggcagcgcgacggaacaggggctcgagccgttggacaggtacgacgacgacgacgcgaacgtgatggacgacgacggctccatggcttcccacaactgccaagcgcaagacgcgagcccctacttgtgccggacccggaccactacgaccatgagatggtggtcgcctcaagcggtttcggcagccaaaccgagaactttctggctttgcacggccaaacacccccaattctgcgctctgcttggctggctccaggcaaatccgcgtcggcaaaagcctcctcgacgtgacccttcctagagcggcacggaagtcggcgtaaatcacacgcgagtcctcccagcgttgccgatcccggactgaaatctcaccggcgctgcgtcaggccaggaacagaaaatatggtgcttccccttcttcttcctaccgggcggtggctaaatctcagacaagtgaaaaagggatccaagagggcagcatagtagctacagggaataacgtgagggattgttggccggtgctgggaggggcgaggactgactgaggagcggtaggggtccaacggaatcgtggaagaagagtccgggggaaacgcagttgcgtggaaagtagggagatagggatgggggaaagagtggatcgaagaagacgacgactcgacgaggaaggagaatagactagagaggcgccggaaggagaatagaataaacaagtaaaaaaatccaagaaatctcgagtatttcggcgcaatttgaaggaaaacctgagccctgtgcccctgtatacgtcgtcaagtgacgcctgaccagggtgacgtcgacggcaatcggcaaggc

SEQ ID NO: 148413 - DNA, 1826 bp, Zea Mays
aagaagcggcgccgcctaggcttgggttccgcggcgaggtgccaatgccgcagtggtggggccgggaggcgcggggtggcggcggcggcggcggcacgtcggtggtggtgaagatggagagcccggactgggccgtccgggagccagaggcggcgagggggaaggccggccgcggcaagaacgctcgccagatcacgtgggtgcttctgctcaaggcgcaccgcgccgcggggaagctcacgggcgccgcctccgccgcgctgtccgtcgccgcggccgcgcggaggcgggtggcggcggggcggaccgacgccgacgccgacgccggcgccggcgccggcgccgcgccgcacggggagagccccgcactgcgcaccaggctctacggcttcctccgcgcctctctcgtcctctccatgctcctcctcgccgccgacgtcgccgcgcacctccagggctggcacctcctcgccgtcgacgtccccgacctgctcgccgtcgagggtctcttcgccgccgggtacgcgtcctgggtgcgcgtccgcctccagtacctcgcgccggcgctgcagttcctggcgaacgcgtgcgtcctgctcttcttggtccagagcgccgaccgccttatcctctgcctcggctgcctctggatcaagctcaggggcatcaagccagttcccaatgctgctggcaaagggccagacgacgtcgaggccggcaccggggagttccccatggtgctcgtgcagattccgatgtgcaacgagaaggaggtgtaccagcaatctattggtgctgtttgcggtctggactggccacggcccaacttcttggtgcaggtgctagacgactctgatgatgctgccacttcagcgcttattaaagaggaggtggagaggtggcaacgtgaaggcgttcgcatattgtaccgacaccgggtaattcgtgatggctacaaggctggaaatctcaagtcagccatgaactgcagctatgtgaaagattatgagtttgttgttatctttgacgctgattttcaaccccagccagacttcctgaagcgaactgtgccccatttcaagggaaatgaggatgttgggctagttcaggcaaggtggtcttttgtgaacaaggatgagaacttgttaactaggctgcaaaacataaacctgtgcttccactttgaggtggagcagcaggttaatgggatcttcctcaatttctttggattcaacggaacggctggagtgtggagaataaaggcacttgaggattcaggtgggtggatggagaggacaacagtggaggacatggatattgctgtccgagcacacctcaagggctggaagtttctgttccttaacgatgttgagtgccagtgtgaattgccagagtcatatgaggcatatcgaaaacagcaacaccgatggcattctggtccaatgcagttatttagactatgctttgtggatattatcaaatcgaagattggattttggaagaagttcaacctcatattccttttctttctccttcgcaagcgtggtacatgatccaaagaagatttgattccggattaagaagggttatatagtttcatcggggatacttgaaacggtgaaaatgtggaattgtggattgtagatataatatggcttgggactgtgggctgtaaaaggcttgggggttctaattcttttgtaagaaaaatcatcagtggttagatgggttattttgcttacttgacagtttaccttcaaagggggatactgttgggatccatgtgatttgggcaattgctacgaatggatactgaattactgaga

SEQ ID NO: 148414 - DNA, 2568 bp, Zea Mays
aagaagcggcgccgcctaggcttgggttccgcggcgaggtgccaatgccgcagtggtggggccgggaggcgcggggtggcggcggcggcggcggcacgtcggtggtggtgaagatggagagcccggactgggccgtccgggagccagaggcggcgagggggaaggccggccgcggcaagaacgctcgccagatcacgtgggtgcttctgctcaaggcgcaccgcgccgcggggaagctcacgggcgccgcctccgccgcgctgtccgtcgccgcggccgcgcggaggcgggtggcggcggggcggaccgacgccgacgccgacgccggcgccggcgccggcgccgcgccgcacggggagagccccgcactgcgcaccaggctctacggcttcctccgcgcctctctcgtcctctccatgctcctcctcgccgccgacgtcgccgcgcacctccagggctggcacctcctcgccgtcgacgtccccgacctgctcgccgtcgagggtctcttcgccgccgggtacgcgtcctgggtgcgcgtccgcctccagtacctcgcgccggcgctgcagttcctggcgaacgcgtgcgtcctgctcttcttggtccagagcgccgaccgccttatcctctgcctcggctgcctctggatcaagctcaggggcatcaagccagttcccaatgctgctggcaaagggccagacgacgtcgaggccggcaccggggagttccccatggtgctcgtgcagattccgatgtgcaacgagaaggaggtgtaccagcaatctattggtgctgtttgcggtctggactggccacggcccaacttcttggtgcaggtgctagacgactctgatgatgctgccacttcagcgcttattaaagaggaggtggagaggtggcaacgtgaaggcgttcgcatattgtaccgacaccgggtaattcgtgatggctacaaggctggaaatctcaagtcagccatgaactgcagctatgtgaaagattatgagtttgttgttatctttgacgctgattttcaaccccagccagacttcctgaagcgaactgtgccccatttcaagggaaatgaggatgttgggctagttcaggcaaggtggtcttttgtgaacaaggatgagaacttgttaactaggctgcaaaacataaacctgtgcttccactttgaggtggagcagcaggttaatgggatcttcctcaatttctttggattcaacggaacggctggagtgtggagaataaaggcacttgaggattcaggtgggtggatggagaggacaacagtggaggacatggatattgctgtccgagcacacctcaagggctggaagtttctgttccttaacgatgttgagtgccagtgtgaattgccagagtcatatgaggcatatcgaaaacagcaacaccgatggcattctggtccaatgcagttatttagactatgctttgtggatattatcaaatcgaagattggattttggaagaagttcaacctcatattccttttctttctccttcgcaagcttattttgcccttctattccttcacccttttctgtatcattcttcccatgacaatgttcattcctgaagccgagctccctgcctgggtcgtgtgctacattccggcaaccatgtccttgctgaacatcctcccagcccccaaatcgttcccgttcattgtcccctatctcctgtttgagaataccatgtcagtaaccaaattcaacgccatggtttctggcctgttccagctcgggagcgcctacgagtgggttgtcaccaagaaatcaggccgttcttccgagggcgacctcatcgcccttgtcgagaagcagcctaaacagcaaagggtagggtctgcacccaaccttgagtcacttacaaaggagtcttccagtctcaaaagggactccaaaaggaagaaacacaataggatatacaggaaggagctggcactctccttccttctcctaacagccgctgctcggagcctgctatcggtgcaagggatacatttctacttccttctgttccaaggggtgtcgttcttggttgttgggctcgatctaatcggtgagcaagtcgagtgatgcggtacaagggagagtaattgggtatctattttgctgcgagtggggggcaatgcgaccaaaagaggcacttcaggtaaaggcaagcgtggtacatgatccaaagaagatttgattccggattaagaagggttatatagtttcatcggggatacttgaaacggtgaaaatgtggaattgtggattgtagatataatatggcttgggactgtgggctgtaaaaggcttgggggttctaattcttttgtaagaaaaatcatcagtggttagatgggttattttgcttacttgacagtttaccttcaaagggggatactgttgggatccatgtgatttgggcaattgctacgaatggatactgaattactgagaccgatttgttcttttcttgaactctcacttgtggataaaaggattgcatgagtgcaccagcagtaaacttcgaatgcctacggtt

SEQ ID NO: 148415 - DNA, 1563 bp, Zea Mays
acattgacatcaaactttgggagccatctaagatgcaatgatgctagaactacggtacacaccaacaaggatcagcgacatcgccagccatacataatctaaaatgcgattaggctggcaattacaagcacaccaactgccagcagcagcaccttcaagtacgcatcgacctgctggccttgtggtgcctggcgcgggaagccatggccatgccacccatggaaagaatggccgtacccataaggaaaccctgcagcaggcccataggcagtcgcctgcgggaatccgtgcacctggaagctcagcaacgggaacagccctccgatggcggccgagaaagtgtaactcccccacctaccattagccacagggggggcgccagcaccattgaaccaggggttctggtgcgggtaatggttattgtggtccggctgcggggcagtggagggccgctgcccggtcggcctgctcgggatttccacaccggccaccgaccttgcacggggtacggcggagctgccaccacggccgtagagggggacgagtttcccctcctcgacgacggccttgcagacggggcactcctgagagtgcgcgtgaacgtggagccactcgtagaggcagggccagcagaagaggtggccgcatagggtgaccacggggtcctgcgccaggtccaggcagatgttgcactcgaagctgcccgagtccttgctgccgccgccgccgccatcgctgttggtcctcgccacaggctcgccggcgcgattcgccatgccgctagactcggatctgcgggatgcggggaccaatcaagccacgatccgacgacacgagcaaaataaataggacaagcaggaggcgtcgctgccacaatcaggaatcatattatttcgggggaacatgccccgactccgatccggcatttcaatcgattgtacagtttgtgccaaacaacgctgaataaatccgccaaagtcatctaatctaggatatttctagatacgattcgttcaatacacgatgcgtggatcacggagagcatatagacgaaagggatccgaacagacaatggaacaaaccatcgcacaaacaattagttgaggaaacgtacccaaatccgtgcgaaggcagtggcgaccatgcgttaccgccagacatcaccggggagcgacgaggagcgagtagccgaggggaatgcggcggcggcggccggcagcgaagttggggcgagccgagcaaggaacgaggcggaggggatgcgatgcgactgccgtctgccggggaagggattggcccaacccccgaccccgagccgctaacgtggtgcggtgcggtgcggtgtggtgcggtgcgggaggacagcaatacgcctctcccgagaacagtgccagactgcagcgagtgggagactgggagtggggcgtggactggtgcaaggggggcgaagaccaatggttccaggtttgtccgatcgagacgggaaccggacggacggatgcgcgtgaggggttggccgcttgccggcttcggggcggtggattccgtagcgtgtttgggttt

SEQ ID NO: 148416 - DNA, 1870 bp, Zea Mays
atggctgcggccaccaaccccttcggcctagtttgtcactttgtcgtcgcagcaagcccttggatcaactcagcggcgaacttggactccaaccttggcctgtacgctgtacctacaaaaggtggcgctatggtagctcgtcttgtgcatcgactcacgccaccacgcacctcctcgtacgcgtccgagcagatggcgccggctgcggggacggtggccagcagcaggcacaagaagtggtcggacgagtgcaggaacctgtggcgcgtcgcggggccggtgatcctgaccgggatcttccagttcctgctcggcttcgtcaccacggccttcgtcggccacatcggcaaggtcgagctcgctgctgtctccatcgtcaacggcgtcgtcgagggcctcgccttcggcctcctgcttggcatggggagcgcgctggagaccctgtgcgggcaggccgtgggcgccgggcagctccagatgctgggggtgtacatgcaacgctcctggatcatctgcctcgccacctccctcgccctgctcccgctctacgtcttcacgtcccctctcctccgcatgctccggcagtccgcggacatctcggcggtggcggggcggtacgcgcgctggtgcgtgccgcagctgttcgcgtacgccgtcaacttccccatccagaagttctaccaggcgcagagcagggtgtgggccatgacggccatctcgggcgccgcgctcgccgtgcacgcgctgctcagctggctcgtcgtggccaggctcgggcgcggcctggccggcgccgccgtcgtcggcgacgtctcctggtggctcgtcaacgtcgcgcagttcgtctacctcgtcggcggctccttccccgacgcatggacagggttctcgcgcaaggcgttcgacagcctcggcggcttcgtcaggctctccgtcgcctcggccgtcatgctgtgcctagagatgtggtattatacggcagtgctcattctggtgggatgcctgaagaacccagagattcaagtcgatgcgatttccatatgcatgaactaccagctttggacactgatggttgctgttggcttcaacgctgcagtaagtgttcgcgtgtcgaacgagctcggcgccaaccacccaaaggcggccaggttttccgtggtcgtcgccaccgtcacgtcggccgccgtcggggtggtcttcacggccgtcgctctggcggcgaggaagcagatgcctcggcttttcaccggcgacgacgtggtcgtcagggagaccgccaagctagggtacctcctagccgctaccatattcctcaacagcgtccagccggtgctgtcaggcgtggcgatcggtgccgggtggcagtccttggtcgcgttcgtcaacgtcggcagctactacctcgttggcctgcccctcgcggccgtgtttggcttcaagctgaagctcaatgctacggggatttgggtgggagtgttgatcggaacggtattacagactgtgattctgttcgtaatactcagcagaaccaagtggcaaaaagaggctatgctagcagaagagaggatacgggagtggggaggaaatgtcgagctgccacatactcaagaaacggggccaagtgaaagcactgccgcgccagacgcaagaaaggggcccaagtgaaaaacatcgtgacaccggtttgataggaaactactaaagcattgtgaccattttcagccaccagaatcatttgattaatgtgtgaagtgtggagtgggagtacttgtaatagatgggaaaaagtgagacatgacagggtcaaaccgatggcctcttcttagggctagtttgaaattttcattttctaatggatttctatttttct

SEQ ID NO: 148417 - DNA, 2036 bp, Zea Mays
cgtgcgcggcagcgagcgtgcgtacacgtcacgcaccacgtcagaagccccccaacccaccggtcccccactcagaccgtccgacgaacgactcgacgactgtcgactcctgcacaggcaacacctcacctcgatgatgcatccgctccgccgcatcctcgctctcttactcgtcggcctcctccccgcggccgcgtggtccttggcaccaccccgcttcccgaggccccaaccccgctcgcggccgggagctaatggggtgggagactacgagtacgagacgcgatacttccggcagcggctggaccacttcagctttccaggggtcggggacgaggacgaggacgaggcggctgcgttcttccagcagcggtacctggtgggccgcggcggtgggtgggctggacccggcggccccatcttcttctactgcggcaacgagggcgacatcgcctggttcgccgccaactccggcctcgtctgggaggccgccccacgcttcgccgccctcgtcgtcttcgccgagcatcgctactacggagagtccatgcctttcggtagcaaagccaaggcgtacagcgactccaagtccctggcgtatctcacggccgagcaggcgcttgctgactttgctgtgctgctcactgacctcaagaggaacctatcggcagagggcagccccgttgtgctctttgggggctcatacggtggaatgctagctgcttggatgagactcaaatatccccatattgctattggggctctcgcatcatcagctccgatcctgcagtttgaggacattgttccttctactatattctatgatctcgtatctgatgattttaggagggaaagtttaagttgttttcttacaataaaagactcctggaaagaattagatgaccaagcaaacgagcaagatggtcttctgaaactaagtaaaacgttccacctttgccagaccctgaaaacaagtggagacctttcagattggttgagctcagcgtacagttatctggccatggtggattacccacttccatcagaatttctcatgcctttgccagccaatcctattaaagaagtatgcagaaatatcgacagtcaacctaagggtactggtactctggaacgtatatatgcaggagtaaatgtatactacaattatactggcactgttgactgctttgatctaaatgatgacccccatggaatgggtggatgggactggcaggcttgtaccgagatggtaatgccaatgtcttacagtgaacaaaggagcatgtatccaccttataaatttgactacgcttcctatgctgaggattgcatcaaaagctatggtgtcaggccaaggcctaagtggattacaacagaatttggtgggcataatatcactaaggtcctggaaaattttggtagtaacatcatattcttcaacggacttcttgacccatggagtggcggaggtgtcctgaagaatatatctgagagtgtcgttgctattgtggctccattaggagcacatcacatcgatctgcgcccggcaactccagatgacccggattggctggtggccctgagagaatcagagctggagatcatatctggctggctatgggattactacggggctggaggagcactcttccagcctgtagctgtgaagggctcctcttcatactgaggaaccgcaccctggctaataactcaaatgcttggtctcagaaataagagggccctgctgcaagtgccaaccaccgttaatgctgctgcagtgctgcgtcatggagaaggaagatcttcatgttgatgatcgggtccgctcctgcatcatgtgccatatcagtagcatttggtctgtgtatcaaatgggacatgtacttggctgatgaggtgaggaaaacactggataacgtaacgactctttcgcagtggtggtggcggtcagcaggtgctctagaggcttgatatcacgtgcatgtgccgctgtaaataacataatgctctatgtacgtgtacatctctactactct

SEQ ID NO: 148418 - DNA, 3284 bp, Zea Mays
tagcccctgcctaggcacacccaaaacccctgcccttgcaacttgtcctcggcgccgccccactcgcccgagatctgccgcgacaacaggaattggacgtacattgggactttgaagtgcagctaaggctacctggcgattggtggaaagagatctgatgacggcgatcatggtcgaagagtaggagaggccctagaagaaaggtgacatattctcgttcttcggcagcggaataaatgcaccgagctgagaaaggacagaacaaagaaagatcttaaaatcaaagctaaagaagtggagattcaaaatctaaaaaaaagctaatgtcatggaataaatgaggttgatgtggagctaaaaagggaggctatgtttttttgggtgaggcggttatcattggcttgttatgtgaacattattgtgatgtggtttcatgttgtccaggtgccagtttaacaactttttgcaccaccatgtcgagaatatcattgggtcatgtctggagagtaataatgatcaactgatgggccatgtccttgatgagtgtaaacttgttacaagaattttggaagcagagaagaactctgctctatcgtcagaattggacggtcgcatcgacgccaggttccagcagaggagtcgttactctccttgattccttcaccgagttcaccgaggtgccatactctcgaaacaaatacttgataattgttttgattttggttctttgttgtttatttagaggtgccataaattttaattcttattcggacatagaacttcataacttaatcatgatcttctccaggaatatgaactgaaaatgaaagagaagggtgagcaactgattgtaagatctttcatcagtgcaacctctccttttttagctttcatcagtgctacactcccacagtccccacatgcacgcagatgtttgaaaatataaaataaaatcaacaacactgcaaatttactagctcaactacaagaggcatggagttattattaaaaaatgaagtactcatgatgaattccaaacaaaaaatctgacctaataatcaacataatataaattgttgtagctcagtcctatagtcatactgagctactgattagaatgttcaagaatgaaccattagatttcctgtgctaaaatgaggattgatcataagactaatgacgatcaagactatcaaggcccctacaaacaaagctcatgggaaattagaaagtgaaatgaaataccatgttgaaaacagggccaaagtagctagcaattcaaagaggcaaaatgctgcaaaatataatgcttcatgaggtcagtaaatacatatttggtaattccatgctaatacactgatgctttaagatgcctgagacatctatcttctttgttagttgttttcggtgttgtcaaaatctcaggtgccacaatggatgaaagaacaacatgtagaattgggttccaaaggacttgagggctacttcatcacaacctgtaactgaagatcttgaataactgactacatcaccatgcaagactaaagtttttattttattaagaaaatgaccccaaagaagaagatgtgtgatatatccctgatgactgcatatgtgttgagggttactacacactgaaaaatagaataacagactctgtggctgttagtgaagagggattagtcaaaaagagaacaaggcgtccaaaacctgttggcaatgagggggctgtcagaaagagaagaggctctgccatcccacaactataattgttcaatatatgtatgcattagacttcttaattctattaacttattgaattgtatgtgcatgaagttttttctttcatgtattacaccgcatgacatagttctttaactaatggcagtgtacctttttaaacctttagatggctgaattgaagggagaagatgatttatcagcaggctctatgagcacaactgcatagtcaagacataattcttcggcccctgcagacttcaagcagctaagaagtgttacgcccattgacatctttccacgacaagagacctgggcaagagaatccggacgtgctgagggggagaggaaggagaggaggaagatatcgggcaagagaacccattgacatccttggatagggtccgtctgatgccattcatcgctgtctttgatctcaggaaggcatcttagccagctcaattttattagaaatattgttgttttaagatacagagtccatggttactattgtacgcttttctgagaaacttgtcatcccaataatttggttctggagctatatactgatctagcttgttttagtaacaaatgtaagttgctcacatttcctttagactgtcactagaactttgaacgatcaactcgtgcttctaaatcaagaattaccatatgtgttttttgagttcgatcccttctattttttatttggccaccaaacgaagtttttacatgacaagaatgttataaatacttctttaaatcacgagtttcgtgtgtcacgtacgtgcaatgtaggtatatttctctttcatgcttctcgcgatcgattgtgccgtcgcaacgcacgggcattaacctagtctgtacatatgctgccagtgtgctgtgtgcgtctggtgtcgcactcgagtagtacgcgacgggtctcctgcggccctgttggagtcgtcaattgtcagccaccttcgaatacgagtagggatgacaattgacaacggggacagaccaggagctgtatgaaataaagaacattgtagatgctcttaatgagcaacgcgagaagttgcaagagcaaagaaagctgcttcattcagaccgagaaccaatctgacagcaaatccagcagcttactgggttagaagagctgaaaattgaatctgagaacgggcaactaactgtctttgacacaatgtgagaacttaaagaaataaaggtggcgtggaaaacctgaaagagaacggtgttcacatgtctcctgacgagaggatgtataaaaacgcaaatgcaaagcacactactgtgaagagattggaaccgtctcctgcgatccacaccaattttcctgggtgttattagaaaatgtgctcaggtgatattcaaaggctgtgcagagaagagcgctgatgatccccacaacacaacgatagattggtacctgcaaagttggcaatgcaaatgtcaatggctctagcttaattagctgctgctgcctattcagatgaactgttatttggtcatcagctggaaaatggtgctgggaa

SEQ ID NO: 148419 - DNA, 3157 bp, Zea Mays
tagcccctgcctaggcacacccaaaacccctgcccttgcaacttgtcctcggcgccgccccactcgcccgagatctgccgcgacaacaggaattggacgtacattgggactttgaagtgcagctaaggctacctggcgattggtggaaagagatctgatgacggcgatcatggtcgaagagtaggagaggccctagaagaaaggtgacatattctcgttcttcggcagcggaataaatgcaccgagctgagaaaggacagaacaaagaaagatcttaaaatcaaagctaaagaagtggagattcaaaatctaaaaaaaagctaatgtcatggaataaatgaggttgatgtggagctaaaaagggaggctatgtttttttgggtgaggcggttatcattggcttgttatgtgaacattattgtgatgtggtttcatgttgtccaggtgccagtttaacaactttttgcaccaccatgtcgagaatatcattgggtcatgtctggagagtaataatgatcaactgatgggccatgtccttgatgagtgtaaacttgttacaagaattttggaagcagagaagaactctgctctatcgtcagaattggacggtcgcatcgacgccaggttccagcagaggagtcgttactctccttgattccttcaccgagttcaccgaggtgccatactctcgaaacaaatacttgataattgttttgattttggttctttgttgtttatttagaggtgccataaattttaattcttattcggacatagaacttcataacttaatcatgatcttctccaggaatatgaactgaaaatgaaagagaagggtgagcaactgattgtaagatctttcatcagtgcaacctctccttttttagctttcatcagtgctacactcccacagtccccacatgcacgcagatgtttgaaaatataaaataaaatcaacaacactgcaaatttactagctcaactacaagaggcatggagttattattaaaaaatgaagtactcatgatgaattccaaacaaaaaatctgacctaataatcaacataatataaattgttgtagctcagtcctatagtcatactgagctactgattagaatgttcaagaatgaaccattagatttcctgtgctaaaatgaggattgatcataagactaatgacgatcaagactatcaaggcccctacaaacaaagctcatgggaaattagaaagtgaaatgaaataccatgttgaaaacagggccaaagtagctagcaattcaaagaggcaaaatgctgcaaaatataatgcttcatgaggtcagtaaatacatatttggtaattccatgctaatacactgatgctttaagatgcctgagacatctatcttctttgttagttgttttcggtgttgtcaaaatctcaggtgccacaatggatgaaagaacaacatgtagaattgggttccaaaggacttgagggctacttcatcacaacctgtaactgaagatcttgaataactgactacatcaccatgcaagactaaagtttttattttattaagaaaatgaccccaaagaagaagatgtgtgatatatccctgatgactgcatatgtgttgagggttactacacactgaaaaatagaataacagactctgtggctgttagtgaagagggattagtcaaaaagagaacaaggcgtccaaaacctgttggcaatgagggggctgtcagaaagagaagaggctctgccatcccacaactataattgttcaatatatatggctgaattgaagggagaagatgatttatcagcaggctctatgagcacaactgcatagtcaagacataattcttcggcccctgcagacttcaagcagctaagaagtgttacgcccattgacatctttccacgacaagagacctgggcaagagaatccggacgtgctgagggggagaggaaggagaggaggaagatatcgggcaagagaacccattgacatccttggatagggtccgtctgatgccattcatcgctgtctttgatctcaggaaggcatcttagccagctcaattttattagaaatattgttgttttaagatacagagtccatggttactattgtacgcttttctgagaaacttgtcatcccaataatttggttctggagctatatactgatctagcttgttttagtaacaaatgtaagttgctcacatttcctttagactgtcactagaactttgaacgatcaactcgtgcttctaaatcaagaattaccatatgtgttttttgagttcgatcccttctattttttatttggccaccaaacgaagtttttacatgacaagaatgttataaatacttctttaaatcacgagtttcgtgtgtcacgtacgtgcaatgtaggtatatttctctttcatgcttctcgcgatcgattgtgccgtcgcaacgcacgggcattaacctagtctgtacatatgctgccagtgtgctgtgtgcgtctggtgtcgcactcgagtagtacgcgacgggtctcctgcggccctgttggagtcgtcaattgtcagccaccttcgaatacgagtagggatgacaattgacaacggggacagaccaggagctgtatgaaataaagaacattgtagatgctcttaatgagcaacgcgagaagttgcaagagcaaagaaagctgcttcattcagaccgagaaccaatctgacagcaaatccagcagcttactgggttagaagagctgaaaattgaatctgagaacgggcaactaactgtctttgacacaatgtgagaacttaaagaaataaaggtggcgtggaaaacctgaaagagaacggtgttcacatgtctcctgacgagaggatgtataaaaacgcaaatgcaaagcacactactgtgaagagattggaaccgtctcctgcgatccacaccaattttcctgggtgttattagaaaatgtgctcaggtgatattcaaaggctgtgcagagaagagcgctgatgatccccacaacacaacgatagattggtacctgcaaagttggcaatgcaaatgtcaatggctctagcttaattagctgctgctgcctattcagatgaactgttatttggtcatcagctggaaaatggtgctgggaa

SEQ ID NO: 148420 - DNA, 676 bp, Zea Mays
gccccatattttcccgcgttcgtggtctccactctccagttctccgtttcccaactccaacccagcatccttgcatcccggggctcagttagcgttcccgccgcaccgtactacacctccggtggtcggtgcgcccatttcccgccgatcaagcgcgatggcctcgacgagggatctagccatagcttctctctcagctgcgaccggcgccgttgttgccgccgctgcactgcgcctcttgtcttcccgcagaacatcctccgtcagaccccagaacctccccgccgccgctaacggatctgcctccgagcgcccgctggctcagtcccccttcgatcctgtcaagagggaaggatatatttcctgggacgactacttcatggcgatcgccttcctttcggctgagcggtctaaggatcctaaccggcaggttggagcatgcttggttagccaagagggaataatcctaggtgaggatgaagctgtactgctgcagaatgctctgtatacactgctatgcatttgtgtatgtatcaatttgataatgagagtgcctggtgtattgggtctatgatctgttctgataaatgctggagtgtgaatgttcactcccggttgtaccttcatgttggaaattcactactcatactataaataacttccatcttttcctgtc

SEQ ID NO: 148421 - DNA, 1159 bp, Zea Mays
gccccatattttcccgcgttcgtggtctccactctccagttctccgtttcccaactccaacccagcatccttgcatcccggggctcagttagcgttcccgccgcaccgtactacacctccggtggtcggtgcgcccatttcccgccgatcaagcgcgatggcctcgacgagggatctagccatagcttctctctcagctgcgaccggcgccgttgttgccgccgctgcactgcgcctcttgtcttcccgcagaacatcctccgtcagaccccagaacctccccgccgccgctaacggatctgcctccgagcgcccgctggctcagtcccccttcgatcctgtcaagagggaaggatatatttcctgggacgactacttcatggcgatcgccttcctttcggctgagcggtctaaggatcctaaccggcaggttggagcatgcttggttagccaagagggaataatcctaggaattggctacaatggcttccctagaggttgttccgatgacaagcttccttgggcaaagaaatctgcaagtggagatccattggagacaaaattcccctacgttgtccatgctgaggttaatgcaattctaaataccaaccatgcttcagcggctggacagaaattgtatgtcaccatgttcccatgcaatgaatgtgccaagattattattcagtcaggcgtatctgaggtcatatatttcgttgaaaaaaagattgacaactcagctcacgtttatgttgcctctcacaagctattgtcgatggctggtgtcaaggtcaggaagcatcagccccagatggcgcaaataccgatcaagttccaggagccatgaagccggtactagttccagccttccaggagcactagtgagcgaataaacagtgcaagatacctgttgaccgcggcacctgtgacaatcgacaatggccgacccgcagcggtctcggtatgcggcgtcggtccctctccctccctcagaggctgttgtaaaactatagctagaattcgtactggtaataatgtaaagacatttcaattctcctctctgataccagcttatcttttacgtgcgtttggatcccttcattttagaggaattgaaattcactcaataaattaactcatttagtttgaaatttgagatttc

SEQ ID NO: 148422 - DNA, 1155 bp, Zea Mays
gccccatattttcccgcgttcgtggtctccactctccagttctccgtttcccaactccaacccagcatccttgcatcccggggctcagttagcgttcccgccgcaccgtactacacctccggtggtcggtgcgcccatttcccgccgatcaagcgcgatggcctcgacgagggatctagccatagcttctctctcagctgcgaccggcgccgttgttgccgccgctgcactgcgcctcttgtcttcccgcagaacatcctccgtcagaccccagaacctccccgccgccgctaacggatctgcctccgagcgcccgctggctcagtcccccttcgatcctgtcaagagggaaggatatatttcctgggacgactacttcatggcgatcgccttcctttcggctgagcggtctaaggatcctaaccggcaggttggagcatgcttggttagccaagagggaataatcctaggaattggctacaatggcttccctagaggttgttccgatgacaagcttccttgggcaaagaaatctgcaagtggagatccattggagacaaaattcccctacgttgtccatgctgaggttaatgcaattctaaataccaaccatgcttcagcggctggacagaaattgtatgtcaccatgttcccatgcaatgaatgtgccaagattattattcaggcgtatctgaggtcatatatttcgttgaaaaaaagattgacaactcagctcacgtttatgttgcctctcacaagctattgtcgatggctggtgtcaaggtcaggaagcatcagccccagatggcgcaaataccgatcaagttccaggagccatgaagccggtactagttccagccttccaggagcactagtgagcgaataaacagtgcaagatacctgttgaccgcggcacctgtgacaatcgacaatggccgacccgcagcggtctcggtatgcggcgtcggtccctctccctccctcagaggctgttgtaaaactatagctagaattcgtactggtaataatgtaaagacatttcaattctcctctctgataccagcttatcttttacgtgcgtttggatcccttcattttagaggaattgaaattcactcaataaattaactcatttagtttgaaatttgagatttc

SEQ ID NO: 148423 - DNA, 1253 bp, Zea Mays
gccccatattttcccgcgttcgtggtctccactctccagttctccgtttcccaactccaacccagcatccttgcatcccggggctcagttagcgttcccgccgcaccgtactacacctccggtggtcggtgcgcccatttcccgccgatcaagcgcgatggcctcgacgagggatctagccatagcttctctctcagctgcgaccggcgccgttgttgccgccgctgcactgcgcctcttgtcttcccgcagaacatcctccgtcagaccccagaacctccccgccgccgctaacggatctgcctccgagcgcccgctggctcagtcccccttcgatcctgtcaagagggaagggttcgtcaatgttctcccgccctcgttagcgatccttatgccagtccgctcgtcttgagtctcctgtgcagattcgtggcgcttgtttgtgcagatatatttcctgggacgactacttcatggcgatcgccttcctttcggctgagcggtctaaggatcctaaccggcaggttggagcatgcttggttagccaagagggaataatcctaggaattggctacaatggcttccctagaggttgttccgatgacaagcttccttgggcaaagaaatctgcaagtggagatccattggagacaaaattcccctacgttgtccatgctgaggttaatgcaattctaaataccaaccatgcttcagcggctggacagaaattgtatgtcaccatgttcccatgcaatgaatgtgccaagattattattcagtcaggcgtatctgaggtcatatatttcgttgaaaaaaagattgacaactcagctcacgtttatgttgcctctcacaagctattgtcgatggctggtgtcaaggtcaggaagcatcagccccagatggcgcaaataccgatcaagttccaggagccatgaagccggtactagttccagccttccaggagcactagtgagcgaataaacagtgcaagatacctgttgaccgcggcacctgtgacaatcgacaatggccgacccgcagcggtctcggtatgcggcgtcggtccctctccctccctcagaggctgttgtaaaactatagctagaattcgtactggtaataatgtaaagacatttcaattctcctctctgataccagcttatcttttacgtgcgtttggatcccttcattttagaggaattgaaattcactcaataaattaactcatttagtttgaaatttgagatttc

SEQ ID NO: 148424 - DNA, 1182 bp, Zea Mays
gccccatattttcccgcgttcgtggtctccactctccagttctccgtttcccaactccaacccagcatccttgcatcccggggctcagttagcgttcccgccgcaccgtactacacctccggtggtcggtgcgcccatttcccgccgatcaagcgcgatggcctcgacgagggatctagccatagcttctctctcagctgcgaccggcgccgttgttgccgccgctgcactgcgcctcttgtcttcccgcagaacatcctccgtcagaccccagaacctccccgccgccgctaacggatctgcctccgagcgcccgctggctcagtcccccttcgatcctgtcaagagggaaggattcgtggcgcttgtttgtgcagatatatttcctgggacgactacttcatggcgatcgccttcctttcggctgagcggtctaaggatcctaaccggcaggttggagcatgcttggttagccaagagggaataatcctaggaattggctacaatggcttccctagaggttgttccgatgacaagcttccttgggcaaagaaatctgcaagtggagatccattggagacaaaattcccctacgttgtccatgctgaggttaatgcaattctaaataccaaccatgcttcagcggctggacagaaattgtatgtcaccatgttcccatgcaatgaatgtgccaagattattattcagtcaggcgtatctgaggtcatatatttcgttgaaaaaaagattgacaactcagctcacgtttatgttgcctctcacaagctattgtcgatggctggtgtcaaggtcaggaagcatcagccccagatggcgcaaataccgatcaagttccaggagccatgaagccggtactagttccagccttccaggagcactagtgagcgaataaacagtgcaagatacctgttgaccgcggcacctgtgacaatcgacaatggccgacccgcagcggtctcggtatgcggcgtcggtccctctccctccctcagaggctgttgtaaaactatagctagaattcgtactggtaataatgtaaagacatttcaattctcctctctgataccagcttatcttttacgtgcgtttggatcccttcattttagaggaattgaaattcactcaataaattaactcatttagtttgaaatttgagatttc

SEQ ID NO: 148425 - DNA, 3412 bp, Zea Mays
ttcgctctcccgcgccaccggcctagacgcctagtatgttctagagcataccgcgatggccgaccctgctggcctcccgccgcggcttcgcccgtccactgtgccgcctccagccgccgtcacgcgcgcgctgcacgcgatcaacacctgcacctccgccgcggcactcgcgcccctccgcgtccacatcctccgggaacccgcgctcctccgctccaccgccgtcatctccgccttcttcctcgcctgcggccgcctccgtagcctcgaccccgcactcgttctcttcgcctccctcccgcggccccacgttttcgtcttcaactccctcctccgctccctcccccaggcccccgcctgctcaccgctcccgctcttgcgccacttcctcggcctcggcgcccgccccaaccgctacaccttcccgttgatgctcacctcgctttcctctctccgcgagctcaacgtcgcgcactcccaggtggccaagtccggctttgcgcgcgacctccacgtccgaaacgccctccttgctcgctacgcggcctgtgatccggacctcgggcacgctgagcagttgtttgatgaaatgccacgcccggacgtcgtctcgtggaccacggtgatcaccgcgtacagaaaccacggccacagtttcttggctctggccaccttccggcggatgttcgctgcatctgttgctcccaaccgcgtcaccatggtttctgcacttggtgcttgtgcagcacatggtgctgtggacactggcatctggattcatcagtacgttcagaagctgggttgggaactggatgtcgtgttaggcactgcgcttgttgacatgtatgggaagtgtggacacgttgcggaaggagtccgtgtattctccaaaatgactgagaggaatgtttttacttggaactctatcattggagcatttgctttggtacaggatggagaaatggctctgcgttggttcttcaggatgaaggctgatggcatacgccctgatgctgtcacgctaatttgtgttctttatgcatgcgtacatgctggattagttgatattgggaggaaaatatttaacttgattgttcaaggcgagtatgggtttcaacctgggatcaagcactttggatgcatggttgatcttcttagtcgctctggacacctgaatgatgctttcagggttgttgaggcaatgccatcacagccaaacgctgtcatttggggcctgctattgcgaggttgcaaggaccatggtgattcagtcttgagtgagcatgtgacaatgcagctgctggagttggagcctgaaaatgcttcgcattatgtgacacttgcaaacttgtatgctgagacagggaggtggctggaggctcacgaggtcttgaagtggatgaaggaaaaaggattggcaaaggatgcaggctggagccttaggatgttagaggacaggtcaagcaaatgtataagtgatggaaatttcatggaagctcttgaggagatactgtaacgaaacatggctcctctgactcctagactggtagtgcccatagacgtgaagaagcagccatgggagcagaaggttcctctccacaaccgctggcatccagacatccctcccgttgctgatgtaaccgaaggggaactgttccgggtcgagatggtagactggactggagggagggttagagacgataactctgcagacgacatcaaatccctggacctcacaatcactcattatcttagtgggcccctaagaatcgttgattccgaaggggttccggcttcaccaggcgatcttctcgcggtggaaatctgcaaccttggcccgcttcctggcgacgagtggggctacactgcgatatttgagagagagaacggaggtgggttcctaactgaccacttccctactgcgaggaaggccatctggtatttcgaaggaatctatgcgtactcccctcagataccaggtgttcgtttcccaggattaacccatcctggtattgtgggaactgcaccgtcagccgaacttcttaatatatggaacgagagggagaaaagattggccgagacaagcccacagacccttaaactgtgtgaagtgctacaccagaggccccttgccaatttaccgacccctgagaactgcttacttggaaagattcaggaggggactgctggatggcacaaagtggcgaatgaagcagccaggactattccgggaagggagaatggcggtaattgtgacataaaaaacttaagcagaggttccaaagtttatctgccagtatttgtcgaaggagcgaatcttagcaccggtgatatgcacttctcccagggcgatggtgaagtttcgttttgtggagcaattgaaatgagtggattccttgagctcaagtgcgagatcataagaggcgggatgaaggaatacttgaccccagttggtccgacaccgctacacgtgaaccctatctttgagatcggtcctgtcgagccacgcttctcggagtggctagtgtttgagggcataagcgtggatgaatctgggaagcagcatttccttgatgcgtcagttgcttacaagcgcgcagtcctgaacgccattgagtacattgctagatttgggtactcaaaggagcaggtgtatctcttactatcatgctgtccctgtgagggtaggatctctggaatagttgactctcctaatgcagtggcaactattgccatccctacagcaatatttgatcaggatataaagccaaaacacctgagaggaagaccgggaccaaagttgataaggcttccagatctcctgagctgttcaaacaatgggcatattcctgtcacccaagaccaaagtggtacaagggcgtcctaggggcgtatatgatctggaagctgatgccgtatccttctacttatacacacaaataatcgtgttggtgtttccaacaatgtatgaggatagagacacctgagtggtgccatattttcagtgcctgtattgctacaaagttgttcattaatttcactctatagaaaatttcttatttggggtcgagtatgtaactagcagtgaagtgaggatgagataatatgaaagaaccaggcagctggtagtggctggagcgaagttgcagttgtgacagattcactctacctgcacacaagaaaccaacacacactgttgatccagttctagcatactatagacagatgctggttggattcatgaaatagcctccggagctgaaggaagtcctaaagagggtgaagaaatgagtttgacaaacgatgctggttgtagccttagggtgatgttagaggaccatatatgagcggtggatatttgatggaatgggcattgtggagttgtggttcagtcaatctgtaccattgtcaa

SEQ ID NO: 148426 - DNA, 2120 bp, Zea Mays
aaaagcagtactgcagtagaaaaaaaactccctagaggtcgaccgagacccctgcggacctgcgcttcggccgttgcggaccgcaggagtgacgattccatggcggaggagatggcgcaggcgcaaccgagactcacggcgccacgttcggtccgctgtattgtcaagctaggtggagcggcgattaccaacaagggcgagctggagagcatcaacgaggagaacctacggtcggcatgtgcgcagctgcggcatgccatgtccgaatctgacggcgatggcgccatggagaaggttctgggaatggactggagtaggaagcccggagatcctgtcgacccggccgttgacgcggagtggatcgcggggatagctaggctggggctcgacactaacttcgtcgtcgtgcacggggccgggtcttttggccactttcaagcaagtagatctggagttcataaaggagggttacattcgacactggtcaaggctggctttgttgctacaagaatttcagtgacatctctcaaccaggaaattgttagagccctagcaagagaaggaataccatctgttgggatgtcaccatttgcttgtgggtggtctacccaacaaagaaaacttgcatcagcaaatgcttctcaaatatttcagtcactccatgcaggttttgtcccagtaagttgttgtagcaaaggttttgaaccgctattccttcaaaatttcatatttatcaaaaatagggcctggtgcagtggtagtctctccacttgctgtttggagatccttgaaaaattaagcaagggtaaggatgtagaaaagttctcttccccataccctttcttctgtgggagcttttggcactgggtacgcacacctgaagttgttggcatgagtggtatagttactcaccccatatttgacagcatatggtgctactggaacatgtatcatattgttatttttttatgcatgcactattttggtactcgtgatagtgcttttctatattgcacattgaacgctaaaacaagtcccatatgaattatttagtattaattattataagcaagcattagataagttccatgcgctttctctgatttgcagctggaacctaagcatgatcagaaattaatataaacttttgcttatagcataagacccttgtttcttgcaggttttgcacggtgatgcagttcttgatgaattattggtgaattttcaaatcaaagcttgctgcgttgttgtttaggttttatggactatgaagtcaatttattttattaaaaataaaattgatcttatctttaaatgaccaggactgtaccatattgagtggggatgtcattatacgacatcttgcacagcttctgagtccgaaatatgtagtatttctggtactgttaccttccctcctttacagctttaaaagttttatgttatcgatggaagatggttttgtacactatatggttttctaaaaattgtgatgtagacagatgtccatggagtgtatgatcgccctccaactgactcaaatgcagtacttctgagagaaataggttagtattcacctggttgatttttatctgcccataatatctagcctgtactttttgatgtgtattagtcattatgcgaggaaacaggacaacaaaggtaatgcaattgtcatcattcaattcttgggtaaaacatggaaatatgcttcttcaacaaattctagctgacttgtgttagttaacagaggtggatgacattggaggctggtcgattgtaaaacctgcattgctgcaaggcaacactaaaggagtggagatatcagttgcagcacatgacaccaccggtgggatggagaccaaaatactggaggctgcagtgatagctaggcttggaatagacgtgtatattaccaaggctggaacagaacactcgctgagggccttgaagggagatgtgagcaccgactcggaagattggcttggaactattatacgctcttccaaatagatttcttgttgcaaaaacattcggactggtttactggcgattttcccgatgttatatgagcagtgatgagccttgggctttcgatgatgatccagcacgggtctatt

SEQ ID NO: 148427 - DNA, 1346 bp, Zea Mays
aaaagcagtactgcagtagaaaaaaaactccctagaggtcgaccgagacccctgcggacctgcgcttcggccgttgcggaccgcaggagtgacgattccatggcggaggagatggcgcaggcgcaaccgagactcacggcgccacgttcggtccgctgtattgtcaagctaggtggagcggcgattaccaacaagggcgagctggagagcatcaacgaggagaacctacggtcggcatgtgcgcagctgcggcatgccatgtccgaatctgacggcgatggcgccatggagaaggttctgggaatggactggagtaggaagcccggagatcctgtcgacccggccgttgacgcggagtggatcgcggggatagctaggctggggctcgacactaacttcgtcgtcgtgcacggggccgggtcttttggccactttcaagcaagtagatctggagttcataaaggagggttacattcgacactggtcaaggctggctttgttgctacaagaatttcagtgacatctctcaaccaggaaattgttagagccctagcaagagaaggaataccatctgttgggatgtcaccatttgcttgtgggtggtctacccaacaaagaaaacttgcatcagcaaatgcttctcaaatatttcagtcactccatgcaggttttgtcccagttttgcacggtgatgcagttcttgatgaattattggactgtaccatattgagtggggatgtcattatacgacatcttgcacagcttctgagtccgaaatatgtagtatttctgacagatgtccatggagtgtatgatcgccctccaactgactcaaatgcagtacttctgagagaaatagaggtggatgacattggaggctggtcgattgtaaaacctgcattgctgcaaggcaacactaaaggagtggagatatcagttgcagcacatgacaccaccggtgggatggagaccaaaatactggaggctgcagtgatagctaggcttggaatagacgtgtatattaccaaggctggaacagaacactcgctgagggccttgaagggagatgtgagcaccgactcggaagattggcttggaactattatacgctcttccaaatagatttcttgttgcaaaaacattcggactggtttactggcgattttcccgatgttatatgagcagtgatgagccttgggctttcgatgatgatccagcacgggtctattccctactgtggtcgtagtttggtttacaagcgtcagcctgatgttacaaatgccgttcagtaaatttgttttgttttctgaaaagataagatgcattggtcgcaagagaggaaaaaa

SEQ ID NO: 148428 - DNA, 1637 bp, Zea Mays
aaaagcagtactgcagtagaaaaaaaactccctagaggtcgaccgagacccctgcggacctgcgcttcggccgttgcggaccgcaggagtgacgattccatggcggaggagatggcgcaggcgcaaccgagactcacggcgccacgttcggtccgctgtattgtcaagctaggtggagcggcgattaccaacaagggcgagctggagagcatcaacgaggagaacctacggtcggcatgtgcgcagctgcggcatgccatgtccgaatctgacggcgatggcgccatggagaaggttctgggaatggactggagtaggaagcccggagatcctgtcgacccggccgttgacgcggagtggatcgcggggatagctaggctggggctcgacactaacttcgtcgtcgtgcacggggccgggtcttttggccactttcaagcaagtagatctggagttcataaaggagggttacattcgacactggtcaaggctggctttgttgctacaagaatttcagtgacatctctcaaccaggaaattgttagagccctagcaagagaaggaataccatctgttgggatgtcaccatttgcttgtgggtggtctacccaacaaagaaaacttgcatcagcaaatgcttctcaaatatttcagtcactccatgcaggttttgtcccagttttgcacggtgatgcagttcttgatgaattattggactgtaccatattgagtggggatgtcattatacgacatcttgcacagcttctgagtccgaaatatgtagtatttctggtactgttaccttccctcctttacagctttaaaagttttatgttatcgatggaagatggttttgtacactatatggttttctaaaaattgtgatgtagacagatgtccatggagtgtatgatcgccctccaactgactcaaatgcagtacttctgagagaaataggttagtattcacctggttgatttttatctgcccataatatctagcctgtactttttgatgtgtattagtcattatgcgaggaaacaggacaacaaaggtaatgcaattgtcatcattcaattcttgggtaaaacatggaaatatgcttcttcaacaaattctagctgacttgtgttagttaacagaggtggatgacattggaggctggtcgattgtaaaacctgcattgctgcaaggcaacactaaaggagtggagatatcagttgcagcacatgacaccaccggtgggatggagaccaaaatactggaggctgcagtgatagctaggcttggaatagacgtgtatattaccaaggctggaacagaacactcgctgagggccttgaagggagatgtgagcaccgactcggaagattggcttggaactattatacgctcttccaaatagatttcttgttgcaaaaacattcggactggtttactggcgattttcccgatgttatatgagcagtgatgagccttgggctttcgatgatgatccagcacgggtctattccctactgtggtcgtagtttggtttacaagcgtcagcctgatgttacaaatgccgttcagtaaatttgttttgttttctgaaaagataagatgcattggtcgcaagagaggaaaaaattgatttt

SEQ ID NO: 148429 - DNA, 1840 bp, Zea Mays
gcagtactgcagtagaaaaaaaactccctagaggtcgaccgagacccctgcggacctgcgcttcggccgttgcggaccgcaggagtgacgattccatggcggaggagatggcgcaggcgcaaccgagactcacggcgccacgttcggtccgctgtattgtcaagctaggtggagcggcgattaccaacaagggcgagctggagagcatcaacgaggagaacctacggtcggcatgtgcgcagctgcggcatgccatgtccgaatctgacggcgatggcgccatggagaaggttctgggaatggactggagtaggaagcccggagatcctgtcgacccggccgttgacgcggagtggatcgcggggatagctaggctggggctcgacactaacttcgtcgtcgtgcacggggccgggtcttttggccactttcaagcaagtagatctggagttcataaaggagggttacattcgacactggtcaaggctggctttgttgctacaagaatttcagtgacatctctcaaccaggaaattgttagagccctagcaagagaaggaataccatctgttgggatgtcaccatttgcttgtgggtggtctacccaacaaagaaaacttgcatcagcaaatgcttctcaaatatttcagtcactccatgcaggttttgtcccagtaagttgttgtagcaaaggttttgaaccgctattccttcaaaatttcatatttatcaaaaatagggcctggtgcagtggtagtctctccacttgctgtttggagatccttgaaaaattaagcaagggtaaggatgtagaaaagttctcttccccataccctttcttctgtgggagcttttggcactgggtacgcacacctgaagttgttggcatgagtggtatagttactcaccccatatttgacagcatatggtgctactggaacatgtatcatattgttatttttttatgcatgcactattttggtactcgtgatagtgcttttctatattgcacattgaacgctaaaacaagtcccatatgaattatttagtattaattattataagcaagcattagataagttccatgcgctttctctgatttgcagctggaacctaagcatgatcagaaattaatataaacttttgcttatagcataagacccttgtttcttgcaggttttgcacggtgatgcagttcttgatgaattattggactgtaccatattgagtggggatgtcattatacgacatcttgcacagcttctgagtccgaaatatgtagtatttctgatgtccatggagtgtatgatcgccctccaactgactcaaatgcagtacttctgagagaaatagaggtggatgacattggaggctggtcgattgtaaaacctgcattgctgcaaggcaacactaaaggagtggagatatcagttgcagcacatgacaccaccggtgggatggagaccaaaatactggaggctgcagtgatagctaggcttggaatagacgtgtatattaccaaggctggaacagaacactcgctgagggccttgaagggagatgtgagcaccgactcggaagattggcttggaactattatacgctcttccaaatagatttcttgttgcaaaaacattcggactggtttactggcgattttcccgatgttatatgagcagtgatgagccttgggctttcgatgatgatccagcacgggtctattccctactgtggtcgtagtttggtttacaagcgtcagcctgatgttacaaatgccgttcagtaaatttgttttgttttctgaaaagataagatgcattggtcgcaagagaggaaaaaa

SEQ ID NO: 148430 - DNA, 1339 bp, Zea Mays
gcagtactgcagtagaaaaaaaactccctagaggtcgaccgagacccctgcggacctgcgcttcggccgttgcggaccgcaggagtgacgattccatggcggaggagatggcgcaggcgcaaccgagactcacggcgccacgttcggtccgctgtattgtcaagctaggtggagcggcgattaccaacaagggcgagctggagagcatcaacgaggagaacctacggtcggcatgtgcgcagctgcggcatgccatgtccgaatctgacggcgatggcgccatggagaaggttctgggaatggactggagtaggaagcccggagatcctgtcgacccggccgttgacgcggagtggatcgcggggatagctaggctggggctcgacactaacttcgtcgtcgtgcacggggccgggtcttttggccactttcaagcaagtagatctggagttcataaaggagggttacattcgacactggtcaaggctggctttgttgctacaagaatttcagtgacatctctcaaccaggaaattgttagagccctagcaagaggaataccatctgttgggatgtcaccatttgcttgtgggtggtctacccaacaaagaaaacttgcatcagcaaatgcttctcaaatatttcagtcactccatgcaggttttgtcccagttttgcacggtgatgcagttcttgatgaattattggactgtaccatattgagtggggatgtcattatacgacatcttgcacagcttctgagtccgaaatatgtagtatttctgacagatgtccatggagtgtatgatcgccctccaactgactcaaatgcagtacttctgagagaaatagaggtggatgacattggaggctggtcgattgtaaaacctgcattgctgcaaggcaacactaaaggagtggagatatcagttgcagcacatgacaccaccggtgggatggagaccaaaatactggaggctgcagtgatagctaggcttggaatagacgtgtatattaccaaggctggaacagaacactcgctgagggccttgaagggagatgtgagcaccgactcggaagattggcttggaactattatacgctcttccaaatagatttcttgttgcaaaaacattcggactggtttactggcgattttcccgatgttatatgagcagtgatgagccttgggctttcgatgatgatccagcacgggtctattccctactgtggtcgtagtttggtttacaagcgtcagcctgatgttacaaatgccgttcagtaaatttgttttgttttctgaaaagataagatgcattggtcgcaagagaggaaaaaa

SEQ ID NO: 148431 - DNA, 1773 bp, Zea Mays
gcagtactgcagtagaaaaaaaactccctagaggtcgaccgagacccctgcggacctgcgcttcggccgttgcggaccgcaggagtgacgattccatggcggaggagatggcgcaggcgcaaccgagactcacggcgccacgttcggtccgctgtattgtcaagctaggtggagcggcgattaccaacaagggcgagctggagagcatcaacgaggagaacctacggtcggcatgtgcgcagctgcggcatgccatgtccgaatctgacggcgatggcgccatggagaaggttctgggaatggactggagtaggaagcccggagatcctgtcgacccggccgttgacgcggagtggatcgcggggatagctaggctggggctcgacactaacttcgtcgtcgtgcacggggccgggtcttttggccactttcaagcaagtagatctggagttcataaaggagggttacattcgacactggtcaaggctggctttgttgctacaagaatttcagtgacatctctcaaccaggaaattgttagagccctagcaagagaaggaataccatctgttgggatgtcaccatttgcttgtgggtggtctacccaacaaagaaaacttgcatcagcaaatgcttctcaaatatttcagtcactccatgcaggttttgtcccagttttgcacggtgatgcagttcttgatgaattattggtgaattttcaaatcaaagcttgctgcgttgttgtttaggttttatggactatgaagtcaatttattttattaaaaataaaattgatcttatctttaaatgaccaggactgtaccatattgagtggggatgtcattatacgacatcttgcacagcttctgagtccgaaatatgtagtatttctgtcattatgcgaggaaacaggacaacaaagcttggctcttaggactggcacatgccttagccactattctgacacttccaagtacctgattcaggggagggcaaaaacgtccaaatctgcaattaaatacccagacgatttcctttcaggtaaagtgagaaaaacggcagagcgactcctaaaaagaaccggagggagtactgaataagcattgccaacctagttttcattcaccattgagaatgtccttctgtattttcaataacgtgacatcaaatgctcctagtgaaggtgcagtggtttagaagcgaactgtaggatcaaactatggtttattaggctgaggagtagggacaatgatgtgcctggcctggttttttttttcttctaaactgcttgctgtagccttgtattttgtagagtaagatatctgttgttctcatgtactgcagtggagatatcagttgcagcacatgacaccaccggtgggatggagaccaaaatactggaggctgcagtgatagctaggcttggaatagacgtgtatattaccaaggctggaacagaacactcgctgagggccttgaagggagatgtgagcaccgactcggaagattggcttggaactattatacgctcttccaaatagatttcttgttgcaaaaacattcggactggtttactggcgattttcccgatgttatatgagcagtgatgagccttgggctttcgatgatgatccagcacgggtctattccctactgtggtcgtagtttggtttacaagcgtcagcctgatgttacaaatgccgttcagtaaatttgttttgttttctgaaaagataagatgcattggtcgcaagagaggaaaaaattgattt

SEQ ID NO: 148432 - DNA, 1757 bp, Zea Mays
cccacacctacagcagcagaactgcagaagcggtccctctccacagaactgcagaagcagcgcggcgcggccgttaactcggctccctcaccttgctgccccctccgcaggcgcaggcgctcgcttccggtaaaaaaattggaggtgccatttgccaggggcgtactccattgattcgggctgagttgtgcaaattgtgatagaactttcccgagattcaagcccatacaatgcagggcatctctatatgcggttcagttgcctcaccccatggagcaaactgcagaagggcttgtgttgcaaggaacgatgtgaggctgccttgtgaagttaatgcagtaagccagggattgcactctctgcattggtggtgtgcacacaaaccgcaaatgaagaacaatggaagaagaatgaatgccgcagtgaaaactaatgccagatggttgtttggaggagatgggcgtagcaatgatgcaaggctggagcgcagtgagtctgctaatgaagatattttgatcttctacttccagatggatctacagacccggatacagtatgcattgaatatagaacaatttgatgtggcaaagcaattgagggaaaaactaaccgagattgaaacagaaattattaggcagcgtgaagctagaaggggttcaccaaagactgaagcccaagacaaagctctaaatcttatacgtgtgcgtgcagacttgcagaaggctattgacagtgaaaactatgctttggcagctggtctccgtgatgacattgccaaacttgaggttgagtctcttgcagtatctgctaaagctcttgcttatcaaaatgtgaaatatgcatttcgattagggcagaaagtacgtcacaatatacatggatatagaggcgtgatatgtggcatggacccggtgtgctgtgaatccaagtcctggatggagacagcaaacgtggagaagctgtctaagggtccaaatcaacctttttatcaggtcctggttgatgtatatgttgatccagaactgctggttgcatatgtcgcagaagaaaatctttctgcagctgaagaatcagaaaaaggaaggtttgatcacccctacattgagtttctcttttacggtgaggacacagctggggatttcattcctatcaagcagctccgtgagaagtatgaccagccacgctatgaagcttctggagatgaaagtgacaacgatggcaacacaaatagctaaaggtcaagtgccttcgtgttgctagagttgttttggaaccattttgattcacctccaccaactcagatgtgaagtgctgaactatctggtacagatgcagatgtaagacaaggcaaccattggcgaactgggcatcctcagtaacctgcagtaattctctgcatatgccgtccaaccttgcagatcgaaaattactcttttagagttttaccgtcaccaatcgattaagccatgcttgagataagctacgtgtgccttgcttttacattataataccatcgataaatataaacgaaggaaagaaaggaagaaagaaagaaagaaaaaaatatatatccctatggatgttctgtgtatagttctctgagatctatctagttctgtactgtaccctctggtggacaattgtgcatatgtaacactggcaacttgtgtggagtctcgaataaattacgcgaagacttcacatgcagttgtttggactctgcattcatggaatcaatcatgtggaaataacatttt

SEQ ID NO: 148433 - DNA, 1750 bp, Zea Mays
cccacacctacagcagcagaactgcagaagcggtccctctccacagaactgcagaagcagcgcggcgcggccgttaactcggctccctcaccttgctgccccctccgcaggcgcaggcgctcgcttccgaattggaggtgccatttgccaggggcgtactccattgattcgggctgagttgtgcaaattgtgatagaactttcccgagattcaagcccatacaatgcagggcatctctatatgcggttcagttgcctcaccccatggagcaaactgcagaagggcttgtgttgcaaggaacgatgtgaggctgccttgtgaagttaatgcagtaagccagggattgcactctctgcattggtggtgtgcacacaaaccgcaaatgaagaacaatggaagaagaatgaatgccgcagtgaaaactaatgccagatggttgtttggaggagatgggcgtagcaatgatgcaaggctggagcgcagtgagtctgctaatgaagatattttgatcttctacttccagatggatctacagacccggatacagtatgcattgaatatagaacaatttgatgtggcaaagcaattgagggaaaaactaaccgagattgaaacagaaattattaggcagcgtgaagctagaaggggttcaccaaagactgaagcccaagacaaagctctaaatcttatacgtgtgcgtgcagacttgcagaaggctattgacagtgaaaactatgctttggcagctggtctccgtgatgacattgccaaacttgaggttgagtctcttgcagtatctgctaaagctcttgcttatcaaaatgtgaaatatgcatttcgattagggcagaaagtacgtcacaatatacatggatatagaggcgtgatatgtggcatggacccggtgtgctgtgaatccaagtcctggatggagacagcaaacgtggagaagctgtctaagggtccaaatcaacctttttatcaggtcctggttgatgtatatgttgatccagaactgctggttgcatatgtcgcagaagaaaatctttctgcagctgaagaatcagaaaaaggaaggtttgatcacccctacattgagtttctcttttacggtgaggacacagctggggatttcattcctatcaagcagctccgtgagaagtatgaccagccacgctatgaagcttctggagatgaaagtgacaacgatggcaacacaaatagctaaaggtcaagtgccttcgtgttgctagagttgttttggaaccattttgattcacctccaccaactcagatgtgaagtgctgaactatctggtacagatgcagatgtaagacaaggcaaccattggcgaactgggcatcctcagtaacctgcagtaattctctgcatatgccgtccaaccttgcagatcgaaaattactcttttagagttttaccgtcaccaatcgattaagccatgcttgagataagctacgtgtgccttgcttttacattataataccatcgataaatataaacgaaggaaagaaaggaagaaagaaagaaagaaaaaaatatatatccctatggatgttctgtgtatagttctctgagatctatctagttctgtactgtaccctctggtggacaattgtgcatatgtaacactggcaacttgtgtggagtctcgaataaattacgcgaagacttcacatgcagttgtttggactctgcattcatggaatcaatcatgtggaaataacatttt

SEQ ID NO: 148434 - DNA, 2223 bp, Zea Mays
cggctccctcaccttgctgccccctccgcaggcgcaggcgctcgcttccggtaaaaagtgagctagttcctctccgcaccactatgattgaagattcaccccaagttcggttccacacaaaatttagctctgctcaccgcggtgggccgccgctgcagcgctgccctgccactgccatgcgcgtcgccgctcgggccggtctcaatgccggacgcttcttgcgctcagccgcggccaggtctggtccggtcatccccatcccttacgccttgcgcgccggcgtataggcgtgggtgcgttccgtgcgcgagcgcggattgacccatgcgattgcctgtaactgtgaacagacaacaggttgtcctcaatctagagaaagaagctagaaattgctgtcccttgcttcgttcttgtaacaaattgtagggtgtcgtgaaatactaccgagtgaaccactccgtcttgtctcctgaagccaaagtcccaagcactgattagttgacagagtaaccttactagtttcagagcactaagcaatttgctgaaagttttgcatgcaccaggcaaaatttgctgtgctaatagcagatcgtgctttgccagaattggaggtgccatttgccaggggcgtactccattgattcgggctgagttgtgcaaattgtgatagaactttcccgagattcaagcccatacaatgcagggcatctctatatgcggttcagttgcctcaccccatggagcaaactgcagaagggcttgtgttgcaaggaacgatgtgaggctgccttgtgaagttaatgcagtaagccagggattgcactctctgcattggtggtgtgcacacaaaccgcaaatgaagaacaatggaagaagaatgaatgccgcagtgaaaactaatgccagatggttgtttggaggagatgggcgtagcaatgatgcaaggctggagcgcagtgagtctgctaatgaagatattttgatcttctacttccagatggatctacagacccggatacagtatgcattgaatatagaacaatttgatgtggcaaagcaattgagggaaaaactaaccgagattgaaacagaaattattaggcagcgtgaagctagaaggggttcaccaaagactgaagcccaagacaaagctctaaatcttatacgtgtgcgtgcagacttgcagaaggctattgacagtgaaaactatgctttggcagctggtctccgtgatgacattgccaaacttgaggttgagtctcttgcagtatctgctaaagctcttgcttatcaaaatgtgaaatatgcatttcgattagggcagaaagtacgtcacaatatacatgaggcgtgatatgtggcatggacccggtgtgctgtgaatccaagtcctggatggagacagcaaacgtggagaagctgtctaagggtccaaatcaacctttttatcaggtcctggttgatgtatatgttgatccagaactgctggttgcatatgtcgcagaagaaaatctttctgcagctgaagaatcagaaaaaggaaggtttgatcacccctacattgagtttctcttttacggtgaggacacagctggggatttcattcctatcaagcagctccgtgagaagtatgaccagccacgctatgaagcttctggagatgaaagtgacaacgatggcaacacaaatagctaaaggtcaagtgccttcgtgttgctagagttgttttggaaccattttgattcacctccaccaactcagatgtgaagtgctgaactatctggtacagatgcagatgtaagacaaggcaaccattggcgaactgggcatcctcagtaacctgcagtaattctctgcatatgccgtccaaccttgcagatcgaaaattactcttttagagttttaccgtcaccaatcgattaagccatgcttgagataagctacgtgtgccttgcttttacattataataccatcgataaatataaacgaaggaaagaaaggaagaaagaaagaaagaaaaaaatatatatccctatggatgttctgtgtatagttctctgagatctatctagttctgtactgtaccctctggtggacaattgtgcatatgtaacactggcaacttgtgtggagtctcgaataaattacgcgaagacttcacatgcagttgtttggactctgcattcatggaatcaatcatgtggaaataacattttttgttg

SEQ ID NO: 148435 - DNA, 1801 bp, Zea Mays
tgagctagttcctctccgcaccactatgattgaagattcaccccaagttcggttccacacaaaatttagctctgctcaccgcggtgggccgccgctgcagcgctgccctgccactgccatgcgcgtcgccgctcgggccggtctcaatgccggacgcttcttgcgctcagccgcggccagaattggaggtgccatttgccaggggcgtactccattgattcgggctgagttgtgcaaattgtgatagaactttcccgagattcaagcccatacaatgcagggcatctctatatgcggttcagttgcctcaccccatggagcaaactgcagaagggcttgtgttgcaaggaacgatgtgaggctgccttgtgaagttaatgcagtaagccagggattgcactctctgcattggtggtgtgcacacaaaccgcaaatgaagaacaatggaagaagaatgaatgccgcagtgaaaactaatgccagatggttgtttggaggagatgggcgtagcaatgatgcaaggctggagcgcagtgagtctgctaatgaagatattttgatcttctacttccagatggatctacagacccggatacagtatgcattgaatatagaacaatttgatgtggcaaagcaattgagggaaaaactaaccgagattgaaacagaaattattaggcagcgtgaagctagaaggggttcaccaaagactgaagcccaagacaaagctctaaatcttatacgtgtgcgtgcagacttgcagaaggctattgacagtgaaaactatgctttggcagctggtctccgtgatgacattgccaaacttgaggttgagtctcttgcagtatctgctaaagctcttgcttatcaaaatgtgaaatatgcatttcgattagggcagaaagtacgtcacaatatacatggatatagaggcgtgatatgtggcatggacccggtgtgctgtgaatccaagtcctggatggagacagcaaacgtggagaagctgtctaagggtccaaatcaacctttttatcaggtcctggttgatgtatatgttgatccagaactgctggttgcatatgtcgcagaagaaaatctttctgcagctgaagaatcagaaaaaggaaggtttgatcacccctacattgagtttctcttttacggtgaggacacagctggggatttcattcctatcaagcagctccgtgagaagtatgaccagccacgctatgaagcttctggagatgaaagtgacaacgatggcaacacaaatagctaaaggtcaagtgccttcgtgttgctagagttgttttggaaccattttgattcacctccaccaactcagatgtgaagtgctgaactatctggtacagatgcagatgtaagacaaggcaaccattggcgaactgggcatcctcagtaacctgcagtaattctctgcatatgccgtccaaccttgcagatcgaaaattactcttttagagttttaccgtcaccaatcgattaagccatgcttgagataagctacgtgtgccttgcttttacattataataccatcgataaatataaacgaaggaaagaaaggaagaaagaaagaaagaaaaaaatatatatccctatggatgttctgtgtatagttctctgagatctatctagttctgtactgtaccctctggtggacaattgtgcatatgtaacactggcaacttgtgtggagtctcgaataaattacgcgaagacttcacatgcagttgtttggactctgcattcatggaatcaatcatgtggaaataacatttt

SEQ ID NO: 148436 - DNA, 670 bp, Zea Mays
gatttatgatataagtcggatgcgtctcgttttgttgcccgcggtcgtggcctcctgggcccctctccacctaccctaccaaacctgctctcccctccgcccccacgcggtcacccgcttccaaataaatcgcagcattccctgcctaaacgtgctcgctctccctcccatttcatcccggcattttccttgcccaacgtgctctccctcccatttcctgcgaggtggttggtggcgatggccttcaagctgatcaccaagcccgcggcggcgtcgcccgctgctgcttactggggagatctcgcccgggggccgcagggtacgagccgcgttgccttcggaccagcgcccaggaacaaggggctccgcgcggccaacaactccgcaacgcccatagctaaggtagagagggttgatcgaagtgacatattgacattggatagcatcagacaagttttgattagactagaagacagcatcatatttggccttttggagagagcacagttttgttacaatgctgatacatatgatagcaatgctttccacatggatggttttggaggatctttggttgaatatatagttagagaaactgaaaagctccatgcacaggtgaatccatttggatttctttaaaaaaacaaaacaattgatcatggcatgcgaa

SEQ ID NO: 148437 - DNA, 1523 bp, Zea Mays
gatttatgatataagtcggatgcgtctcgttttgttgcccgcggtcgtggcctcctgggcccctctccacctaccctaccaaacctgctctcccctccgcccccacgcggtcacccgcttccaaataaatcgcagcattccctgcctaaacgtgctcgctctccctcccatttcatcccggcattttccttgcccaacgtgctctccctcccatttcctgcgaggtggttggtggcgatggccttcaagctgatcaccaagcccgcggcggcgtcgcccgctgctgcttactggggagatctcgcccgggggccgcagggtacgagccgcgttgccttcggaccagcgcccaggaacaaggggctccgcgcggccaacaactccgcaacgcccatagctaaggtagagagggttgatcgaagtgacatattgacattggatagcatcagacaagttttgattagactagaagacagcatcatatttggccttttggagagagcacagttttgttacaatgctgatacatatgatagcaatgctttccacatggatggttttggaggatctttggttgaatatatagttagagaaactgaaaagctccatgcacaggttgggagatacaagagcccagatgagcaccctttcttttccaaggatctgcctgagccccggttgccacctatgcaatacccaagggttttgcatcccattgctgattctatcaatatcaacaaagagatttggaaaatgtattttgatgaacttcttccaagattggtgaaagaaggaagtgatggtaatgctggatccagtgctctttgtgacacaacctgcttgcaggcactctccagaaggatccactatgggaagtttgtggcagaggccaagtttcaagagtcccctgaagcttacacgccagccataatagcccaagtctgcttttgttccaactattagtatttctagtactactattttcatttattttttattttatttcagagtttcagaacaaaatgatatttcgattcatttgaaaaatatatctatttctcgtcacatttggcaaaattcaggaccgtgatcaactcatgaaccttctcacatatgaaacggtggagcgtgctatcgaacacagggtggaggccaaagccaagatcttcgggcaagaggtgaacattggtgctaaggacaacggcagcccaccggtctacaaaatcaggccgagcttggtcgccgagctgtacagctacagaatcatgccgctaaccaaggaggttgaggtcgcgtacttgcttaagaggctggattgagtgtgtttacgtagctgtaaaactgccagatccgaactcctggtattaaaccataacatcggtaagtacccatttctgtgaagaggatgatccgaactcctgtcattaaaccagaacatcagtaagtacccagttttggggagaggatggaaaatataccatgtgtggcaagcaacatgcataatatcatctggagttgcgctt

SEQ ID NO: 148438 - DNA, 1278 bp, Zea Mays
gatttatgatataagtcggatgcgtctcgttttgttgcccgcggtcgtggcctcctgggcccctctccacctaccctaccaaacctgctctcccctccgcccccacgcggtcacccgcttccaaataaatcgcagcattccctgcctaaacgtgctcgctctccctcccatttcatcccggcattttccttgcccaacgtgctctccctcccatttcctgcgaggtggttggtggcgatggccttcaagctgatcaccaagcccgcggcggcgtcgcccgctgctgcttactggggagatctcgcccgggggccgcagggtacgagccgcgttgccttcggaccagcgcccaggaacaaggggctccgcgcggccaacaactccgcaacgcccatagctaaggttgggagatacaagagcccagatgagcaccctttcttttccaaggatctgcctgagccccggttgccacctatgcaatacccaagggttttgcatcccattgctgattctatcaatatcaacaaagagatttggaaaatgtattttgatgaacttcttccaagattggtgaaagaaggaagtgatggtaatgctggatccagtgctctttgtgacacaacctgcttgcaggcactctccagaaggatccactatgggaagtttgtggcagaggccaagtttcaagagtcccctgaagcttacacgccagccataatagcccaagaccgtgatcaactcatgaaccttctcacatatgaaacggtggagcgtgctatcgaacacagggtggaggccaaagccaagatcttcgggcaagaggtgaacattggtgctaaggacaacggcagcccaccggtctacaaaatcaggccgagcttggtcgccgagctgtacagctacagaatcatgccgctaaccaaggaggttgaggtcgcgtacttgcttaagaggctggattgagtgtgtttacgtagctgtaaaactgccagatccgaactcctggtattaaaccataacatcggtaagtacccatttctgtgaagaggatgatccgaactcctgtcattaaaccagaacatcagtaagtacccagttttggggagaggatggaaaatataccatgtgtggcaagcaacatgcataatatcatctggagttgcgcttactcgcccctcgtgcgtaatgctaatggttgtagcctgtatggaatgctgggtcactttctttggctgggtgcccttttgaatcagagtaaattcgctcattgtcgctgga

SEQ ID NO: 148439 - DNA, 1262 bp, Zea Mays
gctggcgccatggccaccacggcccaactggcgggcacggggacagcgcgaagcgcccaaggcccaccgaatcagaagcgatcggaccctcggtccctcgctaagccatccagctctcgttccgttccccccttcaagctggtcaccaagcccgcggcggcgtcgcccgctgctgctcactggggagatctcgcccgggggccgcagggtacgagccgcgttgccttcggaccagcgcccaggaacaaggggctccgcacggccaacaactccgcaacgcccatggctaaggaagagagggttgatcgaagtgaaatattgacattggatagcatcagacaagttttgattagactagaagacagcatcatatttggacttttggagagagcacagttttgttacaacgctgacacatatgatagcaatgctttccacatggatggttttggagggtctttggttgaatatatggttagagaaactgaaaagctccatgcacaggttgggaggtacaagagcccagatgagcaccctttcttttccaaggatctgcctgagccccagttgccacctatgcaatacccaagggttttgcatcccattgctgattctatcaatatcaacaaagagatttggacaatgtattttgatgaacttcttccaagattggtgaaagaaggaagtgatggtaatgctggatccaatgctctttgtgacacaacctgcttgcaggcactctccaaaaggatccactatgggaagtttgtggcagaggccaagtttcaagagtcccctgaagcttacacgccagccataatagcccaagaccgtgatcaactcatgcgccttctcacatatgaaacggtggagcgtgctgtcgaacacagggtggaagccaaagccaagatcttcgggcaagaggtgaacattggtgctaaggacaacggcagccaaccagtctacaaaatcaggccgagcttggtcgccgagctgtacagctacagaatcatgccgctaaccaaggaggttgaggtcgcgtacttgcttaggaggctggattgagtgtgtttacgtagctgtaaaactgccagatccgaaactcgtgcaattaaaccattacatcggtaagtactcatttctgtggagaggatgatccgaactcctggcattaaaccagaacgtcagtaagtacccagttttggggagaagatgggaactgtggcaataaacatgcagaatatcatgtggagttgtcgctt

SEQ ID NO: 148440 - DNA, 1549 bp, Zea Mays
tccctcgctaagccatccagctctcgttccgttccccacgggccacggtcctgggccccttccccatcaagcctaccacacctgctctctccgtccggcccacgcggccaccgacttccaaattcccaataaatacccggcattttgcttgcataacatgctttacacgctctccctcccacttcgtgcgagcgtcccgaactaagttgctcgtggtggaggtggtttgtggcgatggccttcaagctggtcaccaagcccgcggcggcgtcgcccgctgctgctcactggggagatctcgcccgggggccgcagggtacgagccgcgttgccttcggaccagcgcccaggaacaaggggctccgcacggccaacaactccgcaacgcccatggctaaggaagagagggttgatcgaagtgaaatattgacattggatagcatcagacaagttttgattagactagaagacagcatcatatttggacttttggagagagcacagttttgttacaacgctgacacatatgatagcaatgctttccacatggatggttttggagggtctttggttgaatatatggttagagaaactgaaaagctccatgcacaggttgggaggtacaagagcccagatgagcaccctttcttttccaaggatctgcctgagccccagttgccacctatgcaatacccaagggttttgcatcccattgctgattctatcaatatcaacaaagagatttggacaatgtattttgatgaacttcttccaagattggtgaaagaaggaagtgatggtaatgctggatccaatgctctttgtgacacaacctgcttgcaggcactctccaaaaggatccactatgggaagtttgtggcagaggccaagtttcaagagtcccctgaagcttacacgccagccataatagcccaagaccgtgatcaactcatgcgccttctcacatatgaaacggtggagcgtgctgtcgaacacagggtggaagccaaagccaagatcttcgggcaagaggtgaacattggtgctaaggacaacggcagccaaccagtctacaaaatcaggccgagcttggtcgccgagctgtacagctacagaatcatgccgctaaccaaggaggttgaggtcgcgtacttgcttaggaggctggattgagtgtgtttacgtagctgtaaaactgccagatccgaaactcgtgcaattaaaccattacatcggtaagtactcatttctgtggagaggatgatccgaactcctggcattaaaccagaacgtcagtaagtacccagttttggggagaagatgggaactgtggcaataaacatgcagaatatcatgtggagttgtcgctttctttggctgtatggaatgctacgtcactttctttggctgggtgcccagtgcccttttgaatcggagtaaattctctcattgtcgttggatttatacagatcctctcagtgccatggaaattttcagctttctttgattcaaactatttgatgtttgcatttccttggttgccgttcct

SEQ ID NO: 148441 - DNA, 1337 bp, Zea Mays
cagaactgacaacagcgctgccgcacctacccctctccactacgactccacattttccaacggatttttatttttctaagaaaattagtttttttagaaaaatagaaatcacttggttgcactaaaaaaacaggcacactcgtcactcggtcgccgcgcgacctcccagttcgtctattaaaggggaaccagtgaaccacccgatgcaacttgcgtagagagttgggcgcagagaatccccaagcaaacaaacagggtagagggagaggagaggagaggagaggagaggttgggtctgggacaccatggctccgatgaagctgtacggggcggtgatgtcgtggaacgtgacgaggtgcgcaacggcgctggaggaggctggctccgactacgagatcgtgcccatcaacttcgccaccgccgagcacaagagccccgagcacctcgtccgcaacccgtttggtcaggttccagctctgcaggatggtgacttgtacctcttcgaatcacgagcaatctgcaagtacgctgctcgcaaaaacaagccagagctgttgagggaaggaaacctcgaggaggcagcaatggtggatgtttggatcgaggtggaggctaaccagtacaccgctgcactgaatcccatcctcttccaggtcctcatcagtcctatgcttgggggaaccaccgaccagaaagttgtggatgagaaccttgagaagctgaagaaggtgctagaggtgtacgaggcacgcctgaccaagtgcaagtaccttgctggagacttcctcagcctcgccgacctgaaccatgtgtctgtcactctctgcctgttcgctacgccctacgcatctgtgctcgacgcctacccgcatgtgaaggcctggtggtctggtctgatggagaggccgtctgtccagaaggtcgctgccctgatgaagccatctgcttgaaacggttgccctgtcaatcggtgaatggaataagccaagtctgttctgggttgtttgcttgttcagtgatgtgtcttctatgacgaaagttgagtgcctatgtgtgagcatgcttgcttgtaacgagacattgaattgttcggaaatgagcattcctgtgctcttcttgaaaataaactttgcgttaggttcctcaggatcttgatggtttggttgctgctgcaatcttcaggttcgatgttatcgatcatggccatggcaaatgcatctgcatagtctaactctaatggatagcaagcctggatgtcacgaccattatgcctttaaaaaaggccaactgacggtaggcttcctaacgaaattaccaagatggattaatgtgtgttc

SEQ ID NO: 148442 - DNA, 1095 bp, Zea Mays
gccatttggtgcggcccatgttctcgcccaacagaaacctgagcccattgccatttccagcgtctcgtctcgctgtatcgttcggtctcccacccctttcccctcttcgtcgatctcaccaccgcgccgaccccgatggcctccgccgcctcatcggccgccgccgctggcaaatcgctgttccaggggttccgcaggttcctcaaaaagccgtgggagatcacgggcccctgcgcctcgcccgagtaccgcagcgcgctgcctggcgcgctcgagtaccgcgtcaagtgcccggccaccgtgcgcgacgaccgcgacaaggccatcgtgcccacatccgatccggagacagtctacgacatcaagtacttcacccgcgaccgccgccggaaccgtccgcccgtgcgccgcaccctgctccgcaagcccgacctcgagcgctacatggtcaccaagcagtttgaccccaccaaggacttccccgtgccatacgtcaacaccactgtcgaggaggacgacaacacggtcggcggtggctaccagaaatgatccaggtgggtggtgtctcctcttagatctgatgtggcagctagggtttcagctatgttgcttgctaccctgtggtcatgctttccgattttctagtggcaggagctttgcctagcattcaagtagggggaaacataatgcttgattagaattgatatatccgggctgcaaaacgagctattgctggcttgccacaaaacatgaagcagttatctggacatggtgtgtttgatgtcgtgtgcgttacgtgcattagctaactggacaggcctgcaatgtaagacaaggtaccatttcatcagaatcaaacactccacataatttgacatgatcaaggcattagtaattagatgcccatatctttatggcttgcattattgtctcatagagggacgtttctctattattgtttgtaatttggtatctccgttttttaatgcttgaaatgcaatttcttcaggtgtagggtttcacaatagagtagttattttcttcatgaatgtttcactttactgtgtactgagaaacctctattattggggctta

SEQ ID NO: 148443 - DNA, 1019 bp, Zea Mays
gccatttggtgcggcccatgttctcgcccaacagaaacctgagcccattgccatttccagcgtctcgtctcgctgtatcgttcggtctcccacccctttcccctcttcgtcgatctcaccaccgcgccgaccccgatggcctccgccgcctcatcggccgccgccgctggcaaatcgctgttccaggggttccgcaggttcctcaaaaagccgtgggagatcacgggcccctgcgcctcgcccgagtaccgcagcgcgctgcctggcgcgctcgagtaccgcgtcaagtgcccggccaccgtgcgcgacgaccgcgacaaggccatcgtgcccacatccgatccggagacagtctacgacatcaagtacttcacccgcgaccgccgccggaaccgtccgcccgtgcgccgcaccctgctccgcaagcccgacctcgagcgctacatggtcaccaagcagtttgaccccaccaaggacttccccgtgccatacgtcaacaccactgtcgaggaggacgacaacacggtcggcggtggctaccagaaatgatccaggagctttgcctagcattcaagtagggggaaacataatgcttgattagaattgatatatccgggctgcaaaacgagctattgctggcttgccacaaaacatgaagcagttatctggacatggtgtgtttgatgtcgtgtgcgttacgtgcattagctaactggacaggcctgcaatgtaagacaaggaaagcttactgatttgatgctggttaatttgccaggcatccttgttgtgcttggactccatgagcagctgcacaaatttcgtttcagctttcaaatatctcctttttctgcaagttttctggttgtaaaagatgatggtggcaataatatggtacttgagctcacaggatgcacatttcttgtaacctgtattccaaaactttatctacctgaaaccatagttactgtttaagaataaccaaaggttttctaatgtgcacatcatctccaacttaacca

SEQ ID NO: 148444 - DNA, 834 bp, Zea Mays
gccatttggtgcggcccatgttctcgcccaacagaaacctgagcccattgccatttccagcgtctcgtctcgctgtatcgttcggtctcccacccctttcccctcttcgtcgatctcaccaccgcgccgaccccgatggcctccgccgcctcatcggccgccgccgctggcaaatcgctgttccaggggttccgcaggttcctcaaaaagccgtgggagatcacgggcccctgcgcctcgcccgagtaccgcagcgcgctgcctggcgcgctcgagtaccgcgtcaagtgcccggccaccgtgcgcgacgaccgcgacaaggccatcgtgcccacatccgatccggagacagtctacgacatcaagtacttcacccgcgaccgccgccggaaccgtccgcccgtgcgccgcaccctgctccgcaagcccgacctcgagcgctacatggtcaccaagcagtttgaccccaccaaggacttccccgtgccatacgtcaacaccactgtcgaggaggacgacaacacggtcggcggtggctaccagaaatgatccaggaaagcttactgatttgatgctggttaatttgccaggcatccttgttgtgcttggactccatgagcagctgcacaaatttcgtttcagctttcaaatatctcctttttctgcaagttttctggttgtaaaagatgatggtggcaataatatggtacttgagctcacaggatgcacatttcttgtaacctgtattccaaaactttatctacctgaaaccatagttactgtttaagaataaccaaaggttttctaatgtgcacatcatctccaacttaacca

SEQ ID NO: 148445 - DNA, 859 bp, Zea Mays
gccatttggtgcggcccatgttctcgcccaacagaaacctgagcccattgccatttccagcgtctcgtctcgctgtatcgttcggtctcccacccctttcccctcttcgtcgatctcaccaccgcgccgaccccgatggcctccgccgcctcatcggccgccgccgctggcaaatcgctgttccaggggttccgcaggttcctcaaaaagccgtgggagatcacgggcccctgcgcctcgcccgagtaccgcagcgcgctgcctggcgcgctcgagtaccgcgtcaagtgcccggccaccgtgcgcgacgaccgcgacaaggccatcgtgcccacatccgatccggagacagtctacgacatcaagtacttcacccgcgaccgccgccggaaccgtccgcccgtgcgccgcaccctgctccgcaagcccgacctcgagcgctacatggtcaccaagcagtttgaccccaccaaggacttccccgtgccatacgtcaacaccactgtcgaggaggacgacaacacggtcggcggtggctaccagaaatgatccaggcatccttgttgtgcttggactccatgagcagctgcacaaatttcgtttcagctttcaaatatctcctttttctgcaagttttctggttgtaaaagatgatggtggcaataatatggtacttgagctcacaggatgcacatttcttgtaacctgtattccaaaactttatctacctgaaaccatagttactgtttaagaataaccaaaggttttctaatgtgcacatcatctccaacttaaccagttatgatgttttgacaaaagggcgaaaacacttcgtttgtacttctgtacgattagaaca

SEQ ID NO: 148446 - DNA, 511 bp, Zea Mays
actctcgtcttttttctttccttttcctctgaagtttacactcatttgcattgggtgcattgcaatttgcaattgatgtttatacttttatttttaaaagatgtttttaagttctaaagaaagaaaagacattctttcacagaaaattagacacttgatgccattatagctgggtctgggccttaactagcttctctaattgttgccggcatgtatgtggttacattgcaggaaagcttactgatttgatgctggttaatttgccaggcatccttgttgtgcttggactccatgagcagctgcacaaatttcgtttcagctttcaaatatctcctttttctgcaagttttctggttgtaaaagatgatggtggcaataatatggtacttgagctcacaggatgcacatttcttgtaacctgtattccaaaactttatctacctgaaaccatagttactgtttaagaataaccaaaggttttctaatgtgcacatcatctccaacttaacca

SEQ ID NO: 148447 - DNA, 544 bp, Zea Mays
atgaggttgtctatgttcaatgagcatagcaacctgaaattccttgccattgctgacacaagatttacctctgctgttgtgatgttgaagagatttattgctataaaagatgctctttcagtgatggtagtgagtgaaaagtggagtgcctatagggaagataatccacgtcaggctcaatttgtcaaggagaagattgtgaatgatctgtgttgggatcaagtgcgcctatttccttagtttcactgaccctatctatgctatgatacgggcagctgatactgacaagctatgcctccatttgatatatgagatgtgggacacaatgatatagaaggtgaagagcatgatctatcgtcatgaaatgaaagagacacatggagaatctatcttttactcatatgtgcatgacatcttggtaagtcgatggacaaaaagcaacacgcccttgcattgcttggcacactcactaaatccaaattattacaccgatgcatggatcaatgaggtccccaaccgacaagctcctcataataatgaggaa

SEQ ID NO: 148448 - DNA, 1185 bp, Zea Mays
cgcccgcgcggccgtgtcatgaggaagctgtgcccgaacctggaccgcgacgactccctggacaccgtgctcgaggtgcccatccccgatgagatgctcatcaacgcccccggcgccgacaagcgccgcggcgccgggggcgccaacatgcgcgcctggctcaagaaccaggccttcgatcgcgccaccgtcgacgggcctgcctccgccaccgcggagctccagctgttcctcaacgtcgtcgggtcgccgctcatcccctgccccgtcccgcacgaccgcgctttcagccgctccatccgcgactcctctatccaagcatcgacagccaagtacatcatccagcagtacatcgcggccacgggcgggcaggcggcgctgcagggggtgcggagcatgtacgccgtggggaaggtgcggatgtgcgcttccgagttccacctcggcgaccagacggtcaccgccgcgcagggccgcgccgaggtcggcggcttcgtgctctggcagaagacgcccgaggtctggttcttcgagctcataatggccggccacaagatgagcgccggcagcgacggcaaggtcgcgtggcggcagtctgccgccgagcactcccgcgtctcgcgcggcccgccccgccccctccgccgctctctccagggcctggatccacgctccatcgcgaacctcttctccgacgcggtgtgcataggcgagaagatcctcaacaacgaggagtgcttcatcctgaagctggaggctggcgccgcgacgctgcgggcgcggagcgctccggcgttcgacatcatccaccacacggtttggggctacttcagccagcgcacggggctgctcatccagctcgaagactcgcacctgctccgcatgaagtccggcaagggcgctcgccgcagcgagaacatcttctgggagaccagcatggagtccgtcatctccgactaccgctacatcgacggcatcaacatcgcgcacggcggccacaccaacgtcacgctcttccgctacggcgagggatccgtcaaccacaagcggaagctggaggagacatggacggtggaggaggccgatttcaacgtgcacggcctcaccacggactacttcctgccgccggccgacctcaagaaggacgacgaggatcacaataagtgatgggctagcgtttgattt

SEQ ID NO: 148449 - DNA, 222 bp, Zea Mays
tcgagaaccagattactgcattggagaacaagtgctcaggtgattaccaatggattggtttctgtcacaatgatcttcagaatggcaatatcatgattgatgaaaagaccaacgtgctgaccatcattaaaatggccatcggtgtccctaaaaagcggaatgacaaatggatggataatcagcttttgaagctacatctggagtaaaaagcttcgaaggatg

SEQ ID NO: 148450 - DNA, 833 bp, Zea Mays
agggggaatctccgtggtctggtctgagacaacctcaggcttcccacccacggtttcccacactcgccgtcccccgcttcccaccacccatttcatccccccagcaaatccaaccccacccctctcactctcgtctcctgttcgccagagccacctcgctccagaagctttcctcccctagatctccctcccgtgcctggtcgcgctgccgacccggccatggcgaccaaggggaagctcggggagctagtgtgggagcaccgggtgcaggcggccgcagcggtggctttcgtggccgcggccgccgtctcgatctccgccgtcgggcccaggctcggcgccgtggtgtcattcttctggccgctgctcgtctccacgggcctcttcctggtggcggtcgccgtgctgctccggatctcgccgccgcccgcgggcgacgacgacgagtccggcaaggagctcatcgacttcgtcgccgggtgccgcccggagcacctcgtcccggatgcggcgccgccggcggccgtagcccccgtggaggctccgcccgagctgcagatctaacgggctgccggaggaggaggctgacagcagcgtagctgtgctgctgtgcgtggcatggcgtgctccgtccccgggtgaacttcctccagtggcacgggtgggggcaaccgttgcgggcccacctgtaagtgtcaggccggcgcgccgccgtggctcggtagcctaggacttctccatgtcttgctctgctccggtgtaagataccgtggattttaataatgaatcatggcataaaataaaaggctgtcctcgccggagcgatctgtgtc

SEQ ID NO: 148451 - DNA, 1659 bp, Zea Mays
ctcatccctcccaagtcccaactccgctgctacgccttcttctacatcgcaatcacgcgcccgtccggctctcccccttctccctcgccctcacgcgctcacgccctcacctcagtcctcatcgctctcggccgcctgcttaaaccctccgctcgaaccggaacccaaccaagaacagatccaaaacgcaagccgcaccatgtctcgtgtcgcgggctcgcgcctcctccctaggatctctgcgctctccttctgcaccgcctccccggcaaccgccgccgcttcctcctcctcatccacagcggcggtggcagcggcagccgccaccgcctccgaggcttcctccaccgccggagacccatcctcccagccgccccagactgcccgcaagccgtggggcgcgctcaagttcgccgccttcgccgccgtgtccaccgcggttggcggcacgggctacgtcagctacgcttattctctagaggaagtggatcagatgacgcgggagctccggaagaagtcgaagcagcccattcctgaggatgcttctggctttgagaggtttcaggctatggcttattcagcagctatgaaagttcctgttgccgctattgaggtatacatggatgtgaggagccaaattgaagatcaaattcggggatttagcgaaccagtatcagacaaacttcttccagatcttgctcctcaagagcagcatgtattgactctagttctggatctgaacgagactcttgtatactcagattggaagcgtgagagaggatggaggacctttaagaggccaggagtggatgcttttcttgaacatctcgggaggttttatgaaattgttgtgtattctgatcagcttagtatgtatgttgatcctgttgttgataggctggatccaaagggcaatattcgacataggctatcaagagttgcaactaagtatgaaaatggaaaacattatcgggatttgtcgaagctgaacagaaatcctgctcaagttctttatatcagcgctcatgctaaagagtcaagtctgcagcctgaaaattctgtggaaattaaaccttggaagcttgaaaatgatgacactcaactgcttgatcttattccatttctagaatatgttgctatggcaagaccttctgacatcagggctgttcttgcatcctatcaaagtggtgatattgctgccgagtttattgagcgctctaaggagcaccagaggcgcatgcaagaacaaaagaaatcaggacgcatatggaggcggtgaggactaaaagttggaaggaaaacataccaatgattttgacgcttcaatccgaatcaagtgaatggatccatcaaggattacaattttgtcatcttttgccttggcggttaataaacatactaaacgttatttataatcattcagaagacgccataccggctgaagtatagcgcttgctgtttgtatttttaagggtaatgaaagtattaatgtggcggttgctgctttgttttaagagtcgcgatagtattaattaatgtggtatttgcgttttttatggattttatgatggtactccatcaccatctctttcaaaatactatagcctgttctaaatcaaacatggctaagtttaacaagaaatatatcaagatttacaa

SEQ ID NO: 148452 - DNA, 1069 bp, Zea Mays
gcgtacgagtggacgttcacgcgaccacaaactgtcgtattactatcggagaactcgagcagcggtcgcggccggccgtgcagcacatcagcacatcagcgggcgggagcagctcagaccgcagcgatgcaggggagcggcgcactgccgggccttaccggcaccgggcgcggcggcggcttcctcccgtgcggcagcctcggcaagcgaactcccgctggccgacgcggcgccaccagcgttcgcgccgtcgacggggcttccgttgcggccgccgcctccgcggccgccgattccccgctcccgcccgtgcaggtcacctggcagattgccgtcggtgctctagctggagtgacgcctttcgtcgttgcaggagtcgagttcggcaaaagaatcatcgcacagaagaaatgccaagtctgcggaggctctggtcttgtaacgaagaacgactattacgttcgatgccaaaagtgtggtggttttcttccgtggcagtcttggcgaagattcttcacggggtgaacgtggtctctgatcagtggtcttcagtactcaactagcgctgtaactaaggccccgtttggtttgggctaactaaagtttagtgactaaagtttagtcacttttagccactaaagaagcaaacatattgactaaagtggagtgactaaactttagttctttagtcaccaaatgagtgactaaaagggactaaagtagtatttttaccatatttgccctctacactttctttttatagcaaacatccattaattaataggggtaaaacagtcattattcacagcaattaatactctttagtccggtttagtcactggaaccaaacgggttactttagcgcctaaactttagtcactaaaatttagtttagtgactaaaggaaccaaacagggcctaaagatacaatagatggacatcaccgtgctttaaatgcctcctcactagaccataaatgaagcaatatgccgtagtccgtagacatgtagaattactcatgcatgttgtattttacaaaaggcatcttacataaactatattttgcccc

SEQ ID NO: 148453 - DNA, 3024 bp, Zea Mays
ctccgaccttccagctctagctctgatccgagccgaaacagccatccaagacgcccgcggccgccgtgagcgggtgaccctctgcgctgcgctgcgtcaccacccaaatggatgacatcgccagcgaggcgcccgtgggggcgttcgccatcggcccatccacggcgctgggcggcgccgtcgcgctccgggtgctgctctgcggctccgcggcgcgcctgcgtcatcgtctagccgcggcactgcgcgccgcgctgcccgtcgcggcggcgtggctgcacccgcgcgacaacacgcgcgggatcctgctcgccgtctgcgccgtcgcgctcctgctgcggggccgacgcggcagggcggggctgcgggcgagggtgcagtccgcctaccgctgcaagttctggcggaacatgatgcgcgccgcgctcacctacgaggagtgggcgcacgcggcgcggatgctggagctcgaggccgcgccgcgccgcgccagcgacgccgacctctacgacgaggagctcgtccgcaataagctccgcgagctcaggcaccggcgccaggagggatcgctcagggacatcgtcttctgcatgcgtgctgacctgctcaggaacctcggcaatatgtgcaaccctgaactgcacaaggggaggctgcaggtgcctagactcataaaggaatacattgaggaagtatctactcaactgaaaatggtctgtgattctgattcagatgagttgcctctcgaagagaaactcgcatttatgcatgagacaagacatgcctttggtagaacagccttgctgctaagtggaggtgcttcgttaggatcctttcatgtgggtgttgttaaaaccttggtagaacataaacttctgccaaggatagtttcaggatcaagtgtaggctcaataatgtgttctatagtagcaacaagatcatggcctgagctggagagcttttttgaagagtggcattccctgaaattttttgaccagatgggtggaatctttcctgtggttaaaagaattttgacgcatggcgctcttcatgatataaggcacttgcaggtgcttttgagaaaccttaccagcaatctgacatttcaagaagcttatgacattactggtcggattcttgttgtcactgtgtgttctccaaggaagcatgagccgcctcgatgcctaaactatttaacatcacctcatgttcttatctggagtgcagtaacagcttcctgcgcttttcctggactttttgaggcccaagaattgatggcaaaagatagatttggtcaaaccattcctttccatgctccattcttattaggcatggaggaacgaactgttgctccaacccgccgctggagagatgggagcttagaaagcgatttacccatgaagcaattgaaggaactattcaatgtgaatcatttcatagtaagtcaagccaatcctcacatagctccactattgagactaaaggaaatcatcagggcttatggaggcagctttgctgccaagcttgctgaacttgccgagatggaagttaaacataggtgtaatcaagttctggaacttggattccctttaggaggattagctaaactatttgctcaagattgggaaggtgatgttacagttgttatgccagccactcttgcacagtattccaagatgatacaaaacccgtcttatgctgagcttcagaaggctgcgaatcaaggtaggagatgcacttgggaaaagttatcagccatcagggcaaattgtgctattgagcttgcactggatgaatgtgttgccctcctgaaccacttgcgtaggctaaagaggagtgcagaaagagcatccgcatcgcaaggatatggtccagtaatcaggttctgcccatctaggaggattccatcctggaatctcatagcgagagaaaattcaactggttctcttgatgaagaaatgctcgcatctcctcatacaaatcatcaaggacctggaggagttgctggaacatctaccagaaatcagtatcttcagagaaatgcacacgagagcagtgacagtgaatctgagagtattgatttacactcttggacaagaaatggtggccctcttatgaggacagcctcagccaataaattcatcagctttgttcagaatcttgagatcgacacagaattcagaacaattccatcgagggaaaacctaactgatcttgtgacaccaaatgctggtaccttggcagctcatgcagtgagtagagaagcaaccgataggagcttggacatttcagctttagatatccatgataccgctacccctagatcgacatttggccgttcaacaagcatcgttgtttctgaaggtgacttgttgcagcctgaaaagattgaaaatggtattttgtttaatgttgtaaggagggatactctgctggagtctagtagcggagttgagtctcaaggatctcctcgggaaccagatgttgaaacagtgcagacagagtgccttgatggcatttcagcttccgatgacgacgacaaggaactaaatgtcattgttgatgaagcaaccgatcccatgagcagcaataatctacaagatcaggggtcctcactggaagaaaattcatatagtcattttcccttaaattctgcagacgagacaagcacaaacaaaccagaaactgcatctatttttgatatatgtacagagatgcatccggcgtccattagcctaccgcaaggatcttcagaaaaggcagaactctgaaacagcaaagatccctgacgacgattcagctgctatgagtgatgaagttgcctcatgtgctggtaactaaagagttgtcctcctccctctagctttgaggcatcagatgtaagtgatgtactataatctaagcatcatgaattggatggtgaagctttatgttgttcaagtttcagaagaaggagatccaatggctttggttcttcgaatgtactgtagttgttttggggaaataaagcgcttcttagaaaaa

SEQ ID NO: 148454 - DNA, 233 bp, Zea Mays
tgctgctgctgcaggccaccggcgagagccgctgcagaacgagacggaattgagaggcacgcacgaggcggcgcgcggtgggtgatgcgtgtgggggtgggtggaaccacgcgacgaagactagagctgcttgcttggcctcctccggcgcgtcttgctgcggcgggcgcagcagatgtgagccggagccctctcgtccactcacgcagcatcggatgtctggtttgcagatt

SEQ ID NO: 148455 - DNA, 1465 bp, Zea Mays
aaacaaaacgctagacacaagaatccaaccggcaccatctgagcaagtaccagcgcgcccgtgacgagccctgcccctgcgcacggcgccgcgccgtccgagcctctcggtcggtcctcgacctcgagctcgaggagggaaggaaaccccgtcgtcttcgcgccatcgcgtgtgcggacccgccgccccgcgccaaagggaggtcacgcgaccgcctgcgcgccttgtctccttgcccccggtttatttgtccccgaacgctcacaacttcgcgctcgtctgcgtttgccatttctgtgcaaggtagcttgcacccatcgtgaagccgagggagcggcgacacattggtacctgctgtgctgcagtgctctcgtcctggtcggagatggacgctgaggccggcgaggcgggggtgcagcagccggccggggcggcgtccacgagcaccgcggcggtgccgttcgacaggtcgtcgtcgcggctaggcgcgccgggtgccgagagcttcgacggcgcgctcagggagctcaaggatctgcggtctcagctgcacgaagcggcggactgctgcgccaaggcgttcctcagcaccgacaagaagaagatgattctggagggtacaaagggttacatatgcgatgcggtggtagctgtgatcgatcacctggggacagtttcgtccaagcttgagcacaagctgcaggagaggactgaagtcgcacagacggaacgaaagatcaacttcttgaaacaggtgatcttcggaccagagcttcattcttctctgtcactgcgattttatcaggagatcagcatagacatctgcatgcggcaaggaggcttttgacatgcgagcagtacgccgtttctctgaagcttttgtctgtacgaggggaccctgacgccattcgatatcatcgccgttacatctcacaatctactcaaatgtccaaactgggaaacggaatcggctcgagtgaaaatggtccacgacttccgcaaattactggctcaacagtatctggagctaccctcactctcaagccatatgatgttcaaccagccatcggaaaagaacataccgtggtatcagaaaacgttgaggacaacccaaggaccataagaaggtcattctcttttagagcagaggatgttcacgttgttctaggcgatcacaaaaagaagggcaaccatgggagtaacatcttgtcatttctcaagaaaaccaggcgataagcataagaactttgctaaagaaataaacataagaatcaatgcaccaacgggatagagtggaactgtagaggagtaccttttcccccctttggatagtcttttctttcgtggtactattggtcctaccggtcatgcagcgctttcactgtttcgcaataagtactgatatactgaaagcatttcttcaatgatatgtctaggttatcttcaacaacttatcaattctcat

SEQ ID NO: 148456 - DNA, 1518 bp, Zea Mays
aaacaaaacgctagacacaagaatccaaccggcaccatctgagcaagtaccagcgcgcccgtgacgagccctgcccctgcgcacggcgccgcgccgtccgagcctctcggtcggtcctcgacctcgagctcgaggagggaaggaaaccccgtcgtcttcgcgccatcgcgtgtgcggacccgccgccccgcgccaaagggaggtcacgcgaccgcctgcgcgccttgtctccttgcccccggtttatttgtccccgaacgctcacaacttcgcgctcgtctgcgtttgccatttctgtgcaaggtagcttgcacccatcgtgaagccgagggagcggcgacacattggtacctgctgtgctgcagtgctctcgtcctggtcggagatggacgctgaggccggcgaggcgggggtgcagcagccggccggggcggcgtccacgagcaccgcggcggtgccgttcgacaggtcgtcgtcgcggctaggcgcgccgggtgccgagagcttcgacggcgcgctcagggagctcaaggatctgcggtctcagctgcacgaagcggcggactgctgcgccaaggcgttcctcagcaccgacaagaagaagatgtaataagcttaccctagctcgttctgtcaccccacgaacacattggttcacacttcacaagacacgtcaccttttttttctcccctcttggagttattatgtgtgtgctccagctctactctcatgcatgcgaaggattctggagggtacaaagggttacatatgcgatgcggtggtagctgtgatcgatcacctggggacagtttcgtccaagcttgagcacaagctgcaggagaggactgaagtcgcacagacggaacgaaagatcaacttcttgaaacagaggcttttgacatgcgagcagtacgccgtttctctgaagcttttgtctgtacgaggggaccctgacgccattcgatatcatcgccgttacatctcacaatctactcaaatgtccaaactgggaaacggaatcggctcgagtgaaaatggtccacgacttccgcaaattactggctcaacagtatctggagctaccctcactctcaagccatatgatgttcaaccagccatcggaaaagaacataccgtggtatcagaaaacgttgaggacaacccaaggaccataagaaggtcattctcttttagagcagaggatgttcacgttgttctaggcgatcacaaaaagaagggcaaccatgggagtaacatcttgtcatttctcaagaaaaccaggcgataagcataagaactttgctaaagaaataaacataagaatcaatgcaccaacgggatagagtggaactgtagaggagtaccttttcccccctttggatagtcttttctttcgtggtactattggtcctaccggtcatgcagcgctttcactgtttcgcaataagtactgatatactgaaagcatttcttcaatgatatgtctaggttatcttcaacaacttatcaattctcat

SEQ ID NO: 148457 - DNA, 1382 bp, Zea Mays
aaacaaaacgctagacacaagaatccaaccggcaccatctgagcaagtaccagcgcgcccgtgacgagccctgcccctgcgcacggcgccgcgccgtccgagcctctcggtcggtcctcgacctcgagctcgaggagggaaggaaaccccgtcgtcttcgcgccatcgcgtgtgcggacccgccgccccgcgccaaagggaggtcacgcgaccgcctgcgcgccttgtctccttgcccccggtttatttgtccccgaacgctcacaacttcgcgctcgtctgcgtttgccatttctgtgcaaggtagcttgcacccatcgtgaagccgagggagcggcgacacattggtacctgctgtgctgcagtgctctcgtcctggtcggagatggacgctgaggccggcgaggcgggggtgcagcagccggccggggcggcgtccacgagcaccgcggcggtgccgttcgacaggtcgtcgtcgcggctaggcgcgccgggtgccgagagcttcgacggcgcgctcagggagctcaaggatctgcggtctcagctgcacgaagcggcggactgctgcgccaaggcgttcctcagcaccgacaagaagaagatgattctggagggtacaaagggttacatatgcgatgcggtggtagctgtgatcgatcacctggggacagtttcgtccaagcttgagcacaagctgcaggagaggactgaagtcgcacagacggaacgaaagatcaacttcttgaaacagaggcttttgacatgcgagcagtacgccgtttctctgaagcttttgtctgtacgaggggaccctgacgccattcgatatcatcgccgttacatctcacaatctactcaaatgtccaaactgggaaacggaatcggctcgagtgaaaatggtccacgacttccgcaaattactggctcaacagtatctggagctaccctcactctcaagccatatgatgttcaaccagccatcggaaaagaacataccgtggtatcagaaaacgttgaggacaacccaaggaccataagaaggtcattctcttttagagcagaggatgttcacgttgttctaggcgatcacaaaaagaagggcaaccatgggagtaacatcttgtcatttctcaagaaaaccaggcgataagcataagaactttgctaaagaaataaacataagaatcaatgcaccaacgggatagagtggaactgtagaggagtaccttttcccccctttggatagtcttttctttcgtggtactattggtcctaccggtcatgcagcgctttcactgtttcgcaataagtactgatatactgaaagcatttcttcaatgatatgtctaggttatcttcaacaacttatcaattctcat

SEQ ID NO: 148458 - DNA, 98 bp, Zea Mays
ttttttttcagcagcagcaaatcgagcaggtaaagcaagagtagtgaaatttagcacatatgtgttagatcatctaccaagatttatggatcaaagcg

SEQ ID NO: 148459 - DNA, 1862 bp, Zea Mays
ccgactgagcaggggttgtgcatccacacaacaagtatatgtttaaaaatagaaaggctgatttcaagtgtaaaatcttcccagtttttttttcttttacaaaacttcgtcttcaagctcaagaatagcgtctctacgtttgtctcggaagcgactgatggagaacatcctttgcttcccatggccatgaagaagaaccaagactcccagttggtcatgggccggtacaggctgggccaactcctcggcagcggcaacttcgctaaggtgtacaaggcccataaggtggccaccggcgaggctgtggccgtcaaggtgctggacaaggatgctgtgcaccgctccggcatggcggagaaggtgaagaccgaggtcgacgtgatgcggcgcgtgcgccacccgaacgtcgtccgcctccacgagatgatggccacgcggtccaagatctacttcgtcatggaatacgccagcggcggggagctcttcgcgcgcctcgcccagagcacgcggttcccggagcccgtggcgcgccgctacttccagcagctgatgacggccgtcgagttctgccacagccgcggcgtgtaccaccgcgacctcaagcctgagaacctcctccttgacgcgcgcggcgacctcaaggtctccgactttgggctcagcgcgctgcaggacggccgtggcggccgccagctgcgcggtgacggcctcctgcacaccgcgtgcggcacgccggcgtatgtcgcccccgaggttctcttgaagactggctacgacggcgccaaggcggacatctggtcatgtggcgtgatcctcttcgtgctcctggcaggctacctcccgttcaacgacaccaacctgatactggtgtaccggaagatcacacagagcaactacaagtgcccaccgtggttctctgtcgaggcgcgcaagctcctcgccaggctgctagaccccaaccccaggactaggatcaccatctcaaaggtcacggcaaatccatggttccagaaaggactctgccctctcaccaccgacaagcccctcgacttgtgggagacctccgaggtgctcggcaaggaaaaagcctgcaggtgccgccaccaccagcgcgacgacgccgacgccgacgccgacgccgacgacgaggagaacaccaggaagaggaagcggtcgaaggtgacggtgtcttcaccaccgaccgttgccgtgaggccttcgagcatgaacgcctttgacatcatctcccgatcgagcgggctggacctgtccaagatgtttgacgaggagcacaggtcagaggcacggttctcttccagagaatccacggcggcgatcatgtccaagctggaggagatcgctgagacgcggaatctcgacatcaagctaaacaagaggggcagggtcgagatggagggcggtcagtactgtcggagaggcacgcttgtcatcgaggcagagatcttcgaggtggcgccatcggtgcgcgtggtggagatgaggaagattggcggtgactcgcccgagttccgagagttctacaggcaggaactgaagccatcgttaggtgacattgtatggtcgtggcagggcagtgattcgcctcctactcccttgctgccgccggcgctgaggcaggcaaccaaccaacgtccatgatttcctctgcataaaaaaatttgcagtggaattttggcacttatggttcactaaaaacatgatgttaaacatattgttactattaagggtggctggcaaatgatttgtcactgtcatagggacgctgtactagtagcataacatttgtgataatatatcatcacgggctcataatagatatgacaatgaaaatgatttttatt

SEQ ID NO: 148460 - DNA, 2146 bp, Zea Mays
tacgctttaccataatctaatttatataatataggatagaaataagtaccgtaagttgataaaacgaattttaattgggaaatttggatccataccattaaaagatcactattttggatccataccattactatctcacctacatgtgggtccacatgagtcaatgacatgtggggtctatggtatatatctaaagtttagattttttaatggtatagatccaattgttccattttaatttgggacactatagatgcatttttggcactattggagatgtcttaggtcctgggcatcctagctcgtgcgtctctcacccggtacctgctcctcggcgcctccccaaccaagcctccgcaccttcctcccgacgcgcccctcatggcgaggaggcgctgctgatgcctcccggcgtcggattggacgcggcggccacgacacctagccgcttgcggtggtgctcgccgagctctaggcgcctaatccgccgacgctgctcctcggatcctccccgagagattcaggcctcgtctcgtctcgtcctgcctagcagttcaatcgacttccccaagtgcccgacccctacaaggtagtgcgcgtgcgtcgccccaaccccttgcatgcgctgacgctaaccctatctaggagacggagtggcgcgccagcggccacgccggcgaagagaggacgacagcgtgcaagaagagaaggcctgtgtcaggggcagctataggtggcaggtgcaaagataggcaacaagtgttcaacaacacgactgtggatcaattgacctgcatttcagcttttcagttgaggattaaagtggagctttaagaagcttgaaaattgacattatctcaataatacattgaagtgcaagatgccaaaaataaagaatctctctaatgcatgcaaagtatcattttctccggaaggtcccatatctgaagaggtgcttgagagagtccgtgcactgttagatgagataagacctctagatgttggcctagataatgaagcacaaattgcacgcaattggagtagtactacgcgtccatcaaatgggagacgaggacgtaatggggctaaccagttcactgctccaatcaaatatttgcacattcatgaatgtgaaagtttctctatgggtatattttgtatgccaccttcttcagttattccacttcataatcatcctggaatgacagtacttagcaagcttctttatggaagactgcatgctgagtcttatgactgggttgatgtacctgatcatcctattgatcaattgcaaccaaggccagccaagcttgttaaagattgtgaaatgacggctccagagacaactattctataccctaatgcaggtggtaacatccacacattcagagccatcacaccttgtgctctcttcgacgtcctttctccgccatactccgctgaggatgggcggcactgttcatacttccgcaagtctcaaatgaatcaaccatctgttgttttgcctgctgagatagatagcacacaagtagtttggttggaggagttggaggaccatcagcccccagaaggctttgttgttgcgagaggtatgtataaaggccctgtaattaggagataatttgctttggggcacagaatccaccaaactgcaaatcagctgaaagacgatattgcaagcatcctcaggtcatgtgcagcctacggtttactttgtacatgtcaaagtgacctgtgataattcaacagcagttttacaggacaagaatggatgtttttttgtttggttgcttttttaattgtgtcccactgctgtagtatctctgacctagttatggagctcttatcagaccaagaccgtggagcacctacttttgagcatagtctagcatattgtcatgatgtattgatgtactagggacatcaatggacaaccttttccatttggtgatttcagaaagagtttggttggggctaccattttgtctgtgtaatagcaccattactatttttgggcaagactgtaaattacgggggaggaactgtaataatatcgttagatttatcatgaaatatattttcacgatatacctatcatttttaataaaatcttaaacatcaatgttttttcataaactaagtcaaa

SEQ ID NO: 148461 - DNA, 2143 bp, Zea Mays
tacgctttaccataatctaatttatataatataggatagaaataagtaccgtaagttgataaaacgaattttaattgggaaatttggatccataccattaaaagatcactattttggatccataccattactatctcacctacatgtgggtccacatgagtcaatgacatgtggggtctatggtatatatctaaagtttagattttttaatggtatagatccaattgttccattttaatttgggacactatagatgcatttttggcactattggagatgtcttaggtcctgggcatcctagctcgtgcgtctctcacccggtacctgctcctcggcgcctccccaaccaagcctccgcaccttcctcccgacgcgcccctcatggcgaggaggcgctgctgatgcctcccggcgtcggattggacgcggcggccacgacacctagccgcttgcggtggtgctcgccgagctctaggcgcctaatccgccgacgctgctcctcggatcctccccgagagattcaggcctcgtctcgtctcgtcctgcctagttcaatcgacttccccaagtgcccgacccctacaaggtagtgcgcgtgcgtcgccccaaccccttgcatgcgctgacgctaaccctatctaggagacggagtggcgcgccagcggccacgccggcgaagagaggacgacagcgtgcaagaagagaaggcctgtgtcaggggcagctataggtggcaggtgcaaagataggcaacaagtgttcaacaacacgactgtggatcaattgacctgcatttcagcttttcagttgaggattaaagtggagctttaagaagcttgaaaattgacattatctcaataatacattgaagtgcaagatgccaaaaataaagaatctctctaatgcatgcaaagtatcattttctccggaaggtcccatatctgaagaggtgcttgagagagtccgtgcactgttagatgagataagacctctagatgttggcctagataatgaagcacaaattgcacgcaattggagtagtactacgcgtccatcaaatgggagacgaggacgtaatggggctaaccagttcactgctccaatcaaatatttgcacattcatgaatgtgaaagtttctctatgggtatattttgtatgccaccttcttcagttattccacttcataatcatcctggaatgacagtacttagcaagcttctttatggaagactgcatgctgagtcttatgactgggttgatgtacctgatcatcctattgatcaattgcaaccaaggccagccaagcttgttaaagattgtgaaatgacggctccagagacaactattctataccctaatgcaggtggtaacatccacacattcagagccatcacaccttgtgctctcttcgacgtcctttctccgccatactccgctgaggatgggcggcactgttcatacttccgcaagtctcaaatgaatcaaccatctgttgttttgcctgctgagatagatagcacacaagtagtttggttggaggagttggaggaccatcagcccccagaaggctttgttgttgcgagaggtatgtataaaggccctgtaattaggagataatttgctttggggcacagaatccaccaaactgcaaatcagctgaaagacgatattgcaagcatcctcaggtcatgtgcagcctacggtttactttgtacatgtcaaagtgacctgtgataattcaacagcagttttacaggacaagaatggatgtttttttgtttggttgcttttttaattgtgtcccactgctgtagtatctctgacctagttatggagctcttatcagaccaagaccgtggagcacctacttttgagcatagtctagcatattgtcatgatgtattgatgtactagggacatcaatggacaaccttttccatttggtgatttcagaaagagtttggttggggctaccattttgtctgtgtaatagcaccattactatttttgggcaagactgtaaattacgggggaggaactgtaataatatcgttagatttatcatgaaatatattttcacgatatacctatcatttttaataaaatcttaaacatcaatgttttttcataaactaagtcaaa

SEQ ID NO: 148462 - DNA, 2071 bp, Zea Mays
tacgctttaccataatctaatttatataatataggatagaaataagtaccgtaagttgataaaacgaattttaattgggaaatttggatccataccattaaaagatcactattttggatccataccattactatctcacctacatgtgggtccacatgagtcaatgacatgtggggtctatggtatatatctaaagtttagattttttaatggtatagatccaattgttccattttaatttgggacactatagatgcatttttggcactattggagatgtcttaggtcctgggcatcctagctcgtgcgtctctcacccggtacctgctcctcggcgcctccccaaccaagcctccgcaccttcctcccgacgcgcccctcatggcgaggaggcgctgctgatgcctcccggcgtcggattggacgcggcggccacgacacctagccgcttgcggtggtgctcgccgagctctaggcgcctaatccgccgacgctgctcctcggatcctccccgagagattcaggcctcgtctcgtctcgtcctgcctaggtgaggctctggccttcaaggagacggagtggcgcgccagcggccacgccggcgaagagaggacgacagcgtgcaagaagagaaggcctgtgtcaggggcagctataggtggcaggtgcaaagataggcaacaagtgttcaacaacacgactgtggatcaattgacctgcatttcagcttttcagttgaggattaaagtggagctttaagaagcttgaaaattgacattatctcaataatacattgaagtgcaagatgccaaaaataaagaatctctctaatgcatgcaaagtatcattttctccggaaggtcccatatctgaagaggtgcttgagagagtccgtgcactgttagatgagataagacctctagatgttggcctagataatgaagcacaaattgcacgcaattggagtagtactacgcgtccatcaaatgggagacgaggacgtaatggggctaaccagttcactgctccaatcaaatatttgcacattcatgaatgtgaaagtttctctatgggtatattttgtatgccaccttcttcagttattccacttcataatcatcctggaatgacagtacttagcaagcttctttatggaagactgcatgctgagtcttatgactgggttgatgtacctgatcatcctattgatcaattgcaaccaaggccagccaagcttgttaaagattgtgaaatgacggctccagagacaactattctataccctaatgcaggtggtaacatccacacattcagagccatcacaccttgtgctctcttcgacgtcctttctccgccatactccgctgaggatgggcggcactgttcatacttccgcaagtctcaaatgaatcaaccatctgttgttttgcctgctgagatagatagcacacaagtagtttggttggaggagttggaggaccatcagcccccagaaggctttgttgttgcgagaggtatgtataaaggccctgtaattaggagataatttgctttggggcacagaatccaccaaactgcaaatcagctgaaagacgatattgcaagcatcctcaggtcatgtgcagcctacggtttactttgtacatgtcaaagtgacctgtgataattcaacagcagttttacaggacaagaatggatgtttttttgtttggttgcttttttaattgtgtcccactgctgtagtatctctgacctagttatggagctcttatcagaccaagaccgtggagcacctacttttgagcatagtctagcatattgtcatgatgtattgatgtactagggacatcaatggacaaccttttccatttggtgatttcagaaagagtttggttggggctaccattttgtctgtgtaatagcaccattactatttttgggcaagactgtaaattacgggggaggaactgtaataatatcgttagatttatcatgaaatatattttcacgatatacctatcatttttaataaaatcttaaacatcaatgttttttcataaactaagtcaaa

SEQ ID NO: 148463 - DNA, 1064 bp, Zea Mays
gagctcaattagctcgtgcgcgcaccgcccagctccttcccgcttcctcctcgaccgagacctctccgtgctcagctcgatcgcttgtgcttagctcgccgctcgcttgccacacccacacggccacacatgagctgctactagcgccgcatgcagcagctgccggccggcctacaagcggagggaccggtgacggtgaggtccgttccgtcgtccgcgcgtggccagggatcgacgacggcggtatatatgcatggagaccatcaagtgctgcatcgcgtgcatcctgccgtgcggggcgctggacgtggtgcggatcgtgcactccaacggccgcgtggaggagatcagcggggggcccgtgctggccgccgagatcatgaaggcgtaccccaagcacgtcctccggaagccgccgtccacgtgccccgccgacgccgccggcatcgtcgtgcacaagcccgtcgtcctgccgcccagtgccgagctgcacaagggcaagatctacttcctcacgccggtcatggccgacgccaccccgccggcccccgcgcccgagaataagccaccagccgcgagtctccaacccccgcccccgcccccgcccgccgcccaacaaaccgcttcttcggcggcgaggacgaggcggcgccggaggaagggccatactaccgcagccgcacgggagggagcgcccgcctgcagcagcggggccggggccggggctagaaccgcggccgggctggcgccgcaggagggcgacaaggagcggctgctagacaacgagcggtacctgtcggagatcatgaaggagacggcctccacgcccagggaccggcggcaggggcgcgtcgccgtgtggcgaccgcacctggagagcatcaccgaggatgacttgtaatcaatcaagcaatgcaaggtgtctttgtttcttttgttttcttcttcttcttcttcttcttctttctctcccatgcaccccttttctttctctccatttcttttgggttttcattgctacgtagaggatgaatagtggtagtttcctggctttctcctttgtt

SEQ ID NO: 148464 - DNA, 353 bp, Zea Mays
gctccacgtccaccccacggtcatcgtcctctgttgctctacgtttcatgcttctcacctcctctcctcaatctcatcactagaggcggcccatgcctcacggccaaagcagatcagatgagatttttttggtcttgtgtggtactttttaatctgctcacatgatacttcttattcattgccatctaatttaattaattgcccccggctgaattggttcctttgccattttacttaggaggataaaagaagacactaccttggtactgttgccacaatggacaaaagaagattagtgttgtgtgagattttttcattcctttgatctattgcatgatatttgtaacctaatc

SEQ ID NO: 148465 - DNA, 3107 bp, Zea Mays
cctctccgctccgtcccagaaaacccggtatagcatgaaggaacgtttttttggcgtgttgatctctctcctcctccagtcctcccccgtcctgcaggagtaaagcctgttccaggcgaggggacgagaagggaagggttcttggggggagagggaagaagatggcgcgcaatgcggtggacaaggcgacgtctatcgatgcgcagctgcggctgctggccccgcagaagctctctgacgacgacaagcttgtcgagtacgacgccctgctcctcgaccggttcctcgacatcctacaggacctgcacggcgaggacatcagggagacggtgcaagaatgttacgagttagctgctgagtatgaaaataagcttgaccccaaaatgctggatgagattgggaatgtgctgaccagcttggatcctggagactccattgtcataaccaagtcattctcacacatgctgatcctggcaaacttggctgaggaggtacaaattgcataccgcaggagaataaaactgaagaagggtgactttgttgatgagaactcagcaacaactgaatcagacattgaggagacactaaagaggcttatgcatcagcttaagaaatcccctctggaggtatttgatgctctcaagaatcaaactgttgacctcgtcctgactgcacatccaactcagtcagtccggagatcattgcttcaaaagcatggcaggataagaaactgtttaactcaactttatgcaaaggacatcactccagatgagaaacaggaacttgatgaagcacttcaaagagagattcaagctgcctttagaactgatgaaatcaggcgggcgcctcctactccgcaggatgaaatgcgtgctggaatgagttattttcatgagactatatggaagggtgtacccaagttcttacgtagggttgacactgctcttaagaacattggcataaatgagcggttgccatataatgcccctatcattcagttttcttcttggatgggtggtgaccgtgatgggaatccaagagtcacgccagaggttacaagggatgtatgcttgttggctagaatgatggctgctaatttgtataatgcccagatagaagacctgatgtttgagttatctatgtggcgatgcagtgacgagttacgtgtaaaggtcgatcagttataccattcctccaagaaagatacgacaaaacactatatagagttctggaagcaagtccctcccagtgaaccttaccgtgtgattctgagtgatgtcagagataaactctataacacacgtgaacgagcacgtcacttattagctagtgggttttctgaaattccagaggaagcaaccttcaccgatgttgaacagttcttggagcctcttgagctctgttacagatctctgtgtgcctgtggtgatcgctctgttgcggatggaagccttcttgacttcttaaggcaagtgtcaacatttggactatcccttgttagacttgatatcaggcaagaatctgaccggcatactgatgttatggatgctataactgaatacctcggtattggatcataccgtaaatggccagaggagaaacgccaagaatggctactatcggaacttaatggaaagaggccgttatttggtccggaccttcccaagtcagatgagattgctgatgtactagatactttccacgtattagctgaacttccatcagacagctttggtgcatatgtaatatctatggcgactgctccctcagatgtccttgctgtggagctcttgcagcgtgaatgccatgtgaaaaaaccactgagagtcgttcctttgttcgaaaaactggcagatcttgagtcagcaccagcagcgttagctcggctgttctccgttgaatggtacagaaacaggatcagcggcaagcaggaagtgatgatcgggtattcagattctggcaaggatgccggtcgtttctctgctgcttggcaactgtacaaggctcaagaggagctcattaatgtcgctaagctgtatggggttaagctaaccatgttccacggacgaggcggaactgtgggaagaggtgggggccctacccatcttgctatactgtcacaacctccagaaaccatccatggatcacttagggtaaccgttcaaggcgaagtcattgagcagtctttcggagaggagcatttgtgctttaggacactgcaacgtttcacggctgcgacccttgaacatggtatgcaccctccaatttcgccgaaaccagaatggcgtgctttgatggatgagatggctatcgtcgccacaaaggaataccggtcaatcgtatttgaggaaccgcgctttgttgaatacttccgccttgcaacgccagagatggagtatggcaggatgaacatcggaagcaggccatcgaaaagaaagccgagtgcgggcatcgagtcgctgcgcgcaatcccttggatcttcgcttggacgcagactcggttccacctgccggtgtggctgggtttcggcgcggcgttcaagcatgtcttggacaaggacatacggaatctccagacccttcaggagatgtacaaccagtggccctttttcagggtgacgatagacctggtcgagatggtgttcgccaagggtgatcctggcatcgcggcgctgtacgacaagcttctggtctcagaggatctgtgggcattaggggcgcgtctcagagccaactacgaagaaacaaagcagcttctcctgcaggtcgctgggcacaaggaccttctggagggcgacccgtacctgaagcagaggctgcgcatccgtgactcgtacaccacggcgctgaacgtttgccaggcctacacgctgaagcgcatcagggaccctggcttccaggtgaagccgcggccccacctgtcgaaggacatcatggacatgggcaagccggcgtcggagctcgtgaagctgaacaccaccagcgagtacgccccggggctggaggacaccctcatcctgaccatgaagggcatcgctgccgggatgcagaacaccggctgaagccagtgtgcctgtcttctttctgtaggggatcatatcatatgg

SEQ ID NO: 148466 - DNA, 3172 bp, Zea Mays
gtgggattggagggatttgtggggggttttctcttctcttttgtgggaattctgggtttttatctgtgcggattctgttgcaggggacgagaagggaagggttcttggggggagagggaagaagatggcgcgcaatgcggtggacaaggcgacgtctatcgatgcgcagctgcggctgctggccccgcagaagctctctgacgacgacaagcttgtcgagtacgacgccctgctcctcgaccggttcctcgacatcctacaggacctgcacggcgaggacatcagggagacggtgcaagaatgttacgagttagctgctgagtatgaaaataagcttgaccccaaaatgctggatgagattgggaatgtgctgaccagcttggatcctggagactccattgtcataaccaagtcattctcacacatgctgatcctggcaaacttggctgaggaggtacaaattgcataccgcaggagaataaaactgaagaagggtgactttgttgatgagaactcagcaacaactgaatcagacattgaggagacactaaagaggcttatgcatcagcttaagaaatcccctctggaggtatttgatgctctcaagaatcaaactgttgacctcgtcctgactgcacatccaactcagtcagtccggagatcattgcttcaaaagcatggcaggataagaaactgtttaactcaactttatgcaaaggacatcactccagatgagaaacaggaacttgatgaagcacttcaaagagagattcaagctgcctttagaactgatgaaatcaggcgggcgcctcctactccgcaggatgaaatgcgtgctggaatgagttattttcatgagactatatggaagggtgtacccaagttcttacgtagggttgacactgctcttaagaacattggcataaatgagcggttgccatataatgcccctatcattcagttttcttcttggatgggtggtgaccgtgatgggaatccaagagtcacgccagaggttacaagggatgtatgcttgttggctagaatgatggctgctaatttgtataatgcccagatagaagacctgatgtttgagttatctatgtggcgatgcagtgacgagttacgtgtaaaggtcgatcagttataccattcctccaagaaagatacgacaaaacactatatagagttctggaagcaagtccctcccagtgaaccttaccgtgtgattctgagtgatgtcagagataaactctataacacacgtgaacgagcacgtcacttattagctagtgggttttctgaaattccagaggaagcaaccttcaccgatgttgaacagttcttggagcctcttgagctctgttacagatctctgtgtgcctgtggtgatcgctctgttgcggatggaagccttcttgacttcttaaggcaagtgtcaacatttggactatcccttgttagacttgatatcaggcaagaatctgaccggcatactgatgttatggatgctataactgaatacctcggtattggatcataccgtaaatggccagaggagaaacgccaagaatggctactatcggaacttaatggaaagaggccgttatttggtccggaccttcccaagtcagatgagattgctgatgtactagatactttccacgtattagctgaacttccatcagacagctttggtgcatatgtaatatctatggcgactgctccctcagatgtccttgctgtggagctcttgcagcgtgaatgccatgtgaaaaaaccactgagagtcgttcctttgttcgaaaaactggcagatcttgagtcagcaccagcagcgttagctcggctgttctccgttgaatggtacagaaacaggatcagcggcaagcaggaagtgatgatcgggtattcagattctggcaaggatgccggtcgtttctctgctgcttggcaactgtacaaggctcaagaggagctcattaatgtcgctaagctgtatggggttaagctaaccatgttccacggacgaggcggaactgtgggaagaggtgggggccctacccatcttgctatactgtcacaacctccagaaaccatccatggatcacttagggtaaccgttcaaggcgaagtcattgagcagtctttcggagaggagcatttgtgctttaggacactgcaacgtttcacggctgcgacccttgaacatggtatgcaccctccaatttcgccgaaaccagaatggcgtgctttgatggatgagatggctatcgtcgccacaaaggaataccggtcaatcgtatttgaggaaccgcgctttgttgaatacttccgccttgcaacgccagagatggagtatggcaggatgaacatcggaagcaggccatcgaaaagaaagccgagtgcgggcatcgagtcgctgcgcgcaatcccttggatcttcgcttggacgcagactcggttccacctgccggtgtggctgggtttcggcgcggcgttcaagcatgtcttggacaaggacatacggaatctccagacccttcaggagatgtacaaccagtggccctttttcagggtgacgatagacctggtcgagatggtgttcgccaagggtgatcctggcatcgcggcgctgtacgacaagcttctggtctcagaggatctgtgggcattaggggcgcgtctcagagccaactacgaagaaacaaagcagcttctcctgcaggtcgctgggcacaaggaccttctggagggcgacccgtacctgaagcagaggctgcgcatccgtgactcgtacaccacggcgctgaacgtttgccaggcctacacgctgaagcgcatcagggaccctggcttccaggtgaagccgcggccccacctgtcgaaggacatcatggacatgggcaagccggcgtcggagctcgtgaagctgaacaccaccagcgagtacgccccggggctggaggacaccctcatcctgaccatgaagggcatcgctgccgggatgcagaacaccggctgaagccagtgtgcctgtcttctttctgtaggggatcatatcatatggcgtgatgaaccagtgaacacctggatatgtggggattagttacaccctgttgcactcgaatttatgccccgcttggccgcgcccttgtcgcatggtttccat

SEQ ID NO: 148467 - DNA, 82 bp, Zea Mays
tccgcagtgaagcgccgaggccgagcgcgtagagaagaatcagggcacgccgcccacgatcagggggggggggggggggggg

SEQ ID NO: 148468 - DNA, 1122 bp, Zea Mays
ccctccctgtcaccgccggagcctcttgcttagcagtacttcctttctactactggtgtttcctcgctttgacggagttggttggttccagtctccaaatggtgtcccacgtcgagatgggcctcgctgccggcgggttcaagctcttcggcaaggtcatcacgcagtgcgccgagagcgctccgccggcctccttggtcgcgcgggagagggacgatccggacgagcgcgaccagccggtggtgaagcgggaggcagcggcggcgtcggacagcgactcggccgtcgtactcgtagacaagcagcggcgctccggcgggccggccgagagcgaggacagcaaggggcagcatcacccgcgcccgcggcagccgcagcagcaggacaccgcggaggcccgcgccgcggcgtcggcgccgccgctgccgtgcccgcggtgccggagccgcaacaccaagttctgctacttcaacaactacaacgtcaaccagccgcgccacttctgcaaggactgccaccgctactggaccgcgggcggcgcgctccgcaacgtccccgtcggcgccggccgccgcaagaaccggcccctcggcgccgcacccatccccttggccgtgtccgtgccggcccagcacctgcagcacccgcagcaccccgctgcggcggcgggccacggcctcggcctccccggccagcacccttcctgcccgacgtcgccgtccccggcctacgccgggcggtggccggtctgcccggaccgccggttctgagctgacgtgacgatccgatcgatggatcgatcgatcgcagacctctcgggagtcggatgtagcgccaggttggttttgacctgcgtaattagcgggcggggtgggggacggaacggaaggctgccttgtttgtactgtacgtgcttgaggcccaaaagggggtatggattattgatggaggacgacatggaaatgtcttatgttttcttctctgtctagcgtgtactagtagctcgtctgtttccttcttttgttgttccctaaccctgcactactagtactagttataagctaccagatgtgtgtaaaaagtgtggtactactaataatgtaacagaagtggcaagttgcg

SEQ ID NO: 148469 - DNA, 1978 bp, Zea Mays
cacaaagccccaccgctcaccgatgttgtagctgcactgcactgttgcagctaacagttttagcacgccaatctactttctcttttacgtctcgatcagtcattttcagggtccatcagacaatttttttttaccgggaaacaccgtcaccatgttttgaagtgcacgccaactccgaaagagctgaggtggccagtgcgcggatgcgccgcccggtgactgtgagccggtgacctgaaccgagcgcgcacccctcgcggagttcagtcgcgcacaccaacagggcaatgggcacggaagggaacaaaagcacccggttcgcctccaccccgcgcatcccttcggcttaaaatctcccctataggccccttcgcctccctccgattcccatcccttcggcgaccagtggcttcttcctcatcgcgcactttaaaatccccgcgccgcctccccacttcctccccaccccgcgcatcgactcctccttcacccgcatagcgtagtaccatggccgccgcggcgcaccaggtctccgccgtgatctttgatctcgacggcactctccttgacacagagagggcgacaagggacgtcctcaccgaattcctggcggcatacgggaaggtccccgatgcgggggaggaggagaagaggctggggcagatgtatttggaatccaccaccgggatcatcagagactacggcctgccgctcacggtcgacgagtactccaaggcgatgtatcccctgtacctgaaaaggtggcaaaaggcaaaaccgcttccgggagtgaagaggcttgttaagcatcttcacaagaacggagtgccactcgcacttgcttctaactccattaggagaaatgttgatcacaagcttccgaaactagaagattggggaaagtgtttttctgttattcttggtggagatcaagtcccaaatggaaaaccttcccctgacatatttttggaggctgcaaagaggcttggtgcaaatccatcgtcttgcttggttatagaagattctgtcgttggagtcaagggtgccaaggcttctggggcaaaggcagttgcagtaccatcacttcaaaatcagaggaaccactattacattgctgatgtcatcctatattcgcttttggactttcaacctgagatgtggggtcttcctccatttgaagatcgcattcaaggtgttctgccaattgatcccttactttcaaatgcccggataggtggtaaaattttgaacaacattcattgggtaatttcagatgactgtgcctacgagtatattcctgaccaaatatcaggaatttttttgggttgggccaagtccaaagtgcatggattctccaaggtgatcgtagctactgggtgggacttctcacagcagaccgtcgagagagtgatgcatgtacattttcttgattgctctggcacggttgaaacagagcctgtgaagctgctcataattggttacatccggaagctccaaagtgcagatgatatattgcaagcattaagcgtaactgacgaagacaggagaattgcaagggatgcattggatctcccaactttctctgaatatgctaatgaccttcatcttgcctgagtccggctttgtcattgcaagctctcacctcactacctcacgtttgtatttgttattgttaacaagcaaacatgatgatgccagctgcgttttcttctatgaagacttcatatggaatgcacttcttgctcggagaagattagagaagagaagggcggaaggcatgaagcttgtctttcatctagaggtccatcgatgttatcgtatgctgtaaaattttcacgtttaatttttatatactctcttcatccacaaatctagctcaagctaagtttgtagtaaagaatgttagcacttacatataaaattaaagttattataacaatatattttataactaatataatggtacttattatgtatt

SEQ ID NO: 148470 - DNA, 2949 bp, Zea Mays
cacaaagccccaccgctcaccgatgttgtagctgcactgcactgttgcagctaacagttttagcacgccaatctactttctcttttacgtctcgatcagtcattttcagggtccatcagacaatttttttttaccgggaaacaccgtcaccatgttttgaagtgcacgccaactccgaaagagctgaggtggccagtgcgcggatgcgccgcccggtgactgtgagccggtgacctgaaccgagcgcgcacccctcgcggagttcagtcgcgcacaccaacagggcaatgggcacggaagggaacaaaagcacccggttcgcctccaccccgcgcatcccttcggcttaaaatctcccctataggccccttcgcctccctccgattcccatcccttcggcgaccagtggcttcttcctcatcgcgcactttaaaatccccgcgccgcctccccacttcctccccaccccgcgcatcgactcctccttcacccgcatagcgtagtaccatggccgccgcggcgcaccaggtctccgccgtgatctttgatctcgacggcactctccttgacacagagagggcgacaagggacgtcctcaccgaattcctggcggcatacgggaaggtccccgatgcgggggaggaggagaagaggctggggcagatgtatttggaatccaccaccgggatcatcagagactacggcctgccgctcacggtcgacgagtactccaaggcgatgtatcccctgtacctgaaaaggtggcaaaaggcaaaaccgcttccgggagtgaagaggcttgttaagcatcttcacaagaacggagtgccactcgcacttgcttctaactccattaggagaaatgttgatcacaagcttccgaaactagaagattggggaaagtgtttttctgttattcttggtggagatcaagtcccaaatggaaaaccttcccctgacatatttttggaggctgcaaagaggcttggtgcaaatccatcgtcttgcttggttatagaagattctgtcgttggagtcaagggtgccaaggcttctggggcaaaggcagttgcagtaccatcacttcaaaatcagaggaaccactattacattgctgatgtcatcctatattcgcttttggactttcaacctgagatgtggggtcttcctccatttgaagatcgcattcaaggtgttctgccaattgatcccttactttcaaatgcccggataggtggtaaaattttgaacaacattcattgggtaatttcagatgactgtgcctacgagtatattcctgaccaaatatcaggaatttttttgggttgggccaagtccaaagtgcatggattctccaaggtgatcgtagctactgggtgggacttctcacagcagaccgtcgagagagtgatgcatgtacattttcttgattgctctggcacggttgaaacagagcctgtgaagctgctcataattggttacatccggaagctccaaagtgcagatgatatattgcaagcattaagcgtaactgacgaagacaggagaattgcaagggatgcattggatctcccaactttctctgaatatgctaatgaccttcatcttgcctgagtccggctttgtcattgcaagctctcacctcactacctcacgtttgtatttgttattgttaacaagcaaacatgatgatgccagctgcgttttcttctatgaagacttcatatggaatgcacttcttgctcggagaagattagagaagagaagggcggaaggcatgaagcttgtctttcatctagaggtccatcgatgttatcgtatgctgtaaaattttcacgtttaatttttatatactctcttcatccacaaatctagctcaagctaagtttgtagtaaagaatgttagcacttacatataaaattaaagttattataacaatatattttataactaatataatggtacttattatgtattatgagtgtttgtattttttatataaatttggtcaaagtttaaatcatttgacttcataaaaaacagtaattgcattatttttttatggacagagtataatttactacaccagcacatgccttaagccttaaggggcagagtaatagaaaagatatgagcttatgattatgtaatgggatggagagtaagggcctgtttatttgagattataattttgaacaaacacttgacagattataatgctaaacaaacactccctaagaatgattcttcatgatcaaataataccacaaatgttttcaataaaagcgaagtatgttgggtgggtgatctgcgtaccgtgacttgttagatgcataaattttgtcaacatgtgtcgcgactccatggtgaccgtgagtctataaggatcgttattggttttcctttttcatttttggacgggtgataaccccatagaaaattcactgtcgtgtgttgagcggctacgagctgaggcaaagaagaaaggaggactgaagaaggcaagcttccagaaaaaagggagaaaaggcctttttttacttggccattggcttccaatgaacgaagttacaccctgacatactggattcgatttctagtgactaggtggcttctacattttttgttggctttttcttggaagatactccaatttggtttgttcggttagctcttaatccatgtggattgattgagattgagtgggtttaaatctcaagcaaatcaaactttttcttaatttttttacaatcgcatccaatccataggtaacgagattaagcgaacaagcctaaaacccttatgcatcagttaacgtcaagctaacctttgtcgatggatgcccactcgcacttcacttgcaaggattgcaagcaacaacctgaaatgcaaaatatagatattctataatatgccatgcaagtcgtgcgctgttaactacagtactc

SEQ ID NO: 148471 - DNA, 1511 bp, Zea Mays
aaagcccaaccccgaacaggtagatttccctcaaagaaacaaaaaaaataaaacaaagataaatcattggggttgggggattgcaattgcaagttgccgctgtgcggttgcggtcgctcccctcccgactctggccagcagcagcgacggtgccggcagtcgattactccacgcggcggaggcggcggtagcccatcctttcccgttttctgatccagtcctactgataccgcgcacagcacgcctgctctattaaaggtacggcgtgaagatgagggttctcttggtctcgtgaaggcgacgctcttgtctgctaactacatattatagaatgttttgcttgaggggctactggtcgccttcactagctccagtgagggaagggcctgttcgacatcatataaagttcaattctgtagtggtttgtggtgctaggggaccgagaccgagatatccccgtgtgtggaaaactcgtaagaaaattgggactatttccaagtcgcagaagcttgtcgaatgtattaaaggtctgtctaatgtaaaggaggaagtttatggggcacttgactcatttgttgcatgggaactggagtttcccttgatagtagtaaagaaggcactgaagaaacttgaggacgaaaaggaatggaaacgaataattcaggtcattaaatggatgttcaacaaaggtcaagggaagacaatgggaagctattacaccttgttgaatgctttgatcgaggatggacggattgaggaagcagaagagttatttggaatggtgttctcacgatatatggagggtttgcctcgtacatttttcatgagaatgatttctttctattacagcgtggaagcgtatgataagatgtttgagatttttgctgatatggaggaactaggcgtaagacctgatggttctattatcaggatgctaggtgatgtatttcagaagttagagatgatggacaaatatgaaaagttaaaaaagaaatacccaccaccgaaatgggattatcgacacatcaaaggcaagcgcataagaatcagagtttatcctgatagcaaccctgaagtggcggcaaaaggagaccctgacactgatgagctcgaagagttagaaagcacacaccttaataacgaattggatgaagcagcaagctcaggcctcgacaggagtgtattggacgatgcagcttctggagaccttgaatatatgtaggtcagagcttccctttggtattttttttgtgcctgcttaaccaaagcggtctagagcaaattgaaccggtaacatactctctgttttggtttgacatcccagaacccatgtcgtcatacttccaagacatctctgttttggtttgacatcccagaacccatgtcgtcatacttccaagacatgggcatcgctatcttctgaagtattttactacctagaatgagtagaaactacatgccaggctttgccatcagcagtcttttcaagacatcatggtggtttcaccgcg

SEQ ID NO: 148472 - DNA, 1722 bp, Zea Mays
aaagcccaaccccgaacaggtagatttccctcaaagaaacaaaaaaaataaaacaaagataaatcattggggttgggggattgcaattgcaagttgccgctgtgcggttgcggtcgctcccctcccgactctggccagcagcagcgacggtgccggcagtcgattactccacgcggcggaggcggcggtagcccatcctttcccgttttctgatccagtcctactgataccgcgcacagcacgcctgctctattaaaggtacggcgtgaagatgagggttctcttggtctcgtgaaggcgacgctcttgtctgctaactacatattatagaatgttttgcttgaggggctactggtcgccttcactagctccagtgagggaagggcctgttcgacatcatataaagttcaattctgtagtggtttgtggtgctaggggaccgagaccgagatatccccgtgtgtggaaaactcgtaagaaaattgggactatttccaagtcgcagaagcttgtcgaatgtgtcattaaatggatgttcaacaaaggtcaagggaagacaatgggaagctattacaccttgttgaatgctttgatcgaggatggacggattgaggaagcagaagagttatttggaatggtgttctcacgatatatggagggtttgcctcgtacatttttcatgagaatgatttctttctattacagcgtggaagcgtatgataagatgtttgagatttttgctgatatggaggaactaggcgtaagacctgatggttctattatcaggatgctaggtgatgtatttcagaagttagagatgatggacaaatatgaaaagttaaaaaagaaatacccaccaccgaaatgggattatcgacacatcaaaggcaagcgcataagaatcagagtttatcctgatagcaaccctgaagtggcggcaaaaggagaccctgacactgatgagctcgaagagttagaaagcacacaccttaataacgaattggatgaagcagcaagctcaggcctcgacaggagtgtattggacgatgcagcttctggagaccttgaatatataacccatgtcgtcatacttccaagacatctctgttttggtttgacatcccagaacccatgtcgtcatacttccaagacatgggcatcgctatcttctgaagtattttactacctagaatgagtagaaactacatgccaggctttgccatcagcagtcttttcaagacatcatggtggtttcaccgcgatatgtgttcttcagagtttggttacctgattcacttgcataaggctcatgcctttttgaatgcttccagccaggttaaaaacatagcgatggcattaggacctgtagtatctgagtgctttcgtgaacatatatggttgattgttgaaggcaatgtcctggacatcagacagggcagtagccattactatggtcctgtttggcacagctactgcttgttgaaaaagcagcttatctgagaagctgatgaaaagcagcttctgcttgttggctgcttttagtgtattctgagaagcagctgaactaataagctgctgtagaagctggctgtttggcaggacttctgcttaaatttgcgaagaagctgaaaataagctgaaaataagctgtgccaaacagggcctatatcatccggtatggtcctttgttcggcatggaaaggcgccatattttcaggcatg

SEQ ID NO: 148473 - DNA, 1534 bp, Zea Mays
agcctctcgctccgatttatttattattactactcggccaacaaattccgaccgtttcccactagaaaggcagcctcttctgcctgccagtgtccagtgtgcgccgcttgccaccttccgcctttccatgaccacgccgctcctgctgtgtgatcctaggacgacgcgcctcccgactgccctcgcacgctaggagtggggaggggaggctgagcacgagcacgacacgagcgccgccaacgccaacgccaagacgagctcgcgaaggaccatgccgagatccaggggcaacgagccgccgctgcgggcgtcgcagcgcgcgccgctgcacctcaagacgacggcctgctccgaggcgaatggcgcgcaccaccgccccgtcgccgaccggagcagccccaaggtcggcgaccggcactcgccgcgcagccctctgcccgaggtaataagtctcggtttcttccacttccggtacttttcctttcggtgccgcggctcacagtttcgccggtggcgtgtggcaaatggatccctgcagaagaagcgtgcggccgggacgcgtgtggcggagctggaggcgaagctggggaaagtgcaggacgagctcaagaagctgcgggagcagctcgcgtccgctgaggccgccaagaaggacgcgcaggtcgcgctcgaggaggccaagaagcgcgtcggtaccaagggaagcccggcctcctcatccaccaccaccacttcgcctccctctcccccttcgccaggtgtcgaaagcgcgaagaagcccgaggagctgaagctgccgcagccggcggccgaggaggagagcagcgtaaacgcgccggcgaccgatgtgtttgaggtcgtccgggccgagtccggggacaaggagaaccatagcgcgacggccacgggcgctgaggactgcgaggttgtgagctgcggcgaggaggcggcgctggccgagaaggaggaggaagaggagacgaagaaaatgatcgaggaggacaacagcgcggcggcggaaaccgacggcgccgagaaggagagctgggaggtcctggagctgaaggcgaagctggcggagaaggacgcggagatcgccgccctcgcggcagaaaacgccgagctcaagaagcggtccggagaggccgcggaggcggcgaagatggtcgaagaggacgcggcggcgaaggcggcccaagccgagcgcgatctgaaggatggcgcggcgcgggaggcccggacgggcgagcagctgagggcgtcggaggccgcgcgggaggcgctggacgccgagctgcggcgcctgcgcgtgcagaccgagcagtggcgcaaggcggcggaggcggcggccgcggtgctcggcggggacaaccacctcaccgggctggcgggcagcggcaacggcaacggcaacgggtggggggaccccgccacgatgcccgacgacggcgacgacgagggcttcggtggcaagcggaagggcgccggcatccgggtgctcagcgacctgtggaggaagaaggggagcaagtga

SEQ ID NO: 148474 - DNA, 1750 bp, Zea Mays
agcctctcgctccgatttatttattattactactcggccaacaaattccgaccgtttcccactagaaaggcagcctcttctgcctgccagtgtccagtgtgcgccgcttgccaccttccgcctttccatgaccacgccgctcctgctgtgtgatcctaggacgacgcgcctcccgactgccctcgcacgctaggagtggggaggggaggctgagcacgagcacgacacgagcgccgccaacgccaacgccaagacgagctcgcgaaggaccatgccgagatccaggggcaacgagccgccgctgcgggcgtcgcagcgcgcgccgctgcacctcaagacgacggcctgctccgaggcgaatggcgcgcaccaccgccccgtcgccgaccggagcagccccaaggtcggcgaccggcactcgccgcgcagccctctgcccgagaagaagcgtgcggccgggacgcgtgtggcggagctggaggcgaagctggggaaagtgcaggacgagctcaagaagctgcgggagcagctcgcgtccgctgaggccgccaagaaggacgcgcaggtcgcgctcgaggaggccaagaagcgcgtcggtaccaagggaagcccggcctcctcatccaccaccaccacttcgcctccctctcccccttcgccaggtgtcgaaagcgcgaagaagcccgaggagctgaagctgccgcagccggcggccgaggaggagagcagcgtaaacgcgccggcgaccgatgtgtttgaggtcgtccgggccgagtccggggacaaggagaaccatagcgcgacggccacgggcgctgaggactgcgaggttgtgagctgcggcgaggaggcggcgctggccgagaaggaggaggaagaggagacgaagaaaatgatcgaggaggacaacagcgcggcggcggaaaccgacggcgccgagaaggagagctgggaggtcctggagctgaaggcgaagctggcggagaaggacgcggagatcgccgccctcgcggcagaaaacgccgagctcaagaagcggtccggagaggccgcggaggcggcgaagatggtcgaagaggacgcggcggcgaaggcggcccaagccgagcgcgatctgaaggatggcgcggcgcgggaggcccggacgggcgagcagctgagggcgtcggaggccgcgcgggaggcgctggacgccgagctgcggcgcctgcgcgtgcagaccgagcagtggcgcaaggcggcggaggcggcggccgcggtgctcggcggggacaaccacctcaccgggctggcgggcagcggcaacggcaacggcaacgggtggggggaccccgccacgatgcccgacgacggcgacgacgagggcttcggtggcaagcggaagggcgccggcatccgggtgctcagcgacctgtggaggaagaaggggagcaagtgaaggcctgcctcccgcggaatgggggtgatcgtgttttggatttcgcaacggtgagcccgcgccagcttcaactccattgcctgccttgcactagctttagctccatcattttaccgcgttttggtttggattctacttatgtttgtatgatgatgatgatgctcgtgagattgaactatgtctgtaacgactgatcccgctgctgcctgctacctcagcgtaaggagcagcaacaatgctggtttgggtgatcttctttgttattttccatagcggaattgaggaatgctcgattgcagcagcatccggaaa

SEQ ID NO: 148475 - DNA, 734 bp, Zea Mays
actcggccaacaaattccgaccgtttcccactagaaaggcagcctcttctgcctgccagtgtccagtgtgcgccgcttgccaccttccgcctttccatgaccacgccgctcctgctgtgtgatcctaggacgacgcgcctcccgactgccctcgcacgctaggagtggggaggggaggctgagcacgagcacgacacgagcgccgccaacgccaacgccaagacgagctcgcgaaggaccatgccgagatccaggtgcgtgccgagatcaaagccgcctcctcactcagtggcggcggtgccgcgggtttccttcctttttacacatggctggtggctgggttccgtttcaggggcaacgagccgccgctgcgggcgtcgcagcgcgcgccgctgcacctcaagacgacggcctgctccgaggcgaatggcgcgcaccaccgccccgtcgccgaccggagcagccccaaggtcggcgaccggcactcgccgcgcagccctctgcccgaggtaataagtctcggtttcttccacttccggtacttttcctttcggtgccgcggctcacagtttcgccggtggcgtgtggcaaatggatccctgcagaagaagcgtgcggccgggacgcgtgtggcggagctggaggcgaagctggggaaagtgcaggacgagctcaagaagctgcgggagcagctcgcgtccgctgaggccgccaagaaggacgcgcaggtcgcg

SEQ ID NO: 148476 - DNA, 774 bp, Zea Mays
tgaagctacgacctcatagtatttcttgatgcaccataatgattaagatgaattcatatggtgcactgaaaatgccaaatctattttgttttccagcttagttaatgattatagttcatatgtggcttcattttgttagttcaccagccaacatatagccagaggtgtcattggatatatattccccttgagggagtcgaacaagggaaggtggaggctactttcaagccaacatcagtagatgtaaagtttcatgatgtcaaaggcaagaattatcggtgtgccataccaaagctgaacaaggaaactgttcctgataaatgtaaggttgtggtgaagccaacaaaggttattgttacccttttcaaggcttctaaaggcaactggttagacttgcacttcaaggaagacaagttcaagccaagcatggacaaggaaaaggatccgatgtcaggaattatggacttaatgaagaacatgtatgaggacggcgacgaggatatgaaacgcacaatagccaaagcttggtctgatgccaggtctgggaagacgaccgattcgttgagcggattacgttgagctggcatatcggcctacggacttatgttactgatggttcaaacggtctttacagtgtcttgttggtgttagactgttaatgcttgtttatcttacatttgtagtgaagctggacgtgcgaggaatattgaattctcttcttgaaaccaaagaaataaaaaccataagtctaagacgttttatggtattgtactt

SEQ ID NO: 148477 - DNA, 653 bp, Zea Mays
agctatggtttccagtttaaatgtgatcacactgcaacatccaattcgatatcctcataaaacatttcaagttgctattcagcacgcgcgcataggcgcgcgcaatacactagtaacagataagtagtagtataaaatgaaacggtgcgtaatcctctcttatacagccaaaagtgaggacagcagcactggaaccgatagcctagaacaaacagggcgagcataaatgttcccctccgcccgcagcaatccagatcgcaggacccgctcagttcgcgaggaaggcgatgagagagaccagagcggcgacggcccacgcccccggcgtgccgctagcgagccccgcggctccgccctcggcgggggcaggcgccggcgaaaggcttcccaggaaagcgtcctcctcctccagcttcctgctggccaccgcggacgcgaccagcgcgaggagcagcgcggcgaggaggacagcgatggtcttgctcgaggcggcggccatggatacagacgaacgagaaagagctgtctagattgggcgccgggaaagccaggaaccgagggtgctcggcgtcggcggtcggtttcctcctcgtcggcttctcgggctagctgcggcgctggagggagatttgggagtatgtggacgtgtggtg

SEQ ID NO: 148478 - DNA, 227 bp, Zea Mays
tttttttttgctattcttgttgtctatgaagtgtggtgtgcatggtatatatattctatccagccacaaatatgaagtgctctgaacagcaacagggtcaccaagttctaactttgatctctaattcaccagcccttcgttcttttttatttgatattctaattttgagcaagtcagaccttttctgtttggcatgatatgctaaacctacatatattgtctgtatg

SEQ ID NO: 148479 - DNA, 243 bp, Zea Mays
atggcgcgtatcggcgcgagtcatgtactcctcgtcgtcttgctgctctctgcggtcctgagctccggctcggctcgggttcccagagaacgaccggacgcgatgctgccggccggtcagacggcggcaatggccgagatgaccgtgcccggcgaagggcagagcagtgggccggcgtttggagtggcggcgcacgagtccaagcgcctgagccccggaggccccgaccctcaacaccattag

SEQ ID NO: 148480 - DNA, 2557 bp, Zea Mays
atttatttttattatgatttagtttagcatactatatactttaactatgaactaaaacttttatatttccacaaatattttaaataagacaaaccgattaaattcggtctaaaaaagtcaaagaacggagggagcattatatttgccttcggcccaaagaaacatgaacctaaaaagatcagatcgttcatagggccaagtcaacacgcggtaggtcttggaactttcgtcccgagtcgagactcgagacggcgagaagcctttctgctaatctcttcacggcgggcggtagcacaggccaaaccgtctaagacgtcatcctaattccttcacgctaatctctctgcttcctctgttccttccctttcccctcctccccctcccgttttcctttccctttttcctccacacaagcaacctgccgcccgggaaaaaccctagaccggcgatgtccgtccccggcgcccccgcgggcggcggttcccgcagcttcgacttcggcgccgacgacgtgctctgctcctacgatgacttcgccgcctcgtccgagcccaagcgccccgatccggccgacagtgcgcccgattttcatgatagcagattggggaggccatttgtgaaaccttatgaacaagaaagttatgggaaagaggatgtgctttctgctgttgagaaatgcatgaaaaagtatgctgataatttgctacgatctcttgagggaatcactagtcggctttcgcaactggagatttattgctataagcttgagagatccataggtgaacttcgaagtgatgtgcttcgtgatgagactgaccataggttgaagtctcttgagaaacatctaaatgaagtacacaggtctatccaaattcttagggacaaacaggagttagctgaagctcagaaggaattggccaaatttcaacttacacaagatacatctaaaaagaaggaagatgtaccaacatctattcctgagcaaaagaagcttgaagaaaaccctgacacatcaaaccagcaattggctcttgttttgcctcatcaggtgaacctgccatcacttgcccctagagcttctgaatcagtccaacagtacaagaatcaacctgtgcaaccatcagacccaacccctcccgtgccacagcaggaccgctatgttcttagccaagccatcgtctactacccacagcgccaagctccaggtatccaggacacacaagggcaaaaattgcaaccagaagtgcaatacttaccagcaagatccccagcacaagatgttccggtccatgctccatcccaaccacctcaggctggaaaccaaacacagccacagccttaccctccttaccagcagcagtggcaccagcaatcctcccagccagctcctgcaccggtggcccagacacagcagactttctcacagccatttcctccacccgcacagcagccccagttatccaatgtgcagcagtttccaccgcaaccagtacagcagccccaatccaatgctcaacagtatcctccaccagtgcaaccacagcaatctagcccacagcttcctcaggcaatgcaaccacaacatcctcctatgcaaactcagatgagacctcaaaccccaccaaactacccgcattatccaccccaccagccattgaaccccacccctgaaactcttcctggcaatgtggctatgcaaggatcatacaacactgctgttccatcaggtgccaaccgtcctgaactgccatattcgtatggaggggctggcatcccactgtctcagtctcagccactgccacagcacaacatgcaaaggcaccagctaccaccttcaagtcagggctcctttgggccacctccaagcaaagggtcctatgctggctctccacagtatgcaccacagggcaatccgcaaggctacagcacaggttacgcttacccaccaaacggccctccagcagtccagccgcaacagatgccccctggcggagttggcatgagtcatccggcttcgcatatgatgcgtggccatccctacggagaaatgatggagaaggcgatcaccatgggataccctagggaccaagtgctgaacgtcacccaaaggatggccgagagtggccagtcaatggatttcaacaccttgctcgacaggctgaacgaagcagggtcgggagctccacccccacgcgcgtggtgattggatccagtttgggcgccgtgcttggtgtcggttatgtgacttacgactgttatcatgcagctaaataaataagatttgggttgatgccgtgtactgcttatctgtacaatgtgcatatgtgatttttttctccatgtaactgccactggtactacgaatgcatcgcaccaattggactgttcagatattatgtatatatattccgatattcggaagcaattactggcaggcatcctaccatttttgtagcgtgtcatgtgtccgttgcgttgatgatgtgaacaactgttgtccgtcgacttcagcttgacgctaaattttgtaaagactcttttggatccctagatctta

SEQ ID NO: 148481 - DNA, 1086 bp, Zea Mays
atggatcacgtgctcgcaggactgatgggcgaccatctcgcgttgatcgtggaccggctgctgacagagtcgacgctggaggcggcgatcggcggtgggaagcagatggtcgatttgcgtcaagagacggtggacgtcgagtactgccatcgcgggctaggcagcggctcggcgacgaaggtgatggagtgcaggatttgccaggaggaggactgggacacctgcatggaggccccctacgcctgctgtggcaacctcaagttaaatttctcatgtactgaagatttgtgttgtagtcaaacaactgataaaccattcaggaccggacacaggaggcgtcttgaattggccttctggttcaaggtcattgcaaaaggaaaaagttctcttctcaattccatcagtgattggccctatgaaggcgcttatagttttgttttctgttttcacttttgggtcaaacaattagcaaagaccgaagagagtgggagtcatatcatgcagcaaagaaaaatagtgaaatggtttggtgcaaaatataactaccataggactgaaacataccgcacaagcttactgaaaaatactctgatggccttctatattcacccacaccagggtatcatcaaccattcagctcatttgacagagagtggtttatatttggcggcagtacttctgcggcacatcattcttgagaaaaatgacaataagcctgtcacaaatagcagggacacccaggaggtgaagctcgaacagggcctccagatgctaacaatcttcaagagccatgaggctgagacaacaattgtcgaagatttcgacttctatgagcatcgggagaaagccttgcaggagaacagacgtcaacagcatgctgccagcaccgatacccagaaactggtggatatcaaggctcaagatgttgtggccgacatatcagatgcatttgccaaggccgtccagttgaagaatactgagaacagtggacaaccccaaaaattgagggtgcttcagctgaaaagggatccgctgccacagccaaggttgaaggaagtgctggatccgcgggcgggcgagcggtga

SEQ ID NO: 148482 - DNA, 3116 bp, Zea Mays
cgtagtccatagtactccatttgcaaattgcattgccacacctcggctcatccccacctcacctcggcctcacttcacaagttcacatcacgaaacaggagcgtcataaagacatgggcgtcgcagggtagcctcagacggtcagaccagtgacgcagcggcagcggcagcgggcatggggtcctgagtgaccgactgcgaaggagatggctggagcgcgacggccccggagccattaatggggtgctcatcctcctccccctcctcgcctcctccccgccgggtcgcggacgcggtcggctccgccttttaaccggcctgtccgggagcggggcgccggaaccctagtgctgctggtggcacgcggcgcgccccatgggcatcgatctcaacatggtggacggcgagggccacgagcgccgcccgccgccggtgacgtgccgggagctgtggcacgcgtgcgcggggcccgtggtcgcgctaccgcgccggggcagcctggtcgtgtacctgccgcagggccacctggccgcggcgggcggcggggacgtcgctgcggacctgccgccgcacgtggtgtgccgcgtcgcggatgtcgagctatgcgcggatgcggcgacggacgaggtgtgcgcgcggctggcgctggttgcggagggcgaggcattcgggaggaatctgggcggtggtggagttgaaggggacgatggcatggaagatttcgatgctgaaaggaagtccgggatgctgcacatgttctgcaaaacgcttacggcctctgacacaagcacgcatggagggttctctgttcctcgccgtgctgctgaggactgtttcccgcctctggattataatcagctcaggccttctcaagagctggttgccaaggatttgcatggagccaagtggaagtttcgtcatatatataggggtcagcctcgtaggcatctcttgactactggatggagttcatttgtcaataaaaagaaactggtttcaggggatgctgtgttatttctccgaggtgatgacggtgaactaaggctgggtgtgcggagggctattcagcttaaaaatgaggccctttttgaagatttcaatagtgacagcacaaagcggcattctttgacggctgtagctgattccttgaagaacagaagtgtttttcacatttcttacaatccaagagctactgcttcagaatatattattccatacgctaagttcctgaagagcctcaatcatccggtctgtattggagcaaggatcaactttcagtgccataatgaagatgttagtgaaaggcgatctggagtggttgttcgcattagtgaaatagatcccatgaaatggcctggctcgaagtggagaagcctgctgatgggaggacggtgctgaatgtaatggccaagatagagtatctccatgggagatcgagatagctggtggttctgtctctgtttctcattctctttctgcatctagttctaaaagaaccaagttgtgtcctcagggaaatttggacgttccagcaatgtgtaagctctcatagcacaagactaatgcctgtatatgtatgctgctatccttttacctctatggtaattgactgtcgcattagatgttacagggaatggttgtactgactccatggaaactggaaagttacccagggtcttgcaaggtcaagaattgatgagttttaggacttgtcatgttccgtgtgctcctcaaactgctgaggctgcaaaacttcaatcttctgatgctagtaggttccttagtaatgcacatggctgcgcattgggtggtccaacaagcagactcgcagtgcatagctctggttttacctaccaatgtgtaggcttcaatgaatctattggattctcagaggtcttgcaaggtcaagaaatttctcgggcggttcctaagttccaaggaatgatgtcggaagcttgttcactgaaagacagatatgggctgcatagttatatgcgtgccccagttgctgttaatggattatcagctacaactcaagaatgttctctcgcactatctactccgccaggagcacaagtgccctctctctaccctggtaatgttgttaaccgaactgtggttccacaacttggactggcaaggaagtttggtggtggaggtacaaatggccagcagtctggcccatttgataggccgagggaactttggaccaggccacagcatgaaacacctgaccaaatgaacttggatcagtttgagactagaagaccttcagtgcctgtagatgctgctaagcttgggtctggtggaggggaggttcgcaaaactagctgcagactttttggtttctccttgactgaaaagatcttgccagcagatgatgatgacgtcaaggaagtgagctatgagactgagtgccagaacccacggatgctggacctgttcgggtacaactgctcaacaccgagtgccgctcttccagctctgtgtgctgccgccccctttggaatgtgatgctgcttcgaatctttcgataactttgctccatgtactcttagaagttttactttcccagtaccccagtgtagtcataagctgcttttgacatcattccctttggtctgcctcaagttaagcagtcatttgcacaagtaaacgaaggttcgttggtgaaccactcctcgacatgcctcaccctgtcacccaaactattgtggttagtctcaggatacccagagacaccacattgtaacttatgtcgatgatccttcagaactgttgtgcgatgaagctaacaatttgctctaaaagtactttgcttgctctaaaagtaccggctatgtatatttaaatcagcacctgtatgagtttttttagccctcacaagccctggttgcagtcgactaggccgtgtgattgtattagtatgctatctttttaaactgtcgcttatgagtctttattctagtgcattgtgtgaatactctgttcatcgcatgcaagtcttgtcttctgtttctgttggcttggtaggagatactctgattttataacatgtcagatttttattggtcaattcaactttgaccatcaatatacaaggaatttggtgaata

SEQ ID NO: 148483 - DNA, 3121 bp, Zea Mays
cgtagtccatagtactccatttgcaaattgcattgccacacctcggctcatccccacctcacctcggcctcacttcacaagttcacatcacgaaacaggagcgtcataaagacatgggcgtcgcagggtagcctcagacggtcagaccagtgacgcagcggcagcggcagcgggcatggggtcctgagtgaccgactgcgaaggagatggctggagcgcgacggccccggagccattaatggggtgctcatcctcctccccctcctcgcctcctccccgccgggtcgcggacgcggtcggctccgccttttaaccggcctgtccgggagcggggcgccggaaccctagtgctgctggtggcacgcggcgcgccccatgggcatcgatctcaacatggtggacggcgagggccacgagcgccgcccgccgccggtgacgtgccgggagctgtggcacgcgtgcgcggggcccgtggtcgcgctaccgcgccggggcagcctggtcgtgtacctgccgcagggccacctggccgcggcgggcggcggggacgtcgctgcggacctgccgccgcacgtggtgtgccgcgtcgcggatgtcgagctatgcgcggatgcggcgacggacgaggtgtgcgcgcggctggcgctggttgcggagggcgaggcattcgggaggaatctgggcggtggtggagttgaaggggacgatggcatggaagatttcgatgctgaaaggaagtccgggatgctgcacatgttctgcaaaacgcttacggcctctgacacaagcacgcatggagggttctctgttcctcgccgtgctgctgaggactgtttcccgcctctggattataatcagctcaggccttctcaagagctggttgccaaggatttgcatggagccaagtggaagtttcgtcatatatataggggtcagcctcgtaggcatctcttgactactggatggagttcatttgtcaataaaaagaaactggtttcaggggatgctgtgttatttctccgaggtgatgacggtgaactaaggctgggtgtgcggagggctattcagcttaaaaatgaggccctttttgaagatttcaatagtgacagcacaaagcggcattctttgacggctgtagctgattccttgaagaacagaagtgtttttcacatttcttacaatccaagagctactgcttcagaatatattattccatacgctaagttcctgaagagcctcaatcatccggtctgtattggagcaaggatcaactttcagtgccataatgaagatgttagtgaaaggcgatctggagtggttgttcgcattagtgaaatagatcccatgaaatggcctggctcgaagtggagaagcctgctggtaagatgggaggacggtgctgaatgtaatggccaagatagagtatctccatgggagatcgagatagctggtggttctgtctctgtttctcattctctttctgcatctagttctaaaagaaccaagttgtgtcctcagggaaatttggacgttccagcaatgtgtaagctctcatagcacaagactaatgcctgtatatgtatgctgctatccttttacctctatggtaattgactgtcgcattagatgttacagggaatggttgtactgactccatggaaactggaaagttacccagggtcttgcaaggtcaagaattgatgagttttaggacttgtcatgttccgtgtgctcctcaaactgctgaggctgcaaaacttcaatcttctgatgctagtaggttccttagtaatgcacatggctgcgcattgggtggtccaacaagcagactcgcagtgcatagctctggttttacctaccaatgtgtaggcttcaatgaatctattggattctcagaggtcttgcaaggtcaagaaatttctcgggcggttcctaagttccaaggaatgatgtcggaagcttgttcactgaaagacagatatgggctgcatagttatatgcgtgccccagttgctgttaatggattatcagctacaactcaagaatgttctctcgcactatctactccgccaggagcacaagtgccctctctctaccctggtaatgttgttaaccgaactgtggttccacaacttggactggcaaggaagtttggtggtggaggtacaaatggccagcagtctggcccatttgataggccgagggaactttggaccaggccacagcatgaaacacctgaccaaatgaacttggatcagtttgagactagaagaccttcagtgcctgtagatgctgctaagcttgggtctggtggaggggaggttcgcaaaactagctgcagactttttggtttctccttgactgaaaagatcttgccagcagatgatgatgacgtcaaggaagtgagctatgagactgagtgccagaacccacggatgctggacctgttcgggtacaactgctcaacaccgagtgccgctcttccagctctgtgtgctgccgccccctttggaatgtgatgctgcttcgaatctttcgataactttgctccatgtactcttagaagttttactttcccagtaccccagtgtagtcataagctgcttttgacatcattccctttggtctgcctcaagttaagcagtcatttgcacaagtaaacgaaggttcgttggtgaaccactcctcgacatgcctcaccctgtcacccaaactattgtggttagtctcaggatacccagagacaccacattgtaacttatgtcgatgatccttcagaactgttgtgcgatgaagctaacaatttgctctaaaagtactttgcttgctctaaaagtaccggctatgtatatttaaatcagcacctgtatgagtttttttagccctcacaagccctggttgcagtcgactaggccgtgtgattgtattagtatgctatctttttaaactgtcgcttatgagtctttattctagtgcattgtgtgaatactctgttcatcgcatgcaagtcttgtcttctgtttctgttggcttggtaggagatactctgattttataacatgtcagatttttattggtcaattcaactttgaccatcaatatacaaggaatttggtgaata

SEQ ID NO: 148484 - DNA, 3029 bp, Zea Mays
cgtagtccatagtactccatttgcaaattgcattgccacacctcggctcatccccacctcacctcggcctcacttcacaagttcacatcacgaaacaggagcgtcataaagacatgggcgtcgcagggtagcctcagacggtcagaccagtgacgcagcggcagcggcagcgggcatggggtcctgagtgaccgactgcgaaggagatggctggagcgcgacggccccggagccattaatggggtgctcatcctcctccccctcctcgcctcctccccgccgggtcgcggacgcggtcggctccgccttttaaccggcctgtccgggagcggggcgccggaaccctagtgctgctggtggcacgcggcgcgccccatgggcatcgatctcaacatggtggacggcgagggccacgagcgccgcccgccgccggtgacgtgccgggagctgtggcacgcgtgcgcggggcccgtggtcgcgctaccgcgccggggcagcctggtcgtgtacctgccgcagggccacctggccgcggcgggcggcggggacgtcgctgcggacctgccgccgcacgtggtgtgccgcgtcgcggatgtcgagctatgcgcggatgcggcgacggacgaggtgtgcgcgcggctggcgctggttgcggagggcgaggcattcgggaggaatctgggcggtggtggagttgaaggggacgatggcatggaagatttcgatgctgaaaggaagtccgggatgctgcacatgttctgcaaaacgcttacggcctctgacacaagcacgcatggagggttctctgttcctcgccgtgctgctgaggactgtttcccgcctctggattataatcagctcaggccttctcaagagctggttgccaaggatttgcatggagccaagtggaagtttcgtcatatatataggggtcagcctcgtaggcatctcttgactactggatggagttcatttgtcaataaaaagaaactggtttcaggggatgctgtgttatttctccgaggtgatgacggtgaactaaggctgggtgtgcggagggctattcagcttaaaaatgaggccctttttgaagatttcaatagtgacagcacaaagcggcattctttgacggctgtagctgattccttgaagaacagaagtgtttttcacatttcttacaatccaagagctactgcttcagaatatattattccatacgctaagttcctgaagagcctcaatcatccggtctgtattggagcaaggatcaactttcagtgccataatgaagatgttagtgaaaggcgatctggagtggttgttcgcattagtgaaatagatcccatgaaatggcctggctcgaagtggagaagcctgctggtaagatgggaggacggtgctgaatgtaatggccaagatagagtatctccatgggagatcgagatagctggtggttctgtctctgtttctcattctctttctgcatctagttctaaaagaaccaagttgtgtcctcagggaaatttggacgttccagcaatgtggaatggttgtactgactccatggaaactggaaagttacccagggtcttgcaaggtcaagaattgatgagttttaggacttgtcatgttccgtgtgctcctcaaactgctgaggctgcaaaacttcaatcttctgatgctagtaggttccttagtaatgcacatggctgcgcattgggtggtccaacaagcagactcgcagtgcatagctctggttttacctaccaatgtgtaggcttcaatgaatctattggattctcagaggtcttgcaaggtcaagaaatttctcgggcggttcctaagttccaaggaatgatgtcggaagcttgttcactgaaagacagatatgggctgcatagttatatgcgtgccccagttgctgttaatggattatcagctacaactcaagaatgttctctcgcactatctactccgccaggagcacaagtgccctctctctaccctggtaatgttgttaaccgaactgtggttccacaacttggactggcaaggaagtttggtggtggaggtacaaatggccagcagtctggcccatttgataggccgagggaactttggaccaggccacagcatgaaacacctgaccaaatgaacttggatcagtttgagactagaagaccttcagtgcctgtagatgctgctaagcttgggtctggtggaggggaggttcgcaaaactagctgcagactttttggtttctccttgactgaaaagatcttgccagcagatgatgatgacgtcaaggaagtgagctatgagactgagtgccagaacccacggatgctggacctgttcgggtacaactgctcaacaccgagtgccgctcttccagctctgtgtgctgccgccccctttggaatgtgatgctgcttcgaatctttcgataactttgctccatgtactcttagaagttttactttcccagtaccccagtgtagtcataagctgcttttgacatcattccctttggtctgcctcaagttaagcagtcatttgcacaagtaaacgaaggttcgttggtgaaccactcctcgacatgcctcaccctgtcacccaaactattgtggttagtctcaggatacccagagacaccacattgtaacttatgtcgatgatccttcagaactgttgtgcgatgaagctaacaatttgctctaaaagtactttgcttgctctaaaagtaccggctatgtatatttaaatcagcacctgtatgagtttttttagccctcacaagccctggttgcagtcgactaggccgtgtgattgtattagtatgctatctttttaaactgtcgcttatgagtctttattctagtgcattgtgtgaatactctgttcatcgcatgcaagtcttgtcttctgtttctgttggcttggtaggagatactctgattttataacatgtcagatttttattggtcaattcaactttgaccatcaatatacaaggaatttggtgaata

SEQ ID NO: 148485 - DNA, 1029 bp, Zea Mays
caatgactcctgtacgcatcatcccggatccgagaggcaccaactcactctttctacgcccttccctccgcctccttcctctccaagaaaaagtaagcgtggagagcaaaaatctccgccgccgcgcacctacgcccacggaacacgccgtcatatgagtggagagagaaccccgcgcctcctcctccgtgagctccgtacaaggaggctagagcggcggcagcatcggaggggtcggtgaggagggcgatggtgctcccgctggtgaagctcggctcgctcgcgttccggacgctgagcaagcccatcgcggcccgcctcaagtacaacgccggcatccaccccaagttccgcggtctcatcatcggcatcgcgcaggcaaaccatcgtttcacgacaaatatgcagaggcgactttacggacgtgcgactgacattcacattcggcccctgaatgaggagaaagctattcaagctgccgcagatcttctcggtgaactatttgttttctcggtcgctggtgctgcgattatctatgaggtgcaaagaagtgctaggtcagaagccagaaaagaggaggcccgtcgtctggaaattgaggggataaagaaaagggaggagcaactagcgctggaagtacagataatgaaacacaagattagcgagatggagcggcagtactcgaagtggacccttcccgggcttcgcggcttcggcactgcccaggcggcggcacagcctgctggtactcagcacccaacagctgcgtgattgctctacttctgcaactgtcgacagctcgcgatctggatggccgactgcagactgcctctgtttagcttgcattttactccgttacataattgattcgacttcagtagctggcgaaaggctgagggttacgttgtggtacaactgaatcgaagttgttatcgccttataggttgatcggatcggcgacatgacattcagaccatgtttgtcgtagcttaacttatttcacagcttcttcatagatttaagcaggag

SEQ ID NO: 148486 - DNA, 1316 bp, Zea Mays
caatgactcctgtacgcatcatcccggatccgagaggcaccaactcactctttctacgcccttccctccgcctccttcctctccaagaaaaagtaagcgtggagagcaaaaatctccgccgccgcgcacctacgcccacggaacacgccgtcatatgagtggagagagaaccccgcgcctcctcctccgtgagctccgtacaaggaggctagagcggcggcagcatcggaggggtcggtgaggagggcgatggtgctcccgctggtgaagctcggctcgctcgcgttccggacgctgagcaagcccatcgcggcccgcctcaagtacaacgccggcatccaccccaagttccgcggtctcatcatcggcatcgcgcaggcaaaccatcgtttcacgacaaatatgcagaggcgactttacggacgtgcgactgacattcacattcggcccctgaatgaggagaaagctattcaagctgccgcagatcttctcggtgaactatttgttttctcggcaagtgttcttggcttgcattggtctttttcgaagtaatatgaactgaaaagggttgacgcctttttgttttcatgtatgacgagaaacaaaacccgatcgttctagaacatattttcttacttctgcaacgactcctcaggccctagaaatgacaagtactgacgtggactcacatataatttctcaggtcgctggtgctgcgattatctatgaggtgcaaagaagtgctaggtcagaagccagaaaagaggaggcccgtcgtctggaaattgaggggataaagaaaagggaggagcaactagcgctggaagtacagataatgaaacacaagattagcgagatggagcggcagtactcgaagtggacccttcccgggcttcgcggcttcggcactgcccaggcggcggcacagcctgctggtactcagcacccaacagctgcgtgattgctctacttctgcaactgtcgacagctcgcgatctggatggccgactgcagactgcctctgtttagcttgcattttactccgttacataattgattcgacttcagtagctggcgaaaggctgagggttacgttgtggtacaactgaatcgaagttgttatcgccttataggttgatcggatcggcgacatgacattcagaccatgtttgtcgtagcttaacttatttcacagcttcttcatagatttaagcaggagatagatttaaatagaagtaccaaacagtagcttctgcaacagtctccccttttagtcgtagcttaacttatttcacagatttgtcgtagcttaactt

SEQ ID NO: 148487 - DNA, 2381 bp, Zea Mays
atgactcatgagacgacggcagtctccgtctcccgctgttattggacggcgctttcggcattgacgagcaccgatgccctaatccgcatgctgggcccggccgtcgcttttcccaaggccgccgatcccgacgacgacccaacaaagtggcagccagaaaactcggcagagcatctcgcttgcgaaacaaaggacggcgcgccagaggaggggaaaggaaaacaaccaccacgaccccgtccattccgttccacttccacccgagctcagcgatcgcggcggcggatgcggatgcggatggggaaggggccgtcgtcgcgggcggggtcgcggcaccggcagttccgcgcccgagccatgacccgcgtcgacgacctccaggaggtcttctcgggcctgcagtccgcgcgcaaggactcacgctccgcggacgccgccgtcctcgaggcgcagctccagcagatgctgcgggagtggcgctccgagctcagcgatccctcccccgcctcctccctgcagggcaacgccagggaactgtcggatccgccttccgatactcttcgtctgctgcagttggtggtggccgaggaggaggatgacgccacgagcaagatggtcgagcagcagcagcagcagcccccacctccgctcccagctaaccggagccaggggcacgcgcatgttgtgtgccagggcatgaagccggagccgcgcgaggaagcagttgacgtcgctgtggaccagccgcagctgctgagtcagggggttctgcctaatggtgctgctaccgcgtctgcgatgttccatgatcagctgtactatgtgaaccaggagctcacggtcgaggattttctttatgatgatgattacaagatagatctttctgggtctaatctggatgtcattaataacctagaagggattgttcagctggaatatccagatcacaatttgccgcaagggttagcccctaatgcataccttgacatgaatagttgtgggcagagtgccggggctgttttcctgcacatgccagatttgctcacaacaatgacttcagcaccttctgcattcctgaagccaaaatgcgctctctgggactgccccaggcctgctattggatcagaaagatggcataattattgcagcatgtatcatgctgatttggctgtgcaggaagagggccctccaggcacaatgcctgtgatccgtccaagaggcattgatctgaaagatggccccctgtttgctgctcttagtgcaaaagtccaaggaaaaaacgttggggtccctatctgtgaaggagctgccactgcaaagtctccatggaatgcacctgaacttttcgatctttacatatttgaaggtgaatctatcagagaatggttgttttttgacaaaccaaggagggcatttgatagtggaaatcggaagcagcggtccttgccagactacaacggccgtggttggcatgaatctaggaagcaggtgatgaaggactttgggggtctgaagaggtcctattacatggatccacaaccatccaacggctatgaatggcacctatatgaatatgagatcaatgactgtgatgcttttgccttatatcggcttgaattcaagtcttcagatgcaaagaaaattgcaaaatccaaattaggttgtaatccactgaatgaaattcagcagcaaatggatagactcagtgcagacagtcctgtcgacaccaaacggacggcccggagccggacagagcctaacccgatagatgtcaatactaacatctattcagttccaaacaccacagttcaaactgatgttccaaatgcttatcagccagggtcacaagtggaccagatgacatatttgaacggtagtgtcgtttatgggcctcatctgccgtacggttactcgactgaaagaagtgacttctattggaactcaaatgatgggacatgagaagatataaacacatgttcgatttatggcatatttggccttcaagttctaacaattcccgttatgattattgggtcaaatctattagcatgacccccatcttcttgtaattgtagttggcccaatctacaggaaacatctctgaaacaagggatgccaataggcaatactgcagttctattttctgtggcaactttgtcgttgtaatatagccatatcatgataatagcaccctcctcgatgtgcagctgtatgtaacatatatctctggcttggtggacgataaccgttaaccagtcacgttggtgcctccatttatcggttacgttgtatgtgtaccattattcctgttctgaatctgggtgcaatctttatcctcaaactccgattgcacttgggtcagatggagtaaaaaccagccc

SEQ ID NO: 148488 - DNA, 948 bp, Zea Mays
gtttcgcgggctctcgagtctggagggccgaaccgccgccccgcgattcccagcccaccattgtattatggggtgcggtaggtttccgattccttctgcgcttttcacggtgcccacccagcgtgcaacctaggcgagaaccgcctccccctccgctccttccagctcgctctgtaatctgcatcagcctcgcccgccgccgtcgccgccatggggaggggaaagttcaaggggaagcccacaggccgccgcaacttctccacacccgaggagatcgctgctggtacttcaggtcggccacgcacctttaagaagaaggaggaagaggaagatgaggaagaggtagaaagagaagagtctgaggaagaatctgaagaggattctgatgaaaagactaaacataaaggcactgagggtattattcagattgaaaatccaaacttggtgaaagccaagaatataaaggccaaggaagttgattttggcaagacaactgaactctcaaggcgtgaaagagaggagcttgagaaacaaaaagctcatgaacgttatatgaagcttcaggagcaaggaaaaacagaacaagcacgaaaagatttggaacgtcttgctttaataagacaacaaagggctgatgcggcgaagaaacgcgaagaggagaaagctgccaaggagcagaggaagtccgaagcacggaagtaactgcaacagtcatggaccaagagtccacgaagtgacgaaggcacgatctgcgtcgattggatatttgtttctaatgcaccagctaccttttcatagacccggcctctattctgtattcccataaaaatatgcattgacagttgacaccagtctcgtggtcgtggtttcctgtaaacttgagcttgacaaaactgaaaagtagtaaagatcagcttgcaagaaactggctcttcttatttgctgtcc

SEQ ID NO: 148489 - DNA, 943 bp, Zea Mays
gtttcgcgggctctcgagtctggagggccgaaccgccgccccgcgattcccagcccaccattgtattatggggtgcggtaggtttccgattccttctgcgcttttcacggtgcccacccagcgtgcaacctaggcgagaaccgcctccccctccgctccttccagctcgctctgtaatctgcatcagcctcgcccgccgccgtcgccgccatggggaggggaaagttcaaggggaagcccacaggccgccgcaacttctccacacccgaggagatcgctgctggtacttcaggtcggccacgcacctttaagaagaaggaggaagaggaagatgaggaagaggtagaaagagaagagtctgaggaagaatctgaagaggattctgatgaaaagactaaacataaaggcactgagggtattattcagattgaaaatccaaacttggtgaaagccaagaatataaaggccaaggaagttgattttggcaagacaactgaactctcaaggcgtgaaagagaggagcttgagaaacaaaaagctcatgaacgttatatgaagcttcaggagcaaggaaaaacagaacaagcacgaaaagatttggaacgtcttgctttaataagacaacaaagggctgatgcggcgaagaaacgcgaagaggagaaagctggagcagaggaagtccgaagcacggaagtaactgcaacagtcatggaccaagagtccacgaagtgacgaaggcacgatctgcgtcgattggatatttgtttctaatgcaccagctaccttttcatagacccggcctctattctgtattcccataaaaatatgcattgacagttgacaccagtctcgtggtcgtggtttcctgtaaacttgagcttgacaaaactgaaaagtagtaaagatcagcttgcaagaaactggctcttcttatttgctgtcc

SEQ ID NO: 148490 - DNA, 103 bp, Zea Mays
atggaagatgctctgacaaaagtagctgcagtcgcagtcgctagtttggccacgtctcctcagtcctggccatgcatcttctgtgacaaaaaaaaaaaaaaaa

SEQ ID NO: 148491 - DNA, 1447 bp, Zea Mays
agaagcgcgtaaggattaaatccagcgaagtgttcaccttcttcaacttgaactccttgtggtccggactgacgaatcggggacggagattcacatcaacgcagatgtggaccccacgaccgagtcgtcgcgtcgtctcctccgcttccgacactctcctgctctgcctcctcctgcttgccggcgccgccgacgccgcgccgctgctcgtaggcgtttttcccaaagatgaggcgtacttcgcgacgcaggtgatcgcctgcagagacggctcgggctctttcccgaggagccggctcaacgacgggtactgcgactgcggcgatggaaccgatgagccaggcacttcagcttgtccagaaggcaagttttactgcagaaatatcggagatacccctcgattgttgttctcttcgtttgtgaatgacaaaatttgcgattgttgtgatggaagtgatgagtacgaaagtggtatccattgccagaacacctgtagaaatataaaggatactgctgaggctgatggtggtggtggcgacctcgcagtaacacatttagattctactgatgattttatgagtaaacatgcaattgctatggaagaccatatccagaacaacagcaacagagaccttgtccagaagataagaggattgagaacagccctagttattgagctgggccttgttgtatgtatttttgctttttgcattgctcggcgtcgcactagaacacgcaggagacagcatattttgaaacgttagctgaacagtagtaatatacaaagacgatagatcggtgctcatttgcaaacattaaagcttccggagatggtggagaatcagagatgggatgaaggagcctgcacgtcatcctctttaaatcacgaggtccatctgctgttctgaactttgtagggtaggaaaattaagtatgtactccctctagtcgcagaaacttgtcatttaggacagatatggtcaaacctttaaaagtgcaagtatttacattatttactttggaaccatgtaggtctaatgtcgatctgcattcgagattcatgcaaaatctcttatatcggaagggttttaagaatatattctagaatagtggtaaaaacatgcactgaagatcgtgcaaaatcaaatgtgtcaagttgtgaccagatggagtgtacatgtttaacataaataacttaattgttgtaactgatttgtggccccgtcgtgcttcctctgtaactatgagttgctcctaccaggaggaattgacgatgctccatgcctgaaccttgcaacttgttgtatctataatgtttgtctctagcagtgtactctatacctattctatgtgttcgttctttatgatcttctctaaaagattcactctatatctttggtagtagtatcgttctatatatctaaatacttaatattagagacatgtt

SEQ ID NO: 148492 - DNA, 1677 bp, Zea Mays
agtagttgccgctccccattccaaacatgaccgttggggcgctgtgccgctgtcgccttcctgagatccccaaaaccccgacgccgcgctctcccacctggcacccgagaatactcgcgctcgcgcactcgacattcctcgcccccacgccggttcaccctgcgcgcacgcgctcagcatctcgcaatcccccgggcggaggcgtatgtcctgcgccgtggcgatgccgatcgacttgctccacgctccagctccgtgggaggaggaggtgaaggcggttgaggaggaggaggaggtggagggagtaggatgcggcggaggggccgtggtggtggtcgcggcggacgcggaggcggagggtcacccctacgacttccacgtgtccgggccgcgcaacctgccgccgcccaactggaaggagataatcagatcgagctggaaggatccaaattacaaaaggatggtaatggcctgcttcattcaagcagtctacctgcttgaactggacaggcaggacatgaaaggcgaagaggatggccttgctccaaaatggtggagacccttcaagtacaaggtcacgcagacattggtggatgagagagatggttccatctatggcgccatgctggagtgggatcgttcttctgccttgtctgactttatcctcatgagaccaagcggggcaccgagggctgtgttagctctcagaggaaccctcctgcagaagccaactatgaagagagatctgcaggatgaccttcgcttcttggtatgggagagcctcaaaggttcagtgagatttgttggtgctttagcagcgctaaaatcagaagttgagaagtttggcagcgccaatgtttgtgttgccgggcactccttgggagctggctttgcactccaagtctgcaaggagcttgccaaacatggagtttttgtggagtgtcatcttttcaatccaccttctgtttcactggccatgggtgtaaggaccatgagtgagaaggtcagctacctgtggaagaaagtcaaaggaagtctgccattgaaggaagacacaacaccaccacttgagactgctaaggctgatgcaagtgacaagaagagattgcgcgccgagaagaaatgggtgccacatttatatgtcaacaacagtgattacatctgctgccactacaacgctccatcttgctcgtccacaacaacagatggtgcttccaacgaacagcagcaacaacaacgcaaggctagtgaaattgccggtgatgtggtcgcaaagctctttgtgacatcaaaagggccacagaaattccttgaggcgcatgggctacagcagtggtggtcagatggcatggagctgcagctggctctctatgacagcaagctcataaacaggcagctgaaatccatctacgcaacaacaacagaaatgcaatctcctgccaagtcctagacacggcttaagccgctgttgcatcggtcattagaaatactctttctaaccagtgtgtgtgttcctttatcaactgagaatgttttattactccagtgatgccccaaaacagtcgaataatttgattaaagggatagtgtgtgaacagtttcgacaaaacaacattgtatttcaactcaaatctctacttatatgtaaagtgggaatttcttccacgtcttcctccc

SEQ ID NO: 148493 - DNA, 363 bp, Zea Mays
gggggcggccgcgccgcgtggcgcggctgggctgcgcccgtcgtcgaagttcttggcgtagctggcggcgtcgtagccgaacgtgacgggcctgggcctgcccgtggccgccgtcggggagctgcagatgcacctggtttcctgcgccagccgcctgaggagcttccgccacacgcgttgcccgcaccacccgacgtcgcgggacaggacgagctgggcgcggcggaccacggcgggcgcgccgcggtgcttggctgaacgcggccacggggcaacggaggaagaggaagaggacgaggaggaggccatgcggccgggcaggttgacggagtggggtggcgcgggcaggtcagtggtgctcac

SEQ ID NO: 148494 - DNA, 647 bp, Zea Mays
aaaagagctactcgagatagtataaagctgcaggcctgcagtcgcccccaaattccccgaaccaaatcactcccaccgtctccacagcaaccagcacacatttccctttggcggatcgaaggaaggaaggaggagatgggtggcggcatggaggtgcacaaaaaccggtggatcgaagagtggaacgccggccgggagaacctcgagttcaacttccgctggacccgccgcagcctcgccgtcgtcggcctcttcggcctcgctgtccccatcctcgtctacaagggcatcgtccgcgaattcgacgaggatgcaggtcggccatacaggaagttcctgtaagcggcgtccagggctgcaggatacgtcgattcctcgaccggggctgcgaggaggggagtttccgttcagtttgtgtcggtattgttttagtctgaatctgatgaagcaatttggaatgctgaattattgtgcctgatccaaatgaataaggtgtaatgactcgtcttttcaattactgaaactggagatgtttgaatttacttggtcacttgtatggtaaaatagcagcgttgtcatatactgtttatgacttcatttgagcgccgtggaggaatatgggatatccatggaggattggagtttgc

SEQ ID NO: 148495 - DNA, 656 bp, Zea Mays
aaaagagctactcgagatagtataaagctgcaggcctgcagtcgcccccaaattccccgaaccaaatcactcccaccgtctccacagcaaccagcacacatttccctttggcggatcgaaggaaggaaggaggagatgggtggcggcatggaggtgcacaaaaaccggtggatcgaagagtggaacgccggccgggagaacctcgagttcaacttccgctggacccgccgcagcctcgccgtcgtcggcctcttcggcctcgctgtccccatcctcgtctacaagggcatcgtccgcgaattccatatgcaggacgaggatgcaggtcggccatacaggaagttcctgtaagcggcgtccagggctgcaggatacgtcgattcctcgaccggggctgcgaggaggggagtttccgttcagtttgtgtcggtattgttttagtctgaatctgatgaagcaatttggaatgctgaattattgtgcctgatccaaatgaataaggtgtaatgactcgtcttttcaattactgaaactggagatgtttgaatttacttggtcacttgtatggtaaaatagcagcgttgtcatatactgtttatgacttcatttgagcgccgtggaggaatatgggatatccatggaggattggagtttgc

SEQ ID NO: 148496 - DNA, 668 bp, Zea Mays
aaaagagctactcgagatagtataaagctgcaggcctgcagtcgcccccaaattccccgaaccaaatcactcccaccgtctccacagcaaccagcacacatttccctttggcggatcgaaggaaggaaggaggagatgggtggcggcatggaggtgcacaaaaaccggtggatcgaagagtggaacgccggccgggagaacctcgagttcaacttccgctggacccgccgcagcctcgccgtcgtcggcctcttcggcctcgctgtccccatcctcgtctacaagggcatcgtccgcgaattcggttggatccagcatatgcaggacgaggatgcaggtcggccatacaggaagttcctgtaagcggcgtccagggctgcaggatacgtcgattcctcgaccggggctgcgaggaggggagtttccgttcagtttgtgtcggtattgttttagtctgaatctgatgaagcaatttggaatgctgaattattgtgcctgatccaaatgaataaggtgtaatgactcgtcttttcaattactgaaactggagatgtttgaatttacttggtcacttgtatggtaaaatagcagcgttgtcatatactgtttatgacttcatttgagcgccgtggaggaatatgggatatccatggaggattggagtttgc

SEQ ID NO: 148497 - DNA, 3435 bp, Zea Mays
gccattttcttttcttatccccagccgccacaaagacagccggccgcctgggaacttttttttcttttcttcttcctggccgaccgcacctcccacttctctctatttttttttccttgcaccatggcttggcaaacggatctaggctggcttcctctctttctgttcttctcctgctctgttctttgcttctttcttccccaccgaacagctcaaaccgggtgagctagccgctgcctgagcgcgcagccggctcacatatccgaggatgaccggattaatgttcaggggcatgcgggttttaccgccggtgtgcgcgtcccctcagtagggcgcgccgccgtcggtcaaacgccgacagctgtccctgttgacagcagagaaaaggggtcgacctcttggtcgacttctgtgactgtgcacgcccagatcttatctcccttacctctttgactcgatctcgttctctgtgatgtatgagatggatctaatgtaatattcgggatcgagttatgagttgatagaacgtagattttctgtgaggatttttttgtaccttttctaatctgctctgtcatctaggccgtggatgtaaaagatcccgagccactgtgatctctgttgacccagatttaaaactgatcagggttaggttattaaaccctaaccctaaaacatcgatctgtttttactatctcgaatcttctgggtttggccgagaccaaatctctgttagtggccaaaaccctagatttagggttaggtaaaccctaacccgagagataaaaaatattctttctattttaatctatctgttctcgggtgataaacgaaaaaaatagttcaatcatgttgatccgagacttttctgtgatctcataaaactgatgcggattaggagatctagggttcttaggacggctttgataccattgttagaatctatactgcctaggatcgattcctaagtccctagaataccaatccgtctgtaactgaaagtaaaatcttgatgacgtgtagatctgatctactatctactgagaggaacggggaaacacacctttattgttgttgctatcttcataccgtcgccctgcagagaagcagcaggcatcgggatccgagccgctgtaggttgtcgcgtttctaaacactccgacgtctaggcgatggggcctctgaggactagggttttggggcgaggtactagcgttagtttttcctgcgaccccttagtcctatatatagcgtcgtgtgtctgggggctccaaccgaggttagtgtgggccctcccgatcaagggcccgattaaaggaacgatagttgggttaagcccaatccagtctctattgaccggctgtagaggacacacccaacactcggctctttcttgtcttattgcccctggcaccaggcgagtactacgccccgcggcttccgatgacgccgccgccgaacctttcgccggcgccggccatcacgggcggcacgttcgcgtacgacgacctagcggcggcgacgggcaggttctcggacgcgaacctactcgggcagggcgggttcgggcacgtgtaccgcggcacggtgggcgggcgggaggtggccatcaagaagctgcaggccggcggcgggcagggcgaccgcgagttccgcgccgaggtggagatcatcagccgcgtgcaccacaagaacctcgtctccctcgtcggctactgcctctacggcgagcagcggctgctcgtgtacgaggacagggagtggcaggccgacgctggactggccgaggcggtggaggatcgcggttggctccgcgaagggcctcgcgtacctgcacgaagactgttatccaaagatcatccatcgtgacatcaaagcggcgaacatccttctggattaccattacgagccaaaggttgcagatttcgggttggccaaataccaagcagctgaagtcacccctgtttctacgcgtgtgataggaaccttcggatatctggctccagagtacgctgccacaggcaaaattagcgaccggtccgacgtcttctccttcggtgtgatgctgctggagctcatcaccgggaggaaaccaatcatggcatcttcagagtttcagtctgtggcattggtttcttgggctaggccattgctgacaagagctgtggaggaggaaaactacgacgacctcatcgatccgaggctggagaccgactacgacgcgcacgacatggcgcggctggtcgcgtgcgccgcggccgccgtgcgccagaccgcgcggtgtcgcccgcggatgagccagatcgtccggtacctggagggcgagctgtcggtggaggacctgaacgccggcgtggtgccggggcagagcgcggtgcagcggtcgggcggcggcaccacggaccggatcagccggctcgggcgcgtgagggagcaccgtgaccgggacgaccatcacggagtgcacgagcagcgatcccaccagcgaggacgcgggcgacacgggcgaggtggcgggcgcgcaggggcagcagtgctccggcaggcgcgcggccgtctacaccgagaggatgagccggcgcaccaccgccagacgcaccctgaattcgttgttcgttcgcgtacatcagcatactgaactttgcttcaacttttctaaattatataagttactctattctttttaacaacttagatctcaaagtttttggttgtgcgacatagggatgaaaaacgaacggatatatacagaaaacctctctggttttgtttccgtatccgaattttatcatcggaaactacatttatcatgctcttcatgcaaaatacaactgcaatttggagctccactaatgtaaaacgatctccactgatgctaaataaaactttccataacatacacaacagcaatcaacactttgaatgcaaaatagaactatcagatcaggcagcagcagcagcagcaccagaaaacacgtccgccgccgcacgacaccagcttaccgtaagatcagcagatgaccgtgttgcagctgttggtgttgacgccggtctcggttcctccgacgaaggggtcgatcttgacccagagcagggagaagacggaggcgaggaggacggaccagagcaccacgatggtgggcgtgcggttctggcggcccatgaggcccttgaggaacgggtagaggtgcatgatcacccacatggcgaagaacaccttgccgaagagcgggccccaggactcgtagccgctgttcagcgcggccgagaaccccgccaccacgcccaccaggttcagcaccaggatgctggtgggcgggatcagcaccgtcgtccacttgaacacgtacagctccccgaactccgtgtcgtccgtggccttcgccgtcaccgtgaagttggtgtccagcccggcgatcatcttgaggatgccct

SEQ ID NO: 148498 - DNA, 3460 bp, Zea Mays
cttttcttatccccagccgccacaaagacagccggccgcctgggaacttttttttcttttcttcttcctggccgaccgcacctcccacttctctctatttttttttccttgcaccatggcttggcaaacggatctaggctggcttcctctctttctgttcttctcctgctctgttctttgcttctttcttccccaccgaacagctcaaaccgggtgagctagccgctgcctgagcgcgcagccggctcacatatccgaggatgaccggattaatgttcaggggcatgcgggttttaccgccggtgtgcgcgtcccctcagtagggcgcgccgccgtcggtcaaacgccgacagctgtccctgttgacagcagagaaaaggggtcgacctcttggtcgacttctgtgactgtgcacgcccagatcttatctcccttacctctttgactcgatctcgttctctgtgatgtatgagatggatctaatgtaatattcgggatcgagttatgagttgatagaacgtagattttctgtgaggatttttttgtaccttttctaatctgctctgtcatctaggccgtggatgtaaaagatcccgagccactgtgatctctgttgacccagatttaaaactgatcagggttaggttattaaaccctaaccctaaaacatcgatctgtttttactatctcgaatcttctgggtttggccgagaccaaatctctgttagtggccaaaaccctagatttagggttaggtaaaccctaacccgagagataaaaaatattctttctattttaatctatctgttctcgggtgataaacgaaaaaaatagttcaatcatgttgatccgagacttttctgtgatctcataaaactgatgcggattaggagatctagggttcttaggacggctttgataccattgttagaatctatactgcctaggatcgattcctaagtccctagaataccaatccgtctgtaactgaaagtaaaatcttgatgacgtgtagatctgatctactatctactgagaggaacggggaaacacacctttattgttgttgctatcttcataccgtcgccctgcagagaagcagcaggcatcgggatccgagccgctgtaggttgtcgcgtttctaaacactccgacgtctaggcgatggggcctctgaggactagggttttggggcgaggtactagcgttagtttttcctgcgaccccttagtcctatatatagcgtcgtgtgtctgggggctccaaccgaggttagtgtgggccctcccgatcaagggcccgattaaaggaacgatagttgggttaagcccaatccagtctctattgaccggctgtagaggacacacccaacactcggctctttcttgtcttattgcccctggcaccaggcgagtactacgccccgcggcttccgatgacgccgccgccgaacctttcgccggcgccggccatcacgggcggcacgttcgcgtacgacgacctagcggcggcgacgggcaggttctcggacgcgaacctactcgggcagggcgggttcgggcacgtgtaccgcggcacggtgggcgggcgggaggtggccatcaagaagctgcaggccggcggcgggcagggcgaccgcgagttccgcgccgaggtggagatcatcagccgcgtgcaccacaagaacctcgtctccctcgtcggctactgcctctacggcgagcagcggctgctcgtgtacgagtacgtgcccaacaagaccctcgagttccatctccacgggacagggagtggcaggccgacgctggactggccgaggcggtggaggatcgcggttggctccgcgaagggcctcgcgtacctgcacgaagactgttatccaaagatcatccatcgtgacatcaaagcggcgaacatccttctggattaccattacgagccaaaggttgcagatttcgggttggccaaataccaagcagctgaagtcacccctgtttctacgcgtgtgataggaaccttcggatatctggctccagagtacgctgccacaggcaaaattagcgaccggtccgacgtcttctccttcggtgtgatgctgctggagctcatcaccgggaggaaaccaatcatggcatcttcagagtttcagtctgtggcattggtttcttgggccattgctgacaagagctgtggaggaggaaaactacgacgacctcatcgatccgaggctggagaccgactacgacgcgcacgacatggcgcggctggtcgcgtgcgccgcggccgccgtgcgccagaccgcgcggtgtcgcccgcggatgagccagatcgtccggtacctggagggcgagctgtcggtggaggacctgaacgccggcgtggtgccggggcagagcgcggtgcagcggtcgggcggcggcaccacggaccggatcagccggctcgggcgcgtgagggagcaccgtgaccgggacgaccatcacggagtgcacgagcagcgatcccaccagcgaggacgcgggcgacacgggcgaggtggcgggcgcgcaggggcagcagtgctccggcaggcgcgcggccgtctacaccgagaggatgagccggcgcaccaccgccagacgcaccctgaattcgttgttcgttcgcgtacatcagcatactgaactttgcttcaacttttctaaattatataagttactctattctttttaacaacttagatctcaaagtttttggttgtgcgacatagggatgaaaaacgaacggatatatacagaaaacctctctggttttgtttccgtatccgaattttatcatcggaaactacatttatcatgctcttcatgcaaaatacaactgcaatttggagctccactaatgtaaaacgatctccactgatgctaaataaaactttccataacatacacaacagcaatcaacactttgaatgcaaaatagaactatcagatcaggcagcagcagcagcagcaccagaaaacacgtccgccgccgcacgacaccagcttaccgtaagatcagcagatgaccgtgttgcagctgttggtgttgacgccggtctcggttcctccgacgaaggggtcgatcttgacccagagcagggagaagacggaggcgaggaggacggaccagagcaccacgatggtgggcgtgcggttctggcggcccatgaggcccttgaggaacgggtagaggtgcatgatcacccacatggcgaagaacaccttgccgaagagcgggccccaggactcgtagccgctgttcagcgcggccgagaaccccgccaccacgcccaccaggttcagcaccaggatgctggtgggcgggatcagcaccgtcgtccacttgaacacgtacagctccccgaactccgtgtcgtccgtggccttcgccgtcaccgtgaagttggtgtccagcccggcgatcatcttgaggatgccct

SEQ ID NO: 148499 - DNA, 3074 bp, Zea Mays
gttgatagaacgtagattttctgtgaggatttttttgtaccttttctaatctgctctgtcatctaggccgtggatgtaaaagatcccgagccactgtgatctctgttgacccagatttaaaactgatcagggttaggttattaaaccctaaccctaaaacatcgatctgtttttactatctcgaatcttctgggtttggccgagaccaaatctctgttagtggccaaaaccctagatttagggttaggtaaaccctaacccgagagataaaaaatattctttctattttaatctatctgttctcgggtgataaacgaaaaaaatagttcaatcatgttgatccgagacttttctgtgatctcataaaactgatgcggattaggagatctagggttcttaggacggctttgataccattgttagaatctatactgcctaggatcgattcctaagtccctagaataccaatccgtctgtaactgaaagtaaaatcttgatgacgtgtagatctgatctactatctactgagaggaacggggaaacacacctttattgttgttgctatcttcataccgtcgccctgcagagaagcagcaggcatcgggatccgagccgctgtaggttgtcgcgtttctaaacactccgacgtctaggcgatggggcctctgaggactagggttttggggcgaggtactagcgttagtttttcctgcgaccccttagtcctatatatagcgtcgtgtgtctgggggctccaaccgaggttagtgtgggccctcccgatcaagggcccgattaaaggaacgatagttgggttaagcccaatccagtctctattgaccggctgtagaggacacacccaacactcggctctttcttgtcttattgcccctggcaccaggcgagtactacgccccgcggcttccgatgacgccgccgccgaacctttcgccggcgccggccatcacgggcggcacgttcgcgtacgacgacctagcggcggcgacgggcaggttctcggacgcgaacctactcgggcagggcgggttcgggcacgtgtaccgcggcacggtgggcgggcgggaggtggccatcaagaagctgcaggccggcggcgggcagggcgaccgcgagttccgcgccgaggtggagatcatcagccgcgtgcaccacaagaacctcgtctccctcgtcggctactgcctctacggcgagcagcggctgctcgtgtacgagtacgtgcccaacaagaccctcgagttccatctccacgggacagggagtggcaggccgacgctggactggccgaggcggtggaggatcgcggttggctccgcgaagggcctcgcgtacctgcacgaagactgttatccaaagatcatccatcgtgacatcaaagcggcgaacatccttctggattaccattacgagccaaaggttgcagatttcgggttggccaaataccaagcagctgaagtcacccctgtttctacgcgtgtgataggaaccttcgggtaaatcgttctgtgatgttggcagggcacacactcaccaattcgcccacatacagcataacctgctgacgcatattctaagactgaatttctgttgtcttttgtttttgtccgcagatatctggctccagagtacgctgccacaggcaaaattagcgaccggtccgacgtcttctccttcggtgtgatgctgctggagctcatcaccgggaggaaaccaatcatggcatcttcagagtttcagtctgtggcattggtttcttgggctaggccattgctgacaagagctgtggaggaggaaaactacgacgacctcatcgatccgaggctggagaccgactacgacgcgcacgacatggcgcggctggtcgcgtgcgccgcggccgccgtgcgccagaccgcgcggtgtcgcccgcggatgagccagatcgtccggtacctggagggcgagctgtcggtggaggacctgaacgccggcgtggtgccggggcagagcgcggtgcagcggtcgggcggcggcaccacggaccggatcagccggctcgggcgcgtgagggagcaccgtgaccgggacgaccatcacggagtgcacgagcagcgatcccaccagcgaggacgcgggcgacacgggcgaggtggcgggcgcgcaggggcagcagtgctccggcaggcgcgcggccgtctacaccgagaggatgagccggcgcaccaccgccagacgcaccctgaattcgttgttcgttcgcgtacatcagcatactgaactttgcttcaacttttctaaattatataagttactctattctttttaacaacttagatctcaaagtttttggttgtgcgacatagggatgaaaaacgaacggatatatacagaaaacctctctggttttgtttccgtatccgaattttatcatcggaaactacatttatcatgctcttcatgcaaaatacaactgcaatttggagctccactaatgtaaaacgatctccactgatgctaaataaaactttccataacatacacaacagcaatcaacactttgaatgcaaaatagaactatcagatcaggcagcagcagcagcagcaccagaaaacacgtccgccgccgcacgacaccagcttaccgtaagatcagcagatgaccgtgttgcagctgttggtgttgacgccggtctcggttcctccgacgaaggggtcgatcttgacccagagcagggagaagacggaggcgaggaggacggaccagagcaccacgatggtgggcgtgcggttctggcggcccatgaggcccttgaggaacgggtagaggtgcatgatcacccacatggcgaagaacaccttgccgaagagcgggccccaggactcgtagccgctgttcagcgcggccgagaaccccgccaccacgcccaccaggttcagcaccaggatgctggtgggcgggatcagcaccgtcgtccacttgaacacgtacagctccccgaactccgtgtcgtccgtggccttcgccgtcaccgtgaagttggtgtccagcccggcgatcatcttgaggatgccct

SEQ ID NO: 148500 - DNA, 1724 bp, Zea Mays
gataaacgaaaaaaatagttcaatcatgttgatccgagacttttctgtgatctcataaaactgatgcggattaggagatctagggttcttaggacggctttgataccattgttagaatctatactgcctaggatcgattcctaagtccctagaataccaatccgtctgtaactgaaagtaaaatcttgatgacgtgtagatctgatctactatctactgagaggaacggggaaacacacctttattgttgttgctatcttcataccgtcgccctgcagagaagcagcaggcatcgggatccgagccgctgtaggttgtcgcgtttctaaacactccgacgtctaggcgatggggcctctgaggactagggttttggggcgaggtactagcgttagtttttcctgcgaccccttagtcctatatatagcgtcgtgtgtctgggggctccaaccgaggttagtgtgggccctcccgatcaagggcccgattaaaggaacgatagttgggttaagcccaatccagtctctattgaccggctgtagaggacacacccaacactcggctctttcttgtcttattgcccctggcaccaggcgagtactacgccccgcggcttccgatgacgccgccgccgaacctttcgccggcgccggccatcacgggcggcacgttcgcgtacgacgacctagcggcggcgacgggcaggttctcggacgcgaacctactcgggcagggcgggttcgggcacgtgtaccgcggcacggtgggcgggcgggaggtggccatcaagaagctgcaggccggcggcgggcagggcgaccgcgagttccgcgccgaggtggagatcatcagccgcgtgcaccacaagaacctcgtctccctcgtcggctactgcctctacggcgagcagcggctgctcgtgtacgagtacgtgcccaacaagaccctcgagttccatctccacgggacagggagtggcaggccgacgctggactggccgaggcggtggaggatcgcggttggctccgcgaagggcctcgcgtacctgcacgaagactgttatccaaagatcatccatcgtgacatcaaagcggcgaacatccttctggattaccattacgagccaaaggttgcagatttcgggttggccaaataccaagcagctgaagtcacccctgtttctacgcgtgtgataggaaccttcggatatctggctccagagtacgctgccacaggcaaaattagcgaccggtccgacgtcttctccttcggtgtgatgctgctggagctcatcaccgggaggaaaccaatcatggcatcttcagagtttcagtctgtggcattggtttcttggcatcacgtggattccccattcgatatgcaacagcgacagttcctctgctcctcaacaggctaggccattgctgacaagagctgtggaggaggaaaactacgacgacctcatcgatccgaggctggagaccgactacgacgcgcacgacatggcgcggctggtcgcgtgcgccgcggccgccgtgcgccagaccgcgcggtgtcgcccgcggatgagccagatcgtccggtacctggagggcgagctgtcggtggaggacctgaacgccggcgtggtgccggggcagagcgcggtgcagcggtcgggcggcggcaccacggaccggatcagccggctcgggcgcgtgagggagcaccgtgaccgggacgac

SEQ ID NO: 148501 - DNA, 1680 bp, Zea Mays
ctgtgatctcataaaactgatgcggattaggagatctagggttcttaggacggctttgataccattgttagaatctatactgcctaggatcgattcctaagtccctagaataccaatccgtctgtaactgaaagtaaaatcttgatgacgtgtagatctgatctactatctactgagaggaacggggaaacacacctttattgttgttgctatcttcataccgtcgccctgcagagaagcagcaggcatcgggatccgagccgctgtaggttgtcgcgtttctaaacactccgacgtctaggcgatggggcctctgaggactagggttttggggcgaggtactagcgttagtttttcctgcgaccccttagtcctatatatagcgtcgtgtgtctgggggctccaaccgaggttagtgtgggccctcccgatcaagggcccgattaaaggaacgatagttgggttaagcccaatccagtctctattgaccggctgtagaggacacacccaacactcggctctttcttgtcttattgcccctggcaccaggcgagtactacgccccgcggcttccgatgacgccgccgccgaacctttcgccggcgccggccatcacgggcggcacgttcgcgtacgacgacctagcggcggcgacgggcaggttctcggacgcgaacctactcgggcagggcgggttcgggcacgtgtaccgcggcacggtgggcgggcgggaggtggccatcaagaagctgcaggccggcggcgggcagggcgaccgcgagttccgcgccgaggtggagatcatcagccgcgtgcaccacaagaacctcgtctccctcgtcggctactgcctctacggcgagcagcggctgctcgtgtacgagtacgtgcccaacaagaccctcgagttccatctccacggtatgcacgcacggacggacgctggagctccttaactgcgagtgggtctgtctgacactggagctcggtatcagggacagggagtggcaggccgacgctggactggccgaggcggtggaggatcgcggttggctccgcgaagggcctcgcgtacctgcacgaagactgttatccaaagatcatccatcgtgacatcaaagcggcgaacatccttctggattaccattacgagccaaaggttgcagatttcgggttggccaaataccaagcagctgaagtcacccctgtttctacgcgtgtgataggaaccttcggatatctggctccagagtacgctgccacaggcaaaattagcgaccggtccgacgtcttctccttcggtgtgatgctgctggagctcatcaccgggaggaaaccaatcatggcatcttcagagtttcagtctgtggcattggtttcttgggtgagtggtccttctttggacccaatccttcttgcctaaattagttcccatccatcagttaactatgactgtgctaagtatcggtactggttggttataagctgttacatactttacataatagcatcacgtggattccccattcgatatgcaacagcgacagttcctctgctcctcaacaggctaggccattgctgacaagagctgtggaggaggaaaactacgacgacctcatcgatccgaggctggagaccgactacgacgcgcacgacatggcgcggctggtcgcgtgcgcc

SEQ ID NO: 148502 - DNA, 967 bp, Zea Mays
cgagagcccgagaccgcccaggtgcccaccactccaccagccaaccctagagcctctccagtctccactgctcggccgccgcctgccgcagcccgccgtccactggtcccgcctcccggcgtccgctccacgcctccactgctcccggcgtccgctccattgctaccatcgtccggcgttctgctcctgcgccctccctttgattcgttgccagttgtagtgtccgggcagatttgagctgtggcagcaagcaaggattgacgaagcgtgcgttcccatcgcaccaccatgggctacacagagatcgacatccacccctctgggagcggcaagatgtgatagatattagtatgaaagataaaaactagaatgctatgcctgtcagaggagctttcttcagtttcagaacacacctctccatctttcggtgcttggtggatcaccgtctaaacgatccaccaccagaaccgcccaaccccaagataggcagctccatctcagtcgttgtacccgttcaatggcgagctggtggcagcgatgtaggagatgatccatgccgaggtgcacaagtacatgttagtggacggcacctgccaaagatacaccgtttctactggtacacattttattttttatggtgagaattaattttgtagcttgcgcaaaaccaaaggttgagtgatttgtcaaggcagaaatcagtataatgataggtgtgcttgagcttttaatagctggtttatttgaacttttatctttttatgatcatgatatattgagacataaatatattacatgtacctttgcagtttttcagttggagaaaacatttaagacaacattttcatcgtttgttctccatatggggcttgtttcacgccacttgaaggaagaagggaatggtggtgttaagttcggacaatacatctacacatcttggagcatcggcatcaatgttctcaatctt

SEQ ID NO: 148503 - DNA, 774 bp, Zea Mays
cgagagcccgagaccgcccaggtgcccaccactccaccagccaaccctagagcctctccagtctccactgctcggccgccgcctgccgcagcccgccgtccactggtcccgcctcccggcgtccgctccacgcctccactgctcccggcgtccgctccattgctaccatcgtccggcgttctgctcctgcgccctccctttgattcgttgccagttgtagtgtccgggcagatttgagctgtggcagcaagcaaggattgacgaagcgtgcgttcccatcgcaccaccatgggctacacagagatcgacatccacccctctgggagcggcaagatgtgatagatattagtatgaaagataaaaactagaatgctatgcctgtcagaggagctttcttcagtttcagaacacacctctccatctttcggtgcttggtggatcaccgtctaaacgatccaccaccagaaccgcccaaccccaagataggcagctccatctcagtcgttgtacccgttcaatggcgagctggtggcagcgatgtaggagatgatccatgccgaggtgcacaagtacatgttagtggacggcacctgccaaagatacaccgtttctactgtttttcagttggagaaaacatttaagacaacattttcatcgtttgttctccatatggggcttgtttcacgccacttgaaggaagaagggaatggtggtgttaagttcggacaatacatctacacatcttggagcatcggcatcaatgttctcaatctt

SEQ ID NO: 148504 - DNA, 2674 bp, Zea Mays
cgagagcccgagaccgcccaggtgcccaccactccaccagccaaccctagagcctctccagtctccactgctcggccgccgcctgccgcagcccgccgtccactggtcccgcctcccggcgtccgctccacgcctccactgctcccggcgtccgctccattgctaccatcgtccggcgttctgctcctgcgccctccctttgattcgttgccagttgtagtgtccgggcagatttgagctgtggcagcaagcaaggattgacgaagcgtgcgttcccatcgcaccaccatgggctacacagagatcgacatccacccctctgggagcggcaaggtaccgaccccctgcccttacaactcctagagctctacccctcacgctgaccttagggagacaggatggtttgctcgcctactagaggacatgctctgatggtgttccctctgctaccatttttagttcttgattgtaaagtgtatgttctacattttgaaatagaactggattgtgcatattttgttctacatgtaaagtgtatgttctacatgtaccttttagatcgcttgcaatatgatttattttaacacatatttgaaatagaactggattgtgcatattttgtaaagtgtatgttctacattttgtaattcgtattattcatttttcctttagtttttctctttctacaactcctgtctctttacaatcaaatttcagatgtgatagatattagtatgaaagataaaaactagaatgctatgcctgtcagaggagctttcttcagtttcaggtactgctctgctttattagtcatccagccgatggataatttctatacgtgtatcgcccctgcactttcaaacacatgttcattgtttccaatcacataatttttttcttctcttagatttactatgtggttgtggtctcagtttggtttgtaggttaatttgtatactcatgtgattttagtttttccgtgtattttatgttcatttagtatgtcttaatttagttactttcaattcttgatgctaataatatggatagattgcgacactactttctggcttgagcagaaatgagtttgttgtatatagcagaatatagttgtcgtagctggcaacaatgaccgctctttggatgatctgaaaactattctgtagtcaggtagttaaatatagctgaatatccattattatgttttattaatcttatttgttttttctgtcaaaagaacacacctctccatctttcggtgcttggtggatcaccgtctaaacgatccaccaccagaaccgcccaaccccaagataggcagctccatctcagtcgttgtacccgttcaatggcgagctggtggcagcgatgtaggagatgatccatgccgaggtgcacaagtacatgttagtggacggcacctgccaaagatacaccgtttctactgtttttcagttggagaaaacatttaagacaacattttcatcgtttgttctccatatggggcttgtttcacgccacttgaaggaagaagggaatggtggtgttaagttcggacaatacatctacacatcttggagcatcggcatcaatgttctcaatcttctcaaatttcaaattatactggtcattactttgaccattagaataaaatccctataaaacgtggccatgcaatcactggttgtaaactgatgggcagaatgttgtaggatggattggctcaagaactaatatagcttacttatgacaatgtagtaattcatgaagttattgttccttatgttcatggagtttgttctgctaggtttttatgcttttaatttctatttccttaacgaaacctcaggcaccttaaagacagcttggatgattggtttcatgaacagctagagaacttggatgatgattatcttgtgtttgattgccctaatatattctcaaatcatcttttcatgctttagttgtttcttaatagttgcacagtttcatctcactcatattcttgccacttacatgtatgtgacaaaacagacaatccgtcttttttattgcttatggcgttgtgcattatacatgtccaccaattatatacaaataccatttgtgggttacctctggtgtgtttaggtattcctcagattcctgacattttttctgtctttaaatgtcatatcactattaaaaaaattgatttttgttgtctaaaataccacaactacttttctaggtgcgagctgcaatcaaagttaaggcattagtcatcatttgcttcacctcttctggacaggctgcaagggtgttctggacaaagaaagcttgtaccttaaaacaagaggatacaagaagctggagtggttgtctaaaggcttttgaactgcttgaagcattagtgtagctttggtgattttgtgactgatcagctctggagcagctagagtgatgtagttgtgggcttttgaacaatagctggagtgatatgaaacattagtgatgtggttgtgggcttttgaactgcttcaagctggagtgatgtcgctgtgttgcttttgtgactgatcatctctggagcttttgtgaatgatctaactagctatatgtaaatgatctagttgtgaatggtattataattgtgatgattttgtgaatatataattgtggtgcttttgtgttt

SEQ ID NO: 148505 - DNA, 1156 bp, Zea Mays
cgagagcccgagaccgcccaggtgcccaccactccaccagccaaccctagagcctctccagtctccactgctcggccgccgcctgccgcagcccgccgtccactggtcccgcctcccggcgtccgctccacgcctccactgctcccggcgtccgctccattgctaccatcgtccggcgttctgctcctgcgccctccctttgattcgttgccagttgtagtgtccgggcagatttgagctgtggcagcaagcaaggattgacgaagcgtgcgttcccatcgcaccaccatgggctacacagagatcgacatccacccctctgggagcggcaagatgtgatagatattagtatgaaagataaaaactagaatgctatgcctgtcagaggagctttcttcagtttcagaacacacctctccatctttcggtgcttggtggatcaccgtctaaacgatccaccaccagaaccgcccaaccccaagataggcagctccatctcagtcgttgtacccgttcaatggcgagctggtggcagcgatgtaggagatgatccatgccgaggtgcacaagtacatgttagtggacggcacctgccaaagatacaccgtttctactgacaatccgtcttttttattgcttatggcgttgtgcattatacatgtccaccaattatatacaaataccatttgtgggttacctctggtgtgtttaggtgcgagctgcaatcaaagttaaggcattagtcatcatttgcttcacctcttctggacaggctgcaagggtgttctggacaaagaaagcttgtaccttaaaacaagaggatacaagaagctggagtggttgtctaaaggcttttgaactgcttgaagcattagtgtagctttggtgattttgtgactgatcagctctggagcagctagagtgatgtagttgtgggcttttgaacaatagctggagtgatatgaaacattagtgatgtggttgtgggcttttgaactgcttcaagctggagtgatgtcgctgtgttgcttttgtgactgatcatctctggagcttttgtgaatgatctaactagctatatgtaaatgatctagttgtgaatggtattataattgtgatgattttgtgaatatataattgtggtgcttttgtgttt

SEQ ID NO: 148506 - DNA, 473 bp, Zea Mays
gtgcacaccggacagtccggtgaattatagtcggcacatttccctttcaatgagtccactgacctcttacttcatttcagaggaagcgcccttcgactgcaaaggtttcagctttattgtggcgagtttcttcttggcaatctcgttctgcctcgcttggatgcttaacccaggaatgaaggacaagggcacaaaagctgccgtttcagacaacgctgatgaggaagcagcgcaaggaccactactggcaaaatggaccagaccatgactccagcttcaggaaactgagctataaagctcagctggagtgtgcgtaaaattgtaggatatgtgaattagagtgccaacaacatagggcttgcatgtacctgtagtatagtgtctgtacatacctcagaacgagaaagccgataaagctcggtgttttgtgccatccagccttcactgtttcaggcaaatggatctttatgtta

SEQ ID NO: 148507 - DNA, 3644 bp, Zea Mays
ccgttccaaattcgccaacccacaccaccttcctctctctcgccgccgccctcagatcagatcaaagcggaacaccaactcctcctcttcctcctcctcgtagggtttggtgtgttcacctcacctctcgcggcgacagcgaagccttctcttctcttcccctccgctccgctccgctccgctccgctcggtgtttcagccatgatgtcgcggtcgtacaccaacctgctcgacctcgcggagggcaacttcgcggcgctgggcccggccgccggcgccggcggcggcgggcggcagaggcaggggtcgttcgggctgaggcggatgtcgcgggtgatgacggtgccggggacgctctcggagctcgacggcgaggacgagtcggagccggcggccaccagcagcgtcgcctccgacgcgccctcgtccgtggcggcggaccgcctcatagtggtctccaaccagctgcccatcgtcgcgcgccggaggcccgacggccgaggatggtccttcgtgtgggacgacgactcgcttctgctccagctccgcgacggcattcccgaggatatggaggtgctcttcgtcggctccctccgcgccgacgtccccgtagccgagcaggacgaggtgtcgcaggcgttgctcgaccggttccgctgcgcgccggtcttcctccctgaccgcctcaacgaccgcttctaccacggcttctgcaagcgccaactctggcctctgttccactacatgctccccttctcctcatccgcgtccgccgccggcaccacctcttcctcctccgccgccacttgcaacggtcgcttcgaccgcagcgcttgggaggcgtacgtgctcgccaacaagttcttcttcgagaaggtcgtcgaggtaatcaacccggaggatgactacgtttgggttcacgactaccatctcatggcgctgcctaccttcctccgccgctgcttcaaccgcctccgcatcggattcttcctccacagccccttcccctcgtccgagatctaccgcaccctccctgttcgggaggagatactcaaggcgctgctcaactgtgacctaattggcttccacacttttgattacgccaggcacttcctctcgtgctgcagtaggatgctgggaattgaataccagtcaaagcgtgggtacattgaattggattactttggccgcactgtcgggatcaaaatcatgccagtgggagttcatatgggtcaattggagttgggtctgcgcttgcctgatagggaatggaggctttctgagcttcaacggcagtttcaggggaaaactgtcttgcttggtgtggatgatatggatatctttaaggggatcaatttgaagcttctcgcctttgagaacatgttgaggacacatcccaagtggcaggggagagcagtgttagtgcagattgctaacccagcccgtggaaggggtaaagatctggaagccatccaggctgagattgaggagagctgccagcggatcaatggagactttggccagtcagggtatagccctgttgttttcatcggccgtgatgtgtcaagtgttgagaagatcgcctattatacgatagcggaatgtgtggtggtcactgctgtgagggatgggatgaacttgacaccgtatgaatacgttgtctgtaggcagggtgcaccaggatctcagtcggtatcagaggtgagtgggccaaagaagagcatgctggttgtgtcagagtttattggctgctcaccgtcactgagcggtgctattagggttaacccatggaatatagaggcaaccgcagaggcgatgaatgaggccatttcaatgccagaacaggaaaaacagttgaggcatgagaaacattaccgttatgtcaggagccatgacgtcgcttattggtcaaagagcttcatcatagacttggaaagggtttgtaaggatcacttcaagaggacttgttggggcatagggttgggttttggtttcagggtggtggccttggaccctcatttcacaaagcttaacatggattcaatcattaatgcttatgagctttcagagagcagggctatattgctcgattatgatggaactctggttccccaaacttccctcaacaaggaacctagtccacaggttttgagcatcatcaataccctttgctcagatagtagaaacatcgtttttcttgtcagtggtcgagacaaagataccttgggaaagtggttctcctcatgtccaagattggggattgcagctgaacatggttacttcttgaggtggtctagagaagaagagtggcaaacatgcactcaggcattggacttcggatggatgcaaatggcgaagccagtgatgaatttatatacagaagcaactgatggatcctacattgaggccaaggaaagtgccttggtgtggcaccatcaggatgctgacctaggctttggatcctcacaggcaaaggagatgcttgatcacctggaaagtgtactagcaaatgaaccagtctctgtcaagagtggccagttcattgttgaagtcaaaccacagggaataagcaagggaatagttgccgagaggatacttgcatcagtgaaggagagaggaaagcaggctgatttcttattgtgcatcggcgatgataggtctgatgaggacatgtttgaaaatattgctgatatcattgggaggaatttggttgctccaagaacagcactgtttgcgtgcactgtgggacaaaaaccaagcaaagccaaattctacctggatgatacattcgaagtggtcactatgctgagcgcactggcagatgccacaggtcctgaactggagactgattcggctgatgaatctgtcgcatatatctcatcacttgatattggtgacgaacaatcagaatccagtgataaaccagttgaagggtcttagccagttttctcttgcgttttcagaacatgatgattgtttcaatagtcaattctattctacacaattttctgatgggaactcaacgactaacaactggttctacgaatgctccagagtgaagcttctcaatctgctgtgctccaagttctccagttgggcaagatagtacagtctgttgctccaaggcgtagatccatatgttcatagctgacttacttggcacgttctttcactttctcattcctggttgaattaaaatgaaaacctcacagaagacaaagggagcgctgtttggctcattggctgaagtaatctggggggaggtataggagtggcgtatgtgaaaggagcctgtgcgcaggttgtgatatgattccttattaacacgacgttacaaagtggtgtcacttcttgaactaccagtagtaacaatcccaagagtgaggttcgaattgattaattaattgcttcaaagccggatctcggatggttttgctccaacgttttcccctcgtgcggttttttttaataaattttctgggtttacgttgaaagatgccttggaagatagcatatttttaggcctgtctatcagttctgatgaccactgccaatcagcgctggatgcttggcgattgtgtaccttaacacgctaagagcatctccaataatattaatccaaataagagggtattggtgatttc

SEQ ID NO: 148508 - DNA, 4688 bp, Zea Mays
tctgatattctgatgttgtagcagttactgtggacgatgttcgtttgtgtttatcattttcttggtcttgttcggggcaacaacgacattgggaataagtgtacggcagacaaacagtaacatgggaaggaaaggctcagaaatgtcaccaagtaaaaggtatcccttgaggtctccacatagtagtggtagagttcttcgctctgccttagccaatgataataaggacagtgagcctctgaatgctgctgctgctacccaagccgctgtgaaaaaaagaagtggcagtcagttggatagtcctaatagcagtgtcaggttgtttcactctacatcaaaaaataagaacgaggcatgtagcgggcctctaaatgacaggatccctgataagccagctgcaaataaaagaaaacgtgccagtccttcacaggtgggaagttccagcaacagtgtcagggtgcttcgctctgcaataaaaaataaagatgaggcatgcagtaaatctctaagtgacaggaccgctggtgagccagctgcaaataaaagaaaaaacgtcaatcgctcaaagacggggagtctgagctgtggtgtcagggtgcttctatctgcttcaaaagctaaggatgagacatctaccaagcctttaaatgatagtgctgctgttgaaccagcttcaggtaaaaggaaaggcaccagtccgtcaaaggtgggaagtgccagcaatagtgtcagggtgcttcgatctacttcaaaatataagaatgagacatgtactgagcctttaaatgatagtggtgctgttgaaccagctgcaaataaaaggaaaggtgtcagtcgttcaaagaagagaagtctcaatagcagtgtcagggtgcttcgctctgcctcaaataataagattgaggtatctattaagcctctaggtaatagtactgctggccaaccagctgcgaaaagaagaaaaagcggcagttccttcgaggcaggaagccctgtgagcagtgccagggtgcttcgctctacctcagaaaggaagaatgaggcatctaagcctttaaatgaaagtactgctgctcaaccagctgcgaggaaaaaaaaagctggggtaatttcaaagaccgacaatccaaagattggtctcagggttcttcgctctgcctcaggaaagaagaatgaagcatgtattgggcatgtaaatgatagtacttctgctgaaccaactgtgacaaaaagaaaccgcaagccttcaatggatcgcagtcccaagaaggactacttaaaaatttgtcaaagagttagatatattttgaatcgaatgaactatcaacaaacctttattcaagcttatgcaagtgaaggttggaaaggccaaagtttggaaaaaataagacctgaaaaggagcttgaacgagccaaggcagaaatcctccaatgcaagttaagaatccgtgaagcttttcgaaatatggactctcttttatccaaggggaagcttgaagaatctttgtttgattccgcaggagaaatttcaagcgaagatgtaggggtacctccgggggatcaaagatggctttgccctgcatgtgtctgcaaagcagactctatagatgcactaaatgaacttcaaggaagcaagctctccattcatgactcatgggagaaagttttccctgaggcagcttcaattgccaacggttctaaacaagttgatacttctgatctgctgccagatcatataaagcacagtgacaaccctgcattggttgaagggctgatggtgaatgaagtcaggctttctgcagaggatgacagcaaagcggatgaccttggcttgccttcggaggactcaggggatggtgacttcgatccgtcaggtccagattctagtgaagaccaaaaagatggattgaactcagaagagtcagatttcacatctgactctgatgatttttgtgctgagattgccaaatcttgtggccaggatgaagtctcggcatctccattatcaaatgtgataaaccatacttatagaatgaaactcagggccagcaacaaccgctctaatgaagaaaaccatgatcatgtatttatggacatggagctagggcaagacatggtgctaccagtttcaagcaggcggcaggtggaacggttggattacaaaaaactatatgatgaggcatatgggaaagaatcatctaattcaagtgatgacaaagagtggtctggaaaagaactattagaaggcagtgaaacagattcacttagtgagcgacctcatcctgtaaaacggtgctctagaagagcacaagcagagcagcagaataatgaacatacaccacagagggagcgccttcatggttctgaaagtgagcagaaaactggaattcttcgatccaatggcagcagtagcacaggacggaagtttggtcctgtagctacccagaaattgaaggtacattttgagaaagatccatatcctagccgtgaaacgaaagagaatatatcagaagaactaggcttgacatttaatcaggtctccagatggttctctagcactcgtcactattcaagggttgcttctgccagaaaagaaatgcatcctgacggccatactagcgagaataatgataccacgactgtagatagcatgcaagcaaggcaacccaacactgtggtgatggaaaagttgactgggaatagaaatgacattgtttctgagaaaccgatggtgcagaacaatcttaaccaaggggtggcagaaaagttgactagggatagaaatgacattgttcctgagaaacaggtggtgcagagcaatcttaaccaatgtaataatgaagatatcccgctttctggaacagaaattgagatggagtcttacgaacaagaatcatctgaaagcagtgatgaagagtggtccacacttagcacaccacgaaaaacaaaattacaaggcaacgaaaaagtatcacttactgaatcactacgttctgcaaaacggtgttctagaagagcaccagctagggagcagaataatgaacatactcagagtgagcagcttcatggttctgcaagtgagcagcaagctagagagcaacttcatggttctgtaagtaaacagcaaactgaagttcttcgctccaatgtcagcagtggcgatgcctcaaaatgtcattttggccctatagttactcagaagctgaaggaacattttgaaaaagatccatatccttgccgtgcaacaaaagagggtctggcacaagagctaggactgacatttaatcagatcagtaagtggttctctgccacccatcattattcaagagatgctgttgccaagaaccaaaaatacccaggagaaaatactactgagaataatagtagcacaatctttgatggtatacaagtaatagaacccaattttggtttgatagataaaccagatgcagatacaaatgacatgatttctgaaaagttgatggtacaaattaatcttaacgaaggcattgaagaggatatcccaccgagccaatatactaccaggtgtgaagagaaattaactatgactcaagctgccatctcaagggaagctggacctccaggttatggtcctggagaaaactttcttcaggtcagttcaaggattactagctgtgagcagagtgtgataatggctcctagcgctatcgcaagaggagttggtccaccaggatatacgcctggagaacaccagggcaatggggctccatggaatacaagctatgagcgaagaccgtttacgagtcctacgactagctcaagagaagtcggacctccaggatatgggcctgaagaaaaccaaggcagtggcatttcctgtaatacaagcagagagcaaatattgtttatgagccctacaaccatctcgagagaacttggtccaccaggatatttgcccagagaaaaccagcgcagtgacacttcatggaatacaagctgtgagtcgggactatttatgagtcctgcgaccacctcaatagaacatggtccaccaggatatgggcctggagaaaaccaggagaatgacagtacaagctgcgagttgagaatgtttacaagtcctacaatcgtctccagagaagttggcccaccaggataccagcagggagtgtttatgagtcctaaaaccatctcaagagaagtctgtcctccaggatttgggtctggagagaaccagggcaacgacactacatggtacaaacagagcgcgtttacaagtcctacaaccatctcgagagaagtcggtccgccagggtatggacaggaagatcagggcaatggtggttcttggaacacgagttgtgagcagggagtgtttacgagtcctactagaggcatctcaagagaagtcggtccgccaggatacgggcccggggaaagtcagggcaataccacttcgtggatttcgacctgccagcagagaatgcttgcaggaatccagagaactggtggctcaaggagtatggacttggaagcctttccaccgggatacggacctggtggtgcttcagggagtgtcataagcccccaagctcggtctgcagagaatgtagaattttcggacgaggctagaaaaaaggctatacagcgggagctgagacggcggcagaagttcaggtgaaggcaatatatccagtcttcaagac

SEQ ID NO: 148509 - DNA, 2762 bp, Zea Mays
cgtcgcatttcaaattgaaccccccgtttcctcaagtgctgtcgtttcgttcgcaccccaccccatggtggccagctcccactcgtccccggcggccagccggacgccgaacctgaaatcggcgctggcgccgtcaccatccccatccacccgccgggcggcaacagatgtggcatcggcgtcggccgcggtggactcgaaagcacggttcgaggcttacaaccggctgcaggcggcggcagtggctttcggcgagaatcttcccatcccggagatagtggcgataggaggccagtcggatgggaagagctccctcctggaggcgctccttggcttccgcttcaacgtccgcgaggttgagatgggcacccgccgtcctctcgtcctccagatggttcacgaccccaccgccctcgagcccagatgccgattccaggaggaggattccgaggagtacgggagcccgatggtgctggctactgccatcgcggacctcatcaagcagcgcactgaatcacacctccggaagatccaggctgctgtctcatccaaaccaatcgtcatgagggcagagtatgcccactgccccaacctcacaatcatcgacaccccaggtttcgtgcttaaggctaagagaggcgagccagggagcacaccggatgagatacggtcaatggtgaagtcactcgcgtcccctcctcaccgcctcgttctgttcctccagcaaagcagcgttgagtggtgctcgtcgatctggcttgacacgcttaaagagattgaccccactttcaggcgcaccataatagtcatctccaagtttgacaaccgtctcaaggaattcacagagaggtgggaggtcgataccttcttgagtgcaagtggctaccttggggataacatccacccgttcttcgtggctcttccaaaggaccatggtacaatttccaatgaggagttccgcaggcagatctgtcaggtcgatattgatgtgctacgtcacttgcgagaaaatgtgaaagggggtttcaatgaagagaaatatgtatcatgcattgggttcagctgcctcaagaagtacctcgaatctgaacttcagaagaggtacaaagaagcagctccagctaccctggcattgttagagcagaggtgcaccgaagtctcaatgaacctaacgagactagactccaaactacaagcagcgtcggatgtctctcagctccggagatcggcaatgcttcatgcagcttctatttgcaccaacttgaatgcattacttgatggagctgctgatccagctccagaaatatgggggaaaactacggaggaggaacaaatacatagtggtattggcagctggcctggcattaatatgcctgtaaaacctgccaactccagccttaagctgtatggtggtgcagcttttgagagagtaatgcatgaatttcgctgtgcaacgtattcattggaatgcccacaagtgtcaagggagaaggttgcgaacatactacttgctcatgctggaagacgcggaagcagtaggttgactgaggcagcagttgcgatagctcgtgcagccgcacgatcatggcttgctcctcttattgataccgcatgtgaccggcttgcatttgtcctacaaaatctgtttgatcttgctatggagcgcaaccgcaataatgactcacaatatcatcaaaattttgaagatatggatagttatgttggctttcttgctgctctccggtgctcatattataagttcgtcaaagaactgtccaagcaatgcaagcagatagtgcgtcatcaccttgattctgttacgagcccctactcccatatttgctacgacgacgacttttttagtggtgttggatctgtagcaaactccacgtgtaggtttaaccacttcactggagttacatcctttgacctagcagacagtggatcagcactagaggaagctcaggagaacttgcctccaaaagatcagcaccatatgacaccgcctattaataaagggaatgactcaaaggaggtcctcagagaaagccagctaacagtacctgagacaccttctcctgatctgccatctgatatacatggtggtaagaagaaagataatgggatcccaaatgacggtggcccaaggaaaagacatgccaggatggcagcatatacaagcagaaatcaccataacagtatgattggtgctgatgacatggcctcaaagtcagggtcatcatactccaccatatgcgcaatatctgctcaatattttgccaaaatgcgagaagtccttattgaaagaaatgccccctctgcattgaactctggattcttaacaccatgccgtgaaaggttatttctggcacttggctttgagctatttgctgtgagtgacaataagttcatgggcatgtttgtcctgcctggggcagttgatggtatccagaatgagcgccattctcttctcaaacggcagaagattttgctgtcctgtttgaacgagtttaagaacatatcccgggctctgtaatgatgatgtttctcgatttcttcaggcctttattgtgtatcctttagacccattctgttgtcatgtatctttcttggcataacctattttcttgaaatctgtaccactctctgtcaagttccttcgctgacaaggtctttatcactaacatttgttcagattcaatacttgatattattgattatgctcgatgactcgaatacaaaactattaacttgtgatctca

SEQ ID NO: 148510 - DNA, 156 bp, Zea Mays
cgagaccttcaataccccagctatgtacgtcgccatccaggccgtgctctctctatatgccagtggtcgtaccacaggtatcgtgctcgactcgggagatggtgtgagccacaccatccccatctacgagggatacgccctcccccacgccatcct

SEQ ID NO: 148511 - DNA, 646 bp, Zea Mays
taaaataacagataacatgtacttgatgcagtttaacatgatcatgttgatgttccattgggagcatttgtttcttacaaacattttggtacatcaagacgcatgactaaaaagtggtttccaaaagagcctgaggcatatgctgagcagccccaatgcctcctgtgaatgaacttgtgccaccggtggaatgtgcagcagaggttgtttcaacactgtccccacctaggaaattaaggaaagctgtgaaaaagataactccaaagaagaagatccaagccatgtacaactgtaatttggttcctgaaatctgaaatgtgtgatcctatgccatgcaacagcagttggttcactcaaaatgtgtggttctgtacttggataccacttggttcactccaaatgtgtgttctcgtttttagtctaaatgtttgtagcaacccagttttattctaaatgtttgtagaagttagtcttggttctggacttggatatcaattggttctggtcttggacagctgaaattgtcacctactactatgactcatgtttaaccgtggcctgcattttggaaagcaagttctggtcttagcactgatactggtgttctctgatcatgcttgttaacaagttctgttaactttgcgaa

SEQ ID NO: 148512 - DNA, 5927 bp, Zea Mays
atggaggtggccacgctgacaaccccggatgttatgctaggcgaggactacaaggatattgaggctattgagggtcagaaggattacgagacttgttatggtggaggtggcagtgttatagtggcaaatgagctcgtggggatttctgaagaccccaaccaacccgatattgctactgctgacgagccagaggagggtgctgatgtagaggggcaaactaatgacattagtgctgccgtgtcaacctccaagctggtggatgatcccatggaggttggcatgcaaacagaggttagtgctgctgcagatgatctcatagaggtcggtgctgctctggtatcatctgcagaggattgcacagcggtggctgcttgcctggttaatgatgactgcaatataattttccctggaggtgtgcataggtccgatgaccaaactgatcaggagtttggtggcaattcccttgacgctgatgaggtcgctctcttggtaaatgacatacaagatgacagtgcaaggatggatatggatgtttcagcccatggtgatgtgcatgctcaggatcgggaaagctcacagttggatgtggctacagctctgttaaatgaggtgggaacagagcttgtggaagctggtgaccatgctgtacaggaatgcacaaatatggatatgcggattcaagccggagataacaatgaggcagaacgtgttggcactattgctgacactgccacaaatgaggagcacagacacatgggtgaagttaccatgaccagagatgatagtgagaaacatgatgtggcaggtggtgttgatgtgcctgatgagaggatacaaatgggtaggggtggactgcctggagatgataatgagcaaaaggaagttgcaacagctgatgaagatcgtgtggaagatgaaggcatgcaggtagatgcagtaaacattactggagacatggttgaggaaggcagaattgctgttgaatacattgcaggtgaagctgtaattggcgagggtggtattgatgtccctgaagaaaaggctgctcagatagacagggcgggtaatgacattcccgaagaagagggtctccaaatgggggaagctggcttgattggcagtgataatgggctgaaagaggctgtgattgctgatcatgatggagtggaagtaaatgccataccgacggaggcaactggcacaactaacgatgatgatgaaaacaacacaattgttggtgaagatgttgcagaggctgtcaatgacataactggtgatgatgtccctgacgaagaggctgcacatatggaagatgatgacgacgacgaacctcctcctttagtggaaaagaaaggtggagggcgtcgtaagagaggccgtccatcttccaaggtccagggtgtggtcaagccatctgtaaagaggaaggatgaggaggaggtttgcttcatttgctttgatggtggtgatcttgtgatttgtgatcgtaggggttgccctaaagcctaccatccttcttgtgttaaccgggatgatgacttcttcaagtcaaagggtcggtggaactgtgggtggcacatttgtagcaactgtcagaaacctgcccgccatatgtgctacacatgcaccttttcattatgcaaggcatgcatgaaagatgcaaagtttagctgtgtcagagaaaataagggcttctgtgatacatgcatgaacactgtgatgttgatagagaatagagaggaggctgcggacccaatggaggtggattttgatgacaaaggcagctggtggtatttgttcaaggactattggttaaatttgaagacaaacttgtcgttgacagttgaggaaatatcagcagccaaatctcgaaagagtggagagttacctgatactaatgatgaagttaattcagagagttcatcagggcgcaatctagaaagcaatacatcaaaaaagaggggaaggaagcgatctaaacaagctgccatcaatgagggttctgaaggaaaagcgagcactaggaaatctgccaaacgagacctgtcaggcattcatgatgttcagacctcgtcagggaaaaaggttagaaaactatccaggcgttctttgagcagccagcattcatcaaaagactctgaaagtgttgggacatctacatcctcagctgaagaggacagctgggcttctaaggagctcattaactttgtagctcatgtgagaaatggcgataaatctgtgatcagccgatatgacgttcaaccccttttacttgactatatcaaacgcaacaaactgcgtgatcctcgtcggaaaagccagataatttgtgattctttgctccaaagtctcttcgcgaaagaacgtgttgggcattttgagatgcttaagcttcttgaatcacattttttcatgagtgaggtttcaccaattgatgctgatgaaaatcatggtggtgtagtagatcctgatcctagtcaggatgctgatggtaacagtgaagcttcagttgttatgagttcagaaaaaagaagaaaatcacgcaagtatgacctgaggcaccagcctaatcttgatgattatgcggcaatagataaccataacattggcttgatgtacttacgtcgcaacctaatggaagaattgattggcgatgttgacacatttgatgagaaagttgttggatcatttgtgaggataaaaatacctggtacagggcaaaggcaagacatttatagacttgtacaaattgttgggactggaagatctgcagaaaaatataaatatgggaaaaggactactgatataactctagagatactaaacttagacaagcgggaggcagtaactattgacataatctcaaaccaagagttcactgaggaggaatgcaaacgcttgcgtcaaagcataaagtatggattcattccaaggctgactgtgggagaggttcaggagaaggcaagggttctccaaactctgaaagtcaatgactggattgaaagcgaaaagatgcgacttgggcatcttcgtgaccgcgcaatattcactcttagggaatgtgtagagaagcttagattgctaagcactcctgaggagcgtgctcgtaggctgaatgaagaacttgaaatacatgctgaccctgcgatggatccatattatgaatctccggaggaacaggagcaggaaattgaaaaaagtagcttcaacaagtccagaggttctttcttgaggaaagatggtaatcctgtgcctccaggtaaaggagatggtagaaatgctgcacagcgagattcaaaaactaattgggaatctaatcgaaatacatgggccgaatcgagttctcatatggaatcaccccttccacggaggtccacattttcttctcaaggtgaaagtgctggttatacaagtaaatcagagagcccaaacactggtgcacaaacagttaaactggaaggcaccacacgcagtgctccacaagggtcacctggtgcctcttctggaattttagctaataacatatgttcaggggcaaaaactgcacctcaatcagccattaacgagtctgagaagatctggctgtacatggatccttctaataaaatccaaggtcctttctcaatcatacagctgcggaaatggaacagcaatggctacttccctcctagtttgaaaatatggaaagctagtgagaagcaggacgattccattctattgactgatgctttggcagggaagtttgagaaagaccttcctccatgggaaccgccacatgttagtttgtttcaaattaacaaaacccctcttgagcaaagcacaatagctggtgaacaaactccaaaatcagtagttgcaaagtctttctcaagtagtaatcaaagacatggttatagttcaacaaaccttggaacaaccatgatccattctggcacacaaggttattatggaatgcaaaattcccatgcagcatacacaagccaacattctcttactggaagttggaatgccacgtcaagtcagtttggggttgcggtaaatcctgtgacacctactcagcctgccatggggagcttttcaggacaaaacatagtgtctgcagaaaatatgggtcatctaactcctggaacggctcctgcagctgcaaatgcagaaatggttaattcagatttgacctcccagaagcaaatatcgtatttaccgcaaacagacggcatattagctgatgacattgaatccaaatcaggagaagatgtttcacatggaaaagtgagctcttcagccaaagcaattggaccactgggtgcacagcttggacaaggacaactgaacactcagcaacatgaagacataaaaaaccagatgtcatcaactgatgtctccaactcgacgatgccatcgcagatgatgtcaacaccatccgctgcatcagtacaaccttcattgtcaaccattgctggcagtgataatcaaagcagtgggtgggctgtacctacacaagtggtgaacacatctggccagtctcagataactggaaatctgacctggggaaatacacctcagggtgatgcaagcttaggttggggaatgatgggacagaacaatatgaatatgccttgggtagcatcagctcaaggtgcttcgggctacaacatgggtgcagccatgccaacccagccaaatgcagttccaaacatgggttggttaccaaatccaggaaacaccaacatgaacatgatctgggccgcaactcaaggccaggggattccaaatgcagctgctatgatgggaggtcagatgcaaggagtcgcagtggccccttggggtggtgttgcagcaggaaatgcaaattcttatcctgcctggggaaaccaacaagttggaaacatgaaccaaaacgttcgatggagtgctcctgtgcagggaaacccgagtcaggaaaataacaacatgaactggaatgcaccaaatggtaatcctaataattggaataatcagcagagagagaatgagggcaggcactctggacaccgtggtgcttttagtgctggcgactcaggcagaaagtcatggaagccacgctctggtgccgatggggggtcatgggggacatagaggagtctgctatacatttcttgaacgcggggactgctttaaagttgactgcaaattcgcccattcaacaaacacagagggatatccatccatccaggattcgggcaacgagatgcgatatgagaatcacaatgagagaaatgatcgacagtttgataggcagccttcggataatgaaaggcatcatgttaggcctgatgacaggcatggtggcagggatgacgataggcaggctgataggtctcagtcaagagagccgcgttagaactgatttctgtttcgtaccttccctttgttgtatgtgcagtagcaaactagcataatagcttccgtgcatgttttgaactttatgccctgtagcaagctgcaaacatgtgcaaatcgtgtacagcagttgtagtttaatgctgtgtgcgtcctagccccatatttaataatttacttgaataaatcgtagttgtctgatatctgatgtatagcaggggctacacacccaggtcctttatggtgatgactattgagtgttttcttataagcctcatgattgtaagtgaaggtgtttttggaaatcctatgacctaatgtccgatctgtgttcttcgttgtgcaatgatgccattgagcctccgtgatcaaatagtacttcattttgtttgactgttgtgggtggctgggtgctgtgtatgtgtatccacccagctggtttacctgttaagcatgtgcatcatctttcggctgatgtgtttaaaaaaaaaacaccttccacactccctcgtgctcagctgtattttaacttatttttgtaaaaaaaa

SEQ ID NO: 148513 - DNA, 1748 bp, Zea Mays
tctccgcgctccagctccacgccaattaaaccctactctactgcttctttctctctcttctctctctgcgtcatctcatttccgtttccgtctctccctctcctcgcccacacgtccaaaaccgaagggagcaaacgaacaaaacccggccgagtaacgcaggagacgaagctgcggaaggcgagcaagcacgatggaggcggcagcgtcagccgagtacgggtactacggcggaggcgcgggcccacacgagacgaagaccgccgggtgcggggaccacttcgtcgtggacgacctcctcgcgctgccgccgtacgacgacgaggaggagggggcgacaggcgagaccccgctgtgcctgcagcctgtcaaggaggaggagggcggcctcgggaatttctcggccgactcgtccatcgtcgtcacagcaatcgacagctgcagcaactccttctctaggctagccgacgacgacttcccgggggaattctacgagccgtacgaccaactggtggagctagaatggctatcaaactacatgggcgagggcgaggaaactttcgcggcggaggacctggagaagctgaagctcatttccggtgggttctccccggcggctgtgaacgtgtcagcaccagctccagtgggcgtagcttcagccgcctctgcgacacagtccggtatgttcctgccggtcccggcaaaggcccgtagcaagcggtcccgcgcagctccgggcaactggtcgtcacggttggtcgtgctcccgccgaccccggcctcaccaccggcccctgcagcgtccatggccatttcgccctcggagtccggcatctcggcgcagcaggcgttccgcgccaagaagccgccgccgtcgaagaagaaagacgcggcggcaccggcaccggcaccggcagaagggcgacggtgcgtgcactgcgacacggacaagacgccgcagtggaggacggggcccatgggccccaagacgctgtgcaacgcgtgcggggtgcggtacaagtcggggcggctggtgccggagtacaggcccgcggcgagccccaccttcgtgatgtccaagcactccaactcccaccgaaaggtgctggagctgcgccgccagaaggaggtggtagtgcagcagccgccgcacgtgatgggcggcgccggcggtcctgcaggcgggctgatgcgcatgcagagcgcgatgctgttggacgggccggtggcggcggtgtcgtcgtcgtcccccatcgtcggcggcgacgagtttttgatccaccagcacttagggacggcagactaccggcagcgcatctaactagatgagtttttgatcagttagcctactagcccagtaataatcaatatgcgcaccagcttaaatccaagtaccctccttaaaaacatgaaagaactaataatcttgccttaattaattaattaggagttatttttcctcttcactatattttgtttattaattagttgctgtgttccggttcagatccttggaaattttttcgtggcgactttcgtatggttttgtatctctctttttttttattttttgctagactctcctaattaacatgcctatgagaactctacgagagagagagagagagagttttcctatctattttcttcctttgtttcttagcattatatatgtaatttaaggggctagctctcgttctgcttccggtccggagcacgcatgaaaagaagactggaaattttggtaa

SEQ ID NO: 148514 - DNA, 2452 bp, Zea Mays
ccgtggccggagatctcacatcactacaccagccaattttatcaagctcgctcgccgtcacactgcgccaccagcggcgatcccgccatggcctcctggctcaaggtcgccgaagacttgctcgaagtcgtcgaccggagggccaagatcgtggcaacagaactgtcggatgagcagtctacctctcagccttcaggaccaaacaaccaagaagtgcaagcaaagaagggaaagccgagggagaagggtccattgaagctcactaatgccgatggtggcaacaagatatctgctcagaaggaaaagaggagtaggcaacggccgcgagagcggatgaagatcgagaagatcaggccttcgccacctgcaggttcatcaagtgttgataccagtgctagtgaaccagaagtcactccgatcgatgttaaggaagtgggtaatgagggtacattggagaaaggagagaaaggtactgatggccttaagactgatgggtctgggattgttaataccatggttgaagttcaactgatgcagaaaaactctgacaatgccactctggatggtgttacacataccaattcagagattgctgttgaaagctatttttcagttatggatgcaaaaagtgagtcgagcagcagtaaccagacttccgagattggttcagtgattaatttggaggagagagactctactgtggctgttatccaggacacaaatgcgtctgaattgccaaatacagaggttactggcaaactgcaggaatcaaagaaagcgagtgtttcagattcatcagaaagcatagaagatcgacgcaaacaaaaatctgatacaatttctgtgaaagaacaagaccaacttgaggaggctcagggattgttaaaaagtgctgtcaagactggccagtcaaaagaagctaggttagctcgggtttgtgctggactttcatcccgcctccaagagtataagtctgaaaatgcacagctggaggaacttcttgttcaagagagagagaaatctacattgcatgaagctcatataaagcaactacagcaagagttatcaatgtccagagtagaaggttcaagagctgaattgaatatggttgatgctttgactgcaaaaaatgcagagattgaatctcttgttaaatcattggactcttggaagaaaagagcagcaacttcagaagaaaagcttgcttctttagaggaagatatagatggtctcaagaggaactgtgaacttactgaaaccagagttatacaggctttacgggaggaacttgctaccacagagcgtagggctgaagaagagcgcattgctcataatgccacaaaaatggcagctgttgagagagaagtagaactagaacatcgggctgttgaggcatcgagcgctttagctagaatccagagagctgctgatcaaagctcatcaagagtgctggaattggagcacaagttggctgttcttgaggttgaatgtgcttcattgcaacaagaactacaggagatggaagctcgtaatcgccgcgtacagaaaaaaccttccgaagaagctaatcaagttcttcagatgcaggcttggcaggaagaagttgagcgtgcacgccaaagccaacgagaggcagaggcaaagatatcatccttggaggcagagttgcagaaaatgagagttgaaatggctggaatgagaagagatgcagagcattattctagacaggagcatgttgaacttgagaagagataccgtgagctaactgacttactgtaccacaagcaaacacaattggaatccatggccagcgaaaaggctgcgttagagttccaactggagaaatcattgaaacaatttcatgaagtgcagattgaggcagaaaggagtaaagctactcgcagatcagcatcgtcgtgggaagaagatgctgatatcaaggcattagagcctcttcctctacatcatcgacacatggcaacagcaaatcagcagttacaaaaggctgcgaagcttttagacacaggagctgtgcgcgcaacaagatttttgtggcgacatcccgttgcacgagtcagcctgctgttctatttggtgttcgtgcatttgttcttgatgcacttgttaaaccgccttcaggacttcgcgtccagagaaggaacatcagccatgggggatctggccagcgcgaacctgccatagcccatagtctctgtgcccttcttgttgattcaggcattccccactgattcttggtccacatgccttcaaagtttcatttcatcctcctgtttctttttttttccgtcttccccatcttttgtaaagtagtagtgttcgttgtttggccatgcgctgtataatccattcttttacattgactgatgagtcagattgagtatgtaccaagtaccttgacatgatataccaagccaattgagccagttcttgt

SEQ ID NO: 148515 - DNA, 1187 bp, Zea Mays
ataacctcgcgtctgcgacacaccaacccgaaccttaggtagcgtcccggtccgcggtgccagccaccgcgtgccgccgcctgggtcttccctcctcagctccttcctgagctcggcggtggaatcacgggaggaggcggaatagtaagctgaggcggggccatcgggctccgtggttgaggatgcctgtgctgcgtagcgcggcgcgaagggcccgagaggcgcaggggcatccggcggcagctgatgaaaaagctccggaggcggcggcagcagcattagcagcagccccggcaccaccgccggtggagaagaggcggagagtgacgagggcggaggagagggagcgggaggagatcaggcctagggaggtcgtcgcgggagaaggcggcgacgacgagggggagcgtgggatggacgaaccggacagcgcggcacgcagcgccgacaagctgacattcgatgatgaggacggccccactgtccctgaagcggtccaggtgggtagttcaccgaagtatagagtcgacaggaagcttgggaaaggtggttttggccaagtatatgttggccaccgcatgtcagctactggtccaggtgccgtcgaggtggcactgaagtttgagcataggaccagtaaaggatgtcactatggccctccttatgaatggacagcttacaacgccattggtggcattcatgggtttccccgagtccactacaaaggacgccaaggggattactttgttatggttatggatatgctcggacccagtctgtgggatgtctggaataataaatctcacataatgtcagttgagatggtttcttgtattgctattgaagcaatctgcatacttgagaaattacattcaaaagggtatgttcatggcgatgtcaaaccagagaatttcttgctagggactcctgggacacctgaagaaaagaaactcttccttgttgatcttggcttagctacgaagtggaaggatattgcaacagggcggcacgttaaatatgatcagcgttcagatgttttcagttcatccacgagaggatcactaggccgtggtcaagcatttgatgcgctaaatcaagggcctgatcagggagtcgcctcccccaagatctgtggagaggaaatgcagctcaagggcttcagcgacagcgacatggtaggctgttag

SEQ ID NO: 148516 - DNA, 452 bp, Zea Mays
tcctagctaatcgcgtatgtcatcatttctcattcggtccaatcttgtgtgcccacatatccaacgcaacatacgcatctctgcgacacttagttgttggatatgtcatctcttagtcggccaacactcagccccatataacataggcatgcctaaatcgttgctcgtgtagaatttgccttttcaatttctgtggcactctcgtcatacaggactcccgatgcttgatgccatttcatccatcccgctttgattctatggttaacatcttcatcaatatcaccatctctctgtagcatcgatcccaaataacggaaggtgtccttctttggtactacctagcctcccaagcttacatctccatcctcactaattgtagtaccaaagccacatctcatgtactcggttttggtcctgctaattctaaatcattttgactctagggtctgacg

SEQ ID NO: 148517 - DNA, 321 bp, Zea Mays
atggaattgaaatggaggagcacaggaagagaggagtacggtccagtacgacagcgtctgctcggcggccgcgtcgaacgtccgtctcccccagtacaggtcacaccctacgccatccacgaccgcaagatctttgatattggtgccggtcgggcctgcgcggccaccacggcggggggagttagggttctttatttctcagccgaggatgtggcggaggcggtggagcgagcggagaagcctgcgagcagcggcaaggcagtgagcgttggcgaggagcgagcgagacgacgatgtagtggcaagccgaaggagcggtag

SEQ ID NO: 148518 - DNA, 105 bp, Zea Mays
ccttgttttgagttgtcaacttgtcatacatgtcctgatatttgtgaattgcgttataaactcacattaaggtgttgtttggttcacgaaatgcaacgtaaatga

SEQ ID NO: 148519 - DNA, 1410 bp, Zea Mays
ttcccgtgcgctcactctgccgcgcagaagtcgccatcatttgctagggcagcgtaccaaacgcacttggcaggcagcagctcgtgaactgtggcgactcgctcgacttcatgccactttattccgtttctgtcttcttcttgcccgtgatcgagctccttttcttgcttaaattctccgccgccccacctccagcttccttcaattccggaatgggcatgccgcgagcacgatccttggcctgcattgccgtggcggccattgcgctcctcgcgccgacgcgcggagcggagatggtcgagcggcagttcgtggagtgggtgcggtacatgggcggcctccggcacagcacgttccagcagcacgcgctggaccgtgcgtccccctcgtactcgctcgtcgtcgacgcgaacccggcgttcggcgacttcacgaccatccaggccgccgtcgactcgctcccggacatgaacctcgtccgcgtcgtcatcagggtcaaccccggcacctacacggagaaggtgagcatctcggcgatgcgcgcgttcatcaccctggagggcgccggcgcggacagcacgatcgtgcagtggggcgacaccgcggactcgccgacgggggccaagggacggcccctcggcacgttcaactccgcgtccttcgccgtgaacgcgcagtacttcctggcgaggaacatcactttcaagaacacgtcgccggtgccgaggcccggggcgacggggaagcaggcggtggcgctgcgggtgtcggcggacaacgcggcgttcgtggggtgcagtttcctgggcgcgcaggacacgctgtacgaccactcgggccggcactactacaaggagtgctacatccaagggtccgtggacttcatcttcggcaacgcgctgtcgctgtacgaggactgccacgtgcacgcgatcgcgctggactacggggcgctgacggcgcagaaccggcagagcatgctggaggacacggggttctccttcgtcaactgccgggtgacgggctccggcgcgctctacctgggccgcgcctggggcaccttctcccgcgtcgtcttcgcctacacctacatggacgacatcatcatccccaaaggatggtacaactggggcgaccccaaccgcgagctgacggtgttctacgggcagtacaagtgcacggggccgggcgcgacctacgccggccgggtggcgtggtcgcacgagctcaccgacgacgaggccaggcccttcgtctcgctcaacttcatcgacggcaacgagtggatcatgctgtagttgtatattatcgtaaatctcccagtcgctcacacggcagcacgtcgccacaccatgtaaagaagcagaggaacaaaacaatatacaagatttacatttttctgttgctcca

SEQ ID NO: 148520 - DNA, 636 bp, Zea Mays
gccatggcgaccaaagggtcagaccctgcctccccggcgtcggcgccaccgccgccaccgaagcggcgaaagatcgagccgcccaggaggaccaggctttctcaagttaccatcgataacaagtcgtcttccaactcatcgactcctccgggttcgctgccagcgagagttgatctcaacaaagttagagaggcaaagagatttgccgtccttgaagcgcagcatgagggatgccttggaagctataaaagcttcgattccctctttgggaattaccttgttcctgtcataccaacgaacgatttctttcatcaggccgggaccaaatgatgaacaagaatggctatttgtaacgaacagaatgactactaaattttgcaatttcctttaagagcgcgacctgatacagcattactaagctatcaacggaagataacacgaagaccaagttttgtgtgtggtgttgtacgtaggccccctaacttgcaagatctcaaaaggtaaagattatcctgcacagttgcagatctaagtagtgaaaaagtttttgcattatggggagcatatgtcagtgtgtgttagctttctttttttttcccttctagtgcgaatttgtcaagacatattttccatgaa

SEQ ID NO: 148521 - DNA, 1826 bp, Zea Mays
ccctctcttgaccaacgggccagcagcaaatcccttccggaccccgaaaaccctacactccccatcgcgccggcgctggcgccgacgtcgacgccatgctccactccagcttgtccaagtgccaccctctcccgctcctcgcaaccgcgtcctcgccccgccgcaccctcgtcgccgtcctcctccgcgccggctacctttcgaagcatccagccacttcaaccgcgcctcgtccgaccacaaccgcctgtgcgagcgccagggtcgacacttccccgggcgaatcccgcttcgggctggaaggcagggtttcgttctccaccgcgccggatgggtccgcattggctggcggcgggagggcgcttccctggcttgcagctgagactggcaacagcggcgcgcccgttgctaggactagcgccggccgatcctcctcgtgggagagctccgcagagaagttcttctcgagagacgaccaatacacgcgaagagaagtgtcgggagtcaggatgtcggacaaggtagctattaaggatgacgatgacgagaatgaggggaatggcaatcctgaacggggaaggattaagggcaggtaccaacgaagagaggtgtcgggaaacaggatgccaaacaaggtggcgattagggaacaagaggatgaggatgagccaattgacaatcccaaatggggaaggattaaagacaggtaccagcgaattggggggagggatggagggtcccgtgatgagaggtttaggagggagagatttgacaagccggatgtgaggcagtggaacaagcaggagaattggggaaggaacacagggaaggaagcaggggaatcatcggtgccaaagatggtggggcaaggagtctatggtgttgggcctgtccttgcagcactcatggctcggaggagggagttttatgcgctgtatatacaggaaagtatggatttgagcgggaacaacaagaaaaggaaagataagaaggcagttgagaaagtgctgcggatggcagaggagattgggctgaatgttattgagactccaaagcatgatcttaacatggtggtggataaccgaccacaccaaggtgtggtgctcgatgcatcacccttggaaatggtcaatataaaggagttagatccagtcagggtggaaggtggaaaggcacctgtgtggatagccttggatgagattatggatcctcagaatttaggagccattattaggtccgcctactactttggtgctcagggtgttgtgttgtgtgctaagaactctgctccattaagtggagtagtgagcaaagctagtgcaggttcactcgagttgattgagctactctcctgcagaaacatgatgcagttcttgtcttcgtcagctgaaaatggttggcgagtccttggtggtaccattgctaacaaagctgtacctctctctcaagtggaattaggggtgccaactattcttgtgatgggtagtgaaggcactggattgagacccctggttgagcgatcctgcacacatcttgtcagaatacctggaaatgttgatgtatctgttgaaggagcagatgcagatgcaggggaagaaggtgacagttctagtaatcgagatttgagatcattccttgcggtcgagagtttgaatgttagtgttgcagcaggagtgttgctttatcatctggctgcaaaagatgcctgccccataagcgataagcctagtgttactctaatgtaaggatactttgtgattcgtgcatgtcatagttattacaattgcctaatttaatttctgctaatgaattatttatttctcatt

SEQ ID NO: 148522 - DNA, 772 bp, Zea Mays
aaaccatcccaagtagagtttgcatgcttatatatcgttacatatgttataaatatctggtaatctgcgatcaagcatttcagttgacccctgcttgttaagagcacaaagatgaacaacaacaacaacaaccaaaaaaagacttaactataatttagatcgcagcgcttgaaccgcattttgtgcacggacaggtagggcgtgtttgtgattctgtaccgctcggcccgcccaacatgatcaagcctgacctgcttttgccgctgcaactcaccatgtttgcgtccatgtacaaaataagcctggctaagactagatgttgtttgccacccctcagtcacctgccatcacatcaaattttcctaccttgcaccgcgggcagccgagccccgaaaaaacgaaccccagcaccgtttccagggatccaggcgttgttgtcacttttgcacacacacgactgtgctcttaaacgggtcagacacgcaaacacgcccagttgcagcccaggagcgcagccgggctgctaggccaccgtcgcaaacacgcccataaataccattctcagttcactccatcagtgctttgatgctccagataacacatcctgatacttcccatggctccatacaagggggaaaaaaaagagataatccgagaaaaatcgatgcatatcatggaaataagaccataagttttcggtcgcagattccatcagcaaaagtccaagggcgtactcccgcaaggcatgtaaaaatgttattggaatcctcta

SEQ ID NO: 148523 - DNA, 684 bp, Zea Mays
gccatgtcaaccaccactgcacacagcagcttctcaggcgttacctctgctccttccctcagcaccgccatcaccgtccgtctctctcgcaccaattttttcctgtggaaagctcaagtcacgccgatccttcgtgctcatcagctgttcggccatgttgatggctcgcttccaccaccgactctggtcatcaccaccggaactggagtcgatgctcttcaggttcccaacctagattaccttcgttggttcgcctctgatcaacttgttctttcagcactccttgcatccatgtctgaagaaatgctaggccaaatgacccagcacaccagtgctgctgctgcctggtctgtgttgcacgctatgttctcctcccaaaatcgtgcccagatcatgcaggttcactatcagctttccaacgccaagaaggcggatctcacagccgctgcctacttccagaagatgaaggggtatgctgacaccatggcttctttgggtcaccccctttctgatgaagaagtcctcggctacatgttggtcgggttgggctctgattttgagtccttcgtcacgattgttgccctgcgtgatacatcgatggatctcaataccttcttcgctcatcttctgagtgccgaagctcgtctccaacgctacacctccaccgattgtatcctttcttaa

SEQ ID NO: 148524 - DNA, 1395 bp, Zea Mays
atggcgaccccatccgagagcccagacaataaggcagagaagctcgtggtcatctacgtcccggcgctgacgatcagccacctgttctcctcggtggagctcggcgagctgctcgcagcgcacagcctcggggtctccatcgttgtctgcggccggacagccgacacggccgccggttcatttgccgaaggcctcgcggctgcgcacccccagctctcctttcacctcctaccgcacgtcacgcgcccgcgcgacgtgcctgcccacgatcacgtggcgcagaccatcgggctcgcccgcgcctccgactctgacctccgcgaattcctccgtgtcgcctccccttccccgtccgccctcgtgctggacttcttctgcggcagcgccgtggacgtcggcgccgagctgggcatccccacgtactttttctttacctcatccatctccggcctggcggaactgctataccacgccttcgccttgatccacgaacaagcatctcctggtatctcccaccagaacctcgggggtgaacttttgcacgttccgggtatcccgccgatatcccgtggatgacttcccggcggcatggcacgaccgcgacagccttggcaacagactcttcctcaccctacccgaccagatgtgcagttctcacggcattgtcgtgaacagcttccgctcattggaaccacgcaccaccgatgccatcgtggctggcctctgcacgccgccggggagacgtacgccaccgctgcactgcgtcggtccagtgataaagaaggaagaggctggcgcgcacgggcacgagtgcctggcgtggctagacgcccagccggaggccagcgtcgtgttcctctgcttcggcagcatgggccggctcagcgcggagcagacgaggcacgtggcgcgcgggctggagatgagcgggcaacggttcctgtgggttgtgcggcgcccgccgacctcgacgcgctcctccccgaggtgcgcaccaagggcaaggggctggtggtcgacgcgtgggcgccgcagcgccgggtgctggcccacggcgccgtcggcgggttcgtgacgcactgcggctggaactcggtgctggaggcgatcatgggcggcgtgccgatgctggcgtggccgatgtacgccgagcagcggatgaacaaggtgttcctggtcgaggaactgcgcctcgccgtggctctggaagggtacgacaaggagatggtcaaggacgaggaggtagctgccaaggtgaagtggctaatggagacggacggcggcggggagcttcgtgagcgggcacgggcggcgatgcgggaggcgaagaaggcgctgagcgacggcggagagtctagcactgcgctgttggagctcgtaaggcagtggaaaatg

SEQ ID NO: 148525 - DNA, 939 bp, Zea Mays
atggtgcactgttctacctgcgcccgcgccccgaaatctcgcaccgcgcgtccgcgcccttacgccacctcctcctctccccctcactgcgccgccacctcctcggttccgcgtgtccgctgcgccgccacctcctcggttcagcgtgtccgctgcgccgcccaccacctcctcctcctctcccccacgaatccgacctcccagctcgagcacgacatcgaccacaccgaaaagtacgctggcgactccgacctccagctcgagcgcatcaacgtctactacaacgaggccaacggcggccgcttcatcccgcacgccgtcctcatggacctcgagcccggcaccatggactccgtgcgctcgggccccttcgaccagatcttccgccccaacaatttcgtcttcggccagtctagcgctggcaacaactgggccaagggccactacactgagggcgccaagctcatcgacttcgtgctcgacgtcgtgcgcaaggagaccgagaactacgactacctccaagggttccaagtctgtcactcactgggaggaggatcacgccgagaaggttgcttccttgaagcttttcttagaggtgactctccaccatattcagccgacgatctagaaggaatgacatttattgcgagcatgcatgttaaagtagctaggaggcttcatagcaatagcttgcggtactggctattggaattcttgaggcgacaaccaaaggggagaaagtacagagcactgattctgaagtttgtcaaggatcgtatgggagctctgcttttggtggaggttgggatgcaagttacaacgacaatttcacgtgggaaagtgggagatcaagtcagtgttactgtggaaacagctcatccacgtgatgatatattatcagtcagagaggttgtagaggacaccgaggattcagagtaa

SEQ ID NO: 148526 - DNA, 1182 bp, Zea Mays
atggccacgcttccaatggcgctctcccccgccgccatttcccccttcaccaccctccccctctactattcttcgcgtcctcaccgccgcctcctcgcccgcttcttctccgtcgcttcggcaccgggcggagcgaaagggcaccgaccggcggcctccgccgttgaggtgggcggcgtcaagatcgcgcgcgaggtatgttctgaactttactgtcatgaattgtttcattttggatgtcctcggacctcggtagatgttgtgaaggaggatgatccgacaaacaacgtgcccgacaatatcttttcgaagatcggcctgcagctgcacaggagggataaccatccccttgggattttgaagaacacaatttatgattactttgacaagaacttcactgggcagtttgacaagtttgatgacctttgccctcttgtttctgtcaagcagaattttgatgatgtcttggtcccttctgaccatgtaagccggagttacaacgacacatattatgttgatggtcaaacagtcttaaggtgtcataccagtgctcatcaagctgagctgctaaggcatggacatacacactttcttgtaactggagatgtttaccgtagggattccattgattcaactcactatcctgtcttccatcagatggaagggttccgtgtcttctctcctgatgaatggtcagggtctcgcatgggtgggacagcatatgcagctgcagaactcaagaaaacactggaaggcttggcaagacatctatttggtgctgtagagatgcgatgggttgacacttacttcccatttaccaacccatcctttgagctcgaaatatactttcaggatgattggttggaggttttggggtgtggagtcaccgagcaggaaattttgaaaagaaatggcaggagggaccatgtggcttgggcctttggattgggcttggagcgccttgcaatggtcctttttgacattccagatattcgactcttctggtcgaatgataaacggttcacgtcccagttctcagaaggcaagcttggtgtcaagttcaagccattttcaaagtttcctccttgttacaaggatatgagtttctggatcaatgatgcatttacagagaacaacttatgtgaggttgtcagaggaattgctggtgatcttgttgaggag

SEQ ID NO: 148527 - DNA, 1772 bp, Zea Mays
atgaccagtgcatgcaaacggcgaccactctcagccgccgcgggtccagacgacgtggtcctgcggcaggaagtggcagatcggcaccgtgccgggcttcaccctgagcacctggaacgcgacgtgcttggggttccagccggacgtgtcggcgtggcacaccgcgacagcgtccacggccgtgccgtccctgcccagcatcgacaccgagtacgcccgcgtctgctgcgtcaagtggcacgcgaacacggcgtacgcgtacggctccgcgtggcaggccaccaggcgcccgccgcccgcccgcttcacgcctgtcacggtgtactcctgcctcggcgagccctccctccccacgaccgtcgacgcggccctcacgtggctggtcccgaggctggcggtggcaaagtccaccatggattccagcgacgtggcgcacgccttcctctcgcccctggccgcgggcgcctcgcagtcgtgcagcgtctgcgccatctccgccgcctccacggagtccgggtccaccgagaagcggccgaggatctcggggaccttctcggaggagaacgggatggcctcggcatcgcttcgcgggaggaacttggcgccggccatcgcggtgttggcgaactggacggtcgtcttcttaccgggctgcaggtcctcctctcggaagaagagcgccacgctggggtcgtcgtgcaactgcgtctccgatgcggcgtactcgtactggaaagggccgacggggacgtggacgggcttcttgcccgggttcacgtggacgccaaccctgcccttgccaacgcccaccgtggtgccacccggcttgccgtacccgggattgacgccgacgccgacgccacctttgccaacgccaacggttgtaccggcgccgccgggtttggtagggttaacgttaacgcccactccccctttcccaactcccaccgtggtgccgccgggcttcttgccgctgctgcctccaccgacgccgcccttgcctacgaacacgcagggaattgaagagatcgaccggtgttattacgtatatatgtttgtacgatggacgagcctccctatacaacacgtatctagtagtgataaagaccagctggggtgttgaggagttgggagagggagctcggcatgggagtgtcgggaagagcagacttccagtactgatctggagcacgagttgcatggcttcctactgacgcgatctgcatgaaaaccacaagagtcgttcctttatttgcatcagcatcagggcatgtacagtgggtgtcttaagttgtgtcttagagtgtgtctagggggctgaatgtaaaaaatctcaagacatgtatcttgacgaagacacagtgtcttagctctatattcgagacaggagactatctgattggtcactttaatttattgaatgttctgattggtacaatgaatatggtaagacacatgttttagatatgaccattgtattatgttgtgttttagctgtgtcttatacttggagtaccgtgcagctgtatctaggttgtacatgccctcagagatcgtccacccaccttaattaattattatgtcattactaggccgggtgaaaagaatgctgaatgtatccatacgttttgaatcacatgattggagaaacgatgcagaagatgaactgctttggcagtgagagagagagactgaccaataataggaagccgagtagtaggccggcaaggagcctctccatggaagacgaaggatggccaatgaggaagctg

SEQ ID NO: 148528 - DNA, 1660 bp, Zea Mays
acgccgcaaggcgaccacgttccctccctattctctcccatctcattatcggcggcaacctcaatcattaacagttaaactactggccaaacccggcaatatatacccctgcaggcccatctcctaagcacaccatcaaagtgcctgttcctgagccagcagcatctgtctcttgcttcatcagctaggcgcccggccgcgcggaccaggctccaggagaccaaaaatgaagctctcggtggcagtcctctgcgcgcttctggctgtccaggcggcggtgctcctcgccaccgtgccgacgtcgcaggccagcgagctggaggtcgggtactacagcaagaaatgcaagggcgtggagaacgtggtgaagtggcacgtgatcaaggcgctcaaggccagccgccgcaccggcgccgctctcgtccgccttctcttccatgactgcttcgtcaggggatgcgatggttctgtcctcctggacgcttcctacgacaaccctcatccggagaaggaggcgccggtgaacatcggcctcgccgccttcgacctcctggaggagatcaaggccgctgtcgagaagaggtgccccggcgtcgtctcctgctcggacatcctcatctacgcggcccgcgacgcggccagcgtcctcagcaacggccacgtccacttcgccgtccccgccggccgcctggacggcttcgtctccaaggccgaggaggcccaggcggagctcccggactccaaccaagacgtgcagcagctcatcgacaacttcgccaggaagaacttcacggtggaggagctcgtcatcctcaccggggcgcactccatcggccagggccactgctcgtccttcaccggccgcctctccgagccatcgcagcagatcaccccggcgtaccgcgacctgctcaactacaagtgctcccaggggtccaacccgcccgtggacaacaacgtccgcgacgaggactacgacgtggtggcgaggttcatgccggggttcaccagccgggtgcgcaagatccccgacttcctggacaactccttctaccacaacaacctggccaagatcgtcaccttccactccgactggacgctgctcacgcacaaggaggcgttcggccacgtcgtggagtacgccgagaacgccacgctatgggacgaggacttctcggactcgctgctcaagctcagcaagctgcccatgccgaaaggaagcaagggagagatcaggaagaagtgcagcgtcgttaaccaccgcttatactaagcctgccagatgccgtggaaatcgaagaaagaggtcgtgccagcacaacacatatatatcaaccatcggagatcagaaagccataaggttgcgcttttttgtttcatccattcttttgattatcattcgtttgtgctacactcatctttttgtgtatttctcatgcatatctgtcaaactgcaataaaactttgttcctgatatgtgcaacaacaagtgaagtgctacttctattggcaaatgtcattgtcgtgtacaacatatgagtggtcggataaaacagctaattgctacgatatatactaaatctatactatctattaagccaataatatagaccacggcactaccataactacagcctcccacaagcccacaccactaccg

SEQ ID NO: 148529 - DNA, 1016 bp, Zea Mays
tccgattcttagtgtaaaacagttaaaataaaaactaagaccaccatttattgttagaacctaagtctgcacctgaaatattttcatctgaaatgcattatgtacatatcaagaaaaagaaaggacttccatcaaaacattggtttgtgtattacattgattgttgaatagatcgtgtagggtgtataatatcacatcagagttccgcatgaggtgtagtatgataaaaattcatttaccttaaaaacattttcttttacttttgagaatttgtgcaagcactgaaacatttgctgtctggcttctttctgcctaaatgtctcagttgggaatcaaagcgtggaagaatgctcgtgacgccactggcttcactcctgaggaatatgctgcaaagagaggcaacatatcctatattcaaatggtacaggacaaaattgacagaagggtgaccagagctcatgtctcggttaccatccccagcacaattgatactgtcggaaagcatggtagccgaatgaagcctgccgatcaaatcacatttggtgttgagaaaaaacaactaagcatcaaccaaacattgagctgcagacagtgtgtccagcaggcccagcagcttgcattccatccccggacaaataggtttctgtctaataggactgcgatgctttccttggtctccattgctgccgtctgcgtctgtgtgggattgatcatgaagagcctgccacaagttggttgtatgaagcctttcctctgggacaatatacgttggggccccaattgatagactgcagaagagccagcccgattgtatcagtgtatgatgaagatgtttgcgccgagcgaagctagtttcttgtaatgtacatgtttcttatactaaatgtctaacttatttctgtttatagtaaaacctgtgaacttgcctagcttgtaactccattgcatttgcatcctgactgaagtaaagcttttacttgttttggttgagaggaagaaaaccttttacttctaaa

SEQ ID NO: 148530 - DNA, 2860 bp, Zea Mays
ccaaccggcccttggtcgtggcgtcgctgtccgagcgccagacaagagacaggggagatgaaaaagaggcggtggtggttcgagtgtgaatatgccggtggggagggctctgcctccccaggatacttcgccccccgttccaccgcgagcccttccggcttccgcctctgttccgccgctccagcctccaggatccgtggggagatcgatttcggcgtcgtcgttgacaagaggcggcggctctcaccagaggaggacggcagcggtgggtgcagcaattctgcggtagcagatggagacaacagtcacgtggtgtgtgttcagagagggcggaacactgaggagacgagacccaggaaaggtgccaattcgagcaccactccttcttgccaggttgacggctgccaagctgatcttagtggtgccagggactaccataagaggcacaaggtgtgtgaagcgcataccaggacaacagtggtctgcatcaataatgtagagcatcggttctgtcagcagtgcagcaggtttcaccttcttcacgaatttgatgatggtaagaagagctgccgatcacgtctggcacaacataatggaaggagaaggaaagttcaaccgcaacctgctgtgaacgggaattccatgaatgaagatcagtctctaagtagcaccttattccttctgttaaaacaactttccgggctcgagtctggtagctcttctgagcaaatcaaccatcctaattctttggttaaccttttgaagaaccttgctgctattgctagcacacatgcatatcaagatgttctaaagaatgcaacttcaatatcatcaaatgatggtaataatgctgcaaatggctctataatgcatgagcaaaccatacggtcaattcctgtcaggagagaatcattagcagaagagcctgcggtgaaaagacgagtacaggactttgatttgaacgattcatgcattgaagaagccgagagccgaacagataaaattgtgttcaaactctttggaaaagagccaaaagattttcctgtagatctacgggaacagatcctaaactggttgtcgcattatccaactgatatggaaagttatattagacctggttgtgttattctaactatttaccttcacctccctaattggatgtgggatgagtttaatgatgacccagcttcatggatagaaaatcttattagcttatccaatgatggattctggagaacaggatggttgtatgctagggtacaggactgcctaacactgagttgcaatggtagtcttatgtttgcatctccctggcaaccggtaattggtgacaagcatcagagactgtgtgtaactccaattgcagttgattgttcttcgtcagtaaaattctctgtgaaaggtttcaatatagttcagccaaccacaaaattactttgtgtgtttgatgaaaaatatttaattcaagaagagacacaaatgctacttgaagattcaactatgcagcaaggccctcaatgcctgaccttctcttgttcctttccttgtacaagtggaagaggattcatagagattgaagactatgatcaaagcagcctttctgttccctttgttgtcacggacaaagatgtatgttctgagattcggatgttggagcatggattggatttagtttcatttgatcaaacctccaaaagaatagatgatctgatgatttatcgcagtcgagcattacattttttgcatgaaatcggatggcttcttcaaaggagccatgtgcgagctacgtctgagcagcgacaatattgtcctgaccgcttccctgttgcaagatttagatggctgctatcctttgcagttgatcaggaatggtgtgctgttctaaggaagcttctgaacaccatgttccagggtgatattgatgtattgtcaccaattgaatttgccttgggagaaaatctattgcatactgcggtcaaaaaacgctcaaagcctttagttgaatttctattaagatacaccacaacaaatattgctccagtgggcggtggagatggtgctccagttcagttcttgttcactcctgcgatgactgaactgtcaaatatcacacctcttcatattgcagccacaatcagtgatgctattggtgttttagatgctttaactgatgatcctcagcagttgggaatcaaagcgtggaagaatgctcgtgacgccactggcttcactcctgaggaatatgctgcaaagagaggcaacatatcctatattcaaatggtacaggacaaaattgacagaagggtgaccagagctcatgtctcggttaccatccccagcacaattgatactgtcggaaagcatggtagccgaatgaagcctgccgatcaaatcacatttggtgttgagaaaaaacaactaagcatcaaccaaacattgagctgcagacagtgtgtccagcaggcccagcagcttgcattccatccccggacaaataggtttctgtctaataggactgcgatgctttccttggtctccattgctgccgtctgcgtctgtgtgggattgatcatgaagagcctgccacaagttggttgtatgaagcctttcctctgggacaatatacgttggggccccaattgatagactgcagaagagccagcccgattgtatcagtgtatgatgaagatgtttgcgccgagcgaagctagtttcttgtaatgtacatgtttcttatactaaatgtctaacttatttctgtttatagtaaaacctgtgaacttgcctagcttgtaactccattgcatttgcatcctgactgaagtaaagcttttacttgttttggttgagaggaagaaaa

SEQ ID NO: 148531 - DNA, 1017 bp, Zea Mays
ccaaccggcccttggtcgtggcgtcgctgtccgagcgccagacaagagacaggggagatgaaaaagaggcggtggtggttcgagtgtgaatatgccggtggggagggctctgcctccccaggatacttcgccccccgttccaccgcgagcccttccggcttccgcctctgttccgccgctccagcctccaggatccgtggggagatcgatttcggcgtcgtcgttgacaagaggcggcggctctcaccagaggaggacggcagcggtgggtgcagcaattctgcggtagcagatggagacaacagtcacgtggtgtgtgttcagagagggcggaacactgaggagacgagacccaggaaaggtgccaattcgagcaccactccttcttgccaggttgacggctgccaagctgatcttagtggtgccagggactaccataagaggcacaaggtgtgtgaagcgcataccaggacaacagtggtctgcatcaataatgtagagcatcggttctgtcagcagtgcagcaggtttcaccttcttcacgaatttgatgatggtaagaagagctgccgatcacgtctggcacaacataatggaaggagaaggaaagttcaaccgcaacctgctgtgaacgggaattccatgaatgaagatcagtctctaagtagcaccttattccttctgttaaaacaactttccgggctcgagtctggtagctcttctgagcaaatcaaccatcctaattctttggttaaccttttgaagaaccttgctgctattgctagcacacatgcatatcaagatgttctaaagaatgcaacttcaatatcatcaaatgatggtaataatgctgcaaatggctctataatgcatgagcaaaccatacggtcaattcctgtcaggagagaatcattagcaggtaaagcactttatcgtttacttgattctatttagcatgtcaaatatcaaaggtataaataaaatgatttgaataacttgtgttctcagaagagcctg

SEQ ID NO: 148532 - DNA, 1466 bp, Zea Mays
atctcctaggaaagagaaacaacgaagactcgaaacgagtacaccaacctttctttctctcctctcgcttctgcggcgaattttcttgtcccgtgccggccgccgtgtctaccctgcgccaccgccccttccaacgcctgccgtgaagacaaaaggtcttggttaagtttgaagatgtcgtgcttggcatgctgtggcggcgaagatactcaaagaacacctgataatggaggtccataccctggtggctacccaccaagggatgatgcttatcgcacagctgatccaactccgaggggtgctcaacctttgaaaatgcagccaatcactgtccccactattcctgtagaagaaattagggaggtcacagtggcttttggtgatgaagctttgattggtgaggggtcttttggcagagtatattttggtgtactaaaaaatggtaggagtgcagcgataaaaaagttagattcaagcaagcagccagagcaagagtttttggcacaggtatccatggtgtcaaggcttaagcatggcaatgtcgtagagttgcttggttactgtgttgatggaaacacccgcatccttgcatatgaatttgctactatgggttctcttcacgatatgcttcatggacgcaaaggtgtgaaaggagctcagcctggtccagtcctgtcctggacacaacgagtgaagattgctgttggagcagcaaaaggccttgagtatcttcatgagaaagcgcagcctcatattatacacagggacatcaagtccagtaatgttcttctatttgatgacgacgtatctaaaatagctgattttgatttgtcaaaccaagctccggatatggcagctcgacttcattcgaccagagttcttggaacatttggctatcatgcacctgagtatgcaatgactggacaacttagctctaagagtgacgtttacagttttggagttgttcttctggagctcctgactggaagaaagcctgtggatcatacattaccaagaggacagcaaagtcttgtgacatgggcaactccacggctttgtgaagataaagttaggcaatgcgttgattcaagacttggagtagaatatcctcctaaatccgttgcaaagtttgcagctgttgctgcactgtgtgtgcaatatgaagctgactttcgacccaacatgagcatcgtggtgaaggcgcttcagcccctgctgaatgcacgtgcatccaacaaccctggatgaatgaatgaatgactgccgttgcttttccctgacgagagtatctgaatcagacaacatgtagcattgaattcagataaatatagtgtttggcttaatacacttggccctagatgttcatcaggagataacctcttgcagtttctggatgttacctagtctttgtatccctaaactgtaacctattgttcggttgcgttccatctggtgttgtttacatc

SEQ ID NO: 148533 - DNA, 594 bp, Zea Mays
atggacgccggcctcgcttccgcagtcaccatgctccggacctgcaccgatgtcgtgcacctcgcgcacgttctcgagcagtttcgccttgcctggtgcggcaagctcgttcgggacacccgcgccgtcgctccgtcaagggcctctgcttcgacctcttcatcattaggggtggaaacagagctttcaatgtatgctggaggtgagcgatgtgatcgatattatccatgcttgataaattatgacaatggtgatggccatgatatatggtcaggttctatccggacatccggagaactgggcaccggtgatcggatggcggcctccggcgctaagatctggcggtcacaacctagccgcgccgtcgacgaggttttcgcctgtgattccataattcgaggaagagccgtgctgctcgcagcaccggtaccgcccccgttggcgcggacgcctgccatcggccgcgagctgttgatgggggaaacaaaaataggaagggacatcggagacaatccctgccgcgttcatcctttattaacgagcagaaaccatggttcgggacttcaggtttcagtaaatcttgccagaaattaa

SEQ ID NO: 148534 - DNA, 782 bp, Zea Mays
ctcatagtgatctttgtgtattgcgcacaacattatgtaccttactacgttttctcagtaattgctacttgtaatagagctctacacgccaatcttgttacacttttttacctcatagtgatctttgtgcattgcccacaacatcatgtaccttactacgttttcctgcttattgaaatcctgtgagccctactcagtttttacctatcttttgattttacccatggagaaatattggctgggtgactgccatgaaggcatgaaccttaaaaaaagtttgttttttcaattctaaatatcttgtgacttatttatattgagcatgtgtttacaaataatgttctcatcagctcatgtggtattttaagctcgcctctacatggacgccggcctcgcttccgcagtcaccatgctccggacctgcaccgatgtcgtgcacctcgcgcacgttctcgagcagtttcgccttgcctggtgcggcaagctcgttcgggacacccgcgccgtcgctccgtcaagggcctctgcttcgacctcttcatcattaggggtggaaacagagctttcaatgtatgctggaggtgagcgatgtgatcgatattatccatgcttgataaattatgacaatggtgatggccatgatatatggtcaatattgtattaatcttttttcgagttttaggctgtcatgttgtttgctggaatggagatatttcattgttcacttggttcatgtgacagagttaattaccttatttccgtgctttcttagtacctttttc

SEQ ID NO: 148535 - DNA, 1097 bp, Zea Mays
cgcctctgcatctcgccattgttgccgccattctcgcgcccgtgcccctccattctcgcctccgcccccggatcctctcgcccccgcgaccttcgatggaagcccgcaatctgcgcccttccatcgccgcaatgcatcgatcccattccattttgcgagaagggcgggcgcgtgcagggcttcgcaatggctgacggttcaattggaagatcaaccacagggagtaggactcctaaatgagccgccaactgttcttctccttcccaatcatcggcaatcccacacgctctggtggctaaggctgcgggattcccaggtgcagcgtgctggggtcgcccaggcacggagtcggccaccacgcagcagccgtcgcccctccacctcgttgtcgtccgtccatgatcttgttgtggttcatgagcactgagctatacttcaacttaactgattcagcccttggctttctgggcatgtttgacaaagttgaatagctatgaaaccgaaaacaactgccaaatgtacatgttctgaatcaagacctgagatctagaaggacacaacaggcaaggtggatgtattcgtagctggttcaggcacagaagggtcgttttgagatactctctgtctgggtcgtttcttcaataagataacggtggccatcatagtcgaattggtgggcctgctagcgtccccaatggtcgtgtcctggcctgtgtggtagtgttgccggacttctgatagttgcttcgccagtacagatcatagtggaaccatcatggatgtttaatattgcagtccaaggtaagaaagtattgcagaaccaagcacaaaagcatccaggaagaaaaatagaagggacaagctgaatgagagaggtatgtgccctggtgagacaaatcattttagttcttagatataatacttgcatcattgtctaagctggtagcatcgtagatatattttttatccaaataatgattgtgctcatgtaaaccatgccaaatattattctacaatgaatagcccatcgctgaaaaatgcagaaatcaagaagagcttttaccattgcattgcaaagtccacatgttcgacgattc

SEQ ID NO: 148536 - DNA, 1400 bp, Zea Mays
accgtggctccgcccccgagattgtcgcgcccacagcctcgcctcccatggatcctctcgcctctgcatctcgccattgttgccgccattctcgcgcccgtgcccctccattctcgcctccgcccccggatcctctcgcccccgcgaccttcgatggaagcccgcaatctgcgcccttccatcgccgcaatgcatcgatcccattccattttgcgagaagggcgggcgcgtgcagggcttcgcaatggctgacggttcaattggaagatcaaccacagggagtaggactcctaaatgagccgccaactgttcttctccttcccaatcatcggcaatcccacacgctctggtggctaaggctgcgggattcccaggtgcagcgtgctggggtcgcccaggcacggagtcggccaccacgcagcagccgtcgcccctccacctcgttgtcgtccgtccatggtacacctcgcccgcggccatcatccctacactagtaccagcgcgtgtatcgagttacagttctctctgttttcttctgaagagtgagcaaaggatgcacacgctggtactgtggtatgtgctgatcgattaactgtaatgagcctgtgttgatccattttcttcctacgaagggtgatagaagatgcagaggagaggggttggccctctttgctatttagagaggttacaggctcattgcagttatgccgactaaatactcgcttgtcatgcagatcttgttgtggttcatgagcactgagctatacttcaacttaactggtatgattagttgaaagaaaggtacaacatcaccttacgtgttgaattgccttgattaagaaatttatgggtagccttccgtgtgtgtatgtgtgtgcagattcagcccttggctttctgggcatgtttgacaaagttgaatagctatgaaaccgaaaacaactgccaaatgtacatgttctgaatcaagttatgatgctaatgtctcagcgaatgtacatgttctgaatcaagcaatggcgaattttgaagcccactttagattaatcggtatatatggatacagtagcatgtgttcaaatgatgcttatttctcaacgaatagtagcaatcattggtcaggacatgtagcttaatgctatcttgttgttattacatgggtgtcgtaacaccttgccgactgttcataaacgcaggacctgagatctagaaggacacaacaggcaaggtggatgtattcgtagctggttcaggcacagaaggcatagtttattgtttcttttacattcagtttactgcttcttaaggaattattcaactaggaacatgtactgaatatgggattcaggttgaaataaagcgtatattttctgtttgttggtgaatgtaaatgaagataa

SEQ ID NO: 148537 - DNA, 1376 bp, Zea Mays
aaaccaacaagatgttgttcgaggcgttcccctcctccacgcaaccttctcccctccagatccaggattgccgggctccttgactcgttacctcgcgcgccctcggttctagagctagcgaaatcgcaaggctattagggttcctttcggagcgcgtctgaagcgatgatggctgaagtcggcggtgggatcgggatcttctctgccctgctccactcgggatgatgaatctgctgcgctgataattattggatgaatttcgataattattagatctaagagatgcgccgacttgaagaggcgaggtaaggtgcaacatgtataagacgtgacatgctatagaggcctttgccatggtgggtgcgctcgcatggcaggccacggtaataaaagaagatatttttgtgtcctgggggtggagatcgcacgggggattgttttttggccccgggttctcctccctcgtggtgttccgtgtccctatgtgcattggtctttgcgtggtttgcgatctcagctcacctacacgcttcggatttctgcatctaacacggagatctacaacaaaaacaaacatggagctacaacgagattcttaaggtacaatcgttaatttactgtaacaattaagtttcttttctcatctctgacgccacacttgtatccttatgttctctctctgcacattcaaagaaaccgttaaacccccatgaataatgacattcgacgtccactttgcccagctgtgttgaatttaatagttcaacaatttcagactcccatgaactcagtgaaacaagcgttactgatgtcctaagtgaaattttatgtcgcacttaagatggcgctgcgtctttatttcgttgtatattttattttcaacaactccaatctgattatgtcgtggcatttcatttgtatttatcatgtcaattgggatatttggtccttgtaagcttttggcatgtttgttagttaagccattgcaattgttggacttgtggagggttgcaaaatcgcagtgattctactattcatcatgtcatcatgtgaaatcttctaccacggagcacgtcaatcgtggctgggctgatggacgactgtgctgatggaactgattcgttacgtgggttgaagattttgtgccaaatatgcgatctggttggttactccgccctgctgacgttgttttagcccaggtgtttctgctgctcattccttgcattttttatggcactgtacatacaattggacaacctaatttttggcagttcaactcatttagaagttagaagggtttgagaaacattctcccctagaaatacatggaggtgtatctgatgattgttttttttgttacaaagtttcctagttta

SEQ ID NO: 148538 - DNA, 1546 bp, Zea Mays
aaaccaacaagatgttgttcgaggcgttcccctcctccacgcaaccttctcccctccagatccaggattgccgggctccttgactcgttacctcgcgcgccctcggtgagctactttgtttcgatttagcgacaaatcagtttgcttcatgttgcgcaggcttagatctgaatgccggattcttcgtcttacggcttgaatcgagctgggaggctgtggatctgagcacgggaggtacaacaaatccgcgtgtatgacgagttggatcggcaccggttctagagctagcgaaatcgcaaggctattagggttcctttcggagcgcgtctgaagcgatgatggctgaagtcggcggtgggatcgggatcttctctgccctgctccactcgggatgatgaatctgctgcgctgataattattggatgaatttcgataattattagatctaagagatgcgccgacttgaagaggcgaggtaaggtgcaacatgtataagacgtgacatgctatagaggcctttgccatggtgggtgcgctcgcatggcaggccacggtaataaaagaagatatttttgtgtcctgggggtggagatcgcacgggggattgttttttggccccgggttctcctccctcgtggtgttccgtgtccctatgtgcattggtctttgcgtggtttgcgatctcagctcacctacacgcttcggatttctgcatctaacacggagatctacaacaaaaacaaacatggagctacaacgagattcttaaggtacaatcgttaatttactgtaacaattaagtttcttttctcatctctgacgccacacttgtatccttatgttctctctctgcacattcaaagaaaccgttaaacccccatgaataatgacattcgacgtccactttgcccagctgtgttgaatttaatagttcaacaatttcagactcccatgaactcagtgaaacaagcgttactgatgtcctaagtgaaattttatgtcgcacttaagatggcgctgcgtctttatttcgttgtatattttattttcaacaactccaatctgattatgtcgtggcatttcatttgtatttatcatgtcaattgggatatttggtccttgtaagcttttggcatgtttgttagttaagccattgcaattgttggacttgtggagggttgcaaaatcgcagtgattctactattcatcatgtcatcatgtgaaatcttctaccacggagcacgtcaatcgtggctgggctgatggacgactgtgctgatggaactgattcgttacgtgggttgaagattttgtgccaaatatgcgatctggttggttactccgccctgctgacgttgttttagcccaggtgtttctgctgctcattccttgcattttttatggcactgtacatacaattggacaacctaatttttggcagttcaactcatttagaagttagaagggtttgagaaacattctcccctagaaatacatggaggtgtatctgatgattgttttttttgttacaaagtttcctagttta

SEQ ID NO: 148539 - DNA, 2054 bp, Zea Mays
agccaaacgcctctctcagctctaactccacatgaacgtgaagattgctccagacagagttgcaaattagagcagaaatttattgaattggagcagtaacgctccctaaaaagtcttcgggagagatgccttagcccgttgaccagttctttacatcaagggggcaggggcacctggctcctgcaagtcaaccattactctccccctcatcgctatctcagcctcaggcccgcacccggccctctccatccccaaattccgatggcctcggctccgcacgacgacgcggccaagggcaggaacgctgcgccgccggaaaaacgcaccagcgcaactatcacggaagccgatattcgcgccgagttcgcgcaccacgacggcaccgtagcccgcgtcaacaacggcaccttcggctgctgcccggcgtcggtcctcgcggcgagggcgcggtggcaacggctttttctctctcagcccgacgcgttctacttcgactctctccagccggggctcgcccgctcgcgtgccgccgtggcgtccgccgtcggggcgggtgacgcctccgaggtctccctcgtcgacaacgctaccacggccgcggccatcatcatgcagcacgtggcctggagcttcgcggagggcgccttcgcacgcggcgacgtggtgctcatgctccactacacctacagctccgtcaagaagtccatccacgcgtacgtggtccgcgcgggggccaccgtcgtcgaggtgccgctcccgttccccgtcgcctcggcggtcgccgtcgtcgccgagttccgtgccgcgctcgcgctcgcccaggctgggggccgcagagtccgcctcgccgtcatcgaccacatcacctcgatgcccagcgtcctcctccccgtgaaggagctcgtcgccatctgccgcgaggagggcgtggacaaggtcttcgtcgacggggcgcacgccatcggccaggtgcccatcgacgtgcgcgacatcggcgccgacttctacaccagcaacctccacaagtggttcttctgcccttccgccgtggccttcctgcacatccgcaaggatgaccccgtagcctcgcagctccaccaccccgtcgtgtctagcgagtacggcaacgggctgcccatggagagcgcctggatcggggtgcgggattacagtgcccagctcgttgtgcctgatgccgttgacttcatgagacggttcgagggcggcatcgagacgataagcaaacggaaccatgagaaggtgatcgagatgggcacgatgctcgccgaggcttgggggacgtttcttggctcgccgccggaaatgtgcggaagcatggctatggtcgggctgccaggttgccttggcattgagagcgatgatgatgcgatgagagtgagggacatgctgaggaacgaattcaaggtcgaggtgccaatattcaacaactcaagaagtgttgaggaaggacaagagatggccaagggcgatcaagtgacagggtacgtgagaatctcacatcaggtttacaatgtcacggaggagtatgaggtcttgagagatgccgtaggcaagcttgttcttgatggtttctcctgcaccaagctgagaccttctgagaaggttatttctaactgaaactgttattacgcttaattacaatgtctttacctttgttcactcacttcaatttcttgatgaaagtatgaactgctgtagcatgttatctgctgactactcgttcttgtagactctagtctgtaatgaaacacgtttttactgtaccgcatgtccatttacatttatatatgtgttgttggtgtgtttatctacgtcgttggcctactatatgaagatgaaaattgcaccgacgcctacaatgtttcagcttctgttcatatatatggtatagaaaggcctaatctgagcaataactaattaagttatgcatttgggtaataattacagtttagtagtttcggttgatctatggacatttatgaatcttattattggactcttcaaacacgacattagatcgttttaactcttgt

SEQ ID NO: 148540 - DNA, 226 bp, Zea Mays
atgcatcataatgttgttgcctacagttactgggggtacagacataatgcccggaagacaaacaaaggttggcgcctggattactttcttgtgtccgaatcaatcgcagaaaaagtgcataattcatatattattccggacacctctgccagtgatcacagtccccttggtctcgtgctgaagctgtaggctgtatcacaggctatgccaaacattcagtctgaag

SEQ ID NO: 148541 - DNA, 450 bp, Zea Mays
tacctacacatagtaatcaggacaataacgtgatgagaataggttaaaagccctaatcctcatcgtctccctttacataaaactctaggtcctggagctccatacatagcatagctccatttgcaaacacatatcatgccacaatcttctagatttctgcatgaatatatactattaaacactgcggattacaccagttggcaacatatatatgtacaatacccggataacaaactggacatgctactaaagcgcagaactccagtcctcatgcagatttggcaaacccaatcctgttctcaccgaagtcaaaaacagtgtggtaggcacccataaaaacatcaccaacgtaccagagaggaccacgaggaggcggtacgtcaaatgccataaacccactgatgcagatagtttgtcctgcttgctccagcttcactatgtactgcagca

SEQ ID NO: 148542 - DNA, 756 bp, Zea Mays
ctgcaggtgcagcggtgcgccgaggacaagacaatcctggtcaccacatacgagggccaccacaaccacccgctgccgccggcagccgccaccatggcgagcaccacgtccgccgcggctaccatgctgctctccggcccggccaccagccgcgacggcgcggccgcgctcctcggccacccggcggcgctgttccaattccaccactccagcagcatcccctacgcgtccactatggccacgctctccgcctccgcgccgttccccaccatcaccctcgacctcacgcagacgcccggcggcgttgtcggtagcggcggcggtctgctgctgcctcatcacgggctcgggctccatcgcccgcccagtggaatccaccccgtggcggctccggcgatgccgttatcgccgctggccacgttgctccagcagctaccgcccacggggtcgatgtcgctggctggcctcgtcgcgcgtcatgagcagcagcagtcagtgatggagacggtgaccgcggccatcgccgccaaccccaacttcaccacggcgcttgcggcggccatctcgtcggttatggcaggggcagcgcatcaggctcagcctactccacgtgcaggtaacatcggcagcgccggggaggccaacggcagtgcgggtggtgccgcagcaggtcccacggcagccggagcatatggagcgtctggcgggtcgccgcggttcgcgacgcagtctgcttgcaccacgtccacaacttga

SEQ ID NO: 148543 - DNA, 88 bp, Zea Mays
ggcatatgcaaatgtgcatcaaattaaagagctagcgcatgcagctggtgctatacatcgaaaaatcaaaataacaactatactaatc

SEQ ID NO: 148544 - DNA, 192 bp, Zea Mays
aatgctagacaagaaatcttgagcatcaacaacaaagacaaccgcagcagttttaggcaggacttcatcaagtttgggtttgagcctagcatgaccaggaacatcaataatatgcacaggttttactttgtctttctgcagggaaggacaacaggaaggtttagcagaaatatcgcagtcaggatatgcatg

SEQ ID NO: 148545 - DNA, 113 bp, Zea Mays
gtggtggtgcatatggatgctacaacaagaaagatcaaaagttcttttggatggatgcagctagatattttgttttgtattttctccaaaagagaaatttgcaagtgaactta

SEQ ID NO: 148546 - DNA, 1242 bp, Zea Mays
atgactcctagggtctggaaacaaaccacggagctgtgaccgctccgtgaccgaggggagcggcggcggcggcgcaaggagtcttcctctccgacgccggcaacgtcgacaccgctggcaagcttctctccgattatcccttctccagtaagagtaggcgaggacgagcctcccccatcttgggtgttggtgtctgacccattttctcaagatatgatgttcacaagaggttctcccaaaattttgatgttatctaaagctgctcaaaagaaggtttctcctaaagcttctacatcaaagaagtgtggaggtggtgttcatagagcagcatgaaattctgaattggagaagagcctcgttgatttgttgtttgagcacaatgtacctccatatagggctcaaaatggctggagtctagatgcttggaacaaaattgttactaaattcaacaagaagcatgagtatgtcacattcaacaagattcaaattcaggagaaggagagggaattgaaaagggattacaagatgttgaaagaggctagaaagcaaagtggtgtttcctggaatgagaaacgatgcatggttgttgctgatccaccaatatgggaaaacatcaaaaaatcatttcctagggccaagaaatttcaaaagaagtctttccctctctttgatgctcttggggaactatatgatggacacattgctcaagggacctggaacataacatctacacagctaccacaagaatggaacacaatttcaaatgaagaagaacaagtgaacaccacaataatggatgaggaaggcattattcaacaacaaccacaagaagaggattcaatattggaacaagatgaagatcctataattggaaggattgaacagaggtctactgcaacgagaaggtctactgcatcaacaatcaatcaggataaggaagcaaagaggatgaagaaggattctttggaaggacttgttgggagatatctagatctgaaatcaaaacaagttgaggatgaggttacacaaatggcgaaaggaaaagaatctgctcaaggtaatgacttctccatcatgagatgcatttctgttcttagatccatgaatgtgactgcagatgagaagataaaagcagctgaggtgttcgacataccaaacaacagagagacatttatcagttttagtgttgatgaaccagaaactgccctcctatggttaagacggaagattgataagctctaa

SEQ ID NO: 148547 - DNA, 1605 bp, Zea Mays
atgactcctagggtctggaaacaaaccacggagctgtgaccgctccgtgaccgaggggagcggcggcggcggcgcaaggagtcttcctctccgacgccggcaacgtcgacaccgctggcaagcttctctccgattatcccttctccagtaagagtaggcgaggacgagcctcccccatcttgggtgttggtgtctgacccattttctcaaggtactagccaaaacctaaagaaattgaattatatgaactgcataactagctttagtaattaattttccttatgtctcttgatgctacttttagttttgctatggatatgagcaatagagatcaccttaggaggagggaggaggatgatgatgacctcttccttttgattcccccttccctacatctcttgggctatcttggacgtagtaaaaagaaattgaggcatacatcagcgctgaccggggaggaaaaggttcgagagctacttgaaggccatatcaagaactgcagggtatcatttagaatggaaccttacattttcaaatccttggacaactatcttagaatggaaggattggttaaagatacaagaatcaaagttgaggaaaaacttggcttcttcctatacatgattagccacaatgcgacatttgaaggtctccaagtcttttttggtcatagcaatgatacatttcaccgtgtcatcaaacatttcttcaacattgttatccctggccttagcatgtggttcctaaagcctccttccaatcaagttcatcctaaaattcatggagacaaccgattttatccatacttcaagaattgcataggttcaatagatggaacccatgttccagtatcaatgtcacactatcaagccgcaccattcaggaatagaaaagggacccttagccaaaacgtgatggttgtgtgtgattttaaccttaacataacttatgtgtcagtcggatgggaaggatcagcaacagattcaatggttcttagatctgcaatgaacaatgttgtaggaaagtttgaagtaccttctgggaagtactacatagtagatggtggttatgccaatacgacttcctttattgcaccatattgtggggttagatatcacttgaaagagtttggccatggtcatcgaaggcctcaaaatcacaaagagttattgaaccatcgccatgttgttttaagaaatcatgtatagagggctttgggtgtcataaagaagagatttccaatcctcaaagttgctacccttcacaaaacggaaaatcaagcaaaaatacctattgctgctacagtcctccataacttaattcggtcacataatggtgatgagagatggctagaaaatgatcaaggaaatatcaacccacaaagttttgtcaacctacctacccaatagtgaccatggaaatgatgaagggaatatggaaaggaataacttaagagatatggtagcttatcatatgtgggcagattatgagcaacgtagaaatcagtgaatcatttctgtaatggatattgtgtaatcaataaatgtcatttttgtaatggatattttgtaatggatattttgtgatcaaggaattattgtgttt

SEQ ID NO: 148548 - DNA, 1512 bp, Zea Mays
atgactcctagggtctggaaacaaaccacggagctgtgaccgctccgtgaccgaggggagcggcggcggcggcgcaaggagtcttcctctccgacgccggcaacgtcgacaccgctggcaagcttctctccgattatcccttctccagtaagagtaggcgaggacgagcctcccccatcttgggtgttggtgtctgacccattttctcaagttttgctatggatatgagcaatagagatcaccttaggaggagggaggaggatgatgatgacctcttccttttgattcccccttccctacatctcttgggctatcttggacgtagtaaaaagaaattgaggcatacatcagcgctgaccggggaggaaaaggttcgagagctacttgaaggccatatcaagaactgcagggtatcatttagaatggaaccttacattttcaaatccttggacaactatcttagaatggaaggattggttaaagatacaagaatcaaagttgaggaaaaacttggcttcttcctatacatgattagccacaatgcgacatttgaaggtctccaagtcttttttggtcatagcaatgatacatttcaccgtgtcatcaaacatttcttcaacattgttatccctggccttagcatgtggttcctaaagcctccttccaatcaagttcatcctaaaattcatggagacaaccgattttatccatacttcaagaattgcataggttcaatagatggaacccatgttccagtatcaatgtcacactatcaagccgcaccattcaggaatagaaaagggacccttagccaaaacgtgatggttgtgtgtgattttaaccttaacataacttatgtgtcagtcggatgggaaggatcagcaacagattcaatggttcttagatctgcaatgaacaatgttgtaggaaagtttgaagtaccttctgggaagtactacatagtagatggtggttatgccaatacgacttcctttattgcaccatattgtggggttagatatcacttgaaagagtttggccatggtcatcgaaggcctcaaaatcacaaagagttattgaaccatcgccatgttgttttaagaaatcatgtatagagggctttgggtgtcataaagaagagatttccaatcctcaaagttgctacccttcacaaaacggaaaatcaagcaaaaatacctattgctgctacagtcctccataacttaattcggtcacataatggtgatgagagatggctagaaaatgatcaaggaaatatcaacccacaaagttttgtcaacctacctacccaatagtgaccatggaaatgatgaagggaatatggaaaggaataacttaagagatatggtagcttatcatatgtgggcagattatgagcaacgtagaaatcagtgaatcatttctgtaatggatattgtgtaatcaataaatgtcatttttgtaatggatattttgtaatggatattttgtgatcaaggaattattgtgttt

SEQ ID NO: 148549 - DNA, 130 bp, Zea Mays
cgatcttcgccacggctaagcaaaggcaacagaggttccaccgacagggggaaaaccgtcgccccctacaacagcggcgagagtagcactgatccggcagcgagaggcggtccaactactatgtgttcgc

SEQ ID NO: 148550 - DNA, 253 bp, Zea Mays
tttttttctttctatttcaagttcaaatttcaaatcaattccaagtttaaatttcccaaattttgtggcaagtttattctcaggttatatattcaatttgaacctaccaatctaggatttattcatttataaatttatttgtattttataacatttctttctctttttctttcttttcatattttcattctcttgattttcaaatctaaatttgaatttttgttatgagtcacaccatggatcaaaatgtacc

SEQ ID NO: 148551 - DNA, 460 bp, Zea Mays
aggaccacccaagactggcccccgatcaaaccattcctgagaagcgccttgacagcctcggcacgccgacgccggacactgttggtgaaggtgtacatggaaggcgttgcgatcggccggaagctggacttgctcttgctggatgggtacgacagcctcctagcgaagctccgccacatgttcaaggcctccatcacctttgctgatgctatggagtaccatcaacgagttcctcacgagaagcctgcacatgttctcacctatgaagaccgggatggagactggatgatggttggggatgtaccgtgggagctcttccttggaagtgtgaagaaactgaggatttgcaagaacagataaatgctagtacgttagcaaagcttattattcgtgcgctgcatggactctatttctttcttctttttatttatatcggttcatacagcagaaagattttgct

SEQ ID NO: 148552 - DNA, 549 bp, Zea Mays
aattgttgacagtagcgtggacgcatcgtcatcattcgagcagaggggagagagagagagagagagagagagatgaaggagggcacggcgaactgcatcgacatcctcatcgccatcatcctcccgcctctcggcgtcttcctcaagttcggctgcaaggtcgaattctggctctgcctcctgctcaccttcctcgcctatctccccgggatcatctacgcgatatacgttatcaccaaggactagccagctagcgccgtaaaccgggacaaggtgagagagctagctgatcagccagcggaggtaatggagatgaactgctgagatcacttgccctgctgctcaatgtttctggatggagactgaatctcagctgtgctgtgctgtgctgtgctgtgctgtgatgctgctatatactaccgattgatcctgaaatttgtcgcttttcgttcgtgtctgcatagtatgtgatgcatagtctgtaaaatttctctcagactcttgtgctatagtatgtgatgcatgcatgtgtttgcttgatgaatttgg

SEQ ID NO: 148553 - DNA, 345 bp, Zea Mays
atgggtattggtcctagtctggtttctcctccatggggttgtgggcatgtgaagtctgtggccaagaatgaaacgaaaaagaacagaaggaggcttcccaggtgtccaggacaagatgggatggggagcgatgcagggagtcggggagggagcgagtcacgacgaaaggccaagagcgatggggagcagcgagacagacggcgggtgggcggcgccaggttcgaccggggattcgtatggtccaagaacgcggagacgacgatgagagtgaagactcgccgctttttcccatggaggtcgtcgccctgtgaaagccatcgcccaacagagttctggagacaatga

SEQ ID NO: 148554 - DNA, 99 bp, Zea Mays
gtgcgcctaaccgcacaggcacaacctcttcagtacgaaattttggatggacagattatttatctaatactaacttgcagaatataaactgacgaattc

SEQ ID NO: 148555 - DNA, 2145 bp, Zea Mays
ccaaggccaggttctagagcgaacaaggcccacgtcacccgtggcccgtcaggcgaagcaggtcttgtgtagactttgagagggattggatattaacggaaccaatcacgcacgggaatgcgattcccagcccacctgtaacgttccagtgggccatccttaactccaagcccaacggccctaccccatctcgtcgtgtcatccactccgccgcacaggcgctcagctccgcaacgccgccggaaatggtcgccgccaccgccaccgccaccgccatggccaccgctgcatcgccgctactcaacgggacccgaatacctgcgcggctccgccatcgaggactcagcgtgcgctgcgctgctgtggcgggcggcgcggccgaggcaccggcttccaccggcgcgcggctgtccgcggactgcgtcgtggtgggcggaggcatcagtggcctctgcaccgcgcaggcgctggccacgcggcacggcgtcggggacgtgcttgtcacggaggcccgcgcccgccccggcggcaacattaccaccgtcgagcgccccgaggaagggtacctctgggaggagggtcccaacagcttccagccctccgaccccgttctcaccatggccgtggacagcggactgaaggatgacttggtttttggggacccaaacgcgccgcgtttcgtgctgtgggaggggaagctgaggcccgtgccatccaagcccgccgacctcccgttcttcgatctcatgagcatcccagggaagctcagggccggtctaggcgcgcttggcatccgcccgcctcctccaggccgcgaagagtcagtggaggagttcgtgcgccgcaacctcggtgctgaggtctttgagcgcctcattgagcctttctgctcaggtgtctatgctggtgatccttctaagctcagcatgaaggctgcatttgggaaggtttggcggttggaagaaactggaggtagtattattggtggaaccatcaagacaattcaggagaggagcaagaatccaaaaccaccgagggatgcccgccttccgaagccaaaagggcagacagttgcatctttcaggaagggtcttgccatgcttccaaatgccattacatccagcttgggtagtaaagtcaaactatcatggaaactcacgagcattacaaaatcagatgacaagggatatgttttggagtatgaaacgccagaaggggttgtttcggtgcaggctaaaagtgttatcatgactattccatcatatgttgctagcaacattttgcgtccactttcaagcgatgctgcagatgctctatcaagattctattatccaccggttgctgctgtaactgtttcgtatccaaaggaagcaattagaaaagaatgcttaattgatggggaactccagggctttggccagttgcatccacgtagtcaaggagttgagacattaggaacaatatacagttcctcactctttccaaatcgtgctcctgacggtagggtgttacttctaaactacataggaggtgctacaaacacaggaattgtttccaagactgaaagtgagctggtcgaagcagttgaccgtgacctccgaaaaatgcttataaattctacagcagtggaccctttagtccttggtgttcgagtttggccacaagccatacctcagttcctggtaggacatcttgatcttctggaagccgcaaaagctgccctggaccgaggtggctacgatgggctgttcctaggagggaactatgttgcaggagttgccctgggcagatgcgttgagggcgcgtatgaaagtgcctcgcaaatatctgacttcttgaccaagtatgcctacaagtgatgaaagaagtggagcgctacttgttaatcgtttatgttgcatagatgaggtgcctccggggaaaaaaagcttgaatagtattttttattcttattttgtaaattgcatttctgttcttttttctatcagtaattagttatattttagttctgtaggagattgttctgttcactgcccttcaaaagaaattttatttttcattcttttatgagagctgtgctacttagattgccttggatgattattttgcttctgcgtttttctggaagtacaaacaaattcaaat

SEQ ID NO: 148556 - DNA, 342 bp, Zea Mays
atgcggattgtcggcagtccgatggcgtcctcgcgatccgtcgaagaatccggccaggacgaagcggtatcgcctgacgccgaccggcggctacgtttcgcgctcctggaggccgcgggagggccatcgatgggcgatggcgagaggtctcgtttggagcaggtggcgccgggcagggcacgcgccgcgcgtggatgttcacgtgcacgcgaagatgcgctcgggcccgcgcagcaccatgtcaccaccccggtcggcggtcgcttgggtgggggcgcggaccaggcctatggcgcccgacggcgacatccaccggagatggaaacgcttgccaggaagtga

SEQ ID NO: 148557 - DNA, 1608 bp, Zea Mays
cgcacttctctctctctccctcaaattccctgcgtgcggtactcctccagctcgccgagcggctcctcccacggcgtcgttctgcgtccttggttctcctcgtcggcgtacctccctgagcgctccctcctcccttgtttccctggcgcatggacttctctttaccccagttccttgccatggcgcacccgaagcttccttctgcttcctacccggcgtccagcccagctgaagctcccctgccgcgcctggcttgccgcgatgctccttggcgctctcctgtctgctcgcgacgcacgcccagcgcctcgtcaagcttctccatgtcggcgtccctgcttccgtactggccggcgagtggtctcgagctctcatggcgctcggacttctgctcgggttcaggctcactgcgcgtgagcctctgcgcgccctgtctctctcccttcgcgtgcgctgctccctgttggcctgcgcagtttctcggttgccacgccggatttcttcctcggtgcccagctcggattttcctatccctccatggccggtcgatcctacccatttccctggccccgcgcgatcctctgccccctgcgcgcagccggtttctctgttcgccgtggagccctgcgggcccagccgttgaagcttccagcccagccgtgctcggcttccctgctccagctcgatcctcccatggcgagctcacggggatgccccttcccctaccggcgtttagccccaactggatctccctgcgcgcgctgctgctttgctgctcggcgctctccgctcggatttagcccagccgctccctgctcggttccgtctgtcgcgtcgtcaccttgctgctcgcccgtccgcgtgccccttcgtccatggtcgccgtccgcagtcgatcccctcacgcaggccacgagctctctattcgccgtggtcgagccgttctcagttgctcgccgtcaaagctccgctgttggctgcgtctgtagtcattaaacgtgtctgttgccgtgaactcgcccctggtacccactctgtctctggtccgcgcttccttcagctcggccaggcggggcatcgttccgtgctgcgctcgcccaagtcgccgccgtcaaatcgtcggagtcgctcgactcgtcaatcgcatctcagccgattgccaattttttattcgccatggtacaacacagctgttagatccgatcttcaaaccgtcatggcatttgtcgacctctggtcctagcccgatccatccgtgcactcactccttgtccatcgggcttcacgcgtgctcgtgtttgtcgtcgagctgttgaacccgtcctccttgctcgtaacttcatcgtcgctagaatcctcactagattcgtgtcctcgccagctcgttccatattcaatctcgtcgttgttccgcgcgtcagcaagaaatcccaagaatcgggtgaagacgaagctagcagcatggtattcaccaagtgcgtgataggaagctcgagccaggatttatcagcattcgtacgagaattgggtcgcgtttgatgctggtgagccgatttataatttttgtaagtttatctgatgatcggattaactagaattattagtcgt

SEQ ID NO: 148558 - DNA, 1199 bp, Zea Mays
gctggcgtcttgtgatcgtgtttgtccttgcaagttcttttcctaccccggccggcccgtggtcgccttccccgggtggttccagagctccagtcacaacgactggtcactctcccttgcctataagtacaggcccctagtgtgatcgatccatttcatcagcagcattacccatcgctcgccaacgtgcagactaaggaagcactgaccggccggtcatggcgaggatccacctctacgtcgtcgccgcggcctgcgccgtcgccctcgcgctcgccggcgacccggacatgctccaggacgtctgcgtggctgactacgcttccccggtcaagctgaacgggttcccgtgcaaggcgaacgtctcggcggacgacttcttcttcgacgggctgaggagcccgggcaacaccaacaacccggcgggctccgcggtgacggcggccaacgtggacaagttcccgggggtgaacacgctgggcgtctccatggcgcgcatcgactacgcgccgggcggccagaacccgccgcacacgcacccgcgcgccaccgagatcatcttcgtcctcgagggcacgctcgaggtcggcttcctcaccaccgccaacaggctcctcagcaagaccgtcgccacgggggacgtcttcgtcttcccccgcggcctcgtccacttccagcagaacagggggcacggccccgccgccgtcgtcgccgccttcaacagccagctccagggcacgcaggccatcgccatgacgctcttcggggccacgccgcccgtgcccaccgacatcctcgccaaggcattccgggtcggcagcggggaggtcgagcacatcaaggcaaacttcgcacccaagtagacgacgaccaggcagcgtgtctgcatttgttggtttctcaataaatatcccgcggcaacgattatattgctcggtcgatgtatcgtgtcgcagcgtgcagttttcgatttgttgttcttcgttttgagacgacattgctgaccacgctagttcttgttgctgctaatttgtgtggagccactgcttgtcctccaataaataacatgatcagccctttagttttatggcttgcgtagctttcacttgcttcatgttaagtacgtccggcaaatcatgatataaacagtgcttattatatgtgtgcttgcaaattgtttgagaaattaagacatatac

SEQ ID NO: 148559 - DNA, 1050 bp, Zea Mays
aatataccgtcgtttttgctccgcaagtcttctctgcgcagcttggctctcttgcctgcttcttgcccagcctgccgtctagctagtttcattcatctatcagacaggtcccgctgctgctccggccgctcggaatggcctcgccgtcgacagaagccccacctctcccgaccctccgagacgtcatcgcccacgatgacgacgacgaccacttcatcgcagaagaggaggaggatgaggagtgggacgacatgagcaagcgcatgtcgcgcctgtccatggaaggttccgaggcgggcgacgccgacgacgaggacgacggcggagaagatgagggggaggaggacgacgacgagttcgacgacgtgcggtcggacgtgaacgccgccgccacgtaccgcgcgtggcctccgcgcgacgagccgcagcaggccccgtcggcggcgtcgctcccgggcacgccggaccgcggcgcgcaggcgccgtggtggcccgggccgagcgccaaggggtacgcgagcgagacggaggcgcggtggccgcccggcgcggacgggcgcggcgggaggcggcagcggcagcggatggcggcgcgggaggtgtggctggagcgcgcgtggcggacgcgcaagcagcggcgccagctgcaggaggaggttcccgtgcccgtggtggtcctcggcggcggcgggggcgactcaccggcgagccgcggcgtggcgatggacatggaggaggtccgcgcgtgccgggacctgggcctcgaccttccctgtgactggaccgtggagatcccatcctgcgcgctctccgtctccggcgtcgacaccgccagcagcggcggcaactcgccggcctccggcagctggcgcatctccagccccggggacgatcccaaggacgtgaaggcgcggctcaaggtgtgggcgcaggcggtggcgctcgcgtccgcatctcgtctcggttcctgaggtgaggcaccaaccaagcaaccgatcaagaccgatgcaaacacaccatgcatgcgtacacgtccacaggacagattat

SEQ ID NO: 148560 - DNA, 351 bp, Zea Mays
ctcccttccctcttctctctcccctcaactctcctcattctccacaggctgagcagcagccgccccattctgcggttcaatcaccgcccacgcagaacccctccgccctccgctccttccagctcgctctctacctgcaccagcctcgctcgccctttgctcgccgccgccatggggaggggaaagttcaagggaaagcccaccggccgccgcaacttctccacactagaggagatcgctgctggtacttcaggtcgccctcgcacctttatgaaggtctgcaaggctaagagaattgatctttttatgggcgaagtgtgaagatggcttgggacgaattctctagatcgc

SEQ ID NO: 148561 - DNA, 3542 bp, Zea Mays
tttttttatgatgtcacagtgatatagaggaaaaacagaagttttgatgcattttacaaccagggacaaaaacatcattttcattctacgttaaccgctgttaccattaatttagacggcagctttataaatatttaatggtatggaagtaatatcgatctttttcatattatcacatactcctagctaaaaggcttaaacgacgccaattgatggttgcctggcggagaggtggcccgtgggccctcgtcgcttcctacctcttctccctgttcccgttccccaatcggcttaaatgcgcaccaaaaccaaatccaatcctcgatcggccgcgtgcacggcatggcgtctccgccgccggatctactaatcgacgacgccaccgccgagattctccttcgcctcccaccggatgacccagcgtgcctcgtgcgcgcctcccttgtctgcaaggcttggcgggagctcctctctagccccatcttcctccgccgctaccgcagattccacggcgcgccgcccctgcttggcttcctctacaacatctacgacgaacgcccctgtgctcgattcgtcgtcgccgccgacgccgccaccaccttccccttctctgcaccggcgttcgaccaattcgatttgtggttcatcgagtgccgccacgggcgcgcgctgctacaaactttcgagcggcatgcgcccgcgcgcctcgtcgtctgggacctcatcacgggcgaccagcagcacataccaatgcccgtgcccgggtacccttacttctgccgcaccgcagctgttctctgcgccgcggatggctgcgatcatcttgactgccacgggggcccatacctcgtcgtcgtcataggcgcctacgaagaagatactctcaggtgggcgagcgtctactcatcggagactggcgtatggactacgtcatcctccattcaaattgatgcctacgtcgagcaaaggcccagcctccttgccggtgacgcgctctactttagcgcacaggaaggcaaaataattgtcaaatacgacctcaatggacagagcctacatgtgatcaatgcgccggatatgtttgagccaacagagggcattgctgtgaccgtggaggacggtggtttgggactcgccggagtgaaggatggcaacctccacctgtggtcatggcaggctggtcctggcggcattgcggaatgggtgcaaggcagaatcgtaaagttgaggacgctcttccctattcttaaaccgctggactcacttgatgtgattggcttccaagagggcacagataccattttcattagcatagatatggaggtctttgcagtcacgctcagatcggagcaggtgaagaaggtaggcaagacgggctccaaatatgccatggcaccctatgtgagcttctacactccagatcttgcaaagggcagattgctatcaccatgaagatgcagtgatccatccattaacatggccgtgacactattgacttcttaaggagatgatgagttaaagtgtttttccagtttggacggttatggaaaaaaagcaagttaccatgttcattcagaaaagtttagtttcttacctgtgcagtttaagtaaggaactgtaagaacaggatatcatcgtcaaaatgtctagtctattagttaagctgtttaagggattggtttgttttattgtggccttttcgctattgttattttataagggatgccctgtgtctatagaaagtgaggctttctccagcaaatcgtgcatatagccgtgcaaaacactgttttgcactgtagatagcactatttgcagagtggagttgaaataggtggtgggataggtaatgagatatgagagctgctggagatagcctaactagaagaactgcacaactctagtctgagcagcttataaaatagcaatagatagcaatcagtaccgatcggtttagctccgatgtcggtcggttcgaccggccagtactgatccatgcactggagaatcagttggtaccgacccttaccggtgagtaccgaccacatgttgcacgtgccatatcctgattgtttcacacctttttgactgtttgaagttcgaaacatttcaaaaaatatatataaattttctaaaaacaactggctcacttgatgtgattggcttccaagagggcacatataccattttcattagcatagatatggaagtcttcgcagtcatgctcagatcggagcaggtgaagacggtaggcaagacaggctccaaatatgccatggcaccctatgtgagcttctacactccaggtactggcattgtgctcatctttaacctttacatcttatatatagatgtttgtgttgtctgtgatctgcaaaatttagtgaaacaaagggtaagtaagattttacttatacaggaatatgaatcatggtatctgtgcataggagtcagcagcaatgtatttatgaaattagaagtctgcattctcatatgcaccacattacttgtacggttacgggtatttaaccctagtatgtgcaacacagttttgcatctgactatatgtttttcgttgtgatttatgtgtcatactataagagttagcaaaactagattgggatgtatgaacttatagttttttgtggttgttctcactagcttaatcttggtctggctctagatattaagaaacattcatgaaattagctagttgtttatggaacttgatgatctattgttcttttacttactttatttatgcttcaatgacctatctgattcctgatgcatgatccaaatccatgtacatgtctcaaatatgtgtaactgttacatggttgaaagttctctgcattgtatcttttcagatcgtgcaaagggatttctatcaccatgaagatgcagtgatccatccattaacgtgaccgtggtactattgactttttaaaggaggtgatgagttaaggccctccgcactcatactaatataaatttctaccctaaaaagaatattctgtcctagtcagcaaaattctttaatctataccacaattctccgcacacatgtttactctatatctcaaccctatactaattatcatatataattttatttcttcccaattctctttctctttgcactcaactattgaaagacacaggttgtccgcccgtgtacggcgagtaggagggaacaaactctacaaaagtacaaatagagttttccatgctctctcaaattttacagttgcatttacaaagtgtctgcgccatttgtctactgcatatgtataccgtttgctttggcgttcgtcaccgcggccagcctaagtgttttgtttccggtttggacggtttatgggaaaaaaagtaagttactatgttcattcagactatagtttcttacctgtgcggtttaagcaaggaacaggatatcatagtcaaaatgcctagtctgttggttaagctgttcaagggattggttggtttcattgtggcctttttccttcttgttattttataatggatgccttgtgttt

SEQ ID NO: 148562 - DNA, 1747 bp, Zea Mays
tttttttatgatgtcacagtgatatagaggaaaaacagaagttttgatgcattttacaaccagggacaaaaacatcattttcattctacgttaaccgctgttaccattaatttagacggcagctttataaatatttaatggtatggaagtaatatcgatctttttcatattatcacatactcctagctaaaaggcttaaacgacgccaattgatggttgcctggcggagaggtggcccgtgggccctcgtcgcttcctacctcttctccctgttcccgttccccaatcggcttaaatgcgcaccaaaaccaaatccaatcctcgatcggccgcgtgcacggcatggcgtctccgccgccggatctactaatcgacgacgccaccgccgagattctccttcgcctcccaccggatgacccagcgtgcctcgtgcgcgcctcccttgtctgcaaggcttggcgggagctcctctctagccccatcttcctccgccgctaccgcagattccacggcgcgccgcccctgcttggcttcctctacaacatctacgacgaacgcccctgtgctcgattcgtcgtcgccgccgacgccgccaccaccttccccttctctgcaccggcgttcgaccaattcgatttgtggttcatcgagtgccgccacgggcgcgcgctgctacaaactttcgagcggcatgcgcccgcgcgcctcgtcgtctgggacctcatcacgggcgaccagcagcacataccaatgcccgtgcccgggtacccttacttctgccgcaccgcagctgttctctgcgccgcggatggctgcgatcatcttgactgccacgggggcccatacctcgtcgtcgtcataggcgcctacgaagaagatactctcaggtgggcgagcgtctactcatcggagactggcgtatggactacgtcatcctccattcaaattgatgcctacgtcgagcaaaggcccagcctccttgccggtgacgcgctctactttagcgcacaggaaggcaaaataattgtcaaatacgacctcaatggacagagcctacatgtgatcaatgcgccggatatgtttgagccaacagagggcattgctgtgaccgtggaggacggtggtttgggactcgccggagtgaaggatggcaacctccacctgtggtcatggcaggctggtcctggcggcattgcggaatgggtgcaaggcagaatcgtaaagttgaggacgctcttccctattcttaaaccgctggactcacttgatgtgattggcttccaagagggcacagataccattttcattagcatagatatggaggtctttgcagtcacgctcagatcggagcaggtgaagaaggtaggcaagacgggctccaaatatgccatggcaccctatgtgagcttctacactccagatcttgcaaagggcagattgctatcaccatgaagatgcagtgatccatccattaacatggccgtgacactattgacttcttaaggagatgatgagttaaagtgtttttccagtttggacggttatggaaaaaaagcaagttaccatgttcattcagaaaagtttagtttcttacctgtgcagtttaagtaaggaactgtaagaacaggatatcatcgtcaaaatgtctagtctattagttaagctgtttaagggattggtttgttttattgtggccttttcgctattgttattttataagggatgccctgtgtctatagaaagtgag

SEQ ID NO: 148563 - DNA, 1688 bp, Zea Mays
cggattttgtcgtcatcattataatcatgttccgtgacatcgcacggacaagtacctagtataatgattaagggcacttcgtccaaactgtttgctagagttacttatcaaatatgacggtacaccgaaagagcattgtactataaatatgaagaagaagaaaaatagacaagtgtgaaaaaaaggaaacgagaacgagaccaagcgaattgggggcggcgcggcagccagagtcatctggaaggttcgatcgcctgtcgcctcgccgccatccattccttcccttgcgcccgaagaaagacacggaaattccccccaactgataaaaggaccatggtactcgcaaagcgataggaagccaccgaaggagagaattggatagcagagagtttgcgtgtgactgtggaagcagagatggggtccggcatgagccgcggccggcggcgcggtttcggcgcaggggcgtcgggagggatgctcccactgctggcgcttcaggttctgatcgagtacggccgcgcgggcgcctctcggccgcccgtgacggcggcgttgctcgccggcaacgcgctcatctatctccgtcccggggcgctcgacgggatcctgccctctgtcacacgcgtctccttcaatccgcggctcatcgtcgagaatggcgacttggtgcgcttcttcttgtcaccattctaccacttgagcgaaagccacctgttctacaatatgacatcgctcctatggaagggtattcagcttgaaacatccatgggtagtgtcgagttcgcttccatggttgctgcattgcttgggctgtcacagggcatcgcgctgctcttgtccaaaggcctactcttgcttggtgattatactgcgtactacgaccaatacgcggttgggttctctggtgttctgtttgccatgaaggttgtgctgaacgcctggtcagaagattttgtctatctgcatgggatggtcattccggcgaaatacgctgcctgggctgagttgatcctcatccaggtcttcattcctggcacatcttttcttggccatctcagtggaatacttgctggattggtttacctttggctgaagcgggcgttgaatgggccagatcccctcactcttctggtgtcaagcattaccaaagtcgtgacctggccagtaagatttgcgcagaatcttctatggtctgcccatccacagggacgctttagaggccggggcagggttgggcgccggcaatcagcaagagatactcctcgaggtctatggagatgcccagcctgcacctatgacaactcagtttccacagatatctgtgagatgtgcagcactgcacgagaggaccatgatttttcgctgaggcagtatcatcaggctggaggtactggagaactcacagttgatgagatacgccgaaggaggctgcaaagattcggtagatgatgtaaatccattgttatcagcacactttgtgcggcgctgaacgaagctctatatgagtatgtatgatagctccattcctctgctacatagcgtaggcatatttggttcttctcgtgatggagaatgctttacattattgaattgtttctcatttttgaaggagacagttactgatgtaattttaggtacttcaaagccatagaagtatagtaatacaaattatcaagggcatatataaa

SEQ ID NO: 148564 - DNA, 1824 bp, Zea Mays
tattctccgtaaatctggttctccactctctcttggactaatatctccaacattttctcgctactgaccagtgaccacccttccgctcccttctcacctataggtagcaaccttgagatccagccaagatccagccatgagggagattctccacatccagggtggacagtgcggcaaccagatcggttccaagttctgggaggtcgtctgcgacgagcatggtatcgaccccaccggacgctatgtcggcacctccgacctccagctcgagcgcgtcaatgtctactacaacgaggcctcatgcggccgcttcgtgccgcgcgctgtgctcatggacctcgagcccggcaccatggacagcgtccgcaccgggccgtacggacagatcttccggcccgacaacttcgtcttcggccagtctggtgcagggaacaactgggccaagggccactacacagagggcgctgagctcatcgactctgtgcttgacgtcgtgaggaaagaggcggagaactgcgactgccttcaaggattccaagtttgccattcccttggaggaggcacaggatctggaatgggcacccttctcatctcaaagatcagggaggagtaccctgatcggatgatgctcactttttctgtctttccctcacccaaggtttcagacactgttgttgagccatacaatgcaacactgtcagtccatcagttggttgagaatgctgatgaatgcatggttcttgacaatgaggcactttacgacatttgcttccgaactctgaagcttacgacgcctagctttggagacctgaaccacttgatcagtgcaacaatgagtggagtgacttgctgcctccgcttccctggacagctgaactcggacctgcgcaagctcgcagtcaacctgattccgttccctcgcctgcacttctttatggtcggctttgcgccactcacctcgcgtggctcgcagcagtaccgtgctctcactgtccctgagctaacccagcagatgtgggatgccaagaacatgatgtgtgctgctgacccgcgtcatggccgctatctcacagcatctgccatgttccgtggaaagatgagcaccaaggaggtggacgagcaaatgatcaatgtccagaacaagaactcgtcctacttcgtggagtggatccccaacaatgtgaagtccagtgtttgtgatatcccgccgcgcggcctctccatggcctccaccttcattggcaattccacctccatccaggagatgttccgccgtgtgagcgagcagttcactgctatgttcaggaggaaagctttcttgcattggtacactggcgagggcatggatgagatggagttcaccgaagctgagagcaacatgaacgatctggtgtctgagtaccagcagtaccaggatgccactgccgatgaggaggagtacgaggacgaggaggaggtccatgacgagtaaggtgatcttggaccctgctgcatattgtaccgtctctggacctggctttctttcaagctggagcttaggtttggttgttgtattcgaacatgctatgatgggtatgatgtagtagtactttcgtgggtagcatgctgtatgctaccacttgccctctttcacctagctgcttgatttgctacttgtccgacctcttgtgtggctggacctcaatcccatcgctcttgccagaaccacatttgccgttgtgccatttagtgaatccttgtatgattgcctgccatcgtagttctttctccaggatctagatgcagctgatatttcctaatttgtacttgcgcgttcagtctaca

SEQ ID NO: 148565 - DNA, 1618 bp, Zea Mays
aaaacttttcaaaatccaagcgccccaaaggccgttttcgaacccgacgctgccgtccgtccgatgggaacgatctgccggcgccaggcggccgaggccgacgacggcgaacacgtctgggccgcccctccggtgccctagcccccacgcccactataaaatcagctccatttctggacactctcatttcatttaccacaccctgctctcgctcttgttgtgacggtcgattcgcttgtacaaggtagcaaccttgagatccagccaagatccagccatgagggagattctccacatccagggtggacagtgcggcaaccagatcggttccaagttctgggaggtcgtctgcgacgagcatggtatcgaccccaccggacgctatgtcggcacctccgacctccagctcgagcgcgtcaatgtctactacaacgaggcctcatgcggccgcttcgtgccgcgcgctgtgctcatggacctcgagcccggcaccatggacagcgtccgcaccgggccgtacggacagatcttccggcccgacaacttcgtcttcggccagtctggtgcagggaacaactgggccaagggccactacacagagggcgctgagctcatcgactctgtgcttgacgtcgtgaggaaagaggcggagaactgcgactgccttcaaggattccaagtttgccattcccttggaggaggcacaggatctggaatgggcacccttctcatctcaaagatcagggaggagtaccctgatcggatgatgctcactttttctgtctttccctcacccaaggtttcagacactgttgttgagccatacaatgcaacactgtcagtccatcagttggttgagaatgctgatgaatgcatggttcttgacaatgaggcactttacgacatttgcttccgaactctgaagcttacgacgcctagctttggagacctgaaccacttgatcagtgcaacaatgagtggagtgacttgctgcctccgcttccctggacagctgaactcggacctgcgcaagctcgcagtcaacctgattccgttccctcgcctgcacttctttatggtcggctttgcgccactcacctcgcgtggctcgcagcagtaccgtgctctcactgtccctgagctaacccagcagatgtgggatgccaagaacatgatgtgtgctgctgacccgcgtcatggccgctatctcacagcatctgccatgttccgtggaaagatgagcaccaaggaggtggacgagcaaatgatcaatgtccagaacaagaactcgtcctacttcgtggagtggatccccaacaatgtgaagtccagtgtttgtgatatcccgccgcgcggcctctccatggcctccaccttcattggcaattccacctccatccaggagatgttccgccgtgtgagcgagcagttcactgctatgttcaggaggaaagctttcttgcattggtacactggcgagggcatggatgagatggagttcaccgaagctgagagcaacatgaacgatctggtgtctgagtaccagcagtaccaggatgccactgccgatgaggaggagtacgaggacgaggaggaggatctagatgcagctgatatt

SEQ ID NO: 148566 - DNA, 1849 bp, Zea Mays
ccaggcggccgaggccgacgacggcgaacacgtctgggccgcccctccggtgccctagcccccacgcccactataaaatcagctccatttctggacactctcatttcatttaccacaccctgctctcgctcttgttgtgacggtcgattcgcttgtacaagtgaccacccttccgctcccttctcacctataggtagcaaccttgagatccagccaagatccagccatgagggagattctccacatccagggtggacagtgcggcaaccagatcggttccaagttctgggaggtcgtctgcgacgagcatggtatcgaccccaccggacgctatgtcggcacctccgacctccagctcgagcgcgtcaatgtctactacaacgaggcctcatgcggccgcttcgtgccgcgcgctgtgctcatggacctcgagcccggcaccatggacagcgtccgcaccgggccgtacggacagatcttccggcccgacaacttcgtcttcggccagtctggtgcagggaacaactgggccaagggccactacacagagggcgctgagctcatcgactctgtgcttgacgtcgtgaggaaagaggcggagaactgcgactgccttcaaggattccaagtttgccattcccttggaggaggcacaggatctggaatgggcacccttctcatctcaaagatcagggaggagtaccctgatcggatgatgctcactttttctgtctttccctcacccaaggtttcagacactgttgttgagccatacaatgcaacactgtcagtccatcagttggttgagaatgctgatgaatgcatggttcttgacaatgaggcactttacgacatttgcttccgaactctgaagcttacgacgcctagctttggagacctgaaccacttgatcagtgcaacaatgagtggagtgacttgctgcctccgcttccctggacagctgaactcggacctgcgcaagctcgcagtcaacctgattccgttccctcgcctgcacttctttatggtcggctttgcgccactcacctcgcgtggctcgcagcagtaccgtgctctcactgtccctgagctaacccagcagatgtgggatgccaagaacatgatgtgtgctgctgacccgcgtcatggccgctatctcacagcatctgccatgttccgtggaaagatgagcaccaaggaggtggacgagcaaatgatcaatgtccagaacaagaactcgtcctacttcgtggagtggatccccaacaatgtgaagtccagtgtttgtgatatcccgccgcgcggcctctccatggcctccaccttcattggcaattccacctccatccaggagatgttccgccgtgtgagcgagcagttcactgctatgttcaggaggaaagctttcttgcattggtacactggcgagggcatggatgagatggagttcaccgaagctgagagcaacatgaacgatctggtgtctgagtaccagcagtaccaggatgccactgccgatgaggaggagtacgaggacgaggaggaggtccatgacgagtaaggtgatcttggaccctgctgcatattgtaccgtctctggacctggctttctttcaagctggagcttaggtttggttgttgtattcgaacatgctatgatgggtatgatgtagtagtactttcgtgggtagcatgctgtatgctaccacttgccctctttcacctagctgcttgatttgctacttgtccgacctcttgtgtggctggacctcaatcccatcgctcttgccagaaccacatttgccgttgtgccatttagtgaatccttgtatgattgcctgccatcgta

SEQ ID NO: 148567 - DNA, 1900 bp, Zea Mays
aaaacttttcaaaatccaagcgccccaaaggccgttttcgaacccgacgctgccgtccgtccgatgggaacgatctgccggcgccaggcggccgaggccgacgacggcgaacacgtctgggccgcccctccggtgccctagcccccacgcccactataaaatcagctccatttctggacactctcatttcatttaccacaccctgctctcgctcttgttgtgacggtcgattcgcttgtacaaggtagcaaccttgagatccagccaagatccagccatgagggagattctccacatccagggtggacagtgcggcaaccagatcggttccaagttctgggaggtcgtctgcgacgagcatggtatcgaccccaccggacgctatgtcggcacctccgacctccagctcgagcgcgtcaatgtctactacaacgaggcctcatgcggccgcttcgtgccgcgcgctgtgctcatggacctcgagcccggcaccatggacagcgtccgcaccgggccgtacggacagatcttccggcccgacaacttcgtcttcggccagtctggtgcagggaacaactgggccaagggccactacacagagggcgctgagctcatcgactctgtgcttgacgtcgtgaggaaagaggcggagaactgcgactgccttcaaggattccaagtttgccattcccttggaggaggcacaggatctggaatgggcacccttctcatctcaaagatcagggaggagtaccctgatcggatgatgctcactttttctgtctttccctcacccaaggtttcagacactgttgttgagccatacaatgcaacactgtcagtccatcagttggttgagaatgctgatgaatgcatggttcttgacaatgaggcactttacgacatttgcttccgaactctgaagcttacgacgcctagctttggagacctgaaccacttgatcagtgcaacaatgagtggagtgacttgctgcctccgcttccctggacagctgaactcggacctgcgcaagctcgcagtcaacctgattccgttccctcgcctgcacttctttatggtcggctttgcgccactcacctcgcgtggctcgcagcagtaccgtgctctcactgtccctgagctaacccagcagatgtgggatgccaagaacatgatgtgtgctgctgacccgcgtcatggccgctatctcacagcatctgccatgttccgtggaaagatgagcaccaaggaggtggacgagcaaatgatcaatgtccagaacaagaactcgtcctacttcgtggagtggatccccaacaatgtgaagtccagtgtttgtgatatcccgccgcgcggcctctccatggcctccaccttcattggcaattccacctccatccaggagatgttccgccgtgtgagcgagcagttcactgctatgttcaggaggaaagctttcttgcattggtacactggcgagggcatggatgagatggagttcaccgaagctgagagcaacatgaacgatctggtgtctgagtaccagcagtaccaggatgccactgccgatgaggaggagtacgaggacgaggaggaggtccatgacgagtaaggtgatcttggaccctgctgcatattgtaccgtctctggacctggctttctttcaagctggagcttaggtttggttgttgtattcgaacatgctatgatgggtatgatgtagtagtactttcgtgggtagcatgctgtatgctaccacttgccctctttcacctagctgcttgatttgctacttgtccgacctcttgtgtggctggacctcaatcccatcgctcttgccagaaccacatttgccgttgtgccatttagtgaatccttgtatgattgcctgccatcgta

SEQ ID NO: 148568 - DNA, 301 bp, Zea Mays
aaaacttttcaaaatccaagcgccccaaaggccgttttcgaacccgacgctgccgtccgtccgatgggaacgatctgccggcgccaggcggccgaggccgacgacggcgaacacgtctgggccgcccctccggtgccctagcccccacgcccactataaaatcagctccatttctggacactctcatttcatttaccacaccctgctctcgctcttgttgtgacggtcgattcgcttgtacaaggtaatgatgtggaatgctttgttgcttgtctcacctatgtgtgattatgtttttttt

SEQ ID NO: 148569 - DNA, 2363 bp, Zea Mays
tctaaaaatcgcacccgcaggccgcaccgcagtcgtcaccaaacagcgccgcgctccgcattgcgctagggttttagaactcttcctccggtcctccccgttatccctccaaaaggcagcgcccgctagggttttagccgccgcctccttccctctcctcctccacgtctcctcaacagccgctgccacccggagccttcccgcagcgacgccatgtgggctcttcgccgagctggcaaccccctcaggttccgtgcccaaaaagttgcaagtgcccatgtctgtgcgagtcttgaggtgctgctagctgctgatgcaaagaatgtagaagagcaccatgaggcagactgccagaaaatgtgctgctgtcataaaccaaggtcaccagcctttcaattgtcattttcatctggccagtttgcttgcagtaggggtttctcctctcagccaggtgcaaattctggtgacaaagctgatgagttagaggacggattttctgatctcgaggttccaccagcagctgttcaaaacgatgacgggttggcatctgaagatagttctgatgaggatgctgctgacgaatttggcttgcctgatgtggatgctgatgcaaaacctgagaaggagcacactagaagattatctgattctattctcctcaagacattatctgattctattctcctcaagactgtgttggaagctccgaggcatcaagtcacttcagcacttgagaaatgggcaaaggatggcaatgcatttgataggggtgaactctattatgttcttcttaatcttcgaaagcggcattggtactccaaagccttggagcttgttgagtgggttcaaaaatcacagctattcgaatttgtagagcgtgattatgctgcacatcttgatttaacagctaaggtctatggtcttcataaagcagaacagactattgagaaaattcctgcatcttgtaggggtgagattgtttatagaacacttttggccaattgtgtttctgcatccaatataaaaaaatcggagcaagtttttaataggatgaaggatcttggatttccggttacacaattttctttcaatcagcttctgttactctacaaaaggctggacaggaagaagattgctgatgttcttgcaatgatggaaaaggaggatgtgaaaccatctctctttacttacaagattcttgtagatgccaagggttcagttggagatatagaagctatggagaaagtgattgaatcaatggagaaagatagcattgagccagatctcacgtttaatgctacaattgccagacactacatattttatggccagcgtgagaaagcagaggcacttctgaaggcaatggagggtgatgatatccagaaaaatcgtgctgcttgcaagactttattacctttacatgcttttctgggcaatagtgatgctgtggaaagaatttggaaggcgtgtgaggataatactcgcgtagctgagtccgtgtctgctatagaggcctttggtaagcttggtgatgttgaaaaggcagagaaggtttttgaggatatgcttgtgcattggaaaacactctcttccaaattctacaacgcgttgctaaaggtgtatgctgatcacaacctcttagacaagggtaaggaactagcaaagcggatggatgagaaccgtgtcaggtttggggccccaactctggatgcacttgtgaagctatacgttgaggctggagaggtggagaaagctgagtccctagtgcacaagctatctatacagaaccacatcaagcctatatacaacacatacatgacgctgcttgacagctactcaaagaaaggagacgtccgcaactcagagaaagtgttcaacaagttgcggcagtccggctacactgggaggatcaggatgtaccaggtgctgctccatgcttatgtacgtgctaaggcccctgcttatggattcagagagaggatgaaggctgacaacattttccccaacagtgttgtgtcaactttgattgccgctaccgatccgtttgtcaagaagaaatcgatatctgacttgctcgattaggttatggagtagtgtgagatccatcatgtttccgtgcaacgcatgtgctgccttttttttttttgcattctgctaaagaatacggcgggataataatgtgtcctagtcttgtaatgaactacaagtgtctttgcatttggactggttcgcttgtgagtcatagagattgctgaactcgtgagtcatggaaattggcaactgtgtgctatttgttcttattttgttgttactcatttcatcaatcaagtagaatcaagatgagccttttgcacatcattccg

SEQ ID NO: 148570 - DNA, 1700 bp, Zea Mays
agaccgacatgttactttaccctaaacctttgcagtttgcactgccaccgcgaaggcacacagccgccgtttcttttacttgcgctcggcacgcaggcgacggctgcggcgctcaggttggggttctcatcgacggcgtcagcggcttcccctcccgcctctcgccagtcgcttcgcgccctcgcctccggtcctccgcacactggccggtgaccctgcatagtattatctgattttcctggaggccacattttaaggactgaggttacaatggcagatgccagccctagaacagaaacatcaacagatgatactgacgacaataacgggcttgaaccaggcagaggtggtcttgttgcttctgactccagtgacagatccaaagacaaacatggagatcaaaagacattgcgtcgccttgctcaaaatcgtgaggctgcaaggaagagccgactaaggaagaaggcatatgttcaacagttggagaatagcaggctaaaacttacccaactagagcaagagctgcaaagagctcgtcagcagggcatttttatatctagttcagttgatcagtcacactccatgagtggaaatggggcattggcctttgatatggagtatgcgaggtggttggaagagcacaatcggcaaattagtgaactaagggctggtgtcagtgctcatgcaagtgatactgatcttcgaagtgttgttgataagatcatgtcacactatgatgagatttttaggctcaaaggcaatgcagccaaggcagatgtttttcacgtcttatctggcatgtggaagacaccggcggagaggtgttttttgtggctaggaggtttccgaccatctgaggttttaaagcttctttcgacacaacttgaacctctcaccgaacagcagctgtcagggataagcaaccttcagcaatcttcacagcaggctgaggatgctctttcacaaggaatggaggcccttcagcaatcattggccgaaaccttggctgggtctctttcgtcttctggatcaacaggaaatgtggcaaactacatgggtcaaatggccatggctatgggaaaacttggaacgcttgagaatttccttcgtcagactctacaacagatgcaaaggatcctgaccactagacagtcagctcgggcgctacttgtgataagtgattactcttcacgtctccgtgccctaagctctctctggcttgctcggcccaaggaatagcaagaacatgctatttgactgcaatacttttcacaatttggttttcaatggtcaggagatttgacaaggctgcgacagacttgattcggacatatctgcacatactatgacccaaatggaaggggatgttcatgtagcttaggctgcttagctttgtagttaagtgttgttgatgtatcattaccaactgctgtaaaattctcactctgtatgcccctgatttgcagcgaaccattagaatgcacattgatgttcacctgtcgattttttttgttcactcttaggaacacataatgctctgcccagtatcatctaaccagggtatatggctgattcaccgcactaaaacttgcatagttgatcattcagcattgctgccattgtcgttttgtatgttttccctcgtcatgcgtgagggggaaccgcaccatttactttgttaatataatatttgttggttt

SEQ ID NO: 148571 - DNA, 1721 bp, Zea Mays
agaccgacatgttactttaccctaaacctttgcagtttgcactgccaccgcgaaggcacacagccgccgtttcttttacttgcgctcggcacgcaggcgacggctgcggcgctcaggttggggttctcatcgacggcgtcagcggcttcccctcccgcctctcgccagtcgcttcgcgccctcgcctccggtcctccgcacactggccggtgaccctgcatagtattatctgattttcctggaggccacattttaaggactgaggttacaatggcagatgccagccctagaacagaaacatcaacagatgatactgacgacaataacgggcttgaaccaggcagaggtggtcttgttgcttctgactccagtgacagatccaaagacaaacatggagatcaaaagacattgcgtcgccttgctcaaaatcgtgaggctgcaaggaagagccgactaaggaagaaggcatatgttcaacagttggagaatagcaggctaaaacttacccaactagagcaagagctgcaaagagctcgtcagcagggcatttttatatctagttcagttgatcagtcacactccatgagtggaaatggggcattggcctttgatatggagtatgcgaggtggttggaagagcacaatcggcaaattagtgaactaagggctggtgtcagtgctcatgcaagtgatactgatcttcgaagtgttgttgataagatcatgtcacactatgatgagatttttaggctcaaaggcaatgcagccaaggcagatgtttttcacgtcttatctggcatgtggaagacaccggcggagaggtgttttttgtggctaggaggtttccgaccatctgaggttttaaagcttctttcgacacaacttgaacctctcaccgaacagcagctgtcagggataagcaaccttcagcaatcttcacagcaggctgaggatgctctttcacaaggaatggaggcccttcagcaatcattggccgaaaccttggctgggtctctttcgtcttctggatcaacaggaaatgtggcaaactacatgggtcaaatggccatggctatgggaaaacttggaacgcttgagaatttccttcgtcaggctgacaacctgcggctgcagactctacaacagatgcaaaggatcctgaccactagacagtcagctcgggcgctacttgtgataagtgattactcttcacgtctccgtgccctaagctctctctggcttgctcggcccaaggaatagcaagaacatgctatttgactgcaatacttttcacaatttggttttcaatggtcaggagatttgacaaggctgcgacagacttgattcggacatatctgcacatactatgacccaaatggaaggggatgttcatgtagcttaggctgcttagctttgtagttaagtgttgttgatgtatcattaccaactgctgtaaaattctcactctgtatgcccctgatttgcagcgaaccattagaatgcacattgatgttcacctgtcgattttttttgttcactcttaggaacacataatgctctgcccagtatcatctaaccagggtatatggctgattcaccgcactaaaacttgcatagttgatcattcagcattgctgccattgtcgttttgtatgttttccctcgtcatgcgtgagggggaaccgcaccatttactttgttaatataatatttgttggttt

SEQ ID NO: 148572 - DNA, 2581 bp, Zea Mays
cccggcgtgcgatagccattcgtatccccggccccggggcggccacacccccggccccgctccgaagaatcgcagtcgcagcccgcacggccgcaccgcaccactcccgcacttccgcgcggcgcgaactcggcttatcgacaccaccacggcaccgctacagcctacagctcgagagaggaggggaaaaaaatctcagccaccaccggcagccgcgggagcttcgcgtgcgccgcttgctcactgcccgcacacgtacgccagaacccctctctcccccctccttctgcagccatgctcctccacctgcttccgctctcctgccccgcgccgccgttccacctgcgcaggaccggcggctcgccgcggacgccgcgggtccgggccggcgacaggaccaggacacgggggttccgggggacggacgtggagccggagacagctccgcgaaggcgccgcggccgcgatggcgacgatcctcaagcggctgggagcggtggagacaccggggcgctgctggcgtcggtcaggaggcttctgctctccgaggcgcctgcggcggcggagggagacagtgaggaggaggagcagggacagttccccaagcgttgggccatcgtcttcctctgcttctccgcatttctactctgcaacatggaccgcgtaaatatgagcattgctattctgcctatgtccgcagagtttggttggaacccacagactgttggtctcatccagtcatctttcttctggggctacctcctaactcagatagctggagggatatgggcagatactgttggaggaaagactgtccttggttttggtgtggtttggtggtccatagctacagctcttactcctgttgcagcacatcttggcttgccatttcttcttgttgtgcgggctttcatgggaattggtgagggggttgcaatgcctgcaatgaacaatattctttcgaaatgggttcctgtatcagagaggagcagatcattgtctcttgtgtacagtggaatgtaccttgggtcagttacaggacttgcattttcccccttgctgatacataagttcggttggccatcagtcttcttttcatttggatccctagggcttgtttggttcacgacatgggcaaccaaggcatatagttccccacttgaagatcctggaatcagcgctgcagaaaagaagcttattgctagtcagagcacagcaggcgaacctgttaaaacaattccatggagattaatactatcaaaaccacctgtttgggcacttatagtttctcatttctgccataactggggaactttcattttgctcacatggatgcccacatactacaatcaggttctgaaattcaacctcatggaatctggccttatctgtgttcttccctggttcaccatggcggtttctgcaaatgttggtggttggattgcagacacacttgtcagcagaggagtatctgtgacaactgttcgtaagatcatgcaatcaatcggattcttggggccagcattttttcttactcaactaagccatgttaattcgcctgccatggcggtgttgtgcatggcttgtagccagggaactgatgcattttcgcagtctggtctatactcaaaccatcaagatataggccctcgatatgcaggtgtactgcttggtctttccaacacggctggggtcttagcgggtgtatttggcacagcagcaacaggatacatcttgcagcatggttcttgggacaacgtattcgagttatcagtagtgctttatctggtagggactttggtatggaatgtattctcaactggcgagaagattcttgattgaagggtgtatgtacacagtatgcttacagttcgtagtgacaaactcatttcggatcgacaacttgacccctggacataatacacttcaagataacaaatgtgtcatcgcgcagcacgagaagtatcaaccttaacatcccggatattaaattgcctggttgtgatgttgctctggtagagacgatttgaagcatatggaattatggatgagttgagcgatgcacccgttccgagcatgccactgtatattgtgttgagcataggtatcatgtacagcatggtagaaagattcgtcatacagagtagttttttttttacttgtacaatttttccctcttgaatagtttgttcctgtaacagcccgacgtagataaaaacaaggaaacctggggatgggggtactactaatgcaaacatttggtgaatatttatccatttgcggactgagtctttaggggtagtttgaaaacttaaatcctatctggattcctgatgattaaggaaaaaaattaagctattttttccctcaatctcaggacatcgcggaggaaatttaagttttcaaactatatgccaaattgttacaatatctgtatcgttgtttggtatttctttaaagatgaagtgaagttcaacctcaaatgtttgagtttgaccgtaggaattgagttgcttaaagatgtagtacagttcacccaataaggggcgtttggttgcttgtatgactgagtcaggcttgt

SEQ ID NO: 148573 - DNA, 1760 bp, Zea Mays
cccggcgtgcgatagccattcgtatccccggccccggggcggccacacccccggccccgctccgaagaatcgcagtcgcagcccgcacggccgcaccgcaccactcccgcacttccgcgcggcgcgaactcggcttatcgacaccaccacggcaccgctacagcctacagctcgagagaggaggggaaaaaaatctcagccaccaccggcagccgcgggagcttcgcgtgcgccgcttgctcactgcccgcacacgtacgccagaacccctctctcccccctccttctgcagccatgctcctccacctgcttccgctctcctgccccgcgccgccgttccacctgcgcaggaccggcggctcgccgcggacgccgcgggtccgggccggcgacaggaccaggacacgggggttccgggggacggacgtggagccggagacagctccgcgaaggcgccgcggccgcgatggcgacgatcctcaagcggctgggagcggtggagacaccggggcgctgctggcgtcggtcaggaggcttctgctctccgaggcgcctgcggcggcggagggagacagtgaggaggaggagcagggacagttccccaagcgttgggccatcgtcttcctctgcttctccgcatttctactctgcaacatggaccgcgtaaatatgagcattgctattctgcctatgtccgcagagtttggttggaacccacagactgttggtctcatccagtcatctttcttctggggctacctcctaactcagatagctggagggatatgggcagatactgttggaggaaagactgtccttggttttggtgtggtttggtggtccatagctacagctcttactcctgttgcagcacatcttggcttgccatttcttcttgttgtgcgggctttcatgggaattggtgagggggttgcaatgcctgcaatgaacaatattctttcgaaatgggttcctgtatcagagaggagcagatcattgtctcttgtgtacagtggaatgtaccttgggtcagttacaggacttgcattttcccccttgctgatacataagttcggttggccatcagtcttcttttcatttggatccctagggcttgtttggttcacgacatgggcaaccaaggcatatagttccccacttgaagatcctggaatcagcgctgcagaaaagaagcttattgctagtcagagcacagcaggcgaacctgttaaaacaattccatggagattaatactatcaaaaccacctgtttgggcacttatagtttctcatttctgccataactggggaactttcattttgctcacatggatgcccacatactacaatcaggttctgaaattcaacctcatggaatctggccttatctgtgttcttccctggttcaccatggcggtttctgcaaatgttggtggttggattgcagacacacttgtcagcagaggagtatctgtgacaactgttcgtaagatcatgcaatcaatcggattcttggggccagcattttttcttactcaactaagccatgttaattcgcctgccatggcggtgttgtgcatggcttgtagccagggaactgatgcattttcgcagtctggtctatactcaaaccatcaagatataggccctcgatatgcagtaatctcttcctccatgttctatagaacgtcttatgtcatgcaaaacttataacctcattattcttgtgtgcaaaattctggaaccttaaacatatgggt

SEQ ID NO: 148574 - DNA, 597 bp, Zea Mays
tataagggactggctgccccaactatcggggatggaagaaccattcttttctgggaagatatgtggaataggggcaccccggctcatcaatatcctgagttattttcctttgcttgcaacagcaaacttaccgtcaaagaagctatccaaaaggaacaacttattgaaatttttcagcttcctctgtcggtgcaagtctatgaacaatttcttgacttagacgcaacctggggtcaaatcatggtggccaacacaaatgatgcttggaaactcatttggggagcggataatttttctacaaagaaaacttatagacatttgatgggtcaggctcaggttcaccggatcttcagatcgctttggaaaaataagtgtcaaccaaaacataaggtctttttttggctttggctaaagaacagactcaatacaagggatatgctgaagaggaaaaacatgaatctagagtcttacacttgtgagaattgcatctggcaaaaggaggaaaccctttatcatcttttcctcaaatgtaatttcgcaaaggcttgctggaattctattggtacgacgcccccaagaattactaatcctgtggac

SEQ ID NO: 148575 - DNA, 1081 bp, Zea Mays
agctacagttcgtggtaaccttatcttctctctcaatggaacacacaccgtgtcgttttagtgttctcatcctccatccgcttgctcctgctctctcaagtcaaagcagttgatacggtggcgcgagcagcaagctcgggaggccagcgcgcgcgcacactacacgcggacggaccagacaccggcgatggccactctggcgacggccgcggcggcgtggacaagggaggaggacaaggcgttcgagaacgcggtcgcggccgccgcggcgcccccggacgacgggccgccggatgatgggtggttcacggcgctcgtggccagtgtgccggcgcggacggcggaggaggtgcggcggcactacgaggcgctggtggaggacgtggccgctatcgaggccggccgcatcccgctcccgcgctatgctggagaggagtcgtccgccgcgacgcccgagggctccggatccgccgcctccgcgcccaaggacgctggaggaggaggaggaggcggtgggcaccgacgcgaagaacggaagagcggcgtcggcgttgacgtggggaagagtagctctaaggctgagcaggagcggcggaagggcatcccgtggacggaagaggagcacaggttgttcttgctgggtctggacaagttcggcaagggcgactggcggagcatctcgcgcaacttcgtcatctcacggacgccgacgcaggtggcgagccacgcgcagaaatacttcatccgtctcaactccatgaaccgggaccggcgccgctccagcatccacgacatcaccagcgtgagcgcgggcgaagtcgccgcggccggcgcacccatcacgggcggcccaaccacggcgggagcgatgccgatgggtcccgcgggcatgaagcaccaccaccaccacccggctccgccgatgggcatgtacgggcacgcgcccatgggccacccggtctcggggcacatggtggcgccggcggccgtcggcacgcccgtcatgttcccgccgggtcatcactcgccctatgtcgtgccagtgggatacccggcgccgccggccaagatgcaccaatga

SEQ ID NO: 148576 - DNA, 856 bp, Zea Mays
acaaatgcccacgggcactcctatgtcttataaccatgtatatgaattcaactttgttacattaaacttacgtgttttaccttctaaaaatgtgtgtggtttaacaacgcaaatggtagagtttccgaacgtaatatgattgtgatgaaaggactatgctaatactgacaatcttttaccacgattttcttacaaatgtttgtagacgtcactcatgatgcatgacaatgacatcgctaaaacaaaaggagctatgtaaattcagatggtacagcatcatagccaaacgctgttcaatggctttctagtgttacacaatcaaccaaatgtgctgggatacatttatcatgctagttcgacgttcattagcagtacaacaacttcggacgcccccttctgtcgcaaaactggaaggctcgcttctgatgcagtccactgttacttacatggagatgccacacaacagaaatttgccaagctttttatgctgcccaagtctcagtattttacagaagaacacaagaagatgtagatcctctaaccatccagcggttttcaccattcatccaaggccccttcggcagaaagcaccagcagcttgtctttcagggtgaataactcaaggataaatctttgtacagaatcagtaaacgagccggggctcaaattcggcgaaatcaaccgagccagactcgatggggggcatgaggtaggcggcgatgatctcggacaccagagaggcgacaagaggaatcctcttcaggttcttcactagggggatttcgtcggactctccgacggcaatgatcttctggttgatctcaaccatcctgtcaagcttcctcttgaactctgg

SEQ ID NO: 148577 - DNA, 1806 bp, Zea Mays
atggcgttgaactgggacagcgacagcgactgtgaagtacgcatgattgaccatcctcgcgagcgtcgtgctggtgctgctactcaggcagagaaaggaaaggctatggccgatgccggtacatcttcaagtgttgctggtgtgatggtgatggatcaatatgggaaaagtggtgggagctactgtgtgggagaggacagaggagggaaaaaagcgggagctgctgcatttccactttatccaagtctgttgttgccgcctgcgggattgtcctcttcgggtcttccccaatcgtccaggatgacttcatctgagcctcaagttgatgcaaccactgagcttgagagtcaattaaagaggaaatcaagtgacataggatgggaatgggggcgattagttgatccaaatgacaagaaccgagtgaagtgtctactttgtggccatgagagcacaggaggaatacacaggcattggcaaccttccaagattcaagaagagaaaattgaccaagctaaatcattcaccatctttgtctatggtcaccaccgcaccttggcatgtatgagatcattcacattgaagagagatattataagacctggggtaacaagatttgctacagcctaccttactttgcaaagcatgatggagaagaaggatgaccttagaaagattgttgttgattcaaagtggtatgacttacccgatgtgaagtctaagaagggaaaggaggcaacagcaatggtgttaagcataccattttggaaaggtgtgtcactttgcttgaaggtatttgagcctcttgtcaaacttcttcgtttggtagatggggatgtgaagccatctatgggtttcctctatggagaactaatcaatgcaaagaaggccattaaggaagcatttgggaatgttgagataaaatacaaataagttatgtccattgttgagaaaaaaatgaaagacaggcttgattccccacttcatgtggctgcatatatgttgaatccatactatagttacaccaacagtagcatcttctgtgattcaaccattatggaaaaattcatgctatgtgttgagacattttatcatggtgaggacgagaaagcatatagagctgtcaatgatgacttggataggtttcaaacaaaacaaggatctttctcaaaaaatatagcaaggagctgccaacgctttgatttcaatccagcatcttggtggaggctctatgggggtggagcaccttatttgcaagcaattgccattaggatcctttcattaaccactagctcatccggttgtgaaagaacttggagcgtttttgaacaggtcagattgctccttaactcttaaaatgactttctagtaccaattgtttacacttatgacaaggattgtgacttgtgagcatatttgcaaactcatactaagagaaggaacagattaacaacagaacgcctcaacaatcttgtcttcatccaattcaacaatagaatgttgtccaagaaagagagaatttcccgaaacaagaactatgaggtgctcttgagttctaattgttcagaagcttaaggatttttctttgagggaggggatgaacaagcattagttcaaatcagggatgaggatgagggagaaatgcaagggacaggtataccatggtctgtcctaggagatgcaatgggagtagaggatgagcttcaacctcgcaggagcgcaagagtggctagagaggtggacgaagaagattgggaatctgaaaaataagatgaagacaatgtgcatgaggatattgattatgaagag

SEQ ID NO: 148578 - DNA, 104 bp, Zea Mays
atgttggatcaagaggcttgtgaagttcagtcgccaccttccgacacgtcagtacatggaagcgggaaaagcagaagaaaattcaagttgcaagtgttctggat

SEQ ID NO: 148579 - DNA, 1665 bp, Zea Mays
ccggaaagcgagcgctcgagagcgaggggaaatcaggtggaggaagcttaaaattagaagtccagcgcaataattgagcaggcaggcggcaggcccctcctaatcactgccctaaacacatgtgtgccgggccgaggtcacaatcgatgcacggaggaggatgccgccgtagctgcggagattgataatataaagcgggcggagaccgccggcccctctggcctcgctgctcctccccccttcctccccccacatgcgctgcccccgcccggccctgccctgccctgctgcgcccaagcagctgaatctccgcacagacaattagagtagctgcattggcggggaaagcgcaagaagctcagcagaaatggcggagcaggcaggcgccggaaggtactggtgccacatgtgcgccgcggtcgtgagccccgcggagggcgaggcggaggtgaagtgcccgcattgccacagcggcttccttgaggagatggagaccgtccgcggcacgcccgcggccgatgacggcgacggtgacggcgcggtggctcaagtgtaccccggcgccgaccgcccgagctccatctgggcgcacgctatcctcagcacggtcgacagctccgtccgccgccgccgcaaccggcggcagacggaggccgccggcgacgtctacgacgggaacgaccccgagttcgccctgcgccggcgtcgcgtcaccgcgttcctgcggctcctgcacgagctccgggaccgccagctgcagcggctggaggctgctgccggggtcgccctcgaaggcgaccagctgacccctttcggtcggagcctcttcatcggcgcagctggcggcggcgagcatggcgtggcgctgggcgactacttcctcggccccagcctcgacgctctggtgcagcagctcgccgagaacgacgcgggacggcacgggacgccgccggccaagaaggaggccgtggaggcaatgccgaccgtggaaatcgccggtggcaatggcaacgatgacgacacggccagctgccccgtctgcctggaggactacgcggccggcgagcgcgctcgggagatgccctgcaggcacaggttccactccaattgcatcgttccgtggctcgagatgcacagctcctgccctgtctgccggttccagctgccggccaccgacgacaagggctcatgcagcagcggcgacggtggttttgtcagtgtcgacgcggatggtgaaggcaatgacaacggcggcggcgatggtagggcaagtattccaggcaatgcggagcccgccgaagccgaagagaacggcagccggttgccgccatccttgcagtggctcaacagcctgttctcgccatcggcgcagtcctccggtagcggcagcggcagttcgcatcattgggagaattgaacaataatgcaatataagaatggatgattgttgctgcttgagcccattggtgccaatgtacataggaagagcaggagcatgccggcatgaaaaatttggagcctttttttcagtgtgtcaatttggctcatgtaatgttctctctgatatagttgtcatggctataaaaagaacaaaaattggcaagtatatgaacttgcctcttgcgtgaactgggtgtgaatatatccttggactcgatgaagaaa

SEQ ID NO: 148580 - DNA, 1690 bp, Zea Mays
cccccttccttgtcggaatcatctatttctgggctggccggaaagcgagcgctcgagagcgaggggaaatcaggtggaggaagcttaaaattagaagtccagcgcaataattgagcaggcaggcggcaggcccctcctaatcactgccctaaacacatgtgtgccgggccgaggtcacaatcgatgcacggaggaggatgccgccgtagctgcggagattgataatataaagcgggcggagaccgccggcccctctggcctcgctgctcctccccccttcctccccccacatgcgctgcccccgcccggccctgccctgccctgctgcgcccaagctgaatctccgcacagacaattagagtagctgcattggcggggaaagcgcaagaagctcagcagaaatggcggagcaggcaggcgccggaaggtactggtgccacatgtgcgccgcggtcgtgagccccgcggagggcgaggcggaggtgaagtgcccgcattgccacagcggcttccttgaggagatggagaccgtccgcggcacgcccgcggccgatgacggcgacggtgacggcgcggtggctcaagtgtaccccggcgccgaccgcccgagctccatctgggcgcacgctatcctcagcacggtcgacagctccgtccgccgccgccgcaaccggcggcagacggaggccgccggcgacgtctacgacgggaacgaccccgagttcgccctgcgccggcgtcgcgtcaccgcgttcctgcggctcctgcacgagctccgggaccgccagctgcagcggctggaggctgctgccggggtcgccctcgaaggcgaccagctgacccctttcggtcggagcctcttcatcggcgcagctggcggcggcgagcatggcgtggcgctgggcgactacttcctcggccccagcctcgacgctctggtgcagcagctcgccgagaacgacgcgggacggcacgggacgccgccggccaagaaggaggccgtggaggcaatgccgaccgtggaaatcgccggtggcaatggcaacgatgacgacacggccagctgccccgtctgcctggaggactacgcggccggcgagcgcgctcgggagatgccctgcaggcacaggttccactccaattgcatcgttccgtggctcgagatgcacagctcctgccctgtctgccggttccagctgccggccaccgacgacaagggctcatgcagcagcggcgacggtggttttgtcagtgtcgacgcggatggtgaaggcaatgacaacggcggcggcgatggtagggcaagcaatgcggagcccgccgaagccgaagagaacggcagccggttgccgccatccttgcagtggctcaacagcctgttctcgccatcggcgcagtcctccggtagcggcagcggcagttcgcatcattgggagaattgaacaataatgcaatataagaatggatgattgttgctgcttgagcccattggtgccaatgtacataggaagagcaggagcatgccggcatgaaaaatttggagcctttttttcagtgtgtcaatttggctcatgtaatgttctctctgatatagttgtcatggctataaaaagaacaaaaattggcaagtatatgaacttgcctcttgcgtgaactgggtgtgaatatatccttggactcgatgaagaaa

SEQ ID NO: 148581 - DNA, 407 bp, Zea Mays
tttactcttcaggtacaagcttattgcatgtcacttgttaagaaaatgaaagactcgtatggctgccctggtgatgtaatggttgattctcacattggagcatggccgggttggacaactgcctaactgcttcaaggcaatcagttgtgaggatgctgctgcttctggctcttttcagtatcctaacacttttagccaagaaaatcaatccgagcaagtgccagttaatactaagacgtctcatttggaacaaaatgatagaacccaggaattttctctgcacaatattgctagttttcaggtacctcgtgtgacttataaaagggagttctttttgcagtagatgtcttttttatactgattatgtatctaatgagtctaatgtctatattcaccactaagaatgg

SEQ ID NO: 148582 - DNA, 782 bp, Zea Mays
attgtacgtgtcctacagtttcacacgtggagcgcagtgcgacgcgggcgggcggccggcacctgccaccgcgataccgtaccctttctggagatttctcgccgccctttttatcacccacctcgcgccgcactgtgttcatccactgagcactcgcacaagcagggacaaggaagtgcaccggcggcgtcgccatcgatcgagtagatactagatagtgtgtcaggttgctgtcagctagagccatggcgtccatgcagaagagccgcgagcagcgcgcccaggccgcggcgcagaaggcggccgacgagctccacgcgtcgaggcaggacagagtccccgaggaggcgcccgtcagcccccgcggcggcggcggcatcctgggcagcctgcaggaggggaaggcgaacgccaggggcgtggcggacgccgccatgggcaaggccagcgagacgaaggacgcggcggcggacaaggcgggtggcgtcagggacgcggcggcggacaggacgggaaataataaggcgggggccgccgagtcggaggaggacgtgatgctaagggtgaaggcggcggaccagatgacggggcaggcgttcaacgacgtcggtacgatgggggaggagggcaccggcgttccgcggagacgacgttctggctgatggccgctggatcggaactggcctggctggcgctgtgcttctcatgtaaaattagcatgcaacgacaaatgaatgttacataagaaactacaataaataaaagggtgtttggtttgagaa

SEQ ID NO: 148583 - DNA, 1742 bp, Zea Mays
aagcatgaccctcgacggagcgagggcccacggaacaccagccgtccgatccatatcgacggccagaaatatcggagaatgcccggaagaagtcttccttccaccaccaccacccttctctcctccgcatctccctttaccattgtctcccccctcgtccgacctcctcgccgccgcagacgaccgccgccgccgctgccgctgccgctgcgaaccctttgtgaatcttcgttgtccgggctgtgtggggcaggcatggcgctccggaggctgctgcaggggagcgtcctgccgcggataatcggcagggatttggcaccggccgtggcgccgttttcaacggagtccggggagaccattcgtgccacgctctttcccggcgatggcatcgggccagagatcgctgagtctgtcaagcaggtattcaatgttgcaggggtaccaattgaatgggaagaacactatgtcggtacagaagttgatcccagaacagagagttttttgacttgggaaagcctggagtcagtgcgtagaaacaaagttggcttgaaaggacctatggctacacctattggaaagggccatcgatctttgaatcttacattaaggaaagaacttgggctctatgccaatgtcagaccttgcaacagcctcccaggttacaagaccagatacgatgatgttaaccttgtaacaattcgtgaaaatactgaaggagaatatagtggtcttgagcatcaggttgtgagaggtgttgtggaaagtttgaaaattattacacgccaagcaagtttgagagtggcagagtatgctttccattatgccaaggccaatggccgggaaagagtctctgcgatccacaaagccaatattatgaggaagacagatggtcttttcctcaagtgttgccgtgaagtgtctgaaaagtaccctgaaattcaatacgaggaggtcatcattgacaattgctgtatgacgcttgtgaagaatcctggtctttttgacgtattagtgatgccaaatctctatggtgacattattagtgatctatgtgctggtttgatcgggggcttgggcctaacacccagttgcaatattggtgaaggtggcatttgtctggcagaagctgttcatggttctgctcctgatattgctggcaagaacctcgcgaacccgactgctcttatgctgagtgctgtcatgttgttgcgccacatgcaattcaacgacaaagcagaccggatccacaacgccatcctccagaccatcgccgaggggaagtacaggactgctgatcttggtggaaaggcatcgacatcagagtttacaaacgcagtctgtgatcacatctgagaaacggatgtgattcttccttctgattgttttgtcatcctaatatttttttgtcacatatgagaggagctttagctttaagaggttaactggcagcacctcgaacttctttggggtgtttaacacggtttgagaccgtcaaataattttgtcacatttcttgcggttcagaaattctttcaacattggaatggagccaagaattgtctgtaataatcaacatcagcattataacagtatgtagggtttatctcattcacgttcttgaaatattgggccaactggtcagaatgccagctgtgccatgttaatcctggttttctatttatatgcttacaaaaaaccaaattcatgttgctaaggaaatatgcaaatttattaatgtggtg

SEQ ID NO: 148584 - DNA, 1658 bp, Zea Mays
accaccaccacccttctctcctccgcatctccctttaccattgtctcccccctcgtccgacctcctcgccgccgcagacgaccgccgccgccgctgccgctgccgctgcgaaccctttgtgaatcttcgttgtccggcgtctttccgtcccgcgacgatcaggtctgtttgctgtcgcagggctgtgtggggcaggcatggcgctccggaggctgctgcaggggagcgtcctgccgcggataatcggcagggatttggcaccggccgtggcgccgttttcaacggagtccggggagaccattcgtgccacgctctttcccggcgatggcatcgggccagagatcgctgagtctgtcaagcaggtattcaatgttgcaggggtaccaattgaatgggaagaacactatgtcggtacagaagttgatcccagaacagagagttttttgacttgggaaagcctggagtcagtgcgtagaaacaaagttggcttgaaaggacctatggctacacctattggaaagggccatcgatctttgaatcttacattaaggaaagaacttgggctctatgccaatgtcagaccttgcaacagcctcccaggttacaagaccagatacgatgatgttaaccttgtaacaattcgtgaaaatactgaaggagaatatagtggtcttgagcatcaggttgtgagaggtgttgtggaaagtttgaaaattattacacgccaagcaagtttgagagtggcagagtatgctttccattatgccaaggccaatggccgggaaagagtctctgcgatccacaaagccaatattatgaggaagacagatggtcttttcctcaagtgttgccgtgaagtgtctgaaaagtaccctgaaattcaatacgaggaggtcatcattgacaattgctgtatgacgcttgtgaagaatcctggtctttttgacgtattagtgatgccaaatctctatggtgacattattagtgatctatgtgctggtttgatcgggggcttgggcctaacacccagttgcaatattggtgaaggtggcatttgtctggcagaagctgttcatggttctgctcctgatattgctggcaagaacctcgcgaacccgactgctcttatgctgagtgctgtcatgttgttgcgccacatgcaattcaacgacaaagcagaccggatccacaacgccatcctccagaccatcgccgaggggaagtacaggactgctgatcttggtggaaaggcatcgacatcagagtttacaaacgcagtctgtgatcacatctgagaaacggatgtgattcttccttctgattgttttgtcatcctaatatttttttgtcacatatgagaggagctttagctttaagaggttaactggcagcacctcgaacttctttggggtgtttaacacggtttgagaccgtcaaataattttgtcacatttcttgcggttcagaaattctttcaacattggaatggagccaagaattgtctgtaataatcaacatcagcattataacagtatgtagggtttatctcattcacgttcttgaaatattgggccaactggtcagaatgccagctgtgccatgttaatcctggttttctatttatatgcttacaaaaaaccaaattcatgttgctaagg

SEQ ID NO: 148585 - DNA, 960 bp, Zea Mays
cccccctctaggtgctctcaagcagccaagagttgtcagggtagaagcaaaaattttagagatgatgaagacattcttcttgtgtcagcttggctaaatgtgggcatggatcctattcaaggagttgatcaaagacatggcacactgtggacaaggatacatgattatttcaatgcaaacaagatgttcgactcaaatcgttctgaaggatctttaatgaatcgttggtctagtatacaacatgatgttaatctgttttgtggatgtctgtctaggattgaggctaggaaccacagtgggtggtcaattgatgacaagatcgcaaatgcatgtgcaatgttcaaggccgaagatccgaaggaaaggaaattttcattcctgcattgctggaaaatcttgaaggacaagccaaagtggatggatagacggaaggaaattggaagtgcaaaaaaatcaagcaataagaaacagaagacaacgacaaattcttctccagcatcagttgctgctgctattgccatagatgcccctttgggaggtgttgatcatgaagaaccgtcaggaagacccgacggtaagaagaaggagaaacagaaactccggcaatgttcgaccatggaagcagtagactatctaattgcaaagaagaaagaatctgacattcagaaagaattgaagaaagaggagaggtgcaacaaagcctttgctctacaggaagaaaggctcaaattggagaaagaaaaatttgcgttccaaagacagttagaagaggatagaattattgatttggacctgagcaacatgaactacaagcaacaacaatattatgaagatcgtcagaacgagattcttgcaagacgtctgaatgtctagagttgtctagttatagttatagtgtccctgataatttttctagattcttgtcattgtttccttcccatcgttatattatttgtgtcg

SEQ ID NO: 148586 - DNA, 318 bp, Zea Mays
atgatgtttcttctgaagacctcctggtccactatgaaagcaatcttggtgtcaggaggactgtggcagtccttccacttgaatttccgcagcgcaaccgtgaactgtagcagcctgcctcgcttgttgacaaagaagagtgcatcatctgttgtcactctgcgcaataaaccagggatgccatcccatggagacccacttgcaacctgtcttcccttcttcatcgctgtgcagttaatccacaacagttcatctccatttctttctctaatgtgtaagttcccatgcacgtcgacaagatacaaactgccattgtag

SEQ ID NO: 148587 - DNA, 1617 bp, Zea Mays
cgaccaagtccgtccacctctgcctctgcgcggcagcctttctctctgtcgtctctccccgtctcccgtcgctgattccatcatcgtcctccccggcttttccccaccaaaagccggaagccatagcaccttctgccagctagtccccagaaggtgcccacacccctccccacccccatcccacgcagcacagcggcagacaccgcaccgcgagtgacgcggcagcaaaaaaccatggcggctctgccgttctcgacgcggcggcccttctcgtcgccgtgcttcatcctctgcttcctcctcggcttcgtcgccggcctcttccccttcgcgcaccgccacctccacctcgacctcgacctccgccacctcccgctcgcggaccctcctcccgctgcgccgacccagcgggccctagtccggccgccaccgacgacgaccctgatcgtcgtgacgccgacccgcgcgcgcccgctgcaggcgtactacctgcaccgcctcgcgcacaccctccgcctcgtcccgcagccgctgctctggctcgtcgtcgaccgcggcgccgccacgcgcgagaccgccgcgctgctccgcggctgcggcctcatgtaccgccacctgccctcccagtcccaccgcgacgcgcccggtgctcgccggacgaggcccgagcacccggcggcgcgcggcctgcgccagaggaacgcggcgctcgaccacatcgagcaccaccgcatccacggcctcgtctacttcgccgacgaggacaacgtgtactcccttgacctcttcgaccagcttcgcggcataaggagttttggcacctggccagtcgcaatgctgggcgtggggaagagcaagacacttgtggaagggccggtttgtgacaacagccaggtagtgggatggcacacgaacgagaggaccaagaggcaacgaaggtttcatgtcaatacttcgggctttgctttcaatagcagtatgctctgggacgccgacaagagggctcgtcaggcgtggaattacatccggctgctggacacggtcagagatgggtttcagcaatgatacatacaggcaacaacatttatagagcagcttgtagaagatgaaactcatatggagggcataccaactggttgttcaaaaattatgaatgttaatcttcgcctagaagataaacatcttgtatatccgaaggagtggcagatgacagaaaacctggatgtgttaattcctctctgagccagaacagaggcataccgccctgcagcttcagcaatcgagcacatggagacgcggccgagcatgacgtgcgtgtgtggcatatgtcaagctgttgtgggtcagcggaggtttaggttaggtgtgtacatcacccaaggaaatatgcacttaactttttcgcagatttgtttgtagcatagagctaaaagctcccgattaggtacatgaatacatcgtacaagaggatcttacgtccccagtagggccttagcctttgtgggcatttaaggtaaatacatctaactttttttggtttattgaagtggatgcggtgactacttttaccagtatagagactatagataacattggttaattagtttaaattattta

SEQ ID NO: 148588 - DNA, 1602 bp, Zea Mays
cgaccaagtccgtccacctctgcctctgcgcggcagcctttctctctgtcgtctctccccgtctcccgtcgctgattccatcatcgtcctccccggcttttccccaccaaaagccggaagccatagcaccttctgccagctagtccccagaaggtgcccacacccctccccacccccatcccacgcagcacagcggcagacaccgcaccgcgagtgacgcggcagcaaaaaaccatggcggctctgccgttctcgacgcggcggcccttctcgtcgccgtgcttcatcctctgcttcctcctcggcttcgtcgccggcctcttccccttcgcgcaccgccacctccacctcgacctcgacctccgccacctcccgctcgcggaccctcctcccgctgcgccgacccagcgggccctagtccggccgccaccgacgacgaccctgatcgtcgtgacgccgacccgcgcgcgcccgctgcaggcgtactacctgcaccgcctcgcgcacaccctccgcctcgtcccgcagccgctgctctggctcgtcgtcgaccgcggcgccgccacgcgcgagaccgccgcgctgctccgcggctgcggcctcatgtaccgccacctgccctcccagtcccaccgcgacgcgcccggtgctcgccggacgaggcccgagcacccggcggcgcgcggcctgcgccagaggaacgcggcgctcgaccacatcgagcaccaccgcatccacggcctcgtctacttcgccgacgaggacaacgtgtactcccttgacctcttcgaccagcttcgcggcataaggagttttggcacctggccagtcgcaatgctgggcgtggggaagagcaagacacttgtggaagggccggtttgtgacaacagccaggtagtgggatggcacacgaacgagaggaccaagaggcaacgaaggtttcatgtcaatacttcgggctttgctttcaatagcagtatgctctgggacgccgacaagagggctcgtcaggcgtggaattacatccggctgctggacacggtcagagatgggtttcaggcaacaacatttatagagcagcttgtagaagatgaaactcatatggagggcataccaactggttgttcaaaaattatgaatgttaatcttcgcctagaagataaacatcttgtatatccgaaggagtggcagatgacagaaaacctggatgtgttaattcctctctgagccagaacagaggcataccgccctgcagcttcagcaatcgagcacatggagacgcggccgagcatgacgtgcgtgtgtggcatatgtcaagctgttgtgggtcagcggaggtttaggttaggtgtgtacatcacccaaggaaatatgcacttaactttttcgcagatttgtttgtagcatagagctaaaagctcccgattaggtacatgaatacatcgtacaagaggatcttacgtccccagtagggccttagcctttgtgggcatttaaggtaaatacatctaactttttttggtttattgaagtggatgcggtgactacttttaccagtatagagactatagataacattggttaattagtttaaattattta

SEQ ID NO: 148589 - DNA, 1528 bp, Zea Mays
aagaactaaggcttgtccctttccctctcttctcctcccctcccctccgtctcccttccccatcttctctcctggaagccgcctcggtcggacccggacaagatggccgccttcttcggtgctgcaccgccgccggctctcgcttcgttccgccacgaggaggagcagcatcaggacgccgccgaggaggtgtaccacgtggacgatgtcgacgagggcagcggtgacggccgtggccacggcggcgccggccaggggaagctgtgcgccaggggccactggcgccccgccgaggacgccaagctcaaggagctcgtcgctcagtttgggccccagaactggaacctcatcgccgagaggctggacggcagatcagggaagagctgccgcctgcggtggttcaaccagctggacccgcggatcaaccggcgcgccttctcggaggaggaggaggagcggctcctggcggcgcaccgcgcgtacggcaacaagtgggctctcatcgcgcgcctcttcccgggccgcaccgacaacgccgtcaagaaccactggcacgtcctcatggcgcgcaggcagcgggagcactcgggcgcgctccgccgccgcaagccctcctcgacctcgccctcgccggcgccggcgccggcgccgcacctggcgcccgtcgtcgtcctccaccaccaccaccactacgccggcggctcccctcccatgccgccgttgcacgccgccgacgcccacacgcagtacacggcggccgcggcggacacccgcgcgcacagcggcggcgagtccgacgagaccgcctccacgtgcaccaccgacctttccctcgcctccgccgccccctgcttctaccagagtggctacgacgtggccccgcgcgccgcggcgttcgcaccgagcgcgcgctccgccttctccgcgccgccggcgacggcgcgctccgacgacaaggtctcgctgcccttcttcgacttcctcggcgtcggcgcggcgtgatgggggggccggcccgggccggccaggcggcggtgtacaggagggcggaggcggtcaaaggacgagagccccggcggcggtgaagccgtgcccgcgcgtagtttagctttagagcccgagttaaatcatcgagaacagaacatggcctgagcctgagagaggaggagaatggcgatccaccattgaactggtgcccgtggcattgcagactaacagctccgcatccgttcggctgctgatgttgctagtagtaatggtacggtgattactctctgctttgggttgggagagacgagtttgcaagcaccaccagaccaagcaagggcgacgatgggtatgggtggatgtttgcagaagaagaaaaaaccgcttgtaacacaaactgcaggacaaaggcagatcagagatcctctgctaactctctttttaccctgtctcctgtctctctctctcttcttttcatgttctgcacttctctcttcttaggatatttgttttctttcgatttcttttttttccctccaac

SEQ ID NO: 148590 - DNA, 1559 bp, Zea Mays
ggcaatggtaatgtcatgcggggccaccgcggcggtggtccttctacagtcgggcgcggaccacgccacgccacctgaggcgcctccgccgctccaccaaccctctcctcgtcttccatatagatatagtcagagcctcagaggtgaagcatccgactaaaaagggccagggccagggccttcgcttgcttactactcctgcttaccacactctaccttgtctcttcacgtgcacacgacgcctcccccaatggctgcggtggcggaggaggaggtgatcgtcgtcggcgcggggcagtcggggctagcggtggcggcgtgcctgtccctgcgcggcgtgcgggcgctggtcctggagcgcgacgactgcgtggggtcgctgtggcggaagcgcgcctacgaccgcctccacctccacctcaccaagaagtactgcgcgctgccgcacgcgccgcacccggccgaggcccccgcgtacctgcaccgcgacgacttcgcgcggtacctggacgggtacgccgcgcggttcgccgtccgcccgcgcctccgccgcgaggtccggtcggcgcggtacgaccccgcgagcgcgcggtgggaggtggaggccgtggacctcggcacgggccaggccgagcggtacgcggcgaggttcctggtggtcgcgtccggggagaacgccgagaagttcctgccggaggtgcctgggctggaggcgttccccggccaggtgatgcacgcagtggagtaccggtcggccgaggggatgcgcgggaaggccgtgctcgtcgtggggtcgggcaactccggcatggagatcgcctacgacctcgccgccgccggcgccgtcacctccatcgtcgtccgaggcgagctccacctggtgaccaaggagatctggaacgtggcgatgacgctgtacccgtacctgcccgtgtgggtcatagacaagctggtgctgctcatgtgcgccgtggtgttcggcgacacgtcccggcacggcctccgccgccccgccatcgggcccttcaccatgaagctcaccaccccgggctaccccgtcgtggacgtcggcacctacgccaagatcaggagcggcgagatccgggtgctccccgccgccgtcaagagcgtccgcgggaacgtcgtcgagttcggggacggcagccgccaccctttcgacgccatcgtcttcgccaccggctaccggagcactgtcaggcggtggctcaagagcgaggacgggctggtcggtgacgacgggatggcggcgcggagctacccggagcactggaagggggaccacgggctgtactgcgcggggatggtgcggaggggcatctacggcagctgcgaggacgcggagctcatcgccgccgacatcagcaagctgctgcaccccaagcaggagcagggcaacggcgtctagctgcagctagcatttcgctttgttggttgcgatggaaacaagctctattgttgttgggttggttgataataatggttgcgtgaataattaaacgtgcttaattgagatggcctggccagcctattcgttcatt

SEQ ID NO: 148591 - DNA, 207 bp, Zea Mays
cgttgtcaagctgctgctacacaagaggagagagttatggaagaggaagagcaaggcaacgagggcaatgaacaagatgatgaagagtacatgcctaatgatgatgaagtggatgactttggtgaatccccacataacagtccaactcaagctggtgctggtggtgaagaaaatgcaatggatgatcttgatttgggagatatttag

SEQ ID NO: 148592 - DNA, 1837 bp, Zea Mays
atggaactattgttattggccagattagaacaaaaaagatgtggtattagaaggttgaagcagcaccttgttggtggtcatggtgatgttgctaagtgcttgaagacaacatcggcaatcagcaaagagatgaatgattatttgaagaagaatgctagacagaaacctattgacttggatgatgataaagaaggtgataaagacgatgaagttgaagtacttgaagaaggagaaagtagagcatcccatttagttgttcagcccagttttgaaacagcccaaaagagaaggctctcagctgaagcaagccaaaacaatcaacacgcgtcgaagtcttctaagtcaattgcatccatgcttcgcaaagcacctgaagatgtggttcgtgagaggcattgcaagggcaacactcaaactacattgcagcgaaagagcaaggaggagaagaaaagaacagatatgtatgttgctgattttatttatgtgtggcttaccacttaatgtcatcaactcaagggcatttgagatcatgcttgaggcggttgggcaatatggtcctgggtatgggaaaccttcatatcatgatgttacggcgccattgcttgagaaggcaaagaagagtgtagatgagataaaaaaagactcatgagttggcttggactgaatttggttgcacacttatgtctgatggttggacagataggaggggtcggcacttgatcaatttccttgtcaatagtccagctggcatatttttcttggagtctgtcaatgcctcaaatgagacagcagatgctcagatgttagctgcactacgtgagaaaagaattgatgccattggtagagacaaggtagtgcagattgttacagataatggggctaacttcaaggctgctagaagacttttagaaagaaagatccctcacttgttttggactccatgtgctgctcactgtttggacctcatgtttgaggacattgggaaaattggagagttcaagaaatgcatttcccatgcccgccaagtgacaaccttcatatataggcatggcaagcttcttgatgccacgagggagaagatagggggtgatttagtgagacctgcagttacaagatttgctacagttttcattactctccagtccatatataagcataagcaagctttgagatgcctctttgttagtgatgattggactaggtccaagctatcaagcacagaagcaggaaaggtcacagagatacttctttctacaaacttttggaactcagtccaagattgtattcgtgcatcacaaccactcctcactgtgttgtgaattgttgatggtgatgaaaagccagccatgccagaggatgccgctgccatggatatggcaaaagcaaagatcacttcgggttttgaaggtagagaggcaatgaagaggaagttgcttgccattattaatcggaggtggcaagatcaaatgtaggtgaagttgtatggggctgccttgtttttaaatccaaataagttctttgaacttcaaaaaaatgatccaacaaaaagggaggttggtaagctgagggcagcatccaatgaggtgctatggaagatggttgaagattatgaccttcaagctataatcagtaaacaagctgatgagtatatgaatatggttggccctgacttctcatcgccgttagcaattagagaacagcaaaaaaagagccccagtaattcgttggtgggatgcatatggtgtgcatttgagattcaatcctttgcaaagcgcattgttagcctttgttgttccgctttcggatgtgagcgcaattggagcacttttgaatttgt

SEQ ID NO: 148593 - DNA, 1182 bp, Zea Mays
cagtgtcacagtatttttgatttggcttttgtttttggcacgagccccagcccaactccgatcgcacgagccccagcccccaaacagcctccaggtctagctagggtttcgtctccgccgcttgctctaatcctctcccggcacgcgacacgcgagggcgcagcgtttatggcggcgacaccggcggacgcgaagaccgaggccgccaagatggacctcctcgaggacgacgacgagttcgaagagttcgagatcgaccaagtggtaaaaaatattgctgttatatattttgtctggtgtttcctccaaaagtgacgtagttctgcaaatctctaacttctgaagactaatgattatatatgaatgggatgagaaggaagaaggcaatgaagctgtccagcagtgggaggatgattgggatgacgatgatgtgaatgatgatttctcgctgcagctgaggaaagaactggagggaagcaacgcccagaagagctgaagtattatttctccagtttacaaatgatccttctatgccagctacttctggaaatcggaacctttatgtgatttgtgctgctgggagcaatcgaactctggagtaaaaaagtaaccataccagtgatttctaagtatgaacggcaggaagttgacggacatcagtcggctatttaaaaaatatctcagttgtggttagaatatgccacagttcttatcttatttacaactgtttttcccttctctgccaaaacctccgtgctcccaagaaaacggggattgcatgtatcttttttttttttaatcttcgtacgccgagacgaccaggaggcaaggtgcgctggatggaattgggccgatgatgtcgttgctgccggacgcgttagcgattgctaggcggaggacagcagacctattcgcagtcagcgcctaacgggcgccatcttctcttgatcttataggtcgtgcttggattagtgtagcgagtcagtataaaggcctagacacgatattatcatcagtccgtacctggcagtagcacggtatgccttagacgaagctatgcttcggtcatgttatttttaagtaaaatgtagtagtggtcctcaaagctggtacactatcaccttagggtgcgtttggttgtaatgataaaaaggaatatgatagtatgaagattgtttagtt

SEQ ID NO: 148594 - DNA, 1082 bp, Zea Mays
cagtgtcacagtatttttgatttggcttttgtttttggcacgagccccagcccaactccgatcgcacgagccccagcccccaaacagcctccaggtctagctagggtttcgtctccgccgcttgctctaatcctctcccggcacgcgacacgcgagggcgcagcgtttatggcggcgacaccggcggacgcgaagaccgaggccgccaagatggacctcctcgaggacgacgacgagttcgaagagttcgagatcgaccaagaatgggatgagaaggaagaaggcaatgaagctgtccagcagtgggaggatgattgggatgacgatgatgtgaatgatgatttctcgctgcagctgaggaaagaactggagggaagcaacgcccagaagagctgaagtattatttctccagtttacaaatgatccttctatgccagctacttctggaaatcggaacctttatgtgatttgtgctgctgggagcaatcgaactctggagtaaaaaagtaaccataccagtgatttctaagtatgaacggcaggaagttgacggacatcagtcggctatttaaaaaatatctcagttgtggttagaatatgccacagttcttatcttatttacaactgtttttcccttctctgccaaaacctccgtgctcccaagaaaacggggattgcatgtatcttttttttttttaatcttcgtacgccgagacgaccaggaggcaaggtgcgctggatggaattgggccgatgatgtcgttgctgccggacgcgttagcgattgctaggcggaggacagcagacctattcgcagtcagcgcctaacgggcgccatcttctcttgatcttataggtcgtgcttggattagtgtagcgagtcagtataaaggcctagacacgatattatcatcagtccgtacctggcagtagcacggtatgccttagacgaagctatgcttcggtcatgttatttttaagtaaaatgtagtagtggtcctcaaagctggtacactatcaccttagggtgcgtttggttgtaatgataaaaaggaatatgatagtatgaagattgtttagtt

SEQ ID NO: 148595 - DNA, 1086 bp, Zea Mays
cagtgtcacagtatttttgatttggcttttgtttttggcacgagccccagcccaactccgatcgcacgagccccagcccccaaacagcctccaggtctagctagggtttcgtctccgccgcttgctctaatcctctcccggcacgcgacacgcgaggtagggcgcagcgtttatggcggcgacaccggcggacgcgaagaccgaggccgccaagatggacctcctcgaggacgacgacgagttcgaagagttcgagatcgaccaagaatgggatgagaaggaagaaggcaatgaagctgtccagcagtgggaggatgattgggatgacgatgatgtgaatgatgatttctcgctgcagctgaggaaagaactggagggaagcaacgcccagaagagctgaagtattatttctccagtttacaaatgatccttctatgccagctacttctggaaatcggaacctttatgtgatttgtgctgctgggagcaatcgaactctggagtaaaaaagtaaccataccagtgatttctaagtatgaacggcaggaagttgacggacatcagtcggctatttaaaaaatatctcagttgtggttagaatatgccacagttcttatcttatttacaactgtttttcccttctctgccaaaacctccgtgctcccaagaaaacggggattgcatgtatcttttttttttttaatcttcgtacgccgagacgaccaggaggcaaggtgcgctggatggaattgggccgatgatgtcgttgctgccggacgcgttagcgattgctaggcggaggacagcagacctattcgcagtcagcgcctaacgggcgccatcttctcttgatcttataggtcgtgcttggattagtgtagcgagtcagtataaaggcctagacacgatattatcatcagtccgtacctggcagtagcacggtatgccttagacgaagctatgcttcggtcatgttatttttaagtaaaatgtagtagtggtcctcaaagctggtacactatcaccttagggtgcgtttggttgtaatgataaaaaggaatatgatagtatgaagattgtttagtt

SEQ ID NO: 148596 - DNA, 1075 bp, Zea Mays
cagtgtcacagtatttttgatttggcttttgtttttggcacgagccccagcccaactccgatcgcacgagccccagcccccaaacagcctccaggtctagctagggtttcgtctccgccgcttgctctaatcctctcccggcacgcgacacgcgagcgtttatggcggcgacaccggcggacgcgaagaccgaggccgccaagatggacctcctcgaggacgacgacgagttcgaagagttcgagatcgaccaagaatgggatgagaaggaagaaggcaatgaagctgtccagcagtgggaggatgattgggatgacgatgatgtgaatgatgatttctcgctgcagctgaggaaagaactggagggaagcaacgcccagaagagctgaagtattatttctccagtttacaaatgatccttctatgccagctacttctggaaatcggaacctttatgtgatttgtgctgctgggagcaatcgaactctggagtaaaaaagtaaccataccagtgatttctaagtatgaacggcaggaagttgacggacatcagtcggctatttaaaaaatatctcagttgtggttagaatatgccacagttcttatcttatttacaactgtttttcccttctctgccaaaacctccgtgctcccaagaaaacggggattgcatgtatcttttttttttttaatcttcgtacgccgagacgaccaggaggcaaggtgcgctggatggaattgggccgatgatgtcgttgctgccggacgcgttagcgattgctaggcggaggacagcagacctattcgcagtcagcgcctaacgggcgccatcttctcttgatcttataggtcgtgcttggattagtgtagcgagtcagtataaaggcctagacacgatattatcatcagtccgtacctggcagtagcacggtatgccttagacgaagctatgcttcggtcatgttatttttaagtaaaatgtagtagtggtcctcaaagctggtacactatcaccttagggtgcgtttggttgtaatgataaaaaggaatatgatagtatgaagattgtttagtt

SEQ ID NO: 148597 - DNA, 1154 bp, Zea Mays
ctctttccgcacgaccgcaccgtgtgagttcaaaaaacttacccccaaaaactgtcctcccttggttccttcccgctctccagccaaagtcgccgctcccgctcggacacgcgtctagaagcttctggatccgtccctgacgccgatggagcagctcgactacaagttccacgagaagtacactgctctgaagaagcggaagctactggacgaggggctggagcggaagcgggaggcggaactcaatgagctttacgatgccatgaaagattgggtcagcgaactcaggaaagacaatgcggaactcaacgagaagctggtggagaagcaggatgagctcgagaaggcccgtcaggaattccttgaagatattcgtacaagggacgctgaaattctgaagctgaagcagctcttagatgagaaggctgaaaaaaacaattctgcagctactgggtttccttgcctagcgcctgaagctgtcctagaaaattcaactccattgtcacctaaaagaaagacaccattttcccacggcaagctagaatgctccagaagacatacacgcatctcagggaataggacaacagagattcggagtgctcatatgctttctttgctgcttcaatctttagttcgcatgaagatctcggtaaatgatggaacagaaatattttcggtttcagtatctcatgaagctagtggttacagtttcatcctcacctggctagaaacatctgatgaatggtcatataagctctcctcgttgggcacactggaaaggatagccgttgattggatgaggcaagacataagattcagcatgaaaatgtgccgcatgttctttgagcggatatcaagcatcataacaaaaggatgacgacatgctcttcgcttcagctagttatatcagtctgcctactgtacatggaagcatcctgatgtaaaaatgatttgatgcactatcttattgcagagctgtctttcatgctcatgccagtggtgtgtttggttgccggacatttagggacagccacgacagggaatccctgtcatcctctctcgttcctttaatttccctttaatttcgaggtataaccgaggacaagacattgaatcaaataatattattaaatcaagccaaaaaggattatcct

SEQ ID NO: 148598 - DNA, 1085 bp, Zea Mays
ctctttccgcacgaccgcaccgtgtgagttcaaaaaacttacccccaaaaactgtcctcccttggttccttcccgctctccagccaaagtcgccgctcccgctcggacacgcgtctagaagcttctggatccgtccctgacgccgatggagcagctcgactacaagttccacgagaagtacactgctctgaagaagcggaagctactggacgaggggctggagcggaagcgggaggcggaactcaatgagctttacgatgccatgaaagattgggtcagcgaactcaggaaagacaatgcggaactcaacgagaagctggtggagaagcaggatgagctcgagaaggcccgtcaggaattccttgaagatattcgtacaagggacgctgaaattctgaagctgaagcagctcttagatgagaaggctgaaaaaaacaattctgcagctactgggtttccttgcctagcgcctgaagctgtcctagaaaattcaactccattgtcacctaaaagaaagacaccattttcccacggcaagcagctagaatgctccagaagacatacacgcatctcagggaataggacaacagagattcggagtgctcatatgctttctttgctgcttcaatctttagttcgcatgaagatctcggttacagtttcatcctcacctggctagaaacatctgatgaatggtcatataagctctcctcgttgggcacactggaaaggatagccgttgattggatgaggcaagacataagattcagcatgaaaatgtgccgcatgttctttgagcggatatcaagcatcataacaaaaggatgacgacatgctcttcgcttcagctagttatatcagtctgcctactgtacatggaagcatcctgatgtaaaaatgatttgatgcactatcttattgcagagctgtctttcatgctcatgccagtggtgtgtttggttgccggacatttagggacagccacgacagggaatccctgtcatcctctctcgttcctttaatttccctttaatttcgaggtataaccgaggacaagacattgaatcaaataatattattaaatc

SEQ ID NO: 148599 - DNA, 969 bp, Zea Mays
actgcgggcacgtccgcttcttccccatcccgtttctatggccgcgcgcggtgggttgacactgcaattattgatttccgcttaatctattgccgtgccgtagaagcggaagctactggacgaggggctggagcggaagcgggaggcggaactcaatgagctttacgatgccatgaaagattgggtcagcgaactcaggaaagacaatgcggaactcaacgagaagctggtggagaagcaggatgagctcgagaaggcccgtcaggaattccttgaagatattcgtacaagggacgctgaaattctgaagctgaagcagctcttagatgagaaggctgaaaaaaacaattctgcagctactgggtttccttgcctagcgcctgaagctgtcctagaaaattcaactccattgtcacctaaaagaaagacaccattttcccacggcaagcagctagaatgctccagaagacatacacgcatctcagggaataggacaacagagattcggagtgctcatatgctttctttgctgcttcaatctttagttcgcatgaagatctcggtaaatgatggaacagaaatattttcggtttcagtatctcatgaagctagtggttacagtttcatcctcacctggctagaaacatctgatgaatggtcatataagctctcctcgttgggcacactggaaaggatagccgttgattggatgaggcaagacataagattcagcatgaaaatgtgccgcatgttctttgagcggatatcaagcatcataacaaaaggatgacgacatgctcttcgcttcagctagttatatcagtctgcctactgtacatggaagcatcctgatgtaaaaatgatttgatgcactatcttattgcagagctgtctttcatgctcatgccagtggtgtgtttggttgccggacatttagggacagccacgacagggaatccctgtcatcct

SEQ ID NO: 148600 - DNA, 1059 bp, Zea Mays
ctctttccgcacgaccgcaccgtgtgagttcaaaaaacttacccccaaaaactgtcctcccttggttccttcccgctctccagccaaagtcgccgctcccgctcggacacgcgtctagaagcttctggatccgtccctgacgccgatggagcagctcgactacaagttccacgagaagtacactgctctgaagaagcggaagctactggacgaggggctggagcggaagcgggaggcggaactcaatgagctttacgatgccatgaaagattgggtcagcgaactcaggaaagacaatgcggaactcaacgagaagctggtggagaagcaggatgagctcgagaaggcccgtcaggaattccttgaagatattcgtacaagggacgctgaaattctgaagctgaagcagctcttagatgagaaggctgaaaaaaacaattctgcagctactgggtttccttgcctagcgcctgaagctgtcctagaaaattcaactccattgtcacctaaaagaaagacaccattttcccacggcaagcagctagaatgctccagaagacatacacgcatctcagggaataggacaacagagattcggagtgctcatatgctttctttgctgcttcaatctttagttcgcatgaagatctcggtaaatgatggaacagaaatattttcggtttcagtatctcatgaagctagtggttacagtttcatcctcacctggctagaaacatctgatgaatggtcatataagctctcctcgttgggcacactggaaaggatagccgttgattggatgaggcaagacataagattcagcatgaaaatgtgccgcatgttctttgagcggatatcaagcatcataacaaaaggatgacgacatgctcttcgcttcagctagttatatcagtctgcctactgtacatggaagcatcctgatgtaaaaatgatttgatgcactatcttattgcagagctgtctttcatgctcatgccagtggtgtgtttggttgccggacatttagggacagccacgacagggaatccctgtcatcct

SEQ ID NO: 148601 - DNA, 1200 bp, Zea Mays
ctctttccgcacgaccgcaccgtgtgagttcaaaaaacttacccccaaaaactgtcctcccttggttccttcccgctctccagccaaagtcgccgctcccgctcggacacgcgtctagaagcttctggatccgtccctgacgccgatggagcagctcgactacaagttccacgagaagtacactgctctgaagaagcggaagctactggacgaggggctggagcggaagcgggaggcggaactcaatgagctttacgatgccatgaaagattgggtcagcgaactcaggaaagacaatgcggaactcaacgagaagctggtggagaagcaggatgagctcgagaaggcccgtcaggaattccttgaagatattcgtacaagggacgctgaaattctgaagctgaagcagctcttagatgagaaggctgaaaaaaacaattctgcagctactgggtttccttgcctagcgcctgaagctgtcctagaaaattcaactccattgtcacctaaaagaaagacaccattttcccacggcaaggtaaagagggtacagttgagtgaagatgttcatcacagtagccccgcagaggagaaatctgagtagttccttttcatgtacaaatatttgagtgacttttgtctacttatcctttttgtggtttgatttgatctgatacagcagctagaatgctccagaagacatacacgcatctcagggaataggacaacagagattcggagtgctcatatgctttctttgctgcttcaatctttagttcgcatgaagatctcggtaaatgatggaacagaaatattttcggtttcagtatctcatgaagctagtggttacagtttcatcctcacctggctagaaacatctgatgaatggtcatataagctctcctcgttgggcacactggaaaggatagccgttgattggatgaggcaagacataagattcagcatgaaaatgtgccgcatgttctttgagcggatatcaagcatcataacaaaaggatgacgacatgctcttcgcttcagctagttatatcagtctgcctactgtacatggaagcatcctgatgtaaaaatgatttgatgcactatcttattgcagagctgtctttcatgctcatgccagtggtgtgtttggttgccggacatttagggacagccacgacagggaatccctgtcatcct

SEQ ID NO: 148602 - DNA, 868 bp, Zea Mays
gaattgtgaacatgctaccagttgaaaatgccttccgtgaaagcaatgtttgcaccatgtattgtgtaacagagtaaggatgccgaggtgatgctgaagatgggaagcacaactgacaagcgtgaacagtatagattgatgagagatgctatggagaaaaggttcattcgggttgccaaaggttcactagtcgggggtgttcggctggggatgtttactgcgactttctttggcatacagaaccttcttatcgatactcgtggagtacatgatgtattcaacattgccgctgctggctctgctactgcagctgcttttggccttatattgccagggtcaatgatgtggcgtgcaaggaatgtattggtgggatctgctcttggtgctggcatctgctatccacttggctgggtacagttaaagctggcagaaaaggccaatcttgagattgcaaattcaaaaccatcatccgatttgacagagggaaaagaaaatcaaagccgtgtgggtgctgctatcgaacgacttgagggtagtctgaagaagtgagtgaagcctacgcatcgatggcatttttctcgttgtcttggttccataaatgtagcagctacaaggactgggctgcactgactattgcttcttttctcgcatgttatggacttttatttcgagtttgcagtaggtatcgccgtaccgcactggtaacttgtatctttcaagtcacaagttattgagttcgcagttgctattctaaaaggactgggaaatgcaaaatgtgtttttttttttactttttttcaaaagctggaaaagatgtctgttgtactgaaacagtagataagtcattgtttgagttttgtttggcaca

SEQ ID NO: 148603 - DNA, 1170 bp, Zea Mays
aactagaatcactcaacacgcacgggccaggcccagctcagaggcaaaaacccacaccacacttcgttccccttgtcccaattgctcctccacttcccccaccgcccaccagtgatctcgccgccgcgacgcgaggcaccacggccggcgccggccgccttcctccagaaagtatcccccgtgcgcccgaatcacctcttaatttcgttcttagccgctgcgtttcacagaggtcgcgacatgcccgcctcggcggctcctcctgcccagcccgcggcaccgccccctcctcctcctcccgcttctcctgcccctccggaggatgtggaggcgactgccggttcaccttcgagggcttcagcagtggggacggtgaactggggaacggccaccctcgttggcgtcttcgctgggctgctatacggggggagcagggaggcctccgcttccgtcagtaaggatgccgaggtgatgctgaagatgggaagcacaactgacaagcgtgaacagtatagattgatgagagatgctatggagaaaagaaccttcttatcgatactcgtggagtacatgatgtattcaacattgccgctgctggctctgctactgcagctgcttttggccttatattgccagggtcaatgatgtggcgtgcaaggaatgtattggtgggatctgctcttggtgctggcatctgctatccacttggctgggtacagttaaagctggcagaaaaggccaatcttgagattgcaaattcaaaaccatcatccgatttgacagagggaaaagaaaatcaaagccgtgtgggtgctgctatcgaacgacttgagggtagtctgaagaagtgagtgaagcctacgcatcgatggcatttttctcgttgtcttggttccataaatgtagcagctacaaggactgggctgcactgactattgcttcttttctcgcatgttatggacttttatttcgagtttgcagtaggtatcgccgtaccgcactggtaacttgtatctttcaagtcacaagttattgagttcgcagttgctattctaaaaggactgggaaatgcaaaatgtgtttttttttttactttttttcaaaagctggaaaagatgtctgttgtactgaaacagtagataagtcattgtttgagttttgtttggcaca

SEQ ID NO: 148604 - DNA, 1249 bp, Zea Mays
aactagaatcactcaacacgcacgggccaggcccagctcagaggcaaaaacccacaccacacttcgttccccttgtcccaattgctcctccacttcccccaccgcccaccagtgatctcgccgccgcgacgcgaggcaccacggccggcgccggccgccttcctccagaaagtatcccccgtgcgcccgaatcacctcttaatttcgttcttagccgctgcgtttcacagaggtcgcgacatgcccgcctcggcggctcctcctgcccagcccgcggcaccgccccctcctcctcctcccgcttctcctgcccctccggaggatgtggaggcgactgccggttcaccttcgagggcttcagcagtggggacggtgaactggggaacggccaccctcgttggcgtcttcgctgggctgctatacggggggagcagggaggcctccgcttccgtcagtaaggatgccgaggtgatgctgaagatgggaagcacaactgacaagcgtgaacagtatagattgatgagagatgctatggagaaaaggttcattcgggttgccaaaggttcactagtcgggggtgttcggctggggatgtttactgcgactttctttggcatacagaaccttcttatcgatactcgtggagtacatgatgtattcaacattgccgctgctggctctgctactgcagctgcttttggccttatattgccagggtcaatgatgtggcgtgcaaggaatgtattggtgggatctgctcttggtgctggcatctgctatccacttggctgggtacagttaaagctggcagaaaaggccaatcttgagattgcaaattcaaaaccatcatccgatttgacagagggaaaagaaaatcaaagccgtgtgggtgctgctatcgaacgacttgagggtagtctgaagaagtgagtgaagcctacgcatcgatggcatttttctcgttgtcttggttccataaatgtagcagctacaaggactgggctgcactgactattgcttcttttctcgcatgttatggacttttatttcgagtttgcagtaggtatcgccgtaccgcactggtaacttgtatctttcaagtcacaagttattgagttcgcagttgctattctaaaaggactgggaaatgcaaaatgtgtttttttttttactttttttcaaaagctggaaaagatgtctgttgtactgaaacagtagataagtcattgtttgagttttgtttggcaca

SEQ ID NO: 148605 - DNA, 1886 bp, Zea Mays
aactagaatcactcaacacgcacgggccaggcccagctcagaggcaaaaacccacaccacacttcgttccccttgtcccaattgctcctccacttcccccaccgcccaccagtgatctcgccgccgcgacgcgaggcaccacggccggcgccggccgccttcctccagaaagtatcccccgtgcgcccgaatcacctcttaatttcgttcttagccgctgcgtttcacagaggtcgcgacatgcccgcctcggcggctcctcctgcccagcccgcggcaccgccccctcctcctcctcccgcttctcctgcccctccggaggatgtggaggcgactgccggttcaccttcgagggcttcagcagtggggacggtgaactggggaacggccaccctcgttggcgtcttcgctgggctgctatacggggggagcagggaggcctccgcttccgtcagtaaggatgccgaggtgatgctgaagatgggaagcacaactgacaagcgtgaacagtatagattgatgagagatgctatggagaaaaggttcattcgggttgccaaaggttcactagtcgggggtgttcggctggggatgtttactgcgactttctttggcatacagaaccttcttatcgatactcgtggagtacatgatgtattcaacattgccgctgctggctctgctactgcagctgcttttggccttatatgtatgtctctcaccatattctgtctccatcataattttgttatgggaagatactagatacctaaagtattgttctggtttaactttgtatgattttgagtaatcttatgaaatatatgaagtactacgaagcacataagagagctagtatggaatgagcagaagcagagcattttggtattttaaatcctttgtaatggtggctatttgttctaggattcttaatgcaggccaagatcaattctgtcagtatgtttcgtttttcttcatctataaggtttcttgctttggtggctttctaatgcctagcatggaatagatgtttcaagatttttctattttaattcttgtgcctatgaagtcaattggaagttttttatgtcagcaactcagtactagttgggcagagtaagaagctcataaaaagatgtctgccgcattacactggttgaacttagtgttcagaaactgtaaataccgttttggttttgttgctcttttaactgttcctgcacagtatgagttatcatcttatcgtattgtttaattttttttttctgatttttctatggaaataatcagcactgacttgtgatggtgtttgcatcctgacttcaacgacatgtttgtatattcagtgccagggtcaatgatgtggcgtgcaaggaatgtattggtgggatctgctcttggtgctggcatctgctatccacttggctgggtacagttaaagctggcagaaaaggccaatcttgagattgcaaattcaaaaccatcatccgatttgacagagggaaaagaaaatcaaagccgtgtgggtgctgctatcgaacgacttgagggtagtctgaagaagtgagtgaagcctacgcatcgatggcatttttctcgttgtcttggttccataaatgtagcagctacaaggactgggctgcactgactattgcttcttttctcgcatgttatggacttttatttcgagtttgcagtaggtatcgccgtaccgcactggtaacttgtatctttcaagtcacaagttattgagttcgcagttgctattctaaaaggactgggaaatgcaaaatgtgtttttttttttactttttttcaaaagctggaaaagatgtctgttgtactgaaacagtagataagtcattgtttgagttttgtttggcaca

SEQ ID NO: 148606 - DNA, 926 bp, Zea Mays
gtctggggtggcatgctgcgctgcgatgcaaggctgcgacgcgtcgatcctgctggacaacgcgcagagcgagaagacggcggcgccgaacctgtcggtgggcgggtacgaggcgatcgacgcgatcaaggcgcaggtggagaaggcgtgcccgggggtggtgtcgtgcgcggacatcgtggcgctggcggcgcgcgacgcggtgtcgtaccagttcggggcgtcgctgtggcaggtggagacggggcggcgggacggcggggcgccgtcgctggcgtccgacgcgttgggggcgctgccgtcgcccttcgcggggttcggcggcctgctggcgggcttcgccagtcgcgggctcaacctgacggacctggtggcgctgtcgggggcgcacaccatcggcgtggccagctgctccagcgtcaccccgcgcctgtaccaggggaacgccaccagcgtcgacccgctgctggactccgcctacgcccgcgcgctcatgtcgtcgtgccccaacccgtcgcctgcgtccgccaccgtgggcctggacggcggctcgccggccaggttcgacagcgggttctacgcccgggtgcgccagggccagggcacgctggcctccgacgccgcgctggcgcagaacgccgccgccgcgcagctcatggccgacctctccacccccgccagcttctacgccgccttttccatgtccatgaagaagatgggccgcgtcgacgtgctcaccggcaccaacggccagatcaggaagcagtgccgccagatcaacacatcttgaataccttggtttctcttcaaattttttttcttctctcctggcttgcctgatggctccctcccattcatcaccatgcgtcgattcggcgcgcatcaatatatttctcttcgtcgaagccgtcgattcttgcgttcga

SEQ ID NO: 148607 - DNA, 1146 bp, Zea Mays
ccgaggggagcaacacgaatcttgtcattttgcccccggcccacggcgctcacatgctctcgtccggattccggtgccgcggcggctgatgaggggtccgtctggggtggcatgctgcgctgcgatgcaagctgcgtcctgctcctgcccttgtcgtcgtcactcgccacgccacgccacgctgtctcgctgttgtaactgtaatatctaaactgagcaccgtccgtctgctgctcccatcccaatcccaatcccatgcagggctgcgacgcgtcgatcctgctggacaacgcgcagagcgagaagacggcggcgccgaacctgtcggtgggcgggtacgaggcgatcgacgcgatcaaggcgcaggtggagaaggcgtgcccgggggtggtgtcgtgcgcggacatcgtggcgctggcggcgcgcgacgcggtgtcgtaccagttcggggcgtcgctgtggcaggtggagacggggcggcgggacggcggggcgccgtcgctggcgtccgacgcgttgggggcgctgccgtcgcccttcgcggggttcggcggcctgctggcgggcttcgccagtcgcgggctcaacctgacggacctggtggcgctgtcgggggcgcacaccatcggcgtggccagctgctccagcgtcaccccgcgcctgtaccaggggaacgccaccagcgtcgacccgctgctggactccgcctacgcccgcgcgctcatgtcgtcgtgccccaacccgtcgcctgcgtccgccaccgtgggcctggacggcggctcgccggccaggttcgacagcgggttctacgcccgggtgcgccagggccagggcacgctggcctccgacgccgcgctggcgcagaacgccgccgccgcgcagctcatggccgacctctccacccccgccagcttctacgccgccttttccatgtccatgaagaagatgggccgcgtcgacgtgctcaccggcaccaacggccagatcaggaagcagtgccgccagatcaacacatcttgaataccttggtttctcttcaaattttttttcttctctcctggcttgcctgatggctccctcccattcatcaccatgcgtcgattcggcgcgcatcaatatatttctcttcgtcgaagccgtcgattc

SEQ ID NO: 148608 - DNA, 1364 bp, Zea Mays
cttaatgccactgtgaccacaccaaacgccggcggagtcgtcagtcgtgcgtgccggtgcccgtcccgttctgccccgctcccctcccccgactccctcactcttcctcttccgttccattcaagatccctgcagccgtccgtccatccatccattcatccgttaagaggagaggggaggccggccggccggccggtggagcggagatgagggggcagacagagacaggccggtggcgaggaggcgacggcgttgcggcgtggtgggtggccgtggtggccctgcagctgggccattcgctgagccgcgcgcgggcggggctgctggagtccaacccgggccttgcctacaacttctaccagagcagctgccccagcgcggagtccatcgtccgcagcgtcacctgggcgcaggtcgccgccgaccccgcgctcccggcccgcctcctccgcctccacttccatgactgcttcgtcaagggctgcgacgcgtcgatcctgctggacaacgcgcagagcgagaagacggcggcgccgaacctgtcggtgggcgggtacgaggcgatcgacgcgatcaaggcgcaggtggagaaggcgtgcccgggggtggtgtcgtgcgcggacatcgtggcgctggcggcgcgcgacgcggtgtcgtaccagttcggggcgtcgctgtggcaggtggagacggggcggcgggacggcggggcgccgtcgctggcgtccgacgcgttgggggcgctgccgtcgcccttcgcggggttcggcggcctgctggcgggcttcgccagtcgcgggctcaacctgacggacctggtggcgctgtcgggggcgcacaccatcggcgtggccagctgctccagcgtcaccccgcgcctgtaccaggggaacgccaccagcgtcgacccgctgctggactccgcctacgcccgcgcgctcatgtcgtcgtgccccaacccgtcgcctgcgtccgccaccgtgggcctggacggcggctcgccggccaggttcgacagcgggttctacgcccgggtgcgccagggccagggcacgctggcctccgacgccgcgctggcgcagaacgccgccgccgcgcagctcatggccgacctctccacccccgccagcttctacgccgccttttccatgtccatgaagaagatgggccgcgtcgacgtgctcaccggcaccaacggccagatcaggaagcagtgccgccagatcaacacatcttgaataccttggtttctcttcaaattttttttcttctctcctggcttgcctgatggctccctcccattcatcaccatgcgtcgattcggcgcgcatcaatatatttctcttcgtcgaagccgtcgattc

SEQ ID NO: 148609 - DNA, 1121 bp, Zea Mays
gcagatggcactcttttcaggatttttgttctgtttggtttttttttatagctgtcacgtaatcgcacgtgtccgatcaagcaacggaagagacccataccagtcaaaactggccagaaagggacccataccagtcaaatctggccagaaaggttcgttcttgcacatctcgttcagcccacgcaccgtttccagcgacgccatgcatgcatggctcggtgtccagcacacagcaaggtgacgttacccggcacgccacgccacccacaccttaatgcactgtacagtgcagctgtgctttgcgcctggtaggctggtaggtactatagacaaatgatggcgctgttgcagccaaaaccataataattaaacaaagcttgcaagttgcaagctgggtgaagggcagcacatcacagctagtgtagtgacggcatcactgtcctcctggcttggctggctacgtacgcgggcgagcgagagcgccatttgcgtttgctcggctcgggcatatccatcgctttgctttcgcgcaaagctgcccccctgggggggcctataaaaggcatcgccccgcaggccgccccttaatgccactgtgaccacaccaaacgccggcggagtcgtcagtcgtgcgtgccggtgcccgtcccgttctgccccgctcccctcccccgactccctcactcttcctcttccgttccattcaagatccctgcagccgtccgtccatccatccattcatccgttaagaggagaggggaggccggccggccggccggtggagcggagatgagggggcagacagagacaggccggtggcgaggaggcgacggcgttgcggcgtggtgggtggccgtggtggccctgcagctgggccattcgctgagccgcgcgcgggcggggctgctggagtccaacccgggccttgcctacaacttctaccagagcagctgccccagcgcggagtccatcgtccgcagcgtcacctgggcgcaggtcgccgccgaccccgcgctcccggcccgcctcctccgcctccacttccatgactgcttcgtcaaggtccgcctccgcccgtgctctctctctctctctctctctctctctctctctctctctct

SEQ ID NO: 148610 - DNA, 106 bp, Zea Mays
agaaaagttgttcctgagaatctacgtgtttggataatgagattctcatattgcagattctgttcgaacaaccggtaaaatgaaactcataacgaacaaaagatca

SEQ ID NO: 148611 - DNA, 2885 bp, Zea Mays
caccgctccgccccaccatttgaccccacccgtcattccagaatctatttcagccaatgatggcctcggaccgagtagagagcaccgcacgggctctccgtccgttccattcgcccgtgcgcgccatcaccgccgtcgccatggcgtcgctcaagactgccaagaagcaccacgcgcgcctcaacaaccccttcccgcgcgccgtaccgacggccgccatccacgacggcgacggggccctgcgcctgtcgttcgcgtcgacctccaagctcgcccacgcgcacgacttccccgtggggacccgtttccgcctccgctgggacccgtcccgcggcggcgaggtctcgctgtccagggttcctccgtcgtcgggcggcggcgcgatgtgggagaccgtccccggcgtggcgttcctctccgtggcctccgtggccaccgaggccgacgagtgccgcggctccttcgcgctccgcgacggcggcgcccgcctcgtccccgatcgccagcacgtcgacaagatcagggctttctaccgctgcgacgccgaggcaggcggctccgagcccgacctgctgcgcgccgccgcattccggccgtccgacgcgacgcggttcccggtgctggtggtgaccgggctcgtgtccgccgccaagaaggccggcgcgtcgccgtcgtgcacctgctgcgggttgcgcttgcgcgcggcaggtcgccgcgcccggagcgcggcggcggcggcgaggcccgtgctctcggcgcggtactggatccttctcgaggagaagagcgacacgcaggttaggttcagcgtcaagatcggcgactaccaatggacctgctcgcacgctgaccctgccaagtcgcccccggcgacggcgacgaccacgaccacgaccccgaggctccaccgggccagcctgcggcttcgtctgtcggcgcgcgtccagcgagccaccacgagcaagaggacgaggctggccccggccccgagccgtgagcgtgaggaggcgtcggcgctcctgccagcgcccgagcgggcggaggagcggcggccggaggagttcaaccgtgtgttcctgacgtatgcgagcagccgcgacgagcggttcttcgggttcggcgagcagttcagccacgtggagttcaagcggaagcgggtgccggtgctggtgcaggagcaggggatcggcaggggagaccagcccatcacttttgccgccaacctcgtcagctacaggtcaggaggaaactggagcacgacatatgccccctctccgttctacatgacctcaaagatgagatctttgtacctcgaaggatacgagtactccatcttcgacctgacgagacctgacagggtgcaaattcagatttacggcaattcagtccagggacggatacttgacggcgactcaccgacggagctgctcaccagctacacggagtcaaccggacggccgccggttcttcccaggtggatcacgtccggcgccgtcgtcggcatgcagggtggcacagacgccgtccgcagagtttggggccagctcaaggactacgacgtccctgtctctgcgttctggctacaggattgggttggccagaggaagacggcgatcgggtctcagctctggtggaactgggagctcgatgatgcccactacaatgggtggaacgatctagtagacgacctccgcagccacggcatccggacgatggcttactgcaacccttgcctcgtgccgatggacgagaagcccagcgcgaagaggcacctgttcgaggaagccaggaagctgggcatcctggtgagggacgacgccggcgagccgtacatgatgcccaacacggcgttcgacgtcgccatgctcgacctcaccaacccggcagcgcacgcgtggttcaagagcaccgtcctgcgggggatggtggaccgcggcgtcagcggctggatggccgacttcggcgagggcctgccgctggacgcgcggctgcactcgggcgaggactccgtcgccgcgcacaaccggtacccggagctgtgggcgcgcgtcaaccgcgagatcgccgacgagtggagagccagccgccgccgtgccgcggcggagagcgacgacatcgtcgacgacgacgacggcctggtgttcttcgtgcggtcggggttccgggagagctcccgctgggcgatgctgttctgggagggcgaccagatggtgagctggcaggcgaacgacggcatcaagagcagcgtggtgggcctcctcagcggcggcctctcggggttcccgctcaaccacagcgacgccggcggctactgcacggtggacctgccgccgttcctgcgctaccgccggagcgaggagctcctgatgcgctggatggaggtgaacgccttcacggtcgtgctccgcacccacgagggcaacaggccgggctccaactgccagttctactccagcggccgcacgctggcgcacttcgcgcgctgcgccaagatgtacaaggcctgggagttctaccgcgcgcgcctcgtcggggaggccgcgcggacggggctccccgtggcgcgccacctgttcctgcactacccggcggacgagcgcgtgcaggcgctcacgtaccagcagttccttgtcgggacggagatgctcgtcgtgccggtcctggacaaggggcggaccgcggtgaccgcctacttcccggccggcgccggtgcgtggaggcacgtgtggagcggcaacgagtacgggaccggggctggggtgcagggcgggttcgaggcccaggtcgaagcccggatcgggtacccggccgtattcgtcagggccgggtcgtccgtcggggaaagatttgtgagcaacttgagaaatctcacggtgttgtaattt

SEQ ID NO: 148612 - DNA, 86 bp, Zea Mays
gcactcaccttttacggtgttgtcagtgtagatcagatcaaggagctacccgccggcagcttttctacggtttgcatgcatgcagc

SEQ ID NO: 148613 - DNA, 1711 bp, Zea Mays
cttctctctttccttcacacacgcagctcacgtacacgcgatgagcacaccgcgtcgcggcgggcagcaccacggcgacaagcgcaccgtgacacgagcagcctcccgaaacagcgacggacacggcgcaggcgacttgagcttcgggtccacggcggggcctcggttcgccgtcgccccgccgcgcccttgggcgccgccgcctgagcacgcggccgtcttcgcgcagccaccagacgatccgtcgacgttgaccatgctgtggggaccgcccggcgaggtgcccgttgccggcttcgctgcggcaccggaagggcgaccggatgcgttcgctggcagcgcgtcgtgcctgccgctcgcgaggcaggtcggcggccagcagggggcgcgcaacttcgtggtgtcgccgctgtcgttccacgcggcgctcgcgctggtggccgcgggcgcgcggggcgagacgcagcgggagctcctgcgcttcttggactccgagtcgctgggcgagctgcaccgcgccgcggcgacggcgctggtcgcccggctcagcgacctcccgcaggcgtccttcgcctgcggagtctgggtggaccggagccgcgcgctcacgccggagttcatggacaccgccgcgtcgcgctacgcggcggtcgcggagtccgtcgacttcttgaagaactccgaggcggcaaggcagcaagtcaacgacttcgtgaaaggagcaacgaaagggctcatcggcgacgtcctgcctcccggctccgtcgactcgtccacggcgctcgtcctcgccaacgccatctacttcaagggggcgtgggctcggccgttcgatccgtcgagaaccatcttcgcgccgttccatctccccgacggcggcaccgtgcgcgtgccgttcatgactacgagcggtttcgaggaccagcggcagcgggttgccgtgttccccggattcaaggcgctcaagctgccctacaagaacgacgacggcgcgcagcaggacgcgttctacatgcttctactcctccccgacggtgagaccctaaccctcaatgatctctatgataaggtcgtgtcgtcgccgggattcatcaggaagcacacgccggtggacgaggtccgggtcggggggttcatggtgccgaagttcaagttcacgttcgagtttgaggcgtctcacgatatccagaagctgggagtcaaccgagcctttcaaagaggtgacttctccggcatggtctccggtggaaacgggctcatcatctcaggagtgtaccacaaggccaccgtagaggtggacgaggccggcaccgttgccgccgcggccacggccgagttcatgtttatgtgtgcaagaatgcatccaccgccggtggatttcgtggcggaccggccgtttttgttcgccatcgtggagagaagtggcgtcgtgctgtttcttgggcatgtggtgaaccctctggttgggtgatgaatgataggagtggcagctatattttggtcgttatagctttaccgaaatgacgttgttatttaacaataaataaataccgtctattatgtggtttatttttatgggaaccttgaagatgtttatcagaggtagtggctatgaagatttttgtaatatatggatggtggtttaatgctagaattgcaatgtcttagtgattttccacctatatcttaaactttctttctatgttacttt

SEQ ID NO: 148614 - DNA, 1412 bp, Zea Mays
tccggaccggcgcatcggttgcctacgactgtgcggtcgaagaaagaaattaatgaaacggcagtcgcaactcgcaagcaaatcgaacgaacccagccgaagcgcgagctgagcaaggcggaggcggcgggaccggcgatggagcggctgcagcggatctttggcgcctccggcatggggcagccgccgacggactcgccgctgctcgactcctccgagcaggtctacatctcctccctcgcgcttctcaagatgctcaagcacgggagggccggcgtgcccatggaggtcatgggtctcatgctcggcgagttcgtcgatgactacaccgtcagggtcgtcgacgtcttcgccatgccgcagagcgggactggggtcagcgtcgaggccgtcgaccacgtcttccagacaaacatgcttgacatgctcaagcagaccggcaggccagaaatggttgtaggctggtatcactcacatcctggcttcggttgctggctatcaggcgttgatatcaatactcagcagagttttgaagctttgaaccccagggcagttgctgttgtgatagaccccatccagagtgtgaaggggaaggtggttattgatgcattccgcctaattaatcctcagaccatgatgcttggccaggagccacgggcagacgacatcaaatgttgggcacctaaataagccatcgattcaggctcttatccatgggctgaacagacactactactcgattgcaatcaattaccgaaaaaatgaacttgaggagaaaatgttgctgaacttgcacaaaaagaaatggacagatgggctaattttgaagaggtttgacactcattcaaaaaccaacgagcagactgtccaggaaatgctaaacctagccatcaagtacaacaaggcggtgcaggaggaggacgaactgccacctgagaaacttgcgatagcaaatgtaggtcggcaagatgcaaaaaagcatttggaagagcatgtgtccaatttgatgtcatcaaacatagttcagaccctaggaaccatgctcgacacggttgtattttagtctctactaatattgttgttccaaactgaaacatagcccactctatcgaagcatgacacatgcaatgagctcgatgccggatacatttttggttctaagatttgtttacgaatggatttgtctacattctgttgttaaactccctaccttttctatcaaagcttcagtatgttctagttatatttaagccaatgtgggtccacattgtcaattgggatgtcattacccctgggagaaattgtgtaatgcgattatatgacttgttgcgtgggccgcgtgtgatggcttattttgtttgttccacatgcgttggcaccaagtttctcatgcaaatatttgagtgatcttg

SEQ ID NO: 148615 - DNA, 931 bp, Zea Mays
gcgatggagcggctgcagcggatctttggcgcctccggcatggggcagccgccgacggactcgccgctgctcgactcctccgagcaggtctacatctcctccctcgcgcttctcaagatgctcaagcacgggagggccggcgtgcccatggaggtcatgggtctcatgctcggcgagttcgtcgatgactacaccgtcagggtcgtcgacgtcttcgccatgccgcagagcgggactggggtcagcgtcgaggccgtcgaccacgtcttccagacaaacatgcttgacatgctcaagcagaccggcaggccagaaatggttgtaggctggtatcactcacatcctggcttcggttgctggctatcaggcgttgatatcaatactcagcagagttttgaagctttgaaccccagggcagttgctgttgtgatagaccccatccagagtgtgaaggggaaggtggttattgatgcattccgcctaattaatcctcagaccatgatgcttggccaggagccacgggcagacgacatcaaatgttgggcacctaaataagccatcgattcaggctcttatccatgggctgaacagacactactactcgattgcaatcaattaccgaaaaaatgaacttgaggagaaaatgttgctgaacttgcacaaaaagaaatggacagatgggctaattttgaagaggtttgacactcattcaaaaaccaacgagcagactgtccaggaaatgctaaacctagccatcaagtacaacaaggcggtgcaggaggaggacgaactgccacctgagaaacttgcgatagcaaatgtaggtcggcaagatgcaaaaaagcatttggaagagcatgtgtccaatttgatgtcatcaaacatagttcagaccctaggaaccatgctcgacacggttgtattttagtct

SEQ ID NO: 148616 - DNA, 501 bp, Zea Mays
tccggaccggcgcatcggttgcctacgactgtgcggtcgaagaaagaaattaatgaaacggcagtcgcaactcgcaagcaaatcgaacgaacccagccgaagcgcgagctgagcaaggcggaggcggcgggaccggcgatggagcggctgcagcggatctttggcgcctccggcatggggcagccgccgacggactcgccgctgctcgactcctccgagcaggtctacatctcctccctcgcgcttctcaagatgctcaagcacgggagggccggcgtgcccatggaggtcatgggtctcatgctcggcgagttcgtcgatgactacaccgtcagggtcgtcgacgtcttcgccatgccgcagagcgggactggggtcagcgtcgaggccgtcgaccacgtcttccagacaaacatgcttgacatgctcaagcagaccggcaggtagggttccgctgatgattctctcagtcgatctgtaatgcattgtttttcttttctt

SEQ ID NO: 148617 - DNA, 755 bp, Zea Mays
agccatcgcccatctgccatcgccacacaattccatcctgcttccacactgctccaccggaccatctgcacaccacaccacaccacaccatcacttccgccgccgattctcgttggactgtccgttccacttccatcgaccgatcgagacagctcctcatggcttccatcgtgctcctgctgtcggagctgctgggcggggagagcgcgagcgtgctggcggccgagcgctacatgggcggccaccggagcctgcgggagttccggccggccgtgacggaggcgccgcccaagcgtgcccaaaggctggcggagggccagcgcgcggcggccgggacagagcgggcgcgggaggagggcaagcagaggaaggatgacgattcgttcgaggacctcgcgctgcccagggtcgcggtcgacatcatgtggccttgagacttgagagggaggggaggcttgagcgagtcgagttctcgtctaatgccatgtatatttaaaaccagcctattgtttatgtgtatacacatctataattgcgtcagctgttcgtcttcgactactccagctgcaatccacggagcgacaaaatactgtaaaaattatagccctagttgaattaaaaccgcagtaaaccacagtaaacatagccaatagtgaatataacttagaatattatcgagatcagcaacgccagttttactatattaaaattttaacaatgttttactaaatgatttataaattttattagagttg

SEQ ID NO: 148618 - DNA, 1728 bp, Zea Mays
ggaggagattgagaagcaagaagggaagaaagtggccacagacctcacggcggcggctccaatcggcgcctgacaggctgacgacaacaggcctcgcggcggcggctccaatcggacactactgggtgacgacgactccaatcggcgaacgacggcggctccaatcaacgaacgacgacggccacagatcaacggggtgatgatgaagatgaggacttctttgttgatgatcaagacgttagtaggctaatgattgttacacaggatactaggttagaaaaggatgacaaaaatcgcacaagtataccacaggcattttcaactgaggaagcttcaagaataagtgatgccttatactgctatgagaaactgcatggtcgatgcactgataatcaaagaagttcccaggctgatcctgcagatgctgattctaaaccaaccagtggttcaaagggaagccatattcgcactgggactaaagttactgaagaagcaggacagcccattccacgtaggcgccaaaataaaggcaacagaaaagcgcacagctcacgtaaacagagattctttgctggtaattttgtgaataatcctgatcagtatggtggtgtgtcagaaagccctccaggcaattcagttggatatttctatggatctactccagaaaatcacagttataaaagttcaaagctgagttcatctcctcatggaattcctactgggagctcgcctgttgggtctgtgcccaaatcttctccacaatctcagcatcttacttttcatcttttagaaaaaaataaactccagccgcaaaggtacaataagttcaaacatcactgccttatggagcgtaagaaattaggcactggccagagtgagcaaatgaactcactgtatcgcttctggtcatactatctgagagataattttaatgaagatatatacaaggattttaagaaactcgcactggaggatgctgcagcgagctacagatatggtctcgagtgtctattcagattttatagttatggtttggagaaaaaattccaacccaatgtatatgaagatttcgagaagcttactttcgaattctaccgtaatggtgatctttatggactcgaaaaatactgggcatttcaccattaccgaaatccagatatcggtcctgtagataaacttccagagctggagaggcttctgagggaggagttccagaccctagaggacttcaaggcaaaggagaaagcccgagcgacgacggagaaaggaactggcatcagtagcagcagtgtggtggtggccgcaagtcatagcaaggctgagactaagcaggtctgagtcccgcatgaaaattttcggtggtcgccccagcaaaaagaggaagtagcgttttctttttctttgcgaagaagtaatgattcgggtagacatgtgcagattttgctatatcccctgccagtgccgtgtgttgtggctgcccagaaattttccctccttttctcattaccttcctggcaccaatgtcaatgtgggagttgtacatagatattttttttcctctcttgttaaatggacatatcatagagaatggagtttaaagcctttgtggtggctcggtgctgttttttagggtgtgggctatgttgatggcatagtcatctttgagaacttgatttttgaataccttctcgaatttaaaatgatgcaacgaatcatatagttaaagcc

SEQ ID NO: 148619 - DNA, 82 bp, Zea Mays
ctgtatttgtcaagttcattgttttgtgtcatagaaaaagtattcggactgcaagaaatttaaatacgacctgccttcttat

SEQ ID NO: 148620 - DNA, 2843 bp, Zea Mays
tccaaaaataccaatccgccttccatgttctcgtcgctgcctccgtctgacggctcgaagctccctccagttccgatctaaacccgccgaaaccctaatccccatggctgccgccatgggcaaccccatcctgaccctccccgcaccggagggcaacggcaccgggggcggcgacgccgaccagcagctgcagcaggcgccgcctaagccgcctcctcccggcgcgaagacggaccccccggcgacggtggccacccacacgcgcaccatcggcatcatccaccctccgcccgacatccgcgtcatcatcgagaagacggctaccttcgtcgccaagaacgggcccgagttcgagcgccgcatcatctccctcaaccagggcaacgccaaattcaacttcctgcagccctcggatccctaccacgcctactaccagcaccgcgtttccgagatagccgctgcgccgcccggcgcggacggcccctcgggcgccgatactggcgcggctcccgacgaatcgccagcgtcggccccggccgacggcgccgccgccgcacccgtagatggcgctgctgcggacgcaaaggccgatcactccgcgcccttccgcgtggggccgccgcccaaggtgctggtgccacccaaggctgagctgtacacggtgcggctgcccgagggtatcacaggggaggagctggacatcatcaagctgaccgcccaatttgtggcgcggaacgggaagaacttcctgacgagcctggcgcaacgcgagagcaacaacatgcagttccacttcatccgacccacgcacagcatgttccccttctttacggccctcacagatgcgtactccagggtgctgaggccggcagagggggtgcctgcattgctaaaagagctgagggaggggtcaaaggacctgactacagtgttggagagatgcttgaaccggttagagtgggatcggtcgcaggagcaggcaaggcagcaggcagaggatgaggttgagcaggaacggatgcagatgtcaatgattgactggcatgattttgttgttgtggagaccattgaatttgcagatgatgagtatgaggggcttcctgtgccacttacactggaggagttgaagcgccagaagaggatggagaacttgggagaggaggaagcgatggatttgactgaaccttctaaggaggttgagatggaaatggatgaagaggagatgcaacttgttgaggaaggaatgcgggcagcacggcttgaggagaatgatggagcagcacaagttagcttgccgggtgatgacgaggcacctatgaggattgtcaagaactacaagaggcctgaggagaggattccggcagagagagacccaactaagtttgttgtctcgccaataactggggaactcattccgatcagcgagatggaggaacacatgcgcatctcactcattgaccctaagtacaaggagcagaaagagaggatgttagccaagatcaaggagactacccttgcacctgatgatgaaatatcacggaacattgttggccttgctcgcactcgccctgatatttttggaaccactgaggaggaggtgtctaacgccgtcaaggcagaaattgagaagaaaaaggatgaacagccaaagcaggttatttgggatggtcattctggtagcattggacgcactgctactcatgcattatctcagcctcagggtggtgaggaacagtttgatgctacgaatgttgatgggaggcctgttcctggtccagctccacttgtccgacctggcatgccgttgcctcgacctcctcagccacttcctcttgttaatgttcctcgttttatcgctccaccagcaccatactctgttccacccccaggttctcatatgcctggagttccacacatgatgcctcacatgcatctgcctccacagcagatacctggccagccgccgatggttaggatgccaggtcaaatggttcatatgccaaccagcattcctccgcctcctggccaaactcagtttatgcctggtccaccacgcacatttgctatgcccccatcatcgcacatgccacccatgatcaatcccattggaatccctcagcctccagcaccgcctctgcctccacagcctcctgctgaagagcaaccacctccacccgatgaaccagaacctaagaggcagagaacagatgatgcttctctcatcccagcagagcagtaccttgttcagcatccgggtcctgctagcatctctgtatctgtacccaaccttgatgaagggaacttgcgaggccaaattttgcagattcctgtccaatcactgtcagacacagttggtagtctgaaggagcaaattgctggagagttgcaactccctgctaataagcagaagttgagtgtgaggactagtttcctcaaagacaaccttactcttgcttactacaatgtgggtcctggagtggtgatcaatctaacactgagggagcgtggtgggagaaagaaatgagtcttttggttctcagttggcagtttaatgcttacaactataattcagcagctatcatggagaaccagttcgtatctttcatattattttcttttgtatgctatatgcaatcatttgtgttatgtgaacatcgtactttcctctatattatgatacagttaaatcttgtgagtggttctgcctagtatgttacttgaggttgctaaatgctaatggatactttcttggccacttaatgttaaatcgtatggcttctctaacttcttttgtttggtctttgcgagatgccttctatataaagagttcggatttctgtttt

SEQ ID NO: 148621 - DNA, 107 bp, Zea Mays
ctattgacgccgacgactactctacttgcaggcagaggcaggcgacaagtaaatttcagtttaaattctataaaaattcatcaggcaacaagtagatttcagtttac

SEQ ID NO: 148622 - DNA, 83 bp, Zea Mays
atgtatagcttcaatggagttaccaacgcacagaaaaatctttcagctagtacgaacaccgttattagcacagatcaaacagt

SEQ ID NO: 148623 - DNA, 565 bp, Zea Mays
gattatgtctagatctttacatagcgcgacaacagttcatgaccaagcaacattacaagcgtcagatagtgtcactgcaaaagcaaacatagtgctaacaacattattcacaagtctagaaatgagcgagttacaacttttttgggtggcgaccattgtaaacaaaagctaacaatagcgatcacctggatctacacatatatacatacaaaattttcttctttctggatccacaaacgttcggctttaaagtgcacagaactactctggaataaggttggattaatggaatgctctgcaacgaaaaggataataataataatattaccacaattcaatatatctgaagacacactacatatatatatgcaaatagaaaagtgggttgctacatatatgcaaatagaaaaggaaagaatggatacctgtaggttgatagaattggaatgcactaaaaaatttctaatgcatgtaaattgagcatgcgagccatccagcagcgtcaaagatatcgtgcataagaaaatattgtaaagtaaaataaatggttaatgttctgtaacac

SEQ ID NO: 148624 - DNA, 1678 bp, Zea Mays
cctcactctcagctgcgcctgcgagacaaacgagagagagagacgcagccgcatggacaggtacaggatcgcgccggcgcggccggtctgcctctccgccgccggccccggggtccacctccgcgcggcggcgcagtcggcgcgacgctcgagcgtcgccgagatcggcatcttcacggccgagcgctacttcagcgcgggcgacaccggcaggcgcgacgccatgatccccgccgcgcccgcgctccctgaccacgaccgcgacctgccgacgctgtccgtcccatcatcggtggcggacgtggccagccacagtggccgcaccgccgcgtcgtcggaggccagctggaacagccgctccggcctgctgtctgccggacacctggccgctgccaggcagcagcagacggggagcgctgacgctggcagcgatcagggttaccgcggcaggaggaccgccggcggtggctctgcccagcgctggacgctgttcggccgcgactgcccctgcgccggcaggaaggcggtcaccgtcggcatcgcgtccgagccgaggagccccgcgacggcggcgcattcccacgccaagttcagcccgcagtgtgccgtggaggagtgtctggagagcgccatcttcaaggcgaaagacccgtctccgaccgcgaccgaggagcccgagcctcccgccaagctgacggtcacggtcacggtaacgccggggagccgcgcgttccctctcgccgccgacaacgccttcgcggcggcggcggcgccgaaccggagcgccgacgtgccgttcaccgcttacaccaatcccgacaccggtcgccgcgtccggagctccggcgggttcacgttcccggagctcagcctcagcgccggcatcttggacgagccaccgcgcgtgtcgttggaggtgttccgcccgatcgacgaggactcggtgatgcccgcggaccctccgctcgccgccgccgccgtgccccgtgtcgggctacccccgcgcgctccgccggcggcgctggtggacgaggaggcgatgagcgacgcgagctcggacctgttcgacctggagagcttcgcggcgtcgtcctcgtacccgaccacgtaccgcgggcgggggagccggcgcaactcggccgacgacgacccgccctacgtctccgccgcggcggccgccgagccggcgctcagcgagtgcatgtacccggccagcgaggcgagcgtggtgtggagcgtggccacggccgagggcggcgcgttcgacgcgggcagcgtcgccaacttctccagcgccgcgtccgcgtgctgcgtcgacgacctccgctacgtcgtcccggagtcccccgaggccggcttcaccgccgccatgtcacgcagcgcccgccggaagaagagcggcggtggcggcggcggcgggttcctgaacagctgccggtgcgagaaggccgtcagcgtggggcccacgccggtgcgggtggtccggccgccggctcacccgggcgcggccgccaagatgtcgtccggtgacggcgcgtcacggtaccaccgcggccacgctcacgtgccggtccggacgtgacccgcgccatccatcaagtagccggcggcgatgcgtgcacgagcgaggttgcctttttatttttaccggttgcaatagtcgccatgtacaaatatg

SEQ ID NO: 148625 - DNA, 1088 bp, Zea Mays
atcggacggctgcggcctcaattgctgatcggatcgcggccgctggaaatctgcgtgactgcgtctatactgcgcaggcacgagcgtttgtgttgcggcgaggttttcgtgcggccgctgcggtgacaagcaggtcctccctcaagctcgcggcggatcagcgaccgatcgacccgtcttcctcggttcctcatccatcccgggcatccggattccggtgagcggaggaaggcgccatgaaagctgcggaggacgccacgcgctgccctcagatcccccggcgttgccaccactgtgccgggccactctccaaggacatggaaacgagcagctggacagtacctccgttggttcgagatagcttctccatgattggttcggctcttgggggtatagcaggagcgttttatggtttcaaccatgttatgcctgttgttcgacgtcacattaagggcccaatgtggatgcatttttttgttggtgcaccaccagttattgtgttctcttctgcatgtgctggattagcaggtggtacaataccagccaccgcacagctggtttcatcatcctgtcatgccgtgtcatcgcactcctttgcccgctcttcgcgtgtaccaacacatgcaccctccttcgcccccgctgcatctcatgacgacatgcgcaagacaagaagctcctcaccgttgtaagttatcgggtacaacagttcctctacataactccgcctgccttgagaaactaccctattatttaactatgcaagactcatcccatcctactctatcaaacacgaatgttttatcgctccttgccctgtttaatcagggatgccactgtacatggtaaatttctctctctcgtggacagatgctacacgtgccctgtttataaattttggatatatcttgatgtatagctagcattgggcaatgtttcgtggttcaataaaacttcgtgacgtgaccagtgttacactgagctgatgttcttttgagacattccagccctcgaagatattgttttgctcgatggcattgtgactgcattcagtatttacatgaaaaatgccagctatttgttattgg

SEQ ID NO: 148626 - DNA, 1450 bp, Zea Mays
caccgtcccctgctcaaaaccaacaatccttcctttccatacatgcactacacccacttccgttcctgcagctatatatatatataccaccaccacattcccatcttacgaaaccatccacacgagaagaagaagaaacaagccataccatagcacacaccaaaggttactcagtcacatggcaacatccagcacgggctgtctcgtcttgctctgccttgcgtctcccctcctcctccttcccagtgcggtggtccttggccacccatggggtgtcggcggcggcggcttgtccccacagttctacgaccactcgtgtcccatggcggagaagattgtgcagtccgttgtggcgcaggctgtggccaaggagaccaggatggcggcgtccttggtcaggctgcatttccatgactgctttgtcaagggctgcgacgcttcggtgctgctggacaacagcagcagcatcgttagtgagaaagggtccaacccgaacaggaactccatcagggggttcgaggtggtagaccagatcaaggctgctctcgaggctgcctgcccgggcacagtctcctgcgccgacattctcgccctcgccgctcgtgattccaccgccctggttggtggcccatactgggacgtggcgcttgggcggagggactcgctgggcgcaagcatccagggctccaacaatgacatcccagcccccaacaacacgctccccaccatcatcaccaagttcaagcgccagggcctcaatgtcgctgatgtcgttgccctctcaggcggtcacaccataggcatgtctcggtgcaccagtttccggcagaggctgtacaaccagacaggcaacggcatggccgacagcacgctggacgtgtcctacgccgcgcggctgaggcagagctgcccccgctctggcgccgacagcaccctcttccccctggacgtcgtcgccccagccaagttcgacaacttctactacaagaacctcctggccggcaggggccttctcagctccgacgaggttctgttgaccaagagcgccgagacggcgtccctcgtcaaggcgtatgccgccgacgccggtctcttcttccgccactttgcgcagtccatggtcagtatgggcaacatctcgccgctcactgggtcacaaggtgagatcaggaagaactgcaggaggctcaacagcggccactgaggtcggtcgctttatgtgcgtggtgctgctggtggcgtgttttgtttgaataagaaagcatggctgtggttttatcagatgctctggttttttttttgtgtgtgtgtgtgtgttttatttaaacacattgtaaaatgtgtgtctattaattaataactcagtatatgagatgagttcattcttcggttgccatagatctgattatttgttgtgctgtttaacatggtgagagatgaaaaggtgcga

SEQ ID NO: 148627 - DNA, 234 bp, Zea Mays
caagcaggtataccgatccgggacttgtacacaagtttactgacttgcacaagcacaacggtagttatgactcgccctgagaattctgaacaagcacatcaattgctgccaaataaggggggccacttccagtgtcttgttcagaaaatggacacggccatgaatcacattcttcaccacacagtcacgtaattgagtctcaaaatttgttctgaacattcatatcacttccca

SEQ ID NO: 148628 - DNA, 1289 bp, Zea Mays
ctgtctgtatacctgtcactcacgctaccgccgtgaccgatcgttcgttccttccttctcttctccctcccttcgcgggccgcgcgcctattttatttactactgtattcatatcatttatattttttggtttccttccctggcagatctcccactctctcgtcagatcctctcggctagctagctagctagctaggacagaggagggaggggaaggcgctggctatggcgactgcggcggcggcggcggccatggaggagccggacgtcgtcaacggccgcgacgtggtgagctgggtggcgtccggggtggtgctgtggtcgaccgccttcttgctggtgcgggcgctgttccccaagcgctcctacgacttctgcaaccgcgccgtctccaccatgcacgccgtcgccgccgtgtgcctcgcctgcctctccgtcgacgactggtcgtgccccgtctgcccgctcgccgccgcatcctcccctcgccagatgaaggcgctggcggttacgctggcgtacatggtgtacgacgcggcgtgctgccacctcaacggcgacacgcggctggacaacgccgtgcaccacctggtcagcatcgtcggcatcggcgcggggctcgcctaccagaggtgcgggacggagatggtggccagcatgctcgtgacggagatgtccagcccgctgctgcacctgcgggagatgctcaaggagctgggcgtgcgggacacggagctgaacctcctcgtcgacgtgctcttcgccgccaccttctccgccgcccggatgggcgtcgggccgtacctcacctacgtcaccgtgacggccgacaaccccatcctcatcaaggtatatacgtataccgactaccgactccgttccgttcgccaaccaaacaaactgactacttccgctttgccacccaccaggcgatggcgacggggctgcagctggtgagcgcctactggttcctgcggatcctccggatggtcaggtacaagctcgccggcaagaagaagccgacgccggccaagctcgccgccgccgccgccaactgacgtaataagcgccggcgacgaccttcacgagctacgcacatttatgataccgggagttggattcgacagaggccgtgctgtacatatagtacaaatacacacacacgcccgcctctgaagcaatgcaatgcaatgcaatgcaatttctccactgccaaggatgtgtctgtcatctctcatcaaccaagtgtcggtgcgtaccaactgtacgcgcgttgctagcgcaaaaag

SEQ ID NO: 148629 - DNA, 1099 bp, Zea Mays
ctgtctgtatacctgtcactcacgctaccgccgtgaccgatcatctcccactctctcgtcagatcctctcggctagctagctagctagctaggacagaggagggaggggaaggcgctggctatggcgactgcggcggcggcggcggccatggaggagccggacgtcgtcaacggccgcgacgtggtgagctgggtggcgtccggggtggtgctgtggtcgaccgccttcttgctggtgcgggcgctgttccccaagcgctcctacgacttctgcaaccgcgccgtctccaccatgcacgccgtcgccgccgtgtgcctcgcctgcctctccgtcgacgactggtcgtgccccgtctgcccgctcgccgccgcatcctcccctcgccagatgaaggcgctggcggttacgctggcgtacatggtgtacgacgcggcgtgctgccacctcaacggcgacacgcggctggacaacgccgtgcaccacctggtcagcatcgtcggcatcggcgcggggctcgcctaccagaggtgcgggacggagatggtggccagcatgctcgtgacggagatgtccagcccgctgctgcacctgcgggagatgctcaaggagctgggcgtgcgggacacggagctgaacctcctcgtcgacgtgctcttcgccgccaccttctccgccgcccggatgggcgtcgggccgtacctcacctacgtcaccgtgacggccgacaaccccatcctcatcaaggcgatggcgacggggctgcagctggtgagcgcctactggttcctgcggatcctccggatggtcaggtacaagctcgccggcaagaagaagccgacgccggccaagctcgccgccgccgccgccaactgacgtaataagcgccggcgacgaccttcacgagctacgcacatttatgataccgggagttggattcgacagaggccgtgctgtacatatagtacaaatacacacacacgcccgcctctgaagcaatgcaatgcaatgcaatgcaatttctccactgccaaggatgtgtctgtcatctctcatcaaccaagtgtcggtgcgtaccaactgtacgcgcgttgctagcgc

SEQ ID NO: 148630 - DNA, 228 bp, Zea Mays
ccttttccaggcatacaagaaaaggaaggagcctgatgtagagaagcaaaaggaatcaattctagagcacgtcacagtgtcacttgccagtcattatcacctaaaatttacaacttgtgatgtgtttcttccctttggtttatttgtaagcaggaagcatcttagttgaatacaacaaatcaagcttgtgggcttttcaatgaagctgatgtaggttacctctggaca

SEQ ID NO: 148631 - DNA, 175 bp, Zea Mays
cgtctcgctcagggttcgtcctgaccatgctctgtatgctcatgatccgaatccgaagatacctgttcacatatttcacttggaaaactttgtcaaatcatatttttgaggaccttcggaagccgaaggccgccaacacattcccttgcactatacgtctttttgccttttgcag

SEQ ID NO: 148632 - DNA, 3366 bp, Zea Mays
cgccgcgagcgaggggagcgacggcgggagcatccccgtcatgccggcgttcttgaggtcgaggttgtcgacgcgaccctcttgccccagctcggatccgcctaggcgcgccacgacaccgtcctcgccggccccgccggcacggtgctcgtcctcaccgagctcgccacgctatcctacaccccctccggatccgccaagtgatgaagcatcccctctctttgccgtccaagccgcggagccccatactggcctctgacgccgtcttcgcactctgcgacgtcggcacgccgtggcgcatccagtggaagctcttctcctgcccgcttgccatgctcacagggggctatgcgcccgtggagtgagcggcgtggggagacatcttcgaggtcctcaagcgtccccggctcctggctggggcggcggccgctgggtcattatgatcggcaggctcaagtcctccttcgccatggacgcatcgtgctccacggtcttaatacttcgcctagatctggccaccatggagtgggaggaagctgggcgcatgccgcccaatatgtaccgctgcttcactggcctttgcgaggctgcctcgcagggaggcgccataccgaccgctgctaccgggggtaacaataaggtcaaagttttcggaagcgatgggaaggtgtggttcgcaggccgccttcaccggtacacaacactcagtgctacagctgactggcgatcaagtccagacaacagtagcgccccctaccccagcgccgagccaggaccggcgaggaacacaagtcaactagtcaagtcgccgtgcggctcaccagctggcagccagcgagccagcagcggcacctggcgatccgatccaacgagccgcagggccacgaacacgacctcactaccgcatcctgccgtccaacccatccagctcactccgcgaccaatggctcgggccccaggagtcaggacgcccgcgttaagcaaacgaccgagccccgccgcgccgtcccgccagcgcgcagttaaaaacgcgggtgcacgcagcgcacccgtcgcttcgcttccttgctggctgtggctgcttcgtccgtcccacccaatcggcctctcccctccgctccccagcaggagcagccagcccagccctgacgcttcctccccacccggcgtgcaatcgctcccagtcctgactcgttcgctggaccgaacaccgcccggtggtgctcttccgccgtgcttctccgggctcctcctcgccgcccgccgcccggcggcgccgtcctggtggttccgtggggcgccggtcgggcgcgatcggccgtgcggccacccggctctcagtctcaggagagatatattgtaaaatggaagtactgcgtgatatgcacctgccaccaggatttggattccatccttcggatactgaacttgtttctcactacctgaagaggaaaatacttggccagaaaattgagtatgatcctataccagaggttgatatatataagcatgaaccatgggatttacctgcaaagtgcaatcttccaatcgaggacaacaagtggcatttctttgcctctcgtgacaggaagtaccctactggctctaggtcaaacagggcaacactcgctggttactggaaatcaactgggaaggaccgagccataaagctgaagaagcgaactctaggaacaaagaagactttagtctttcatgagggtcggcctccctctggcagacgcactgagtggattatgcatgagtattacatagatgagaacgaatgtaaagtcagccctgatatgaaggatgcttttgtcctctgccgtgttactaagagaagtgactgggaactggataatgaggtgggcaacaggtaccctcatctggaacaactagatgctgctgctgcatcagttgccagcactgtaaagccagaagatgcggttgccacagttatctgtccagaagaatctaatcgtgctgctacaccagttggcagtgatgaactatctaatgatgttggtcaggaacctatcactcctgattcatcacctccaaacggtggtaaagaactggaagtatggctggaagaactgttggatccttcaccttcatttaaccttgtagctgatactcgttctgctgatgtgtctctgactgaccaatatgctgaatcgtccaatttgcagaatcctggttctgtgtctcggaatattggaccaggccatgctagccctatccaggatggaacagatgctacagactacctattaactgatgatcttcccgaggatctttacagtatgttgtatcctggtactgaccagttctatgatagtatgttcttggaacaagctggccaggaaggtattgcttttcctaccaaccaagcgtactacatgatgggaatggaatcctatgctcttccaaccaacttgaacggaactctgaatgctgaattgcagtcagaccaggaaaataacacgacgaatctggcaaatggaaatactgacactggagttacaatacaaagccgcagagcaaccacatctcctgctaacatttcactagcagctggcaagattaaaatgcaggttggaattaataggatggtcacaagtagttccgtatccatcaaccagaccatgcggtttacagataacagtggccgacgtcttgatctcaagactgatgatgttgagcaccagaagaaaactacaaacagtgccatttctgccaagcagtctagggcagccaatcctgaaggccacagtagtcaaggctacctcaagggcttcaaaaatacattcagatgttcatcagctggattcaaggcatacatatcttttgccttttttgtggttggagtcgctgctgctgcagtgctgcatcaccaccgctcctgtgccaacctataaatttgaatcaccaaacaccagcatgcttagttgtagttctagtggtcagcggcagcattggcttgagggcaggtatcttcccagattcatccttgcagtagttcgtcggctttacttacttgcattggactggagtagtagttgagttcctcagcttatatcacgggggttactggcctggacaatggagatacatttgtgcgaccactgattcccagttatctccacatgttttttgtggtgctgtacatattaagtttttttctcgttttgatcgtctagttgctaatgggtgcctatttaaaaaaacgaaaaaaagagggaaaattggtgggggcatatgaacaaaagaaaagaaaagaaagaaagatgtactttaggttatccttagatttgtaaagctgaaccatgtttataaatgatagtggatgactacattattaaa

SEQ ID NO: 148633 - DNA, 1165 bp, Zea Mays
cctgatgttgctttgctcgcaacttttgcttgccacgacggaggctagatccagctcctaggtgtccgtcgtccttccatctcccaccctccctcgttggagcacgagcaccaaaggtccctataccccgtaccgcccttacctctgctctccttttcttctcttctcctgttcacccctcatgccataactgggcgtccgtcgctcccgccctatgccaggtgcccagatcttcgtcggccctgcccctgcttccttcaactccaccaccaggtaatgccctggacttaattgaatgggctctcttctcaccaggatcggtgtcctgccatggctccacgccatgattgttgatcccgtgctgtaggtcatcagaaggggagcagaacccaagcaactagccttctctgctgcccttggtatcacgattgggatctttccggtatgtggattagtcacacaattgttaggcctttaccattctcttgcatttttgcaagattcttggttattaatctcttgctttgtttccttaccgcagaaatattaggagcacctaaaggatcaactacgataaatgttttcagtgagtgtaccaaggccgaatcgtttcttccatttggttctggaagtcgagcatgtgttgggcagaagtttgttgttcttgcaatatcgatgttgattgccagtctgctccgcagctatgaggtatagcctcatccaagtttgtctaaagaaatggacacaacagttacagcagccaccttcatctcccaaaccctaagatcatcctcaccaaaagaaggatctgaagggagagtttggcaaacaaaaatctggcacgtttgctttcactgtattgtttttcactggtgttacatcagtatatgatctttagtttcctaccgtcgtttggaccatgctgaagtttggaaaggcgaccttggtgatgcagaagtgtcttttttcctctggatttttgacagaccctgtgtgcttcactggatctaagtttttgtcaggtttttggagcacccgcagggctgttagatcacaggagacgtatgttgatgtgtataaacagactcattttttcagttggggttttctcctctctgtggagaatgtaatgcccaacgcatgatgtttgtcgtgttgagatgtt

SEQ ID NO: 148634 - DNA, 466 bp, Zea Mays
aagcatagcacacactgtggtcctctttgtcgatgatctcaacccgctggcggaagtacttcctgagcacctccccagcagcgtccgccgcccgctgcgccacctccaccagccgctccgtcgccaactcccccactgccgcagctctccggccggccgccccagcggcgaacgaggccctaaccgtactcatcggctggcgcccactcgcgctcaagaccgcggacgacacgggcgaggcggcgcggaggcggaggaggcgagagcgggggttagggtttgcggaggcgaggccggggaagggcgaggtggccgagtgggtggaggaggaagaggagagcattggggaggagtcggcggcggttgtcgggagcaaggtttaaatgtcggggcggagaatgacgctcggagcacctagcactctagcagcggtgcgccgacgccgacgtggtgggttttgtttacg

SEQ ID NO: 148635 - DNA, 1658 bp, Zea Mays
cgagatctatccccgtttccaacctcacacccccccttccattggagctccttcgtctgagttaaacctaaaccctaatcgcgacctgcgttcgtcaaaaccctacctggccatggacggcggaggaggaggcggtggaggaggaggtggagttggggcaggtgtcatggtgggtggcggagtcgtgccgggcggcgggggcggcgacgtggaactcgtcagcaagacgctgcagttcgagcacaagctgttctactttgatctgaaggagaacccgcgggggaggtacctcaagatctccgagaagacatcggccacgcgctccaccatcatcgtccccatcgacggcgtcgcctggttcctcgacctcttcgactactacatccgcaccgacgagcgcgacgtcttcagcaaggagctgcgactccagaccaaggtgttctatttcgatatcggggagaacaagaggggccgattcctcaagattttcgttgattcaagacatctaggtcctaaatgagtatgctgactaagtattccattgctatgtggatcatggacccatctgttcagtggcagtcttctttcaccaaggtttctgaggcctctgtcaacagaaaccggagtaccataattgttccagctggcagctctggtgaagagggctgggaagcattcagaaatgtactgttggaaataaataacgaggcttccagattgtatgtcctaccaaatcatccaaatcagcaacacatggagccgccagagcgtcttcctggcttgtcagatgatgtgggtgccggatttatagctggacatggtagccagtccgcttctgggccagaggtagatgtcgaacgtttggttgatctgcctcctcaagaagaaattagtggcatgggtatgtctaaggtgattagggcagatcagaagaggttcttcttcgacctgggaagcaacaacaggggccattatttgaggatttctgaggtggctggagttgatcgttcgtctataatcttgccgctctcgggtttgaagcagttccatgaaatggttggtcactttgtagatataatgaaggacaggcttgaaggaatgacaggagctaacgtgcgcactgtcgaatccagtcagagatgattacccttactgtggcctgggcaagactgctgttatgcctcctgtaggtttgccatgtggtgtgtggtaatgttagatcacgcactatcaattcatctggtggggataataatgtctcctttctcttcattttttttttgagttcagtggtgaggattgatttatttgggacgttttgctttttcggaggaataataagcagtgtattgttcgtggggtggtataattatagttgttgtagtgttagccctgttttcatgcttcgctgttcttgtttatgtaaaaaagatgtgtggtatgtttctggcattgagttctttctacatatgttagtgatgcggataggcctgcgttcgaccttcgaccgaattttttgtattttgaccatttttcggaaaaaagaacacgtttagaccctaaaaaattttaatagcattttttggacccttttgctcggcgccatagcctatggcgccgaggtaacacagctcggcgccataggttatggcgccgag

SEQ ID NO: 148636 - DNA, 1557 bp, Zea Mays
gtaaacccccgagatctatccccgtttccaacctcacacccccccttccattggagctccttcgtctgagttaaacctaaaccctaatcgcgacctgcgttcgtcaaaaccctacctggccatggacggcggaggaggaggcggtggaggaggaggtggagttggggcaggtgtcatggtgggtggcggagtcgtgccgggcggcgggggcggcgacgtggaactcgtcagcaagacgctgcagttcgagcacaagctgttctactttgatctgaaggagaacccgcgggggaggtacctcaagatctccgagaagacatcggccacgcgctccaccatcatcgtccccatcgacggcgtcgcctggttcctcgacctcttcgactactacatccgcaccgacgagcgcgacgtcttcagcaaggagctgcgactccagaccaaggtgttctatttcgatatcggggagaacaagaggggccgattcctcaaggtttctgaggcctctgtcaacagaaaccggagtaccataattgttccagctggcagctctggtgaagagggctgggaagcattcagaaatgtactgttggaaataaataacgaggcttccagattgtatgtcctaccaaatcatccaaatcagcaacacatggagccgccagagcgtcttcctggcttgtcagatgatgtgggtgccggatttatagctggacatggtagccagtccgcttctgggccagaggtagatgtcgaacgtttggttgatctgcctcctcaagaagaaattagtggcatgggtatgtctaaggtgattagggcagatcagaagaggttcttcttcgacctgggaagcaacaacaggggccattatttgaggatttctgaggtggctggagttgatcgttcgtctataatcttgccgctctcgggtttgaagcagttccatgaaatggttggtcactttgtagatataatgaaggacaggcttgaaggaatgacaggagctaacgtgcgcactgtcgaatccagtcagagatgattacccttactgtggcctgggcaagactgctgttatgcctcctgtaggtttgccatgtggtgtgtggtaatgttagatcacgcactatcaattcatctggtggggataataatgtctcctttctcttcattttttttttgagttcagtggtgaggattgatttatttgggacgttttgctttttcggaggaataataagcagtgtattgttcgtggggtggtataattatagttgttgtagtgttagccctgttttcatgcttcgctgttcttgtttatgtaaaaaagatgtgtggtatgtttctggcattgagttctttctacatatgttagtgatgcggataggcctgcgttcgaccttcgaccgaattttttgtattttgaccatttttcggaaaaaagaacacgtttagaccctaaaaaattttaatagcattttttggacccttttgctcggcgccatagcctatggcgccgaggtaacacagctcggcgccataggttatggcgccgag

SEQ ID NO: 148637 - DNA, 682 bp, Zea Mays
cgagatctatccccgtttccaacctcacacccccccttccattggagctccttcgtctgagttaaacctaaaccctaatcgcgacctgcgttcgtcaaaaccctacctggccatggacggcggaggaggaggcggtggaggaggaggtggagttggggcaggtgtcatggtgggtggcggagtcgtgccgggcggcgggggcggcgacgtggaactcgtcagcaagacgctgcagttcgagcacaagctgttctactttgatctgaaggagaacccgcgggggaggtacctcaagatctccgagaagacatcggccacgcgctccaccatcatcgtccccatcgacggcgtcgcctggttcctcgacctcttcgactactacatccgcaccgacgagcgcgacgtcttcagcaaggagctgcgactccagaccaaggtgttctatttcgatatcggggagaacaagaggggccgattcctcaaggtgacgtaacgttctctgtatgacctagcgcatcttcaaattttctcatctttttatgtgctggtatgagaaaattgcctaattggggaacttcattatttggaagccaaactgtttagctagaacaaggggtaatttgtcgcactagaacagtgtttgcttgtgtgaatttaggaagtgaaaaatgtcctattgttc

SEQ ID NO: 148638 - DNA, 634 bp, Zea Mays
taaaccaaccatatcaaaagttgcctaatatactctagcactcggaatacatacgtgatgattacagagatactattatatgcgacgaactgcacaagatcccatagccacatacacatacatatgtatccgagatgattacggaacaacaaatgctagctaactatagccggcaaatatacgtatacaagaatgcgatgtgagccatgacaactaagcatgcctttcgtttagactccagatcaacgagacatcaaggcgctggagaatggatgacaacgaacctctgtaccgatcatacacgcacgcacgcaggcagagagaagagagctgggactcgaccagctagctgggcgtgctctcagaagaagccgcggcggcgcggcgggggcaggaggagggcgacgaacgccaggacgacgacggcgacgacggccaacgctatgaggatgttctcgtcgacgatgagcaggcacaccttcttccccatggtcgcagcacggagcctggtggatggcgatgcaggcgggctagtagtatggtattggtatctacacgtcgtccgtcggctttgctcacatgcctggatgggggagtttccttgttgtaggctgtagctgcagaggtctctgtc

SEQ ID NO: 148639 - DNA, 237 bp, Zea Mays
atgtacctccaaatttgcaatgtccagttttcatgtaatacgaacattccttttcacccagacgtagagggaatccactgttgtttaaagcgacaggtacaaaaccactttccctgggatgatcaaacttgcaattggaaccaaatttgcatgtgccattctttgcatagtactcacagagtggctgtccagggcgctctgggtactccatacctgtggtcttcccaacgccattaa

SEQ ID NO: 148640 - DNA, 327 bp, Zea Mays
agatcagacgttgacgaccctgaaggagtcgcggttcttgacgacgatgtcgtacatgtggacggaggagaagctggcgaagtcggcggggagggagatgaggtcgagggagccgcgcttgtggaactggtacagcgccgggtcctcgtagtagcgctcccagcccagcgcccgcagctccggctccagctccgcgtacgaccgcaccacctgcccgctcggcgtgtgcaccagcgccttccgccgtcgcaccgccgcctcgccgcccgccgccccgttctccaccagacgcaccacgccgttcttgaacacccagacgcccgacat

SEQ ID NO: 148641 - DNA, 333 bp, Zea Mays
atgttccttctcctgctcgagagacctgtgaagaaacctgtgaaggactacatgtttgctcgagggaataaccgccatgtcatgttatttttacatgagagtgagaaatctgtgaagagcactacagtggttgagcaggtggatgagtatgttgatactggggatgagatgccagcagccacttaccaatccatggagatcgagaaggacgctgaaggggaggttggtgattatgtggtggggaccattgccgattcattctttgactacgagctgattcatgtggtggggaccgcaaaggaactccttgagtttgctggcaagggattatga

SEQ ID NO: 148642 - DNA, 92 bp, Zea Mays
tttttttttactttttagcagccaagaaagcactgtatcactccaagattccccgttagggctggtttacgaacaaggataccagatgtgat

SEQ ID NO: 148643 - DNA, 945 bp, Zea Mays
cagccagcccgccatgacctagccgcagcctcttttataaaacccgccgcctccgctcgtctcctccacagctccacccaccacagcaggcagagagcagagcgccaccagccaagccgtccgatccttcgtctgccgaagcccaagcccaagcagcagaacaggtccgatggctctcgctctctccggctgctccgcccgcgccgccctgacgtcgctggcccccagggccaggggctacgcggcgtcggcggcgtccggggccatgcggcgcgcggcggcggagagcgcggccgcgggcgaggccaaggaggccgggcgccgcaccgccgccgccgaggtctcgtgggtgccggaccccgtcacgggccactaccgcccctccaactgggccgccgccgccgccgaccccgccgacctccgcgccgcgcacctcgcccccacctacgcccgggcctgaacggcccccgctccctcaccccgctccgcctcgcctcgtgtcgtctcgtatgacatacagtaccgtacctgagtgaaggcgaagagagaggccggtgggggccggggttcgtctggcgaatggcgtcgtcgcgccgcgcgcgcgcgctctgtgacgcccggcccggcgtgttcttggagagcgggaggtgttctgtcgtcttggttggtcgctgtgcgatgcgatccgatgaccaacgggagatgctgttattacaaacaagaagagcggtctgtggtcgccacccgtgtgtggtgtgggtgggctggaatggatgtcctgctctagactccagtgcactcccagctcctacatatatatcagattcagagcagagcagagcagggttttgcactgccgttttacgtttggtgctcgcgacagctagagtatttcggatttatctacgtataataaagttgcatcttttatcgaacacgaacgga

SEQ ID NO: 148644 - DNA, 901 bp, Zea Mays
acggccaccagaccaccacgacgctctcagcttcaccttctcttcagtcttgtctgctagactgtcgacagattccgctccaacgcgcacctgcagtcccgcacgccctcgcccaccgtcgcctttcaaaaagctggaggattctcgagagggagaagcgcgcctggcagctccgttccatccgcccccacgaatgtccgacgaggccaggcgcgggcccgcgggcgccgcgcaggcgatgctccgggcctcctccgaggaccgcaagccggtgggcgctgggtccccggcggcggttgcgcacaagatccagctcaagagcgccgatatgaaggaggagatgcggcaggacgccttcgaaattgcccgcatcgcgttcgataagcacagcatggagaaggacatcgctgagtacataaagaaggagttcgacaagaaccacggcccaacctggcactgcatcgtcggccgcaacttcggttcatacgtgacgcacgagacaaactactttgtatatttctacatcgactctaaagctgtcttgctattcaagtctgggtgattgctcgcagccgacgcaatcaaccttgcacgcctacgttccattgctcccatgtatgcaccgcacccttccccccaggcccagggtcgtctgcagccaagctggaagccggtaatcttaatgagcctgcatgttgatgtatatcagcaacggattattcttcgtatgcccactagtgtgagatcagattgcatcttacttatgtctgatatatctaggttaggtgttgtgagtacattgtcttgttgcaatatgattgccggacaactggacgaactgcctctcgtctgtttgtgattatctcaatagaagcgtccttgctcatgcgtaatactcata

SEQ ID NO: 148645 - DNA, 884 bp, Zea Mays
agtcttgtctgctagactgtcgacagattccgctccaacgcgcacctgcagtcccgcacgccctcgcccaccgtcgcctttcaaaaagctggaggattctcgagagggagaagcgcgcctggcagctccgttccatccgcccccacgaatgtccgacgaggccaggcgcgggcccgcgggcgccgcgcaggcgatgctccgggcctcctccgaggaccgcaagccggtgggcgctgggtccccggcggcggttgcgcacaagatccagctcaagagcgccgatatgaaggaggagatgcggcaggacgccttcgaaattgcccgcatcgcgttcgataagcacagcatggagaaggacatcgctgagtacataaagaaggagttcgacaagaaccacggcccaacctggcactgcatcgtcggccgcaacttcggtattgctctttttcaaaccccttttgggaaccctccttaattagtactgaatgatttcgccagttgtggtcggggtcgggtgtctagtctgatatgcttgcgtcgttgattattctgtggtcgatttcattcgcgctagctcatagaggttcgcacatgattgatagattggaccttgtagaatagtgtttatgctgtcaatagaagccacagaaactctttttttttcctaaaacatattaaaaaggaaatgaacttgggaaagtggagaagtcgaaatggttaccaatcaagttttaagttatacttcaaattcgaagagaatgttttgatgattatgatctatatacttagtccagtagagcccccatacagctctgaatgaagtatagttttagcctttcagggagtgtggtcaggcatgcatgaccgtgtctagttactctatt

SEQ ID NO: 148646 - DNA, 318 bp, Zea Mays
atgaggtcgagtctagggcaagctcgcacagctactggagggatcgagcagagaggaacacccagggcgttgatcaaagagggcgcagcctggcatcgaggggacaagcgccagggaggctcggtgcctggcgacaaactagagcgcgggtcctgggcgcagcacatgacaggagagtggcgggggcaagcggcacttgaggagcggctcgaccaggcggcggcacaggcaagaggcgagcattggggaagacgagtccggcgaggaggcaagctgtggaggagttcggcacaacacccagggcggctgcgctggtga

SEQ ID NO: 148647 - DNA, 97 bp, Zea Mays
gtcactctatgcttcatgagatgatgtatcataagttcattccatcaattttggtggaatcaacccactcctcatgtatatactaattattagctta

SEQ ID NO: 148648 - DNA, 381 bp, Zea Mays
tcatctctgccgggattttgcaggttttgccaggatgatgggacatggagacgtgagctttataaggattctagaggaactcagacttcatctgaacctacttctagaaatctgcaatcaaacaaaaaatcccaagcgcaacaaaaggttgtgaagaaattactagtttcagatcgtcgtggaaagttatctggtgtcgcgagctagtgccctcaacttagcagtaatgttcaggtcccaaaacctgtaaaagaggttattaagagcaacaaaccagttcaaaagagagaccccactccaactactgcccctcctgacatcaagaaacccagtgcacctgcacccgtaccagcaccatctgcactaccaaagcaatcccag

SEQ ID NO: 148649 - DNA, 2483 bp, Zea Mays
atggacgtgctgcggttcgtgcgcgccgccgcggcgccgcagcctgcggtggcgccgccggcgtcggctgcgacggtgccggcgcagcgccagcggctgcgcatgtggccgcgtggcgggggagaccagccgcccccggtcggcgccgcctccacgcgcggcgcggagccgaggagcccgcccgacgaggagcggaaggcggagggggcccagcgggggcagggcaactgggtgctgcagatgctgcgggtgcagccgcggtgggtggatgcggcggacgcggaggccaccggcggcggccaggaaccggacgaggagacggcggctgcggctgcggctggcgctggtggcgtcgaggagtgcgcttcctgcggctgcggggaagacgacgaaggctgcgccgtggggtacggcgacggcgacggcgaggtgttcgaccgcgcgtcgttctcgcggctcctgcggaaggcgtcgctcggggaggctaaagagtattccatgatgtcctacctctgcaacatcgcctacatgatccccagaattcagtgcagctcgtcctcggtgaatgtggaattgctttcggtaaacgctcaaatatcgtcggagtttcctctgaaccagagtttcttacctttcccaccgcctaactcaggaatccttttgctttcatgcttcccatcccagccaaaatgtcttcggcgatacaatctgcggttcgtgacgtcgtcagtgcaagacaaggccggagttagcaaccctgaccagaagcaggagcgtagcaccaagaaagacgaatctggcgatcaagcatccgaagctgtcgacgacgcggtgccacgacgtgggctagggacgataaaaccgtttggtgcgtaccatgtagtgtcttctgctgcctcttacctgcactcccgggccatgggcgttatgccatttggtcccgggaatggcgtcaaggacgatcatccagcagccgtcacgtcgctcgtgagcggcgcgagcggtgacggattgagcgtggacgaggcttcgttcgtggccacgacgagttcggtgacctccatggtcgcggcgaaggaggagacgcggcaagccgttgcggatgatctcaactcttcgagatcttgcccttgcgagtggttcgtctgtgaggatgatcagaacagcacgatatacttcgtggttcagggctcagaatcaattgcttcttggcaggccaaccttttgttcgaacctgtcaaatttgaggaggtggacgtgctggttcacaggggcatatacgaagccgccaaggggatgtatcaccagatgctaccctacgtgaaggcgcacctgaagagctggggcaaatccgcgcggctgcggttcacggggcactccctcggcgggagcctggcgctgctcgtgaacctgatgctgctggtgcgaggggaggcgcccgcgtcgtcgctgctgcccgtgataacgttcggcgcgccgtgcatcatgtgcggcggcgaccacctgctccgccgcctcgggctgccgcggagccacgtgcagtccgtcacgatgcaccgggacatagtgccccgggtgttctcctgccactaccccgaccatgtcgccaacatcctgaagctcgccaacgggaatttccgcagccacccgtgcctcgcgaaccagaaactcctgtacgcgccgatgggggaggtgctgatcctgcagccggacgagcggctgtccccgcaccaccacctgctcccaccggacagcggcatctaccacctgggcggcggtggcggtggcggtggggcgggaacggcggcgaatgcgggcgaaggctccctgccgcagctccggtccgcgctgtcggccttcttcaactcgccgcacccgctcgagatcctcaaggacggcgccgcgtacgggccccggggctccgtgtaccgggaccacgacgtgaactcgtacctccggtccgtgcgcgccgtggtccgcaaggaggccaggcgcgcgcgggaggccgagcgggagcgctggcgcctgctcctctggtggccgttcggcgtgcacggcgtgtcgtcggcgtcggcggggcggcgcgggggcctcgtggacgccgtcagcgaggctgccaggcgcgcgcatctcttgctggtggtgctgctgcccgcggagctgctcgctctcggcgcgctcctggccgtcattagattcaggtgattagataggctctcacgcgggttcatcaatccgttcgttcgttcgtacgccgtcgacacacacgattcttttgtaccaaacacacacacacacatacacgtctgcaaagcaaatgcgacattgcagctgcgtcgcatgtatgtaaaatgaatgaaatgaaaaaaaaaacacaaactcgaattctttggttccgtccaacggttccctctcgacttcactcactcctcgaactatcaactatattttgagtcccctatgaactatattttgaatcttgg

SEQ ID NO: 148650 - DNA, 3309 bp, Zea Mays
gcggtttagattctagcctttgaggcagcagtaccgcagcctaaatgccgtcacggcattgttaatgccagactgcacgtaatcaggccttgtaatatccactcctttaattttttttttcatttttttctggtgcgtgaagcatgttgaatcgaggtgaggtttcgttcggttgtatatagatagaacgaagggaattgaggcttaaatctttttctgtttatttttgaatttaatctcatccgatcctttttcaattcacttcttctaaccgaagaagcatgaggtggattcgtgattattgttgtatgtatatctcctgtacaatttgacctgctggctgtgtagtgtgtacacaggaacctcgcaagtcgcattcgcagctgaaggagaaagaggcaccacgccaaaaccaccacagcaagcggataaatatccaatgtcaaaagggttccttttgaacaagcaaccgaaaagatttttcttcgtcgctcgctcaccacccatcccacccccacaggccacaggccacaggccacagacgagacgatccccggtcatcgcctacctccctgtcctctgccgtccttcccttcgccacgtctccaagtatataggaggaggctctccggcaatgcccgctcccccatcatcctaccaatcacggcagccactccccgtcgtcgaccaaaagcactccggtgagctagaaccggcagaagaatagccagcctgccggcgatccgcgcagaccacgccagccgccccacaagtcccagacggcagggattcctaaacataacgcgctattcctattattagccagccgcctctcgattcgcgcggcttaaccgccctcgtgcgcgtgcgcgcgcgcgcgcggtaggaggccacacgttccggaggcgcgcgcccagaccagggccgcccccgcgccatggacgtgctgcggttcgtgcgcgccgccgcggcgccgcagcctgcggtggcgccgccggcgtcggctgcgacggtgccggcgcagcgccagcggctgcgcatgtggccgcgtggcgggggagaccagccgcccccggtcggcgccgcctccacgcgcggcgcggagccgaggagcccgcccgacgaggagcggaaggcggagggggcccagcgggggcagggcaactgggtgctgcagatgctgcgggtgcagccgcggtgggtggatgcggcggacgcggaggccaccggcggcggccaggaaccggacgaggagacggcggctgcggctgcggctggcgctggtggcgtcgaggagtgcgcttcctgcggctgcggggaagacgacgaaggctgcgccgtggggtacggcgacggcgacggcgaggtgttcgaccgcgcgtcgttctcgcggctcctgcggaaggcgtcgctcggggaggctaaagagtattccatgatgtcctacctctgcaacatcgcctacatgatccccagaattcagccaaaatgtcttcggcgatacaatctgcggttcgtgacgtcgtcagtgcaagacaaggccggagttagcaaccctgaccagaagcaggagcgtagcaccaagaaagacgaatctggcgatcaagcatccgaagctgtcgacgacgcggtgccacgacgtgggctagggacgataaaaccgtttggtgcgtaccatgtagtgtcttctgctgcctcttacctgcactcccgggccatgggcgttatgccatttggtcccgggaatggcgtcaaggacgatcatccagcagccgtcacgtcgctcgtgagcggcgcgagcggtgacggattgagcgtggacgaggcttcgttcgtggccacgacgagttcggtgacctccatggtcgcggcgaaggaggagacgcggcaagccgttgcggatgatctcaactcttcgagatcttgcccttgcgagtggttcgtctgtgaggatgatcagaacagcacgatatacttcgtggttcaggtaccggtaccgctagcttgtggcccaaatactcatggtgattcgatatgtagtttctgttcacttttttttttttgcttctgaatccaatttttgtgccattgtggtttgttttgctttttgtgacctacgtacagggctcagaatcaattgcttcttggcaggccaaccttttgttcgaacctgtcaaatttgaggaggtggacgtgctggttcacaggggcatatacgaagccgccaaggggatgtatcaccagatgctaccctacgtgaaggcgcacctgaagagctggggcaaatccgcgcggctgcggttcacggggcactccctcggcgggagcctggcgctgctcgtgaacctgatgctgctggtgcgaggggaggcgcccgcgtcgtcgctgctgcccgtgataacgttcggcgcgccgtgcatcatgtgcggcggcgaccacctgctccgccgcctcgggctgccgcggagccacgtgcagtccgtcacgatgcaccgggacatagtgccccgggtgttctcctgccactaccccgaccatgtcgccaacatcctgaagctcgccaacgggaatttccgcagccacccgtgcctcgcgaaccagaaactcctgtacgcgccgatgggggaggtgctgatcctgcagccggacgagcggctgtccccgcaccaccacctgctcccaccggacagcggcatctaccacctgggcggcggtggcggtggcggtggggcgggaacggcggcgaatgcgggcgaaggctccctgccgcagctccggtccgcgctgtcggccttcttcaactcgccgcacccgctcgagatcctcaaggacggcgccgcgtacgggccccggggctccgtgtaccgggaccacgacgtgaactcgtacctccggtccgtgcgcgccgtggtccgcaaggaggccaggcgcgcgcgggaggccgagcgggagcgctggcgcctgctcctctggtggccgttcggcgtgcacggcgtgtcgtcggcgtcggcggggcggcgcgggggcctcgtggacgccgtcagcgaggctgccaggcgcgcgcatctcttgctggtggtgctgctgcccgcggagctgctcgctctcggcgcgctcctggccgtcattagattcaggtgattagataggctctcacgcgggttcatcaatccgttcgttcgttcgtacgccgtcgacacacacgattcttttgtaccaaacacacacacacacatacacgtctgcaaagcaaatgcgacattgcagctgcgtcgcatgtatgtaaaatgaatgaaatgaaaaaaaaaa

SEQ ID NO: 148651 - DNA, 1108 bp, Zea Mays
cgccttccgttcccttcaaaaccccgcacgcctcggcctccctgccaggtgactctctctctccagtccagtccagtctcgacgacccactgccctctccaccgaagcatgccgggcgacgtcgacgacgacggtccctacttcttcagcgcgccggcgagccccgtgcactacatcctccgctccccgccttcctccacggccgccggcgcggcctcgcccgccgcctccgccgatgccgactgctgcgcggccgccgcgggggacttcgagttcgccgcgcacatggcggatggacccggacccaagggcggcgcggcgatgagctccgccgaggagctcttcgtcgccggccgaatccgcgtcggctgcctctccccgatccgacgacaggaggccgggcgtgaggggggcagcggcagcggcggcggcgaggaggaggaggaggaggcggagcgggacagacgctcgccgcgggctactcgccggactaggtccgtttccccgacgcgtagccccaggggcgccgccttcgccgagccttccgacaccttcgcgtccgcctcatcgtcttcctcctcctcctcgtcatcgtcctcggcgaagaacagtcggcggcggatatcgctgcgggacctcctgagccgcacgggcggcgactgcgcgggggcggcggaccaggcatcgtcgtcaggcaccgggagcgccgaggtcaccagcaggccgggtttctggccgccgtctatctggccatcgccgcgctcgtcgtccaataacttgccgctgccctgcccggcgccacagccgccgggccgccgctccgcctcatcggacagggccgcggcgccgggcggcggcggcggcggcagtgctcggcgcaccacgtcgctgccgtaccgacagagcctggttctcgggtgcctgggcttcggggctcgcagccggagctacggggctcgccaagtccacgcaccccctcttctcttcacgctgaacacgaaaagctagcaaacgaaggatgaaggagaggtgtttaggccagaagtcacgccacaatttattatgcctcattccacggcattttacaggaaaatgactcagttttaac

SEQ ID NO: 148652 - DNA, 2239 bp, Zea Mays
catttcccccctcctcccgctccccttggctccccaagcctcgacgcccggctagggttttgcctccttcccgccgccgctgtttcagcgagcgagaccgagtggtagagaaagagcggtgcttagccacccatgtcgctgcgtccgagcgagcgggtcgaggtacggcggaaccgctacaaggtggcggttgacgcggaggaggggcggcggcggcgcgaggacaatatggtggagatccgcaagagccgccgtgaggagagcctcctcaagaggcgccgtgaggggctccaggcccaggtccctgcccctccctccggggttgagaagaagcttgaaagcctcccagctatggttagtggggtttattcggatgataataaccttcagcttgaggccaccacacagttccgcaaattgctctctatagagaggagtctcccccatcgaagaagttatcaaaacaggtgtagttccaagatttgtgcagtctctcaccagagaggatttcccccagctgcagtttgaagccgcatgggctctcacaaatattgcttctggcacttcagaaaatacaaaggctgttattgaccatggggctgttcctatatttgtgaagcttcttgggtctggtagtgatgatgttcgtgagcaggctgtgtgggctttgggtaatgttgctggcgattctccgaagtgccgcgaccttgttctcgccaatggtgcgttgatgcctctgctagcccagttgaatgagcatgttaagctctccatgctgcggaatgccacctggactttgtctaacttctgcaggggaaaaccacagccatcatttgatcagactaagcctgctctgccagcacttgcacgacttatccattccaacgacgaggaagttctcactgatgcatgctgggccctgtcatacttatctgacggcactaatgataagatccaggctgtgattgaagctggtgtttgcccccggctcgtggagcttctcctccatccatcaccatcggtgcttatacctgctctacgaactgttgggaatattgtcactggagatgatttgcaaactcagtgtattattgatcatcaagctcttccccgcctcctgaatctgttgacgcagaaccacaagaaaagcattaagaaagaggcatgctggactatttcaaatattactgctggaaacaaagatcagatacaggctgtcataagtgccggtatcatcgctcctttgttgcaactgcttcaaacagcagagtttgatatcaagaaggaggctgcttgggccatctcaaatgctacctctggtggttctcatgagcaaatcaagtacttggtgtctgagggctgcatcaagccattgtgtgaccttcttgtctgccctgatccgagaattgtaacagtttgtctggagggtctggagaatattcttaaagtagggcagcatgacaagaccatgggtgcaacaggtgacactaatgtcttagctcagatgatcgatgaagcggaaggcctggaaaagatcgagaacctacagagccacgataacaatgaaatctatgaaaaggctgtgaagcttcttgagacatactggatggaggaggaagatgacgcaatggctactgccggggaagctgctcctgctgtttttgactttaaccaaggtggcaaccctcctgctgctggtggtctgaacttcaactgatacagtctttgatcgaaagggtgttaattccctcagtgatgggcttggcattggcttgtcgtgacaaatgtagtctggtcgactccacgtgggatataatggtttgtggtgagtccaataaactcaagatttcgaagggagatgggctgagcattatattcccaagtgaaccatggctatcaatatcgcagggtctgtaacaaggattatataatcgtcgaacattagagcgtgggttcttgagaacgctactctaggttgtgcgtcgtttaattatatctggctactgtaaggcattcctgattggtttggttttttaagttcctcgggaatggtctgcgttgcaggttgtccggagtgggtaaacctgagtgggaacatttgagcatattgctcggccttgttttactacggtcgaggctaaattgatttctaaaagctgtttgcttctgcattgttggcgggaaaataaggcgaatgttttgatgccaaattcaatttcgagttaagaggcagatacaa

SEQ ID NO: 148653 - DNA, 1350 bp, Zea Mays
cgagcagccccccacatcatcgcctttcctcttctcaccagcctcctccgacacgcagctagcccacgtaaattgcaccgagacacagacacaggtaacaaaggcaacagccatggcgggaacccgtgccctgtacctcctcgtcgcggctgtcgcggcgctcttagccacgcctgcggccgtggacgcggccacgctggcggagatctgcaggggaaccgcgttccccgacatctgcaccagcacggtggggagcgaggcgcagagcgccggggtgttggacgccatggcggtgttgcggatgcaggtggacgcgttcaacaagcgcaccgaggcggcgagggcgcacgtcaaggaggccgccgtgacggcgtcccccaaggcgcggacggtgctggacctgtgcaacaacctgtacctggacgtggaggacaacctgggagcctgccgccgcgccatcggcttcaaggacgccgtcaccatccgcgccaccatgggcatggcggcgcaggacatgcagaactgcgacgagcagttcaggcagatcggcgagaagaaccccatggagcagttcgacgcgtcgctcgtcgagatgtccgagaactgccgctcgctctccaacatgatctgatcgatctccttctccacggacgacaacagagagccgggcgttttgggccctcgcatcgtttgtcgccgctgctaacgttcgcatgcccatgcccgcgagcgcgctctcgcgcgacaataactgatgagttaagtttgttttgctttgaccatctcacatcgttatttcctgtagagatgcgttaatttggtctcggaaacggggaggcgaattgaggtggaatatttataattcaagaaacacagttttggttctagaagaggatcgtcgatcatgctgctctactcgatctcctctcctcgttacgattttaattaccgttttgtatctatgagaagatctagcaattatagtctatacttttttatagatgtttgagacgataaagaagacatatttaggggttgtttggttcgtggttaaatgtgtcacactttgccacgaaccaaacagcctgaataactaaccttaagcagaaaagttaggcaaagtgtgtcaagttatacatcaaaccaaacatacctttagaccatcttatttgagcccacgcgagaatttttgggagctcatccatctaaaccggattaacgagttcccaaaatggaccagaccagattttttaactttgtaaaatgaaagaatggattgtatcattatgttcttctcgtcgagctaataaaaaaacatatatgggtcgttttgtttggaagtcgaataaa

SEQ ID NO: 148654 - DNA, 336 bp, Zea Mays
gctctcctggccgtctcgccggcgccgtccaaggcgagggaagccgaagccgaggccgctgtcgtggtggtgtcgtgcctcgccaagctgcccgtcaccgcgaaggccttcctggacgtgtcgatcggtggcgagccggcggggcgcatcacggcggggctgttcgggggggggggggggggggcggccccggcgggcgtagcccggttcctgtccctggtgatgggcatggggtaccggcgcaaggagttcatgaaggtggtgccgggctacgtgcagcacggcggcgtggtgtcgtacctggccgagcccgcggtgacggagcggctggcggcc

SEQ ID NO: 148655 - DNA, 531 bp, Zea Mays
cacagaacgttgacgaatatatagatcagctgaccaagaatgaattatcatcaccacccaaaaagatgaagcacacccaggttagcaaaggtatgccagattctacatgttcaaagaatgacaacagttagtccatcatgaaatacatcaaggtatgaggttccatcacttttggtcctgatacttttatgtacatattaacctgatgtttaaaccttcctaaaacagtgtctatgcaagaaaagctaggtcacttttgatcagtagactcttatttgcaccttgcacacatagaaaaggccccatcacttttggtcacaagacttttatgtatatattaacctgatgttgaagccttcctagaactatgtgtgtatgcaagaaaaactatgtcacttctggtcagtagacttttatgtacatacgactccactgttggagcctttctacaactatgcttgtctatgtaaactctgcagatacattattactggacacttaagtatgctagtttaatacaacttgctgctt

SEQ ID NO: 148656 - DNA, 117 bp, Zea Mays
gtgtttgaaaaatgttttcatcgaagaattttatgcgaggtgtgccacatttgttgtgggagggcttgtagcgttatgcaggtggtccaaataatacaactacaaaaataaaaaaaa

SEQ ID NO: 148657 - DNA, 734 bp, Zea Mays
aacacccaacacgatgcccttggggaagtactactgcgactactgcgacaagcagttccaggacacccccgccgcccggaagcgccacctccagggcgtgcagcaccaacgcgcccgcgccctctggtacgactccattcgccaccaagaccagcatggcggcgcttcctccctcctcctgcctgacggcaccctcgccaagggcatctgtcaccacttcgtccgcacgggggcttgcaagtatggggattcatgcagatacttccatccgaagccaaatggtgtcaatccagcattagctgcaccagggcttgggtctgggcctgcacccatggtgcagcagtctgatattattgggaaccaacccaattttgttgtataccagggagtagacataaattcttcctcagggaagatactggggggacacgcctcttggggcaacctgccgccatcactgcaacctcctcctgaaggcggctaccctcccctcccgttcatcgactggggctgaaggggcgttgtctccctgaaattcgaaccatttaatatttcataccttgattggttgtgctaaatcgcatatacttggagcgcagtagagttaaggtgatcccagtttattttgatcttaaatttatctctgtaatagatatttacagtcagaggtacacttcgcagattgcgttgatgtttgaatgaactcacatttgcatcaatggtgctcttatggc

SEQ ID NO: 148658 - DNA, 1906 bp, Zea Mays
gtgcgcgcgggcaggcgggcgtcgcgtggtggtggtggtggtgggtgctttgactgcaggcctcggcagcaggcagagaggactagaggagtcggggcctcggaggaggggagggagagggcgaagagtagggggaaccaaatcttgaagggtaaacggagagttctttcgtggaggaggaagggggggacagcaggaggagggtagaggtagctcaatagatctactgctctcgggggagttaatgcaaagctgagttgctgcacgttggctttcttcagagatggcttcagctggtgtagccccatctgggtacaaaaacagcagcagcactagcattggtgccgagaagttgcaagatcagatgaacgagctaaagattagagatgataaggaagttgaagcaaccataattaatgggaaagggactgaaactgggcacataattgtcaccactactggtggcaagaatggtcaaccaaaacagacagtgagctacatggctgagcgcattgtaggtcaaggttcttttgggatcgtcttccaggctaagtgtttggagacgggtgagactgttgccataaagaaggttcttcaggataagcgttacaagaaccgcgagttgcagaccatgcgccttcttgaccaccctaatgttgttgctttgaagcattgcttcttttcaactaccgagaaggatgagctttatctgaacttggtccttgagtatgtgccggagacagttcatcgagttgtgaagcatcacaacaagatgaaccaacgcatgccacttatttatgtgaagctgtatatgtaccagatatgtagggcattggcttacattcatggcactattggtgtctgccacagagatattaagccacaaaaccttctggtgaacccacacacccaccagcttaaactatgtgactttggcagtgcaaaagttctggtcaagggggaaccaaacatatcgtacatctgctcccgatactatagggctccagagctcatatttggtgccactgagtataccacagcgattgacatttggtctgctggatgtgttcttgctgagcttatgctagggcagcctttgtttccgggtgaaagtggtgtggaccaacttgttgaaatcatcaaggtcctcggtacgccaacaagggaagaaattaaatgcatgaacccaaattacacagagtttaagttcccacaaatcaaagcacacccatggcacaaggtattccacaaaaggatgccgccagaagctgttgatctggtctctcggctactccagtactccccaaatctgagatgcactgctatggaggcacttgttcacccattctttgatgagcttcgagatcctaatactcgccttccaaatggtcgctttttgccaccactattcaatttcaagcctcacgaacttaaaggagtcccatcagacattgtcgcgaaattgattccagaacatgcaaagaagcaatgctcctatgttggattgtgaaatgaccgcgccttgagactggaacctgtggttgcaattgtgaatttcccctgggatgtttgacgatctgaggcatgcgagcctgttgttgaagatgcaaggttacgtacttgtacgacaatgtgacctgtgtagctgagtagtctatgtcgcagtgacatgtaacggcaccccccttcctactaactgacgcttactcgagattgccatagttgatcttgtaatttgttatagagcagtatgaatgtatttatggtagcttgaatctatgtatggattcacttcgtttttccatgtttccttgtctccagacccagattgctaccgtattgtttcagaattcctagctacctgttgcctattgagtattgactaccagcttgcacttgtctgtta

SEQ ID NO: 148659 - DNA, 1601 bp, Zea Mays
atgtctgtggcgttaaaggaggggggagggatcggcgggcgggtggtgcgcgcgggcaggcgggcgtcgcgtggtggtggtggtggtgggtgctttgactgcaggcctcggcagcaggcagagaggactagaggagtcggggcctcggaggaggggagggagagggcgaagagtagggggaaccaaatcttgaagggtaaacggagagttctttcgtggaggaggaagggggggacagcaggaggagggtagaggtagctcaatagatctactgctctcgggggagttaatgcaaagctgagttgctgcacgttggctttcttcagagatggcttcagctggtgtagccccatctgggtacaaaaacagcagcagcactagcattggtgccgagaagttgcaagatcagatgaacgagctaaagattagagatgataaggaagttgaagcaaccataattaatgggaaagggactgaaactgggcacataattgtcaccactactggtggcaagaatggtcaaccaaaacagacagtgagctacatggctgagcgcattgtaggtcaaggttcttttgggatcgtcttccaggctaagtgtttggagacgggtgagactgttgccataaagaaggttcttcaggataagcgttacaagaaccgcgagttgcagaccatgcgccttcttgaccaccctaatgttgttgctttgaagcattgcttcttttcaactaccgagaaggatgagctttatctgaacttggtccttgagtatgtgccggagacagttcatcgagttgtgaagcatcacaacaagatgaaccaacgcatgccacttatttatgtgaagctgtatatgtaccagatatgtagggcattggcttacattcatggcactattggtgtctgccacagagatattaagccacaaaaccttctggtgaacccacacacccaccagcttaaactatgtgactttggcagtgcaaaagttctggtcaagggggaaccaaacatatcgtacatctgctcccgatactatagggctccagagctcatatttggtgccactgagtataccacagcgattgacatttggtctgctggatgtgttcttgctgagcttatgctagggcagcctttgtttccgggtgaaagtggtgtggaccaacttgttgaaatcatcaaggtcctcggtacgccaacaagggaagaaattaaatgcatgaacccaaattacacagagtttaagttcccacaaatcaaagcacacccatggcacaaggtattccacaaaaggatgccgccagaagctgttgatctggtctctcggctactccagtactccccaaatctgagatgcactgctatggaggcacttgttcacccattctttgatgagcttcgagatcctaatactcgccttccaaatggtcgctttttgccaccactattcaatttcaagcctcacggtatgtttcatgcctacataattcaacatcgttatcatagctgctacaaccaggtagcagtgtagtactaagtttgttctttgtatatcaccaccttacatgctcgccacctctgttctgcagaactta

SEQ ID NO: 148660 - DNA, 116 bp, Zea Mays
ttgtttttacatgaagcccgatccctttatattgttgagtataagcggaggccgttgttacatgcgatcgaagtagagatggcaatgggtaaatacccaccgggtattactatctc

SEQ ID NO: 148661 - DNA, 227 bp, Zea Mays
gtttggtttaattccttaagaaaaataaacaacagtagaggaaaaaacaaaatgtatacactgaccacattccctaaccatgacttccatttcccttgcaacctcatcatcccactttgtaatggctatcaggccatatgaaagccataatccacaacagcttttgctactttgtgcttataggactccaagcctacagtcaagttgttgaaatctgttgaaaatgt

SEQ ID NO: 148662 - DNA, 1609 bp, Zea Mays
gcattgggcgcgattcattcccctcgtgggctcccagttcagtaaaccctacgccctgcggcacacacccatctcgccgcgccgccgcgtaaaccccacccgagcccatctcgccctcgcgcctccccgccctcgcgcaggcgcaacaatggcggccgcctcgaggggcctgctcgcgcgcctccgtgtcctctcactctccggcggcgggagcccgtggctccgcttcccgccttcccggctcttctccgcggaggccttcgtctcccattccgatgacgacgacgctgggggcgagggaggaggcgggggccggatcatcgaggcacggtccggggtgatgggccccacctcgcggcgcaccggcgtcatcggcgtcaagtgcgggatgtcggcgatgtgggacaagtggggcgccaaggtgcccatcaccgtcctctgggtcgacgacaacgttgttacccaggtcaagaccgccgagaaggagggtttcttcgccctacagcttggagcaggtcaaaagaaggaaaaacacctaacaaagcctgaagttggccactttagagcacagggagtgcctctgaaaagaaagctaagggaatttcctgtcactgaggatgcgcttcttcctgttggcacaagcatcacagttcgtcactttgttcctggacaatttgttgatgtcactggaatcacgaaggggaaaggttttgcaggtgtaatgaaaagatatggttttggtgggatgcctgcatcacatggaacatctttggcgcatcgcagtggtggctctactggtcaaagagatgctcctggaagggttttcaaaaacagaaaaatgcctggacgcatgggtggtgtgcaacgcacagtgaagaatgtatgggtctatcaaatagacccagccaggaacttactgtatctgaagggccaggttcctggtcctcaaggtagctttattttcgttaaggattctatatataagaaacctgacacggctttgctcccatttcctacatacttcacgcgtgaaggtgagcctgaagacttggagcccctgattgctgatcttggtgatgttgacccattcatggcagccgattaagacaatgcacaaagttggttaattcctttttgtgttctaagcactccttgagctcgtccattccacgagattgtcaaactctcgatggatgtgagcagttcctgaatcacaagctttatccggttactggccagcctgatcaatgttgttccatgtacattacctggcaagtataccagtgctctaatggtttttagatgattgttttgattgaccgaatataacctttttctcaataagttgtacgcggagccacaagtagtatataaaatcagaatatttcactcatgagagtgtgttctggttttacgcgagctgcttatgttattgctagctgttagtttattacctgtcatttttactttctatttctaatacaaccttttctttttctaataatctttatttcaattcttctttttgtcgttttctatgtactattaacttctttcactgctcttgattactgtgtccagagctcaaacgtcatctattacgactcag

SEQ ID NO: 148663 - DNA, 627 bp, Zea Mays
atggcgcaggcgccggctcctgactttgcaggtggcgtggacgatcggctgggtgccgatctatgttgggcagcaaggagggagaccggattagaagggaagaaatacgaagccaggaccattttgttcgagtggatgatcccatatttgcaattgattgggctctcaaggtcctgggttcagcaaaggccacaacctgggtatgtatcttattatgttcttggcattaacgaagataatgttgaggtgctcttcccagaatcacaagttgtgggcagcgacaatccatcttctgttgcgtataacaatgatcttgcttcggcatcatcagccattacagattctgcaacactcgttgagaaggctattgcaaagttgcctgttgatgttcgtgcacacgcaactgattcaaagataaaggccaaatcacaagatcctggttggaagtttggatggttcaaacagcaccttgccggtggattttctgatacgacaaaatgttcaatggttccagaagtagtttcgaaggatatgtatgcttatttgaaaaggaacacaaggcttgtgctttctgttgaaagtgaggaaggaggactggaagatggtgatgctactgaacctgaataa

SEQ ID NO: 148664 - DNA, 2349 bp, Zea Mays
gtcgattctactctacccggtcctcgcttccccgttctgtcctcgcggtcgcgcaggcgtaccaaacagctagggccgggggccgcagccgcgcacacagcaagcaatggcggacgccgccgagatggtgcgcctcctctatctccagaccccgccgcggccgttgctcccgcagttcgctgtacatacacatcggccacaaagtctgctcagagtttccccccgcttccgccctcccatccgtcttcggtgccgcgcgctcgacgccagtagaccggttgcggtggagggggagcgggatgaggaggacggtctcgaggacgaggaggagtcctacttctcggtcacctcgtcggggctctcggaggtggactacctaggggaaagcaccaggggggatttgaacgtgaggagggagcgcctcgaggcgcttgggaacagcaagtcaactttgcatggtcctattgaggagatagcttggaaagaagcgggagaagctgaaacattgcttcatgacttgggaattgcagacccgttttcagtaagacactctcctcgtggaattttctgcaccaggacactaaatcttcgatctatcagtgtagttggctacgatatggactatacattaattcattacaatgtgatggcctgggaaggacgtgcatatgactatgggatggacaacctcaagagcatgggttttccagtagatgaccttaaatttgaccctgacctggtcataagaggtcttgttattgataaagagaagggaaacttggttaaagctgatcgatttgggtacattaagagggccatgcatggtacccaaatgctttccactcgtgctgtgagtgaaatatatggaagagaattggtggacctgcggaaagaaattcgatgggagttccttaatacccttttctctgtttcagaagctgtcatgttcatgcagatggttgacaagttagatcagggattggtgccagctgaacttgggccactggattacaaaggactgtacaatgctgtttccaaagcactttttcgagcacatgtagaaggccaacttaagagagaaataatggctgagcctgatcggtttgtagagcctgatccagaacttcctttagctcttcttgatcaaaaagaggctggaaaaaagttgcttctcattactaattcagatttccattatacaaacaaaatgatgaatcatgcattcaatcgctttcttcctaatgatgtgggatggagagatctgtttgaaatggttatagtctctgcaaggaagccagaatttttccagctttcacatccattgtatgaggttgtaacagatgatggactgatgcgtccctgttttaaagtaaattcaggtggcttatattctggtggtagtgctcagatggttgagaaatcactagacattcatggggatgagatattatatgttggggaccatatttacacagatgtaagccagtcaaaagttcatttacgatggaggacggcattaatctgcagagaactagaagatgagtttaatgcactggtcaaaagccatgatcagaaagaaaagcttgttacacttatacaacaaaaagaaattgtgggggatcttttcaaccagcttcgcctggctctgcagaggcgctctaattcacgtcctgcacagacgcttgctgcaacttgtatggatgaccaggagcttacggagagtatgcaaaagttgctcattgttatgcaaagattagatgaaaagatcgggccaatgctagaagcagatggagaacttttcaataaaagatggggttggttgtcacgtgctggtctatgggataagagtcatcttaccaggcaaattgaaaaatatgctgatatatacacatcaagggtttcaaattttctgcactatactccattcatgtatttccaatctcaagaacagacacttgcgcatgatgcccattcctattctggaggaaaggacatcaaagttcattgagcatccgttcgtcacaatctggagattaggcaggaaagagcgaacgtgatcattgtgattatggctgcgatggctacacaataacaattgtcgttttgaacaaattaattaatacaccttgtaagattgtatttatatataagtaaatctttagctatagcatgctgaatgattgttctgatagtcagtttgtttgtcgtggcctacctagagtttcatattgggaggcacagtacctgttttggtgtacctgctgctatttgcattgtatatgtgaaatgcgaagtgaagtatgacaaggtaacgataagtgacaaatcacgtcatttgatcctgcgcaa

SEQ ID NO: 148665 - DNA, 306 bp, Zea Mays
atgtgctggcgaacgacgtggtgcccgcccgacaccgacaccgacacggcgccgccgctgcgcgcggacggcgtcgacgacgacggctacgaggagctgccggtgtcgctaccgccgcatgtcccgagtgggctgtccagggacgacgcgctgaacgcaggcggggaggcaacgccgttcacggtggagccgcaggtggtggcgccgccgccgtgcaacggtggcttcgacatcggagggccgtggctcatctttgtctgcgcgtcgtccgtctacgccaaggtggcgggccctttccggtcgtag

SEQ ID NO: 148666 - DNA, 1856 bp, Zea Mays
atgcggctcgacgctctccatcgtctggtataccagtgcttatatcctgctttggaatatagttccaagaagagcgccaaggggaacaaacctagaaaagaaagaaacataatttttgaaggtttcagaacgcctagagaagctattgaagtttctcatgcagtgaaaaagctattgttgcaccacgagtgtaaaaccatcgagaagaggaagctggtcatcgacgtcaagggcgtctactgcgccatgcaccctcctcaccctgcctacattgatggtgagaaccaggatgctataaatctatttctaggtattttcaaccacaagatggaaaaccaactcttctattggcccctgccaagtgatgatgcctccctggctcttaacaagatgataactcacagttctgcacctcgaaataatgtgtttgtgggatttggagtgcggctggcgggcgggcgcggcgataggtcggcttgcgggcaggcgggtgcggcatgcaaggagcggctgggtccaaaatgcgtggagcacgattgggcatcaggtcggtgcacgttaaaacataatgcaaataatttagtgtttaggaaaattttatggatgccatctttacgtgcatgctttggagcacttttcgatgatgacccaaagaagtggaggatgtatgcatattttattgtaagtgctggaagcatatttgagctcatcactacactgtatcaggttacttccttccacttcaccattgggaatcttgcaaaggtgtgtaagatcattggctttagatttttaagtaggttgtggcaagaggatttaaagatccttcgtttcttgttatccactgttaagtgtgagcctggatatggttttatgctgcacctttcccagaaacttgccattggaaccctctctgttgacaagaacccacacatacaatttgatctggttttcgataaagagtttaagctgtcgcacacatcaaaaactacgagcgtcttcttcactggctacaaggcaaatctgatggggagaaacagaaaagtcaagaaaaggcagttccttgaatttttcaaaaagaaagatctttttaataatgacctcggtggaccctatgcatttcttgaggcatgtgttggcctcaatgggatgatgcttggtggacgtgtacatactgctgtgcatgtgtttcctaattctcctgtggagcatgaggcaggcaagaagagagccgctgaaagttccgtgctgaaaactcctctatctgataagaaagcaaaagttgccacaccgtcagctcagaagatagttgtgccattgaacagactaacaaaactgtcgtcaaagattgtataggtgtgactctgttcagggatagtcttgaggttctagaacagaagggtagtggtgtgcatcagtgtatctgtttacaggataatagtggttggttaggtgtgtgcagaaaaagtttagcgttatggtttgtatgtgatacatattaactgtgccttggaatgttcatgtgttgtcctgattgcgtgtgatatctctcgctcagttcaagttgcgttttctacatggccatggggaccatctcgctcagttcatttttttattcccgtcgtaacgcacgggcactcacctagtttgagattattttggtaaaagacccactacccatggttatgtaaatataaattacaatatatgccatcattgttttctcacctcaaataaacaaataagggtattgttgtctttgtgaataatctacatttgtataatctaaactatcaaacaactacatgtagattataatatagatatattataatctggattatataatttagatt

SEQ ID NO: 148667 - DNA, 543 bp, Zea Mays
atgcattattcaaacagagaacacagacaaaaaaacattcccataaacacttggctcttggctctgcgacacacctcaaacgatgtgttcagccagggccaggatcttgaggtgcttcttcttcctcagctcgtgggggacggggccgaagacgcgggtgccgatcagctcacccttcttgttcacgaggaccacctcgttgtcgtcgaactggacctcgctgccgtcgctgcgccctttcttcatggcggcgcggacgaccacgccgtagactacgtcttctttcttgaccttgccacgaggctgggcctcctttacggatccgatgatcatgtccccgagccttgctcctttcttccccctcagggactggatgcacatcactcacttggccccagagttatcgaccaccttcaagttagtcctcatctggatgaatgttctgatttgcatgcagcaagtgacgtggattatccaactgcctatagtcccaatcttccggatcatcagaggagatcacatatttgcatgtcgagcacctga

SEQ ID NO: 148668 - DNA, 2087 bp, Zea Mays
agcagcggcatctccatccagaccccggtcggctagccccaacgccgccgccgccgccgccgcccgccgctcggggattgcctgctttcctctgccgaccacatctacaccgcacaactggtccttccaagtgagcttcaatcccctgcgtgtagatggagagggttctcaaggatgacgccgtcgaggagaagggcgaccgcgccagaatggcatcgtttgttggggccatggcaatctcggatttggcgaagaccacattgggtccaaaaggaatggacaagatcctgcaatcaactggtagagggcgtaatgttactgttacaaatgatggggctaccattttgaagtcacttcacattgacaatcctgctgcaaaggtccttgttgacatctcaaaagttcaagatgatgaagttggtgatgggacaacttctgttgttgttctagctggagaacttttgaaggaggctgagaagttaattaacatgaaaattcatccgatgactattattgcaggttacagaatggctctcgagtgtgccagaaatgctttgctacaaaataccatggacaacaaagaaaatacagataagttcagagctgatctcatgaatattgctatgactactcttagttcaaaaatactttcccaagacaaggagtactttgctgaacttgcggttgatgctgtcttgaggcttaagggtagcaccaacttggaatctattcaaattctgaagaaacctggaggatctctcaaggattcatttttggacgaaggattcattcttgacaagaaaattggcatcgggcagccaaagcggattgagaatgccaaaattttggttgcaaacactgctatggacacagataaagttaagatatatggagcacaggtccgggtggattcaatgtctaaggttgcagacattgaagctgctgagaagcagaaaatgagagagaaagtccaaaagatcatagctcacggaatcaactgtttcatcaacaggcagttaatctataacttccctgaggaactctttgctgacgctggcatacttgcaattgagcatgctgactttgagggcattgaacgtctggctcttgttactggtggtgagatcgcatcaacttttgataatccagattctgttaagcttggtcactgcaaggtaattgaagagatcatgattggggaggacaggttaattcatttctctggggtcgcgatggggcaggcttgcaccattgtcttaaggggggctagtgagcatgtgcttgatgaggcagagaggtccttgcatgatgccttgtgtgtgctgtcccagacagtaaatgatacccgtgtcttgtttggaggcggttggcctgagatgctgatggctaaagaagtggatgaacttgcaaggaagacccctgggaagagatctcatgctatcgatgctttctcccacgctctgcaagccatcccaacaatcatagctgacaatgctggtttggacagcgctgagttgatctctcagctccgagctgagcaccacaaagagaactgcactgctggaatcgatgtcatcactggcaccgttggggacatgcaaaggctggggattcaagagtcgttcaaggtgaagcaggccatactcctgtctgcgacggaggccgcggagatgatcctcagggtcgatgagatcataagctgtgccccacgcagaagagaggataggatgtgattagacacgctgtttctcggtgtagtggggatgcttgttaccctagttttgatggtggttctggggcgttcaagttggtcacatttcaagtgtttttggctcctaagaacctagtaattgttatttcgttgaaacaaccaaccgtaggcttttttttttctagattctcatgatgtaccatttggtagcgaagttcttcctctgttcttttttatgtgtcgagttttagtttaaaactagacaacaaatattcgataatggaggtagtacattgtttacgatatgcttgtgccatgtgcctctacatgttctcctattccttttgacgtaggaatgactagcttgtctttgttt

SEQ ID NO: 148669 - DNA, 1320 bp, Zea Mays
aaagttccacactccacagtccacacccgcgcaaaaaacacagcaaggctccatgaacaagttggcatcctgcttcctccagcacggagcaccacacacccaaatcttcaagtcctaccatgttcagagatccccttcgctgcagttgcttgagaaccgatccgtttccatgacccggcaccgcgccgcggaccgtgctgccagaggcaccatcgtcgacgtcgccgtcgacagtggcaccagcttcgacttcgagagctacctgtcggccaaggccagggccgtgcacgacgcgcttgaccttaccctgcagggtctgcggtgccccgaggtcctgagcgagtccatgcgctactccgttctcgcgggcggcaagcgcctccgccccgtgctggccatcgccgcgtgcgagctcgtgggcgggaccgcggccgcggccgtcccggtggcgtgcgccgtcgagatgatccacaccgcgtcgctcatccacgacgacatgccgtgcatggacgacgacgcgctccgccgcggccgcccctccaaccacgtcgcgttcggcgagcccacggcgctgctcgccggcgacgcgctgctggcgctcgctttcgagcacgtcgcccgcggcagcgcgggcgccggcgtccccgcggaccgcgcgctccgcgccgtcgtggagctcgggagcgtagctggcgtcggcggcatcgccgcggggcaggtcgccgacatggcgagcgagggagccccctccggctccgtgagcctgggcgcgctggagtacatccatgtgcacaagactgcgcggctcgtggaggccgcggccgtgtcgggcgccgtcgtcgggggcgggggcgacggcgaggtcgagcgcgtccgtcggtacgcgcacttcttagggctcctgggccaggtggtggacgacgttctggacgtgacgggcacgtcggagcagctcgggaagacggcgggcaaggacgttgccgccggcaaggccacgtacccacggctgatgggcttaaagggagcgcgcgcatacatgggcgagctcctggcgaaggccgaggcggagctcgacgggttggacgccgcgcgcacggcgccgctgcggcacctcgcgcggttcatggcgcacagacagcattgagatggggtggaagtggaactatggaagtggatctggccggctcatccggaacacttgataaaagtgatgcgttgactattagtttctcagacctcaacatcgagtgattactttgccccggcccaaaaggatttatgggcttccgagttgagtgacactgcagtttgccagtggca

SEQ ID NO: 148670 - DNA, 1620 bp, Zea Mays
cggcagccaaatccgctttatcaggtcgagaattgtttctcatccaccgatccacgcgtgctgccgagccggggtctgctcagcctgtaagcgtcagcgtgttccagttccagcttctatttttgctccaaacaagtcgtgctccactagggatcctatccagattcgtggggacacccccgtccagttccagccttccaacttccaaccctctcctctccgcaggctgtagcatttgtcgggttggattgggttgttccgcttgggtagcctggtgggatcgaaatctgtgtgggatccatggcggcggtcgaggggacgacgaagaagaaggtaatcatcgacaccgaccccggaattgacgacgcgatggccatcttcgtggcactgcggtcgccggagctggaggtgctgggcctcaccactaccttcggcaacgtccacaccgccctcgccacgcgcaatgcgctccacctgttggaggctgttggaaggactgacatccccgtcgcagagggatcccatgtaacaatcaagaaagccaccaagctgaggatcgcaagctttgtccacggttctgacggcctgggaaaccaggatttccctccaccggctaccaagcctatagatcagtcggctgctgccttcctagttgagcaagcaaatctgtaccctggacaagttaccattgtcgccctcggtccactaaccaaccttgctctggcagtggagcttgacccttcgttcccgaagaagatagggcagattattattcttggaggtgcatattcagttaatggaaatgtgaaccctgcagccgaggcaaatatctttggggatcctgatgcggcagatattgtgttcacctgcggtgctgatattttggccgtgggactaaatgtaacccaccaagtagttctaaccgatgctgacagggagaagcttgaacagtgtgatagcaaatatgcccgctacttatgcaagataatgggcatttattttgattaccacaaggatgcctacttcattaaaggagtgtatcttcatgatccaacaacggttattgctgctgtgaatccatcgctgctgacttacacagaaggtgttgtgagggtacagacggttggaatcacaaagggccttactgtttttgataacaccaagaaaaggtacggagagatcacagcctggagtggcatgcccaccgtgaaggttgctgtcaccgtcgatgcccctgccgtggtagagctgatgatgcagaggttgatgactgatgactagcagcaataccagttaattggcagcgccaccattaagacaatttccagttcttaagggagaaacaaatgttggaacatggaagtgcatttgttgttcaccagaaatttggtcgtcttgtcatcaaaacaccagaattgcattattgcacgctagatactcatttctttggttgttatgtgcgtgcttggtgtttatgtacagttttatgtgcttgataatgggcacatgaccagttcgacaatgtcatacagttatactatactagtacattgcttatgcttgtgagagaacagaattaagttaaatgaagagccacctgatgccagaaattggtccgcc

SEQ ID NO: 148671 - DNA, 1419 bp, Zea Mays
cgtgctccactagggatcctatccagattcgtggggacacccccgtccagttccagccttccaacttccaaccctctcctctccgcaggctgtagcatttgtcgggttggattgggttgttccgcttgggtagcctggtgggatcgaaatctgtgtgggatccatggcggcggtcgaggggacgacgaagaagaagacgacgcgatggccatcttcgtggcactgcggtcgccggagctggaggtgctgggcctcaccactaccttcggcaacgtccacaccgccctcgccacgcgcaatgcgctccacctgttggaggctgttggaaggactgacatccccgtcgcagagggatcccatgtaacaatcaagaaagccaccaagctgaggatcgcaagctttgtccacggttctgacggcctgggaaaccaggatttccctccaccggctaccaagcctatagatcagtcggctgctgccttcctagttgagcaagcaaatctgtaccctggacaagttaccattgtcgccctcggtccactaaccaaccttgctctggcagtggagcttgacccttcgttcccgaagaagatagggcagattattattcttggaggtgcatattcagttaatggaaatgtgaaccctgcagccgaggcaaatatctttggggatcctgatgcggcagatattgtgttcacctgcggtgctgatattttggccgtgggactaaatgtaacccaccaagtagttctaaccgatgctgacagggagaagcttgaacagtgtgatagcaaatatgcccgctacttatgcaagataatgggcatttattttgattaccacaaggatgcctacttcattaaaggagtgtatcttcatgatccaacaacggttattgctgctgtgaatccatcgctgctgacttacacagaaggtgttgtgagggtacagacggttggaatcacaaagggccttactgtttttgataacaccaagaaaaggtacggagagatcacagcctggagtggcatgcccaccgtgaaggttgctgtcaccgtcgatgcccctgccgtggtagagctgatgatgcagaggttgatgactgatgactagcagcaataccagttaattggcagcgccaccattaagacaatttccagttcttaagggagaaacaaatgttggaacatggaagtgcatttgttgttcaccagaaatttggtcgtcttgtcatcaaaacaccagaattgcattattgcacgctagatactcatttctttggttgttatgtgcgtgcttggtgtttatgtacagttttatgtgcttgataatgggcacatgaccagttcgacaatgtcatacagttatactatactagtacattgcttatgcttgtgagagaacagaattaagtta

SEQ ID NO: 148672 - DNA, 771 bp, Zea Mays
atgagtcatttagtatattcttactatttttagcccgtagaaccaaacatgttagggactaaactttagtcccctaactaaactttagtccctagactaaagaaaccaaacatgacctaagatttaagcgtatttagactagcttcaacaaagacccataaaacatcagataaatatagcgctccatcatctcctttatccgtcgaacaacaaacgctatcgagaccgctaaactatagcgtacgtcgtccgtccgctacatctacagatttcctgtagatcctctatctgatgacgagcgtccgtagccgtcggggaggagcacaagagcgcgggcgccggcgagcagcacaagcacgtgcaaggagcaaaggctctcggctgccactgtggcgtgagcccgatccccgtcggtgcgtcgtggacagtacccggctactcgtccccaccggcgagcccggtccccgttggccgtgaagttggccgcacccatagacacgaatgggaggctatcgccggggtcgggagcacgggaggcggcaacgggaacatggcggcaagactggagagctgatggttcttgctgtagcctgcgacaaaggagcaccgacggctgcagcaagcgccggcaataaagacgcgcgcaaggtgctcgatgtaatgcctgtgtacaacaaacgtgaaggaaatacacgactgctaatcagtttggtattttctatcgatgcaaaactattagttaattcatgatgctaatagtatttctcggag

SEQ ID NO: 148673 - DNA, 1390 bp, Zea Mays
agtgagtctgctgctatattccgaacaaaagcatatattccgaacaaaagcatccattggcacaattaattattaaaatgaaaatggggaatcgaaacatagcaacagtgacacatggatcgtctggtccaatcgaagtgaggcgcgtctcactcgtcgtcggcgacgcggacgagctgctttccgacgttgcgaccgtggaagagtcctatgagcgccttgggcgcgctctcgagcccctcggcgacgtcctcgacgtaggcgagcgtgccgtccctgatgtacggcagcacccacgcctcgtactgcgggtagaggtgcttgtggtcgggctcgatgaacccctgcaggcggaggcgcttggagatgacggcggcgaggttgcgcacggcgtccttctccccgtccgccaggttgtactgcgagatgagcccgcagacggcgatccgtccgtgcacgcgcatgttgagcaggacggcgtcgagcatggcgccgccgacgttctcgaagtagatgtcgatgccgtcggggaagcagcgcttgagcgcggcgccgaggtcgggctcctccttgtagttgaaggcgtcgtggaagccgaacctggtcttgagcagctccaccttctcccgggacccggcgctgccgacgacgtggcagccggcgagcctggcgaactggcccaccagctggccgacggcgccggacgcggcggacacgaacacggtctcgcccttcttcggcgcgcagatctcgtggaagcccacgtacgcggtgagccccggcatgccgaggatgccggtgtagtaggacagcggcacgcccgccccctccccgaccccgtggtgggagatcttggagaggagcctggtggcgggcggcgtcacgacgctgtagtcctcccagccggtgatgccccagacgaggtccccgggcgcgaggcgcgggtcggaggagtcgaccacgcgcgcgacgccgtagcctgtgatggtgtcgcccgggacgaaggcggccgtgtaggactcccgcagcgggcgcgacatcttgggccgcatgtaggggtcgcaggagaggtagaggttcctgacgaggacggacccggccggctcggcgcccgtcaggcggaggggaacctcggcgccctggagcagctccatgtgctcctcgcgaggatatccctccacgtactccttgaggatcacccgccggttcgtcgccgtcgtcgccatcggggcctgcttgtgctcggatctatccctctgcgactctgctttgctgtgccgtgctctgctttcctccgctgaggaggattgagttcagtgtagtacttttgtttggatattgagatttgctagttgcagtagtatattgagatttgcaaatgcaataagtg

SEQ ID NO: 148674 - DNA, 525 bp, Zea Mays
atggagcgcaagcgagatgcgcacggtacccgcgagaacgaggacgcgacttccttttttcttttcggattgctcgtctggaaggctcgcgtggagaagcacaaatacagacatctggagaccgttcgtctttctaggcgtcgaggaggaggcgaggggcgaagggagtttgggatgaaggcgaggccgaggtgtggggccacgacggtcgttcgtcttcccgggtgtcgaggaggagacaagaagcgaaggagagggagtccgggatggaggtcgggccgaggtgcaggcttacgtcgagcaacaaggccgcagccgtcgagcgaggaggaggcgagaggcgaaggtgatggaggcaaggatggaggcggggccgcggcgagcagcgaggccacaaggcgagggaagcatacatggaagagaggcggagcacacgcaagagagacggagcacaacgagagcgtcggtggagagtcacggaggcagggcgtgaaatttctagaatcttcgggacgcaggatgtga

SEQ ID NO: 148675 - DNA, 577 bp, Zea Mays
aattagtgtctccaggtcacataatgttgagttgctaactagcaattatatgtagtttgggtgctaatttctcttctgttgttcaggttactgaagaaaacctggcagcactatttataaattgtggacaggtacgaatctgtgggacaatagtaatcccattacattccccatttgtttttgttgcaaccgtgtgtaatatttggatacatggttgtggactgtcgcatgtgtggagacccaaactcagtccttcggttcgtcttcatagagttcactgatgaggagggtgcaagggctgctctgaatctgtcaggaactgtgctcagatattatcctgtcagggttctgccataaaaaactatcattgcaccagtcaatccaacattcctacccaagtctgatgatgaacaggaaatatgtgcgaggactatttactgcacaaacattgacaagaaggtcactcaggcagatctgaaattgttctttgagtctatatgtggagaggtctttcggctgaggttgcttggtgactaccatcattctactcgcatcgcttttgtggaatttgtgatgg

SEQ ID NO: 148676 - DNA, 121 bp, Zea Mays
tctttcttttctgtcatacctgattgtgttacttttttccaattgaagttgaaaaggttgggtaatgtattagggcaatctttaattctttatctaattgttatattctatatgttagctt

SEQ ID NO: 148677 - DNA, 521 bp, Zea Mays
agtggcatttagcaagcttccgaagtggaagcggaacaagctaaaaattgctcttcaacttttttagcctgctcatcaacacttccaatgtctcatttaatctttgggtcaaatggccatttggtgaaaatagttctcttctacatctgattagcccatgccatctgccactcaattcgcaaaacgcaatcaccatctgcaatgacgcatcaattttcacattgtcctgcatcggtctccttttccctagcatggatttgttttgctaggtttctcttattcttcttccaattcataggtgtgccttttcctctttcctttcagtcaagtgcccttcatttattcaagggtcacacctatttgattccgaggcttgatttttttctgcgtcaactctgccttattgtgttcttttttgtttttgagatgagttgcagtttgagggagcgagatgtacagcagagtgctggcactgtaaaatcacagtactattatctttgatcaatgtaattattttttgt

SEQ ID NO: 148678 - DNA, 201 bp, Zea Mays
atggctacgactacctcgccaacctccgcgagctctgtcccctccctctcctccaccggcggcgggggatcctcggccatgttcctcccaaggcgccggcccacgcgcttcggcctccgcgtggtcatcaagttcaacatcgcaaacccgaccattaggtgccagaagaagctcaagatcgatgacgataagaagctgtga

SEQ ID NO: 148679 - DNA, 1446 bp, Zea Mays
caaactgatagcctgtccccacatgtcaagcactcaagcagcccttcctgtgctggtactagttgtcgctgctgccctgttgcggcgacgactccgtgactcctagtccctacccagatcggcgcccgacgcaaggccgagcaggcgatggccgcagcggcgtcaatggggcacccttacgcgccagccgagctggaccttccgggtttcgtgccgctgaagctgtcccaggtcgagatcctcgtgtcctacctcggcgcctccgtcttcgttttcctcgccgtctggctcgtctccggaagatgtgtcagattatccaagaccgaccgtctgctcatgtgctggtgggcattcacagggttgacccacataatgatcgaggggcccttcgtcttcactcctgatttcttcaagaaggagaaccccaatttctttgatgaagtttggaaagagtatagtaagggagactctaggtatgttgctagggacactgcaactgttacggtcgaagggatcaccgctgtattggaaggccctgcatcactacttgctgtctacgctattgcatccaggaagtccttcagccacattctccagttcgccgtctgtctgggccagctctacggatgcctggtttacttcatcaccgcgtacttggacggcttcaacttctgggtcggcccgttctacttctgggcgtatttcattggcgcaaacagcttctggatctggataccgatgctcatcgccataaggtcctggaagaaaacttgcgccgcgtttcaagctgagaaggtgaagaagaccaaataaaagctgtctttagctaccgttttattggagaccgtcattttgatggcttaaattcttgtgttggttggtactggaaactgcatgatgtactctttgctcaaacaaatgaagaccggtttacaaattcaaggaatcgagcgctggggaaaaaacgatttttttgcttaccaggtaaccaagagaaaaacaacaatcagaggaagcatgggtgaacaatcagaagatgaaaacttaaggaagatatctcctcttacttttctgcagaaaggttcagtgcatataggataaatgaaacttataataatttgaaacaaaatttgttatcacgttctcttaatttagaaaatgtacaaaggagtcctggagccgaaaccgttttttttttaacattagagcatctccaagagagactctaaacatgatcctattttaaatatagagctcaaaactataaaacatccttccaacagcggccctattttataaaatttcatcaaatggttatagggctcggtctctcgggtcctaaatatagtacccatatactagagccctatcctcatttccacttaatctccaaccatttatttcctaatatcatgatttatttcttaaatagcattatttaaggcc

SEQ ID NO: 148680 - DNA, 687 bp, Zea Mays
caaactgatagcctgtccccacatgtcaagcactcaagcagcccttcctgtgctggtactagttgtcgctgctgccctgttgcggcgacgactccgtgactcctagtccctacccagatcggcgcccgacgcaaggccgagcaggcgatggccgcagcggcgtcaatggggcacccttacgcgccagccgagctggaccttccgggtttcgtgccgctgaagctgtcccaggtcgagatcctcgtgtcctacctcggcgcctccgtcttcgttttcctcgccgtctggctcgtctccggaagatgtgtcagattatccaagaccgaccgtctgctcatgtgctggtgggcattcacagggttgacccacataatgatcgaggggcccttcgtcttcactcctgatttcttcaagaaggagaaccccaatttctttgatgaagtttggaaagagtatagtaagggagactctaggtatgttgctagggacactgcaactgttacggtcgaagggatcaccgctgtattggaaggccctgcatcactacttgctgtgtatgtcttcacattgaccactccatttcttcatatgctaccgactttgtttcttctccaacacgggttctgtctagtcagctattgcttatcaagttcaatcaaacctgtctctgtgtgatgccttattttt

SEQ ID NO: 148681 - DNA, 440 bp, Zea Mays
cccgcattaggtgtgattgcaactgttgtataattctacccaaatatctgttaaaaaaatgtaaacaaaatgattgcaaccgatggtgtgttgtaattgcaattgctagtgtagtgtggatgcaactgctgagttgttctgatgtgattgcaaatactgaataactcttgaaatttttgttaaaaaatatgattgcaactgctggtctggtgtgattgcaactgctggtctggtgtgattgtaacttctatataactatgtccaaaaatctgttaaacaaacaatgattgcaactgctgtctggtgtaattgtaactgctggtctggtgtgattgcaacttctatataactatgtccaaaaatctgttaaacaaacaatgattgcaactgctggtctggtgtgattgcaacttctatataactatgtccataaatctgtt

SEQ ID NO: 148682 - DNA, 1251 bp, Zea Mays
caccacaattatatattcacaaaagcatcacaattataatatcattcacaactagatcatttacagatagctagctagatcattcacaaaagctccagagatgatcagtcacaaaagcaccacagcgacatcactccagcttgaagcagttcaaaagcccacaactacatcactaatgtttcatatcactccagctattgttcaaaagcccacaactacatcactctagttgttccagagttgatcagtcacaaaagcaccaaagctacgaagtaaaaaatagtatggaatatagatacataacaacaaatacaaaatatcaccataatataaatatataatattattatagatatgcctcgaggaactccacaaacaaggggcgctctgccatgaaccgtccatgtcgccagatctgcccagtacacccaccgccaccacacaggcatcatctgcagcaaatttaatcaactcatcagccgattcagatggggggttacctctcacgattatgaagccagagaagacattccaaaagatgaagatgaggaacgagagccccatggcgatctcgatgttgggggtcagggccaccgtcatcatcccgtatagagtgtattacatgaagctcatcacctggtataggaagaaccaaaagaatttgctcgctgtcacctggaacccaatcattgggtacacgattgatgagaagatcatcacttacaccaacatgtaaggttgattgttgatgtgttatgttacctaagcgatagcgtatgccatggtggagtacatgcctgccgccttttcacggtagagcacaactctctccattgccaccaccggctgtaggatgctgcaattcatgaaacccaggaacaatgtcaatccatatacgattccaagtatgttgaatacgtcttgctcatccttgttgttgcacaaagaaatacatgttagatcttgattggggcataaaaaataatttaatagtcatgaaagataataataatacgattacatgcttgagccaattttccagaatacaattccaaacatgattgaaacagcaaaagtgttaatgaaccagacaacattgtgttctgagtttttccagtatgcacaactttgcttccacaaacatgccacacattgtatcgtaaagttttgccaataaccctgaggaaaatacagagcatctgtgtttggttctggttgttccaattcatcaattagaaccatgttcttcct

SEQ ID NO: 148683 - DNA, 253 bp, Zea Mays
atgggagagcaggcgattcgagctgttgattgggaatctcaacgagctgctcacctgcagattggaattggatcgatggatggacggtggacgcctgcacgccgattggatctcctcctccttggacggctgctgggttgggatgggacaggacaagagccttcctcgccacagctgccgtgccgtgctgctcctcttctccgagacgctgggagctccgattggagacgtctggaagacggccagacgggag

SEQ ID NO: 148684 - DNA, 1736 bp, Zea Mays
gggcatctcaatttctctaacccgatatgccttccattggtagggcgcgcgtgtgttcttgagagattctcaaaaaagctcatcgtcaccatagagcgctactagctagtgcgactttttctttctctccccctcttggaagtagcatcgatcgattaaggccgcctttacaaccaccatgatggcggcttcgtcatcgtcctccaacctcagtgatcacctcgcgcaagatgacctcctcccatggccttcttcttcttcctcctccctgccatttgctcctgctgctccccatcacagcgccattattggaggcaacagccagcaacctctagcgctaaactgcgctgaccggcatcactccgacgagcttgaggtgctcctctcagcacaaggcagccaccaccaccagagccacagccacaggcacagccaccctgcttctccggtgatccctccgcagctcagcagctctctgctaacgatgcaagacctagggttccaatggagcaactgcggcggcggcttcctagacacctcaccgtccacgccgccgacgaacgggcagctgcagcacgatggccacgacgacgacaagatcgaggcggagggcacgcttattactaactcgtcaaggccatcgtgtgcgggcacagccacgatagccgccagctgccacgacgtcgtcctccacggcggcggcggcggcggcaccgtgctcccgaccataaacatctcgctgacgacgacgacgacgacgcacacgcaggcgcagcagcagcagcgaccgttcctggcggcgccgccgcctctcccgggcgacgcgttcgagatactactggcctcgtcgaggctgtgcaagaccctgctgcttagccaagctgctgcttcttcttcttcttcttcggtgctgctccacgacgacggcacgatcagcacggtgccttcgctgagatcggagtcggagcatgtggcctatggctatggcggcggccctcctcctcctgctcctgccgctgctcatcgtccccgaggacgacgaccatccgttgacaactacaagcagcagatgggcgccgccgcctgtgccgcgggagcaggccgccagtggagcgcggagcacggagggcgagccgccgcctgtgaagaaagggcggcagcggcaccagcacgccgcccggtggtggtgccatggaagaagcctcgactcgagcagcgctccggctccggctccggctccggctcctccaccaccatcctcccttctttcgaggtacggaaagagaagttaggggaccggatcgctgccctccagcagctcgtctcgccattcggcaagaccgataccgcgtctgtgctcatggaggccattggctacatcaagttcctccaagaccaagtcgagactttgagccgcccctacttgaagtcgtccagaagtagcaagaagcccaggccgacgcaccagcgggggtgttggaacgccagcgctgcaggggaggagcaggagcaggaggagacgacgacgaggaggcggcggcctgacctccgcagcagagggctctgcctcgtgcccctctcctgcacgtcctacgtcaccaacgagaacggggcctgggttccttcccaattttaattttaggggagactactagctatagagatcagaggagcagagacaacactgtaccacgaactaatccacggttaatatcacctcacatctctgctctgct

SEQ ID NO: 148685 - DNA, 88 bp, Zea Mays
gacacggaactaattaaagttggttccattcgcatttccagattcgctctatgcaaatcatatatccggataaaggaatccaagaacc

SEQ ID NO: 148686 - DNA, 1884 bp, Zea Mays
cacttcgagtcttcgacgacgacgacgacatcacagcgcacagcgcagttgtggttgcagtttgcttcttcgctcgacatgggcacgggaggcgtagcgctggtcgtcgccgccctcgccgtggtgttggtgacgaggctgtggacggcgctggcccacctggtgtggcggccgtacgccgtcgcgagggcgttcgcgcggcagggcatccgcgggccgccgtacagggtcttggtgggcaacggcaaggaggtccaggcgatgcgggcggcgacgagcggcgacacgctggacctcgcctcccacgactacatcgcgcgcgtgatgccgcagtaccgcgcgtgggtgtcgctctacggcaaggtgttcctgacgtggtccggctcgactccggcgctgttcgtgggcagccacgacatggtgaagcgggtcctgttcgacaaggcggggctgtacggcaagacggacccggggcccaccatactgtccctcatgggcaggggcctcgtgttcaccgacggcgacgactggtcgcgccaccgccgcgtcgtgcacccggcgttcgccatggacaagctcaagtcgatgacgggggccatggcggcgtgcgcggcggaggtgatccgggggtgggaggcgcgcgccgcggcgagcggggaggagggggagccggaggtgacggtggaggtggggcagcagttcacggagctcaccgccgacgtgatctcgcacaccgcgttcggcagcagctaccgtcaggggaaggaggtgttcctggcgcagcgggagctccagttcatcgccttcgcctccatcaacagcggcatgcgcgtgccgggcacgcagtacgcgcccaccaaggccaacgtgcgccggtggcagctcgagcgcacggtgcggggcacgctcatggccatcatcgacgagcgcctcgccgccgcgaaggaggcgaaggggtacggcagcgacctgctcggcctcatgctggaggccaacgccggcgacggcggcggcaagaggcagcagcaggccatgagcatggacgagatcatcgacgagtgcaagaccttcttcttcgccggccacgacacgacctcgcacctcctcacctgggccatgttcctcctcggcacgcaccccgagtggcagcagcggctcagggaggaggtggtccgagagtgcggcggcgccgaggtgcccctcagcggcgacgccctcaacaagctcaagctcgtgaccatggtgctgtacgagacgctccggctatacggcgcggtgccgctgatcgcgaggcgggcgacggcgggcgcggacctctgcggcgtgaaggtgcccaagggcaccctcctgctgatcccgatcgcgatgctccaccgcgacgaggaggtgtggggcgcggacgccggcgcgttcaacccgttccggttccgggacggcatgggcagggccgcgacgcacccgaacgcgctgctgtccttctccctgggcccgcggtcgtgcatcgggcaggacttcgcgatgctggaggccaaggccacgctggcgctcatcctgcggcgcttcacgttccgggtggcgccagagtacgtgcacgcgccggccgacttcctcacgctgcagccgtcgaaagggctccccgtcgtgctcaagctcttggaaccagccgtccttgtcacgagttccggttgagctataatgttcatgtctgacatgccaagtcattgattaggcttctgtcatctgcgactgcgatgtgtttcctcagtttcgttatcatcatatttcagaatgggagctatataatattgtaattttcgtgaatggatgggccaggtccagtccactcatgttttcaaaagagtcattcggcttctttgctggtcc

SEQ ID NO: 148687 - DNA, 384 bp, Zea Mays
atgggtatcaagaaagctaaagaagcgttgtggcgaggtggatcatattcttacatggaggtttctaagcatgtctggggatcaaagaaagtgtgtgatgcagagaaagaaaagaaaaaagaggacatatttaatctagcatgtgaaatagagaaagagaggctacaacttgatcaagtaagagctaggactgaacaaatgagggctgctacacaacaagttagggatgcaaatgaggtcagaaatattgaggtaagggaaagtgagctggagatgaagagatcattagaggaagagaggattaagactatggatctcacctcactgcctgagcacctagaacagttctacaaaagtttacaaaatgaatttattggtcattga

SEQ ID NO: 148688 - DNA, 1370 bp, Zea Mays
aacgggagcgaagacggccctccccgcaatcccatcgcatctgctccaccaccggcacatcgccgccgaccttattcctccgccgctcgaggagtcagccgagccaacggagggagaccatatgggcgcggaggcagcgcatccgcagcaacagcctccctcctccgtccgaccctgcagggaggcggcggcgcccgcggtgctggggctgcagctctcggcgctgatcgaccacgtcgcgcgcgtcgactggtccctcctcgaccgcgtccctggcgaccgcggcggctcgcagcaggtgtccattgtggagttgaatcatattcttaatgaagtgaatacccacatccttccttcccacaatgatctcaccccaataactacaatagccggtggaagtgttgccaacacaatccgtgggctctcagctggttttggaatatcaactggaataattggagcttgtggggatgacaaccagggacttttgtttgtcaacaatatgagtggcttattgtgagatatgcacaacagaacatggaacagattattgaagctattaggattgctaaacaggaaggcctttcagtatcattagatttggccagttttgagatggtccgtgactctaggtctaagcttattaaccttttggagaccggtaacattgacctttgcttcgccaatgaggatgaagctagagaggttatagggggaggtctggaatcagatccagaggaggcgcttgcgttcttgggcaagtattgcaaatgggctgtggtcacacttgcttcaaagggatgcatggcaaagcatggcaaacaggtcgttcaagtgccggccatcggggagagcaacgcggtggacacaactggagcgggcgacctgttcgcgagcgggttcctgtacgggctggtgaaggggttgccgctggaggagtgctgcatggttggggcgtgcagcggcgggtcggtgacgcgggcgctcggcggagaggtgcggccggagaactggcagtggatgtacaagcagatgcacgccaggggcatgctgctccctgagctcaagaactgaactaatcatgctgcagctggtgttagctgcatgctgcaccagctgttgtatctctcagcactcctacctttcccctgctagaatattgaaccactcctgagattgaaccaatcagatggagtgtattgataattgcacttcatatgtgtgctagtgtactattcccttggtctaaaatatcatgtcattttatcttttcaagactagactagacacacaattattattattattatgtaaattgatacaaaccatatgtagatatatagacgaatttgtttttggaaaaacgaaaa

SEQ ID NO: 148689 - DNA, 1532 bp, Zea Mays
aacgggagcgaagacggccctccccgcaatcccatcgcatctgctccaccaccggcacatcgccgccgaccttattcctccgccgctcgaggagtcagccgagccaacggagggagaccatatgggcgcggaggcagcgcatccgcagcaacagcctccctcctccgtccgaccctgcagggaggcggcggcgcccgcggtgctggggctgcagctctcggcgctgatcgaccacgtcgcgcgcgtcgactggtccctcctcgaccgcgtccctggcgaccgcggcggctcgcagcaggtgtccattgtggagttgaatcatattcttaatgaagtgaatacccacatccttccttcccacaatgatctcaccccaataactacaatagccggtggaagtgttgccaacacaatccgtgggctctcagctggttttggaatatcaactggaataattggagcttgtggggatgacaaccagggacttttgtttgtcaacaatatgagctttagtggtgtagatctcacaaggttaagggccaaaaaagggcacaccgctcagtgtgtgtgcttggttgatgcaagcggcaaccgcaccatgcgtccgtgcctatctagcgcagtcaagatacaggccaatgaatttagaaaggaggatttcaaaggctccaagtggcttattgtgagatatgcacaacagaacatggaacagattattgaagctattaggattgctaaacaggaaggcctttcagtatcattagatttggccagttttgagatggtccgtgactctaggtctaagcttattaaccttttggagaccggtaacattgacctttgcttcgccaatgaggatgaagctagagaggttatagggggaggtctggaatcagatccagaggaggcgcttgcgttcttgggcaagtattgcaaatgggctgtggtcacacttgcttcaaagggatgcatggcaaagcatggcaaacaggtcgttcaagtgccggccatcggggagagcaacgcggtggacacaactggagcgggcgacctgttcgcgagcgggttcctgtacgggctggtgaaggggttgccgctggaggagtgctgcatggttggggcgtgcagcggcgggtcggtgacgcgggcgctcggcggagaggtgcggccggagaactggcagtggatgtacaagcagatgcacgccaggggcatgctgctccctgagctcaagaactgaactaatcatgctgcagctggtgttagctgcatgctgcaccagctgttgtatctctcagcactcctacctttcccctgctagaatattgaaccactcctgagattgaaccaatcagatggagtgtattgataattgcacttcatatgtgtgctagtgtactattcccttggtctaaaatatcatgtcattttatcttttcaagactagactagacacacaattattattattattatgtaaattgatacaaaccatatgtagatatatagacgaatttgtttttggaaaaacg

SEQ ID NO: 148690 - DNA, 246 bp, Zea Mays
tcaggtactcaggaagaggcgacggaggcgtacgacatcgctgcgatcaagttacgcgggctcaacgccgtcaccaacttcgacatgagccgctacaacgtggagagcatcctcagcagcgacctcccagtcgggggcggagccaccgggcgcgccgccaagttcccgttggactcgctgcagccggggagcgctgccgcaatgatgctcgccggagctgctgctgcttcgcaggccaccatgcca

SEQ ID NO: 148691 - DNA, 1403 bp, Zea Mays
gcaacgcgtctcaccgtaaccagccaagatcaaagcactctctcgaccatctcctgaccactccagcatctccggccttcaggcactagcagcagcatggctgacgaccagcaaccgccgacgcagcgcatatggttcccgtactggaccgcgcctgcgcctgctcatggtcctcggccggccgcccgcccgcagctgtcgaggcgggaatctcgcccggcgccgcaggcatcgccgcctcctacaacagcatccacaggcgctggcggtggtgtccctgctccaccggcccagccgacgccgctgtcgagcaggccgtcgccgccgcccgcccgcgctccgccactctcgcccatcggagagcccaatgctagagcgccggagccgtcaccggtgccggttgccaaacagcacaggccgccttctcctcttcgtcctaattatatcgcgcgtgatgttcctaagcagaaagacatcgtcgttccgcaagagaaaactatccaggaaccggcgctcgtagcatccaagacgccagccaaggccccagagaaagagaaagaagacaaggagaaaagggaggaggagaagacgaaggagaaagacaaggggcacaagatgaagaaggagaaggatcacgaagagaagcaggagaaggataaagagaaggaaggcggccagccgcacaaggagctcaaggcgggcgtcgccgacatggtgcgcaagctcggcactccggcaccgtcgtccggcggcggccacgagcgcgctggctcggcggcggccgaaggaacgaccatcatcacgctggccggcgagaacaagggcgcgtccatgaaggtagacggcagcgccgtggccgacggcagggcggacgcggccggcagcaaggagcgccgcggccgcacgctcgacggcagcgccgtcgtcagcgggacggagcgggcctggggcggcagagggttcacggctttcgtcaacagcaacgtgcaggtcatcaacaactcgctgctgctgcagagctcctgcaacggcggcggcccgggggtgcacctcaagctgtccaccaaggccaagaagaaggacggcgagggagccggggggaagagtggctctgctgctgcccccaaaaaatgatcagcctgcatccatcgctggcgcgcgcatggcgatcgagcagtgactaatgattactactagtatactgttagcatcgataaatttatatgtacgtcgatgtcagttcgcaaaaaaatcgtggtgaatgatgcctgtaaaacataataggatgccgaagatgagcgaatcaagcaaccaaacctgctatgtgtacatggtctggtctctttatgtttgttactttgaaacaaaggaatctctaaatgtttgcttgtgacggaaaaaaa

SEQ ID NO: 148692 - DNA, 582 bp, Zea Mays
atatcagattcccagtcgcgcctccaagcccactagcgcaacgcaagtcgcctcctccctcgttcaatccaggtccagccatggcgcgcctcggcctcttggccctcgcagtggccgtcctcgcgctagcgtccagcgtggcgtcgcaggcgccggggccggcgccgtcgaccgactgcgcgtcggcgctggcgtacgtgcagcaggggagcacgcagggcaagcccgacagggagtgctgcgccggcgtcaaggccgcgctgaagagccccgccaccgtcgcctgcctctgcgccgccgtcgcgcagaactacggcatgcccgtcaacctcacccgcggcgccgggctgcccgcggcgtgcggcgaagaccatgccgccttgagcaagtgcaacaagcccacagcttccggaacggctccggcagtccaaagcccgggctcttccaagtcgtcgtcgtcggcggcggcggcgatccgatccccggtctcagcgttcgccattgtcgtcgctgcgactctgctctcgcactgcctcctctgaagatgcccgggtgtttggtggttttagttcatgatgatga

SEQ ID NO: 148693 - DNA, 392 bp, Zea Mays
atgtgcctgctgcaggctctccataaggccctgccagggccatgcctgctgggcagtgtcagcctcagccgccttcttggccttctttgcatccttctctatgacccaggagaagtcaatccggcggatggccgcgagtcgctgctcctcgttgctagtgtcactgcaaccccaggcaccactcagcgagcagacgaaggaaaagtgcgtgagttcctggtggatttgagcggatgcgggctgtcagcaaacttacggtgggtagtgctcgttgccagtctcctcaatggcctcaaggcgcttgatggggagcttgtcgaggtccacccgcacgttcccttcctccattgcgttcctttttttcctctgagctcacttaggccctgtttcct

SEQ ID NO: 148694 - DNA, 3012 bp, Zea Mays
gcacaccacagaactctgcaggacctcaatcaaatgtcactggtcagaaaggctggtctgccacttcaggagttcatgttaataccagttctcatcatgctaatgtgaatacaaagcggaaagctgatggtaacgcaggtggactgaaaaacaaaatgaaatctgcacagtccaccaggaaaccttcaaaagcttcatcaagtgctggattgaaaaggggcaggagggcggcatttgaatccagtgaatctagcatatcagaaaccagtagcgacagtgaggaagagattctaaaacatggtccttctgaaaatagggcagggccaggtcaacaaactcgcagatctagcaggcagaagcaagaagttaagtataatgaggatagtgatgatgataattatgatgctgaagatggtaacacagttgaggatgatttttttggctctcctgctttgaaaaggttgagaaaaggtggcctgttccatggcgatcacagtactaaaacagcaaagctgaatgaagacaccactggacataatggtgtgagtagctgcagtaacataaaaggtaaaaagaatggtggtttgccatgtgaagagaaaacttccaattgtgttgagcagatgaagagagaaccaatgcatgttggagaaaatagtgatggcaaagaagagctatttcattctatcaggaacaatggtcttggtctaaacgatgatgatgcttcagatgataacaaattcactttcccagatcctgaattttttgattttgacaaacttcgagatgcaagtcaatttagagccaaccaggtctgggctgtctatgatgatcaaggttgtatgcctagattttatgctcgaatcacaaaggtaaaaatggttccaaagtttatgctaaactttatgtggctggagttcaatcctgcaaataaagcggaggaggcatggtcttacaggggtctgcctgttgcatgtggacactttacgcatggacagtcagagacaacgagtgaaattggtatgttctcccagattatatcattagagagaagcaagacaaacaacttctatgaaatatatccaaggaaaggtgaggtttgggccctttttaagggatgggatattggttggagctcagatgctggcaatcacaaaaaaatgaaccatcgttatgaagttgttcaagttctttctgatctcatcacgagcactagcattattgtcatgccacttgtgaagttaaaaggctatgttagcttatttgtgcagtctggagaggcagctccgtatgtgatacctcagggtgacacactaagattttctcattgtgtcccgcattatttgatgagcggaactgaaaaagaaggcattccagaaggatctcttgaacttgatcctgcagcgcttccctccaacttggaagaggcttttccttctgctaacccagaatgcagttctgtaagaagtaaggagcataactccaaacatgctggtttgtccagtgaagattgcaaagaaaccatgaatgtggggcagcggcaacagacaaaatctgtgaatgcagggatcgctacaaaaacaccaaatgaagagaaaatcaagcataacactcatctgcctgaagttacagatgtcgatgacgataacatttgccaaacagagtatgtatgcgctgaatcagaattctatgatttttcaagaataagatttctccaaaagttttcatctgggcaaatctgggctctctatagtgatatagataaattccccaattactatgcattcatacagaaagtcgatcttaaaaatggtacagtacaagttagatggctggatgtctgtcctcgaggagaagtggagaaaagattgtcccaagaagaacggaccattggcattggaacctttaggcttggctatatcttcgatatgatgacttacactggtacagatcccttttctcatcctgttaaggccagagctactggcagaaaaggtgaatatgaaatacttcctcgtcatggtgagatatgggcggtttacaaaaactgggaggctgtatggactgcacaggattttgaaaaatgtgagtatgaactggtggagatacttggccatactgattcctccatacaagttcagcttctaaggaaggtcgatggttataagatggtatttatgtcatacagagcagagggttctgtgatgacaataaggaacgatgagtaccccaagttctctcaccagattccttgctttcgtctcacacatgaaaaaggtggcaagcttcgaggctatttggagcttgaccccttatcagtaccagaggaatttctcgactgattccatctgagataaactttatcaaccacaaatctggaaccttcttgtgatgaagtttctgtaactgaggctcagttaatgttaaggtcgacaggtcaacattgttcaaatgacactgacataagatgtctggatttcagcattcgtagcactaacgttcttaaggctctgttcgtttagtccggattggaggccagaaccattccaactcatcaagctaatacaaatttgtgaactattctaatccggaaccaatccagtaaagtattccggaagaaccgaacgggcactaaaggtggactaccaatctgcacaatgaaggcattgactgttggactctttgctgggtggctgtcctgcagctgtaattcacaagccgagtaaattgtttgtagttagcttcagctgtatctggggtttatggtgtaaaaactgccacttctcttgtagtgtactctggtagtgctgtatttgagctgtggggtgccatcctgattaattatcagagttctattggccacccttacaggaactgaaacatgaaatggagtcagccaggtcaggctcatcgatcaatgtgttatgattgtgttgttttgcaggggacaaggcctctttctattcgcatttctctgtatatacaagttacacttacacgtcatgatttttt

SEQ ID NO: 148695 - DNA, 765 bp, Zea Mays
aatggatgaagctagacagccattgtccagaaagatcccgcttccttcaagccaaatcaaccccagaaagatctcgcttccttccgttcatcccgtttggcaggaacaggattcccaaatccggtcgactgcggcctcctccgcttggctttggctcttccaggggcggcgacgacggcaccatcgatgtcgtggacgaccgtgtactcgggaaggcccctcgccgagcccttccaccggccaagtgccccaagctgcgccgcgacgacggtggggtccaccctgtcgcccccggcacgcgggctggtggccagcgtggagaggtacccgaggagggcctcgtcctagagcgcacgcttggcaaaggccgcgtccaccgccgccccgagcgcgccgtcacggacgccagcgttggtggacatggggagagatccggcgcggagggagaggatgggaagaacacgacgctgagggagaggattggcagccgcaaacagcgcggagggagatgatgggaagaatcacggcgtggagggagccgcggccatggatggaaggacgcagagggagcgtgactgccatggatggaaggggtgacgccatggaagggggagtcgtgagggaggcacggtttacgggtgcggctgccatggatgcgtgatttgcgggtgcggctaccatggatgggaagaatcacgagattaaatcttgtctgcgggatttgggaagcaacttcacttgcacgggcgcagcggctgccatcgg

SEQ ID NO: 148696 - DNA, 4172 bp, Zea Mays
tttgctctccgccgcctggtgcttcgcccccctcgctctccgacgactggtgggccgccggcgccggtgccgccctacggcagttgggccttcgttggcctcttcgccggccttttcgccggtgacgagcagccactaggaaagcttctgttgctctgcatgcaacgatgaactgatgattattgttgataacagaaatgtgctgttaggttttgttcacatgtgaccatgggcagtcaaagatttctgcaacctgcattgcacctcttattcttagagaactactgcagtggttactaatatattgtgctagccactaggtaatctaacatttctgcaacgataccagcttctcttcttgtttacatggagtgcaacagagatgaggctgctagagcgaaagttcttgcggaaagaaaaatgctggacaaggattttgttggtgcaaaaaagttgattatcaaggtgcagcaactcctcaaagaagtggaagatattgacattccaaaaatgttaactgtttgtgatgttcattgtgctgctggagctaaggtaaatactgagattgattggtacggaatactgcaagtacctgtaaatgctgacgacgcactgataaagaagcagtatcgtaagcttgcccttttgctacaccctgacaagaacaaatttggaggtgcggaggcagcattcaaattagttggagaagcaaacataactctcacagacccatcaaaacgttatgtgcatgacatgaaaagaaacaccttcagaagcgttacggcaagacccaatcgtcagccaccaaaaagacctgcacctgctagatctagttctactcctgtgaatctctacaatatgcatcagcaacatcagcgtcaagcctcaaatcctacagggacgcaaacaacattttggactatttgtccagcttgtggcatgagatatcagtattacctctcgatcttgaagaaagctttgcgctgtcagaattgtttgaagccatttattgcacatgatttgaaggaccaagctattccttccggggcaaatcagcgatctgctggggtttggaaaaatgcaggcacaccacagaactctgcaggacctcaatcaaatgtcactggtcagaaaggctggtctgccacttcaggagttcatgttaataccggttctcatcatgctaatgtgaatacaaagaggaaaactgatggtaacgcaggtggactgaaaaacaaaatgaaatctgcccaggccaccaggaaaccttcaaaagcttcatcaactgctggattgaaaaggggcaggagggcggtgtttgaatctagtgaatctagcatatcagaaactgacagcgacggtgaggtagagattccaaaacatggtcctgctgaaaatagtgcagggccaggtcaacaaactcgcagatctagcaggcagaagcaagaagttaagtataatgaggatagtgatgatgataatgatgatgtggaagatgatgataacacggttgaggatgattttgttgattctcctgcgttgaaaaggctgagaaaaggtggcatgttccatggtgatcacagtactaaaacagcaaagctgaatgaagacaccgctggccataatagtgtgaatagctggggtaacataaaagataaaaagaacggtggtatgccatgtgaagagaaaacttccaatggggttgagcagatgaagagagaaacaatgcatgttggagaaaatagtgatggcaaagaagagctatttcattctgtcagcaacaatggccttggtctaaacgatgatgatgcttcagatgataacaaattcactttcccagatcctgaattttttgattttgacaaacttcgagatgcaagtcaatttagagccaaccaggtctgggctgtctatgatgatcaaggttgtatgcctagattttatgctcgaatcacaagggtaaaaatggttccaaagtttatgctacaatttgtttggttggagttcaatcctgcaaataaagcggaggaggcatggtcttacaggggtctgcctgttgcatgtggacactttacgcatggactgtcagagacaactagtgaaactggtatgttctcccggattatatcattagagagaagcaagacaaagaacttctatgaaatatatccaaggaaaggtgaagtttgggccctttttaagggatgggatattggttggagctcagatgctggcattcacaaaaaaatgaaccatcgctatgaagttgttcaagttctttctgatctcaccacgagcactagcattattgtcatgccacttgtgaagttaaaaggctatgttagcttatttgtgcagtctggagaggcagctccatatgtgatacctcaggttgacacactaaggttttctcattgtgtcccacattatttgacgagcggaactgaaaaagaaggcattccagaaggatctcttgaacttgatcctgcagcgcttccctccaacttggaagaggcttttccttctgctaacccagaatgcagttcagcaagaagccaggagtctgactccaaaaatgctggtttgtccagtggaaatcgcaaaggatccatgaatgtggggcaggggcaacataaaatagccgcgaatggaagggtttgtacaaagacaacaaaggtagagaatatcaagcataacattgatctgtctgaagttacagatgtcgttgacgatagcatttgccaaacagagtatgtatgcgccgattcagaattctacgatttttcagtaagaagatcgctccaaaggttttcacctgggcagatctgggctctctacagtgatatagataaattccccaattactatgcatttatacagaaagtagatctcaagaatgataaagtacaagttagatggcttgatgtctgtcctcaaggagaagtggagaaaagattgtcccaagatcggaccattggcattggaacctttagggttggctacatccacgacatgatgacttacactggtacagatgccttttctcatcttgttgaggccagacctactggcagaaaaggtgaatatgaaatacttcctcgtctcggtgagatatgggcagtttacaaaaattggagcgctggatggactgcgcaggattttgaaaaatgtgaatacgaactggtggagatatttggctatactgattcctccatacaagttcagcttgtgaggaaggtggatggttataagatggtatttatgtcatatagagcagggggtgtgaagacaatacggagggatgagtacccgaagttctctcaccagattccatgctttcacttgacacatgaaaaaggtggcaagcttcgaggctatttggagctcgatcccctatcactaccagaggaatttctctgctgattcgatctgagataaaccttatctacatcaaatctggagcctccggtaatgaagtttctggaacatccacaatttcgtagcactgacgttgttacggtggactcaatctgcacaactaaggcattggcttttggacttttttgctggatggctgtcctgcagctgcaattcacatgtctagtattttttttgcagtaactatttgttgttagcattagctgtatctacggtttgagttctagtgtaaaaattgctacttttaacatcttgcagtgtactctaaattgcagtactgtgtttgaactgtgagatgctagcctgattaatttcctggaactgaaaaatgaaatcgagctggagcaaggttaggctgatcaatcaatgtgtcatgcttgtgttgctgtgcggggacatagatggcatccttcagcgtattatcagaatttatttctattcgcatctctctgtgtataaatgttacacgtcctaattttgatatgaccatgccttttcttgaactctttttatttgctgacaagtattaaagccttgtttgttcctatttgttttatgattaaagtttagttctaggactttagtctctacctgtttgtttgatctcagggactaaacaggttcagagcacattaaatacactatagaaagactaaaatacctcttatatgcttaagttgtctaagagagagaatgttaaaaacacattaatgcactatagaaaactgaaatac

SEQ ID NO: 148697 - DNA, 403 bp, Zea Mays
taccaagaaggagatggccatgacttagtgttgtagaaacaataatggatcaagtattccttggtccccttccaccacctttttgtagtcatctctttagtctaccaggaggagttaacctcatatctcttgctggtgtttggccatacataacacaagacatgctcaagagtaaacttattcctgaagatgaatttgattggagtttacttttggtgggctcaggttcagatgaacaagaaaggtaaagttatctatcagctagactcatggcgggaaaggttttttctatttggcaattttgtgaagcccaaaggttccaagtcaccatgagaaaattgaaatggcgagatctcttaatctaattgttgcaccttggaaggcctgaaccatcagagtttaa

SEQ ID NO: 148698 - DNA, 219 bp, Zea Mays
gcaagcttgaagtcgtgtgagccatgggggaacagggcattctggacaaacgccgctgggccaggttggaagttgagctttgctgttgagccatggactaagggctttagcacgtcgtgtgcggtgccatattctgctggagccacaaagcatcaattattgctcgatgagaaggtggataactccaccgttgcatctgattctgatgggtatgtacca

SEQ ID NO: 148699 - DNA, 1097 bp, Zea Mays
gctgttgaactcatgcttgtcgatgcactcattgaggctaatgactacttggggatatcattgcatgcacacgacccagaagatttttggaagttggatgacacaatcatcaaaaccattgagactgctcccaacaatgaactgaaaaaagcaaaagaaatcattcaacgtattcgccgaagagaactttacaagttttgcaaccagtattctgttccaaaggacaaactggagcatttcaaaaatattactgcacaggacatagtttgttcgcagaaatcttctgaggtgctgctgaaggaagaggatgttgcagtaagcaatgttaagatagatcttactcgtggaaaagataacccccttgaaagcatcaagttctttaaggattttgggtgcgacgagaagttccccatcacagatgatagggttagccacttgctacctgcatacaacgaggatagaattgtgagggtctatgccaagaagcctgagttggttgatgtggtgtcagaagcctttgagaatctccagatgagaatgtatggtgagaaaactcaagtgcatgagacgcccaagagaaagaggattagatccaactaggcagttggattttgtctaatcgcactttagataacatacaaatacaacacaggaaaatagcttcacaaacaagaagctatatagataacaggtttcagatggtagtctgaactggtaaggtgtaggtattttgtgtacaggagaaaatacaaacaacattgcatgaagtctaaaaactcacgttgacgtacgagatgctgcatgtgcgtagattggatagctagtcaaatactttatgatgtggatggattttaattactttatgatgtgtctggatttgtaagtacttgtcattttaatcttaatttatatggatctaagagaattaagtgggtttaaatccctattaagtcaaaatctctcctagtttcttttctccgatctttgtgggatgggaatagctaaacaagatctcagtacacatggttgactctatggaccatatctcattttgttttggtgtgatcaactatttatctctttgattttgttttgtt

SEQ ID NO: 148700 - DNA, 1197 bp, Zea Mays
atggatgacccccgctggcgacgctgcggcggaccgagagggagcgtgccgaagttagtcgatccggagcagggcgtggatgctggagcaggtcgggcgtgtgcatcgacgacgcgaacacggggtggtggtggtggggagggagtgagggaggcgcgtagtgggggcagagctggagaagaagggcagctcgtgttggccaccgaggtatcctcccggagagagggagacgggacgggcgacggcggcgttcgggtcggctccgaagaggatgcaggagcgacgcagcgtgccccttcgaggtcatcgtgcggcgccgtgcaacttccacgcggccacgccatccccacctccgaaaggcacaacccccacgacgcaggagcgctggctccgggcgttcgggtactcggagacggcgttgggagaggagaaccgcaccgcggcgcagacatgggcgagttctgcccctccccgcagggggactccgcgctggcggcgccgcccttgacgctctcctccccgtccccagcaacggcggttaggccgagctacgggagctgcgaccgccgctacgtgaagctggtcttcgacaacctccacgggagcatctccgtagacccgttggccctgcagtttgttgataccgaagagtttcagaggttgcgggacttgaaacaacttggtcttacatatctcgtctatcctggagcggttcacacacgcttcgaacactcattaggtgtatattcgttggctggaaaggctataaataatcttaagacatatcagggagaagaacttggaattgatcatgttgacatgcagactgtaaaacttgcaggtctcttgcatgatatcggacatggacccttcagtcatttgtttgagcatgagtttcttcctcgagttgatcctggctcatcctggtctcatgaagatatgtcagtgctccttttggacagtattgttgacaaacatgcaatagatattgaaaatggttatctcaaaatggtcaaggagatgataactgccagcgctaagcctaccagcacaaaaagtgcaaacgagaagcattttctttatgacattgttgctaatggtcgtaatggtatagatgttgacaagtttgactacgttggccgtgactgcagagcatgtggtcttggctgtaatttccagtattggagccctgcttga

SEQ ID NO: 148701 - DNA, 592 bp, Zea Mays
cctttcatcttgtgttgcagaatcagcaaatacccataaagggaaacctcaccaaaattagaagagaaaccaaatgtatccctgatcttattttttagattgaggattatgagaagtatttaatacagctaagcaaactaactaaggtaaaccttttgaggcatgccaaacgcaatgtagcaagagacttccagatgcaagtagcgtggtacggatggtgactggtgataacatcaatacagctaaagctatagccaaagagtgtggcatactgactaacggcggcgtagcgatagaagggccagagttcagaaacaaaagtccagaggagatgagggacctaatacctaagatccaggttatggctcgttctctgccgcttgacaagcatacccttgtgaaaaacctgcgaggtatgttcagggaggtggttgctgtgacaggtgatggtaccaatgacgctccagctttgcatgaagcagatattgggcttgcaatgggcatagcaggaacagaggtactaactatacctcgcaactctactgttcttactgtagatgtaaaaacctcttgcaaggccatcagaagctaa

SEQ ID NO: 148702 - DNA, 143 bp, Zea Mays
cactgctagttacaaaatcgtaaatatgaatcaagtagtaccacttttgtgtatagtttgtactctcttctgtctaatttataatccgtttgactttttaccaagtttgatcgacacatcttattcaaactttttacaaaaaa

SEQ ID NO: 148703 - DNA, 104 bp, Zea Mays
ttatttttcaccctacaatgcaaaattgttatatggaggccatggtatattgtcatatcatgtattatcaacttaggatttgcctatttcaattaatagtggca

SEQ ID NO: 148704 - DNA, 1896 bp, Zea Mays
tacggcaaaccctaaccacggccccattcctccaatcacctccctacctgtcaaatcccccaaattcgaccgcgaaatcggcatgtgcgcctacggaaacccttctacatgagcccgccggagatgatcgcgtcgcagccgcgccgggtccgcccccttgccgccgtctccctggtgctgttcctcctcctcctgtacagccgttccggttgtggcccgccgcgcgctgcacggctcctgggctccggattgcacccggtgcaccgcagattcctctccgatgccgaccctggcggccccacatctagcgccgcgaatccttctggtgccgctacgctaaatggcgagcaggcggaggaccctgccgcggcgtgcgcggacatcgcgcggcacgaggggttcgggacgcagtgcgagttcctccgggcccacccgcagtgcagctccagtgggttagtcgactacctgggtttcttctactgcagatgcgagaggttcaggttgctgggctacgcggtgctcggggtatgcctggccgcgctgttctatatgctgggcaatactgctgccgactacttctgctgcagccttgagaagatgtcggcactgctgcggctcccgccgaccgtggctggcgtgacgttgctcccctttggtaatggcgctcctgacgtgtttgctagcattgctgcgtttatgggcagcggtgctggtgatgttgggctgaacagtgtgctcggtggagctgtattcgtcacttgtgttgtggttggggcagtttcattgtgtgttgccgagaagaatgtgcagattgataggaggtgctttgttagggatgttgggttctttctggtgactctgctcactttgtctatagtgttgatcgttgggaaggtgactgtttggggagctatgatgtttgtgtcgatttatgcggtctatgcatttgttgtggctgcaaatgaggtattgaggaaacatgccaggaagctgaagtttgatgtggtcacaccattgttgcctgtgagggcaagtatatttgaacaaggagcagaggaggatgagtcagtgtacagttcacttcttgaggaggatgcagatggtgacgtggcccaaatgaatacgtccctgcctcaatggatgtgggcttctcatgtggccatctactcaaatcatgggaatagagttggttcgcctgacagcccaagaccattatggggttggagtgagggagaagtggataactccatgttcaatatttccaagctgtttttgtttatgaagcttcccttgacgataccaagaaggttgacaattcctatagtggaggaagatcgctggtcgaaagaatgtgctgttgcaagttcttgcttggcgcctgttcttttggcatttttatggagcagtcaggatacagtatccacaaaggttagcatagcagcatatgttatggctgtcattttggggatcacacttgctgccctggctttcctgttcaccagtaatgaacgtcctccacggaggtttttgttcccatgggtttttggaggctttgtgatgagcatcatctggttctacatcatcgctaatgaattggttgaacttttggttgcttcgggtgtgatactgggaattaatccttcaatacttgggctaacagtgttagcatgggggaattcgatgggtgacttgatgtcaaatgtcgctttagcaatgaatggaggtgacggcgtgcagattgccatgtctggatgttatgcaggacctatgtttaatacacttgctggtttgggtatatcaatgctgcttggagcttggtcaacggcacccaattcgtatgttcttccgcaagaccactctcttatttacacaatgagctttcttgttgctggattg

SEQ ID NO: 148705 - DNA, 225 bp, Zea Mays
atgacaaaacaacctctcttcacgtcgaagacgtctgacccacgacagaaacaatggacccacgagagaaacaatggaccagatagcggatattgcctagattgtcaattgctctggtctagttacattggggccatgtttcgacctcatctcgacaaacctcctatgctctcatcataccacattgctccattgctcgagtgcttaaggttgtacagcttctag

SEQ ID NO: 148706 - DNA, 2012 bp, Zea Mays
atggcgctcctatctcttaggacccctccctggggatacccgcaaggagacagtggcggccgcagtcgtggccggaagcttcgcgggccccgccgcctcgacgtcgtcgccatccgaagcgccgctttcttccttcggcgagatcgacagccatttgaaactttaaagtctcgattacaaataggtgtaaaccctggtacaatcgtgattaatttgtcagctaggattgctccagcagcagccccctctatgttcctggccccttcatcttcacctgcagaaattttttatgatggttcaatggaggaacccgaacatcctgatataaagcttctaatgacacttcagagaaatccgccaaaggagtcatccccttttctcaaagaagagcccatttttagtggtttgcctacaatgagttctgatgtcaatggagaaaatgtcatggataccaaatctgttctccctgtaacgccagaggcgcctctttggtcaacagcagctgatgaagagcttatatatgcaaagaaagaaatcactaatgcaccattgacctcagatgaccctgatctttatgcacccttgttccggaatgtatccatctttaaaaggagttatgaactgatggagagacttcttaaggttttcatatatcatgatggagcaaaacctattttccattccccagagttgaaaggtatctatgcgtctgagggatggtttatgaaattgatggagacaaaccagaattttgttgtgagagatccaaatacagcccatttattctatcttccatatagctctcgtcaactggagcataacctttatgtgcctggctcaaatacaattgagccactgtctatctttgttaaaaattacattgaccttatctcggccaagtacccatattggaataggacaaaaggagctgatcatttctttgttgcttgccatgactgggggccttacacaacaaaattgcatgatgaattgcggaagaacactattaaagctctctgcaatgcagatctctctgaaggattttttatccgtggaaaagatgtttcccttccagaaacattccttaggtcaccaagaagacctctaagagatattggaggaagaccagctgcgcagaggactatcctggccttctttgcagggcagatgcatggtcgagttcgacctgtacttctcaagtattggggaaacaaggatgatgatatgagaatatatagtaggctgccacaccgaatcaccaggaagagaaattacgttcagcatatgaagtcaagcaagtattgcatctgtcccatggggtatgaggtaaatagcccgagaatagtggaggcaatatattatgagtgtgttccagtaataatcgctgaccattttgttctcccgtttgatgccgcactcaactggagtacgttctctgttgtcgtaccagaaagcgatgtacctaagctgaagcaaatcttgttggcaatacccgagagtcgatacataacccttcaggcaaacgtgaaaagggtgcagaagcattttatgtggcatccgaatcctgtcaagtatgacattttccacatgatactacactcagtctggtttagcagggtgaaccagatccgttagagcagcacctgtggttcacatgcctgaattacatatggagggttgtttgctgacccgtttttggtgtgctcgtctgaggaagctgctcatgtggtgggatttggattgtaatcttgtcgacacagctgttccgtgctcaaggtgctgaatggagatgttgatctgacagtagaactggcagtctgtggataaaatacagtttatataggagcaggcttatgactgagttctcattactggtaatttccctcatggatagtttggtgtaaagcgttgacaaaagccgatgaggtgttgtgacgactgacgatgtccctttctgtaagattgtaattttcgttactctttttaacctgggcacgggaaaagatctggaa

SEQ ID NO: 148707 - DNA, 950 bp, Zea Mays
gacgacattgaacagtcataacaagacaagacgacattgaacagtaatcagacgggatatcacttatacttttcgataaaacccctgttcttctggagaaattgcacacatattccctacgcctcgctagcgccttccgcgaactgaggactcccgagaggccgagaccaccccgatgtccgccatggagaccgacatcaacgcgccgccgcccgccccagccggcgagggatcctccgtggtcggtccgtcctcctcatcctcccgcaagcccaacaagcgcttcgagatcaagaagtggaacgccgtcgcgctctgggcatgggatatcgtcgtcgacaactgcgccatctgccgcaaccacatcatggatctatgcatcgagtgccaggcgaaccaagctagcgcgaccagcgaggagtgcactgtcgcttggggtgtctgtaatcatgcttttcacttccactgcatcagcaggtggcttaagactcgccaagtgtgcccattagataacagtgagtgggagttccagaaatatggccactagttcctgggcaccgtcatgtgatgttggggctttgctgccactcaagtgtttttgtctgccaaacagctccatctcttactgctttcgatgcttgcatctatcacccgtcaattataactagctagcagtacgtacacctgggactgtatttggacgatccattgagaggatagtaggcccattttatcaatggtatgtggatcttcataagtgagcttgtattgtgctgtggtaccattttctgaagtcatgtttttttatacgtgcctgtcttgatgttatgaagtgggtttgcctttcggccgcatgtatataggttactgaatgttgcggacaatgccctgaaattatgttgggcactatatcctgtcttgcaagtgataacctggtctcattatgttcc

SEQ ID NO: 148708 - DNA, 1002 bp, Zea Mays
gacgacattgaacagtcataacaagacaagacgacattgaacagtaatcagacgggatatcacttatacttttcgataaaacccctgttcttctggagaaattgcacacatattccctacgcctcgctagcgccttccgcgaactgaggactcccgagaggccgagaccaccccgatgtccgccatggagaccgacatcaacgcgccgccgcccgccccagccggcgagggatcctccgtggtcggtccgtcctcctcatcctcccgcaagcccaacaagcgcttcgagatcaagaagtggaacgccgtcgcgctctgggcatgggatatcgtcgtcgacaactgcgccatctgccgcaaccacatcatggatctatgcatcgagtgccaggcgaaccaagctagcgcgaccagcgaggagtgcactgtcgcttggggtgtctgtaatcatgcttttcacttccactgcatcagcaggtggcttaagactcgccaagtgtgcccattaggtagctgcagttctgtgttgatttgatcccgtagttgattcgtttgggcattgcattactgacggtggactttttttttatcttgcagataacagtgagtgggagttccagaaatatggccactagttcctgggcaccgtcatgtgatgttggggctttgctgccactcaagtgtttttgtctgccaaacagctccatctcttactgctttcgatgcttgcatctatcacccgtcaattataactagctagcagtacgtacacctgggactgtatttggacgatccattgagaggatagtaggcccattttatcaatggtatgtggatcttcataagtgagcttgtattgtgctgtggtaccattttctgaagtcatgtttttttatacgtgcctgtcttgatgttatgaagtgggtttgcctttcggccgcatgtatataggttactgaatgttgcggacaatgccctgaaattatgttgggcactatatcc

SEQ ID NO: 148709 - DNA, 3958 bp, Zea Mays
atgtttactattggagaacttatgctctcaggtgtatacacgcacgagttccatttctgtgagaaggtgaaggaaaaactggagcatgaagcttaccaggagtttttgaaatgtctacacatctacagccaagagattatcacgagaagtgaactgaagaacttggtgaatgatatactccagcattatccagatcttatggaagggtttaatgaattcttggaacattgtgaaaatatagatggatttcttgctggtgtcttcaacaaacgcccaacaacaaggattgttaaaactgaggataaagaaaaggatagagatcgggacagggaggacagggatagagatcgggaaaaggaaagagagaaggaacgagaaagactcgataaagggtcaacattcaattcaaaggacggttcttgtcacaaacctcctatgttttctggcaaagagaagtacaacctatccaaaccaatatcagagcttgatctctcaaactgtcaacgttgcactccgagttaccggcttctacctaaaaattatcccatgccccctgccagcaacaggactgatcttggagcctctgttcttaatgatcactgggtatcagtgacatccggaagtgaagattattcatttaagcacatgcggaagaatcagtatgaggaaagcttatttagatgcgaggatgacaggtttgagttggatatgctgttggaatcagttaatgcagcgactaagcgtgttgaagagctgatagaaaagatgcaagacaactcagtcaaacctgagagtccaatacgcatggatgagcatttaactccgttgaacctgaggtgcattgaacgactgtacggtgatcatggtcttgatgtgatggatgttcttcgcaaaaatgctagtgttgctttgccagttattctaactaggctcaaacagaagcaggaggagtggtcaaggtgccgatcagatttcaacaaagtttgggctgaaatatatgccaagaattatcacaagtcacttgaccatcgtagtttctatttcaagcagcaagatacgaagaacctgagcacaaagtctctcctgacggagataaaagaaattaatgagaagaaaagaaaggaagatgatgtgctccttgccattgctgctggaaataggcgacctatagttcccaatatgtcattcgagtatgtagactcagaaatccatgaagatctacataagatcattaagtactcctgcggtgaaatctgcaattcttcagatcaattagataaagtgatgagaatatggacaacttttgtggagccaattttgggtgttcagcgaaaacatggctccgaggatcctgacctagttaagccaaagagccgaacaacaaaatcgggtattgcaaatgttggggaaagcaacactggagctgggattgtctccaagcataacaacgatgatgaaagtgaacaagggctgccgtctcgggctagaatagcaaatggagttgcagccaacgctcaaaatggtttccatgatgcagatcgaattgcccgtagaggtgaagaatcattaaatgttacacttaatggaagagtgcatggtgctgcctctgcagacgaaacaccttcactaagcacacaaaatattgcttctactgagcgatcagcagagaatgcagctgttgttaggactgaacaacataaggcaaatttggaacttacgccaggcgtgaatggttctagaagttctcatggtgcagttgaggtggctggtgaaggcaaggctgtcaatgaaacattgccttctgctgtgggaggggaaacaggtaggttgggaccatcttttaatggcatcagtgagggaattaaagggcgcctaaataatgatggttctgcaccccatatttcaaaagttgaaagagaagagggtgaattatcgccaaacggagattttgatgaggaccattttgttccttttgaagatggaacatctaaaggaaaggaaggttctacaagcagatcattccagggtaggcatggggaagtggtgccatctgctgaggcagctggtgagaatgatgctgatgctgatgatgaaggtgaggaaagtgctcagaggtctactgaggacagtgaaaatgcttccgaggctggtgaagatgcgtcgggcagtgaatctggtgatggtgaggaatgctttcgtgaagaccacgatgaagaagaagaggatatggatcatgatgatcaggatacaaaagctgaaagtgagggcgaggcagaaggaacaactgagacacatgatgtggaaggaggaatatcactaccactttcagaacgctctctgtactcagtaaaaccacttgccaagcatgtacctacagctttacatgatcgagagaagttctcacgtatattttatggaaacgattcattttatgtcttgttcaggctacatcagatcttatatgagagactactttcagcaaaaactaactcttttaccgctgaaaagaaatggaggaattccaaggatacaaaccctcctgatctatatgcaaagtttatgagtgcgctttacaacttgctcgatggttcttctgacaacacaaaatttgaggacgactgccgagctattattgggactcaatcatatgttctctttactttagataaattgatttataaagttgtgaagcagcttcaagcaatagcaacagatgaaatggacaataagcttctgcagctatatttatatgaaaaatcaagatctcccgggaggttttttgacctagtttatcatgaaaatgcccgtgttctactgcatgatgagagcatataccgatttgaatgttgctcaagtccgacaaggttgtctattcagctgatggaatatggtcacgaaaagccagaagttaccgcagtatcaattgatccaaatttttcttcgtatctttttggcgagtatttatgtagtacgtcagacaagaaattatctgaaggcgtctaccttgcaaggaataagcggaaatattcagataatgatgaaccttcagattttttgaaggcaatggatggtatcaaagttgtgaatggtctcgaatgcaagatatcctgcaagacctctaaggtctcgtatgtcctagacactgaagatttcttgtcccggcttcggaagagaaggaaaattttgcggggtgggagtgtgtctgacagttcgcagttttcaaaaatatatgctgcaaaagtgcagcgcttcaataggttcctatccaaagcataggatcatttggcatacaaaatgtctcatcattgtatctaaacctggagatattgctgggaccccagttgctttgcttcttcagtgataatatgcaggagttggaagatggtgacgtcatcgacaattcgtcgcagaatgccctttttgaataacagatggggagatctatagggtaaatacagcaaaacgaagcgagcatgtaggccacagcagtcagctctgttgtgcggaaagatgtgtatatatgtattagcaacatgtttgttctgatgacctttttaatgcttttcgatggtaggtctgttccatcaagtatttaactaatcatcatttgttgcagttggtataggtcttctgttctttttttttttgccgtcgtttttcattgaggatgttgccaaaattaaaacctgtgtcaaacagttatgtagtcttgtcttggttaatcttacagacgccgtaatttctcagcctcttgagtgaggtgcttgtacaccctttcattaagcttttgaggcgtggttgacagcaatattctcttgtgtgcatacaattcaattgaagtataggatgtgtttcttctgatcttctcggtgatgtgtatacaggtgcatacatagatttttctctagaatatatctataaaatctagacaatgtctaaaccgttttaagtattcctt

SEQ ID NO: 148710 - DNA, 3920 bp, Zea Mays
atgtttactattggagaacttatgctctcaggtgtatacacgcacgagttccatttctgtgagaaggtgaaggaaaaactggagcatgaagcttaccaggagtttttgaaatgtctacacatctacagccaagagattatcacgagaagtgaactgaagaacttggtgaatgatatactccagcattatccagatcttatggaagggtttaatgaattcttggaacattgtgaaaatatagatggatttcttgctggtgtcttcaacaaacgcccaacaacaaggattgttaaaactgaggataaagaaaaggatagagatcgggacagggaggacagggatagagatcgggaaaaggaaagagagaaggaacgagaaagactcgataaagggtcaacattcaattcaaaggacggttcttgtcacaaacctcctatgttttctggcaaagagaagtacaacctatccaaaccaatatcagagcttgatctctcaaactgtcaacgttgcactccgagttaccggcttctacctaaaaattatcccatgccccctgccagcaacaggactgatcttggagcctctgttcttaatgatcactgggtatcagtgacatccggaagtgaagattattcatttaagcacatgcggaagaatcagtatgaggaaagcttatttagatgcgaggatgacaggtttgagttggatatgctgttggaatcagttaatgcagcgactaagcgtgttgaagagctgatagaaaagatgcaagacaactcagtcaaacctgagagtccaatacgcatggatgagcatttaactccgttgaacctgaggtgcattgaacgactgtacggtgatcatggtcttgatgtgatggatgttcttcgcaaaaatgctagtgttgctttgccagttattctaactaggctcaaacagaagcaggaggagtggtcaaggtgccgatcagatttcaacaaagtttgggctgaaatatatgccaagaattatcacaagtcacttgaccatcgtagtttctatttcaagcagcaagatacgaagaacctgagcacaaagtctctcctgacggagataaaagaaattaatgagaagaaaagaaaggaagatgatgtgctccttgccattgctgctggaaataggcgacctatagttcccaatatgtcattcgagtatgtagactcagaaatccatgaagatctacataagatcattaagtactcctgcggtgaaatctgcaattcttcagatcaattagataaagtgatgagaatatggacaacttttgtggagccaattttgggtgttcagcgaaaacatggctccgaggatcctgacctagttaagccaaagagccgaacaacaaaatcgggtattgcaaatgttggggaaagcaacactggagctgggattgtctccaagcataacaacgatgatgaaagtgaacaagggctgccgtctcgggctagaatagcaaatggagttgcagccaacgctcaaaatggtttccatgatgcagatcgaattgcccgtagaggtgaagaatcattaaatgttacacttaatggaagagtgcatggtgctgcctctgcagacgaaacaccttcactaagcacacaaaatattgcttctactgagcgatcagcagagaatgcagctgttgttaggactgaacaacataaggcaaatttggaacttacgccaggcgtgaatggttctagaagttctcatggtgcagttgaggtggctggtgaaggcaaggctgtcaatgaaacattgccttctgctgtgggaggggaaacaggtaggttgggaccatcttttaatggcatcagtgagggaattaaagggcgcctaaataatgatggttctgcaccccatatttcaaaagttgaaagagaagagggtgaattatcgccaaacggagattttgatgaggaccattttgttccttttgaagatggaacatctaaaggaaaggaaggttctacaagcagatcattccagggtaggcatggggaagtggtgccatctgctgaggcagctggtgagaatgatgctgatgctgatgatgaaggtgaggaaagtgctcagaggtctactgaggacagtgaaaatgcttccgaggctggtgaagatgcgtcgggcagtgaatctggtgatggtgaggaatgctttcgtgaagaccacgatgaagaagaagaggatatggatcatgatgatcaggatacaaaagctgaaagtgagggcgaggcagaaggaacaactgagacacatgatgtggaaggaggaatatcactaccactttcagaacgctctctgtactcagtaaaaccacttgccaagcatgtacctacagctttacatgatcgagagaagttctcacgtatattttatggaaacgattcattttatgtcttgttcaggctacatcagatcttatatgagagactactttcagcaaaaactaactcttttaccgctgaaaagaaatggaggaattccaaggatacaaaccctcctgatctatatgcaaagtttatgagtgcgctttacaacttgctcgatggttcttctgacaacacaaaatttgaggacgactgccgagctattattgggactcaatcatatgttctctttactttagataaattgatttataaagttgtgaagcagcttcaagcaatagcaacagatgaaatggacaataagcttctgcagctatatttatatgaaaaatcaagatctcccgggaggttttttgacctagtttatcatgaaaatgcccgtgttctactgcatgatgagagcatataccgatttgaatgttgctcaagtccgacaaggttgtctattcagctgatggaatatggtcacgaaaagccagaagttaccgcagtatcaattgatccaaatttttcttcgtatctttttggcgagtatttatgtagtacgtcagacaagaaattatctgaaggcgtctaccttgcaagattttttgaaggcaatggatggtatcaaagttgtgaatggtctcgaatgcaagatatcctgcaagacctctaaggtctcgtatgtcctagacactgaagatttcttgtcccggcttcggaagagaaggaaaattttgcggggtgggagtgtgtctgacagttcgcagttttcaaaaatatatgctgcaaaagtgcagcgcttcaataggttcctatccaaagcataggatcatttggcatacaaaatgtctcatcattgtatctaaacctggagatattgctgggaccccagttgctttgcttcttcagtgataatatgcaggagttggaagatggtgacgtcatcgacaattcgtcgcagaatgccctttttgaataacagatggggagatctatagggtaaatacagcaaaacgaagcgagcatgtaggccacagcagtcagctctgttgtgcggaaagatgtgtatatatgtattagcaacatgtttgttctgatgacctttttaatgcttttcgatggtaggtctgttccatcaagtatttaactaatcatcatttgttgcagttggtataggtcttctgttctttttttttttgccgtcgtttttcattgaggatgttgccaaaattaaaacctgtgtcaaacagttatgtagtcttgtcttggttaatcttacagacgccgtaatttctcagcctcttgagtgaggtgcttgtacaccctttcattaagcttttgaggcgtggttgacagcaatattctcttgtgtgcatacaattcaattgaagtataggatgtgtttcttctgatcttctcggtgatgtgtatacaggtgcatacatagatttttctctagaatatatctataaaatctagacaatgtctaaaccgttttaagtattcctt

SEQ ID NO: 148711 - DNA, 2119 bp, Zea Mays
cccgcccgcctcccgccccgctccccaccgcgctcgctgcgctgcctgtcctggcgctgcgtcctgcggcgccgcgagagttggagggtgctcgtggcgggcagatccggcgtcggcgtcggcgtcggcagacaggctcggaggtgagatcggcgtcggtggcggcggcggagcgcgcgaggtggtcgagggaggaatcggtggcgcgcggaggcgaggacgaggctgaggaggacgtcgagctcggctggtgctgcatgggggtatgaagcgcggcgccagagacgacgcactcatggggtcacagctcaagcgcccgaacgttggccgatccgatccgtcggctcagccacaacacatgcctgtgcccggtttagcgtctgcagccgcaccgccgcctcaagctggtgctgctccgccggcgcagccgcaacagacatccggcgcggccttgaccaaccagaagctgacgacaaatgatgcgctcgtctaccttaaggcagttaaggataagttccaggacaagcgggagaagtacgaggagttcctcgaggtcatgcgcgacttcaagagcgagaggatcgacaccaatggagtgattggccgtgtcaaaacgctgttcaacgggtaccctgaactaatccttgggttcaacgccttcttgccgaagggctatgcgatcaagctacaagaagagaagaagcctgttgattttgtggaagctatcaatttcgtgaacaagataaagaatcgatttcagcatgatgaacgagtttacaaggcattcttggacatcctcaacatgtaccgcaaggataataagtctatccaagatgtttaccatgaggttgctgggctgttcaaggaccataaagatttgcttgaagaattccagcacttcctgcctgatacctcagtggccccacaagcagtggcatcttcaaggggtggtttggttaagcgggaggacaggagctctttgccacctgcaaataggacccttcacaatgagaagagggagagagcttgtctatcacatgctgaccgtgactttagtgttgaccgtcctgatgtggatcatgatcgccagagaagacgtcttgataaagaaaaagaacggaaggtggaaagggatagaagggattatgagagagaagacaaggatggtgaacatgacagtagagacctggagataggacagcgtaagcgaaagccttttccaaggaagatggaggataatgcaggtgcggagacacaccaaggaggccccagtgagaatcatggaatccatagcgtttcttcttcatcatatgacgataaggatgcgctgaagaatttcctgcgtatttgggatttggtggcacatgttgatctggattcccataaggaggacaaacatatttttcggttggctgctaatggcaaatattcgactaaagccgcttatgaggggctcttcattggatctgtggagtttgaaccttttgagcggatttggaaaacttgggctccgcccaaatgtcgattcttcttgtggctggtggctcacaagaaatgttggacagcagatagacttgagaagcgggggctggatcatacggaaaaatgtcctttatgtgagcaggaaagggagacaattgaccatctgctggtgaattgtgttttctcaagagaatgttggttcctccttctaaggcaattcgggctgcagggtttggccccccaaccaacggatattaattttatggagtggtggcatcaaacaaatgaagctattcaggggtccttcagagatggcctaaactccctcattatgctgggcgcttggattttgtggaatctccggaacagatgcatctttgatggcctttcccctaatgttgctaatttcctaatccatgtgggggatgagcgccgtctgtgggagactgccggggccaaggggttgacatcccttgttgcctccctatctcatgtagcctagagtttttatagatgagtcagtctatgctagtttcgttcaggccgccgtaaggcgtcagttgtaccccggtctattttagaccttgtgtatttcttcctttaatataatgatacgcagctctcctgcgtgttcgag

SEQ ID NO: 148712 - DNA, 881 bp, Zea Mays
accaccgccactccgccacagttcgaatattcctagcttgagattgcaagaggtctccaagaggagggtaggggagccgagcgctcagctctaattttctccatctattgctaacagctcagacctcaggcaagggaggtacaatgccaagagcaaatgagatgttgagggcagattcaagaatgatggtggtctttggtgccttgtcatcgaaaccagagcaactgacatttgaagaatccctcatatttgtcaagaaagttaaagcccgtgactacatgctgtacctgtcattattcgacgttctcggcagaacggaattaccccagctcgacgcctaccgagagttacagcagatgtttcaaaaccacccagatctgcgcgaagagctcgagaggttcagaccgccgccgccgccgccggtgcctacctcaaagcaggcagcaaacaacaacatctggccctgggtcatcgtgtgcgctgctgtcccgttggtcgcagccagcctgctcccgtcactttgaaacccagtgctgtggcttgctcaacaccctgttggccaaaaaatggccgtctgatcgaagaaccgctgcatgcagtacatacattacatgtgcagtggaccgaaccggcctcctgttgctattcgtgccatcacaactgaatcacagtattgtctgtgtatatatattagagtagtgttctggaagggaacctgcgttcttggtcatcaggtaccactgggcaagaaatgtagtcggtacttgctggcggcgcggtgcaacggtttggccatttgggttgggctttaactgctaaaaatcaagcttgcattgtttgaatctccttttggcagccatgactgagcccaggtttgttgt

SEQ ID NO: 148713 - DNA, 967 bp, Zea Mays
accaccgccactccgccacagttcgaatattcctagcttgagattgcaagaggtctccaagaggagggtaggggagccgagcgctcagctctaattttctccatctattgctaacagctctggccaatcatataaaaaaacgttggttacaagccaaatggcacttcctggtagctgctgattttctatcgacaagatcagagctcagacctcaggcaagggaggtacaatgccaagagcaaatgagatgttgagggcagattcaagaatgatggtggtctttggtgccttgtcatcgaaaccagagcaactgacatttgaagaatccctcatatttgtcaagaaagttaaagcccgtgactacatgctgtacctgtcattattcgacgttctcggcagaacggaattaccccagctcgacgcctaccgagagttacagcagatgtttcaaaaccacccagatctgcgcgaagagctcgagaggttcagaccgccgccgccgccgccggtgcctacctcaaagcaggcagcaaacaacaacatctggccctgggtcatcgtgtgcgctgctgtcccgttggtcgcagccagcctgctcccgtcactttgaaacccagtgctgtggcttgctcaacaccctgttggccaaaaaatggccgtctgatcgaagaaccgctgcatgcagtacatacattacatgtgcagtggaccgaaccggcctcctgttgctattcgtgccatcacaactgaatcacagtattgtctgtgtatatatattagagtagtgttctggaagggaacctgcgttcttggtcatcaggtaccactgggcaagaaatgtagtcggtacttgctggcggcgcggtgcaacggtttggccatttgggttgggctttaactgctaaaaatcaagcttgcattgtttgaatctccttttggcagccatgactgagcccaggtttgttgt

SEQ ID NO: 148714 - DNA, 1695 bp, Zea Mays
accaccgccactccgccacagttcgaatattcctagcttgagattgcaagaggtctccaagaggagggtaggggagccgagcgctcagctctaattttctccatctattgctaacaggtgcgccgctttcttcgccttccgccttatctttgcctggtccatccttaaatccgggcattctggctgttgcgttcgagggctgctgcgcccgccgattggagtcactcttcttgacgctctccactgtcattgccttgtgctagtttcgtgagcagtatttggttcaagctaactgccagctgttatgcgaaggctgttatttttccttatccagttgtgaactgtgtttgtgttccgattggggatatataacctgcggccctgcgccttctgaatcgtatcccaatgcatttcgatgcaacggccgttgttctgcagtggcagcacagtgttgccatcattattaccgtgattcagtatgcgttctgccgttctttagtttcggcattcatcattatgccatcatcggttgcgattcgttctagtgaaaaaaaaatctgccttgcttacattcaaaggcttctattggctggaattcttttcaacccttgtttcgcaatacgctcagccaatcagttgattggctcttcctaacgaaatcgtttgcttcgcacggtttacctgggcttcttttttttctgtctggagaatacctgttgattttagaaaaaaaaatggaaatgattgcccttacatcataatggaaagcaggcgtggttggtgcttttgttattgtgtttggtgttgtggttggcatgaactgaaattccactctaatctgttagctctggccaatcatataaaaaaacgttggttacaagccaaatggcacttcctggtagctgctgattttctatcgacaagatcagagctcagacctcaggcaagggaggtacaatgccaagagcaaatgagatgttgagggcagattcaagaatgatggtggtctttggtgccttgtcatcgaaaccagagcaactgacatttgaagaatccctcatatttgtcaagaaagttaaagcccgtgactacatgctgtacctgtcattattcgacgttctcggcagaacggaattaccccagctcgacgcctaccgagagttacagcagatgtttcaaaaccacccagatctgcgcgaagagctcgagaggttcagaccgccgccgccgccgccggtgcctacctcaaagcaggcagcaaacaacaacatctggccctgggtcatcgtgtgcgctgctgtcccgttggtcgcagccagcctgctcccgtcactttgaaacccagtgctgtggcttgctcaacaccctgttggccaaaaaatggccgtctgatcgaagaaccgctgcatgcagtacatacattacatgtgcagtggaccgaaccggcctcctgttgctattcgtgccatcacaactgaatcacagtattgtctgtgtatatatattagagtagtgttctggaagggaacctgcgttcttggtcatcaggtaccactgggcaagaaatgtagtcggtacttgctggcggcgcggtgcaacggtttggccatttgggttgggctttaactgctaaaaatcaagcttgcattgtttgaatctccttttggcagccatgactgagcccaggtttgttgt

SEQ ID NO: 148715 - DNA, 972 bp, Zea Mays
accaccgccactccgccacagttcgaatattcctagcttgagattgcaagaggtctccaagaggagggtaggggagccgagcgctcagctctaattttctccatctattgctaacagctctggccaatcatataaaaaaacgttggttacaagccaaatggcacttcctggtagctgctgattttctatcgacaagatcagagctcagacctcaggcaagggaggtacaatgccaagagcaaatgagatgttgagggcagattcaagaatgatggtggtctttggtgccttgtcatcgaaaccagagcaactgacatttgaagaatccctcatatttgtcaagaaagttaaagcccgtgactacatgctgtacctgtcattattcgacgttctcggcagaacggaattaccccagctcgacgcctaccgagaggtacgttacagcagatgtttcaaaaccacccagatctgcgcgaagagctcgagaggttcagaccgccgccgccgccgccggtgcctacctcaaagcaggcagcaaacaacaacatctggccctgggtcatcgtgtgcgctgctgtcccgttggtcgcagccagcctgctcccgtcactttgaaacccagtgctgtggcttgctcaacaccctgttggccaaaaaatggccgtctgatcgaagaaccgctgcatgcagtacatacattacatgtgcagtggaccgaaccggcctcctgttgctattcgtgccatcacaactgaatcacagtattgtctgtgtatatatattagagtagtgttctggaagggaacctgcgttcttggtcatcaggtaccactgggcaagaaatgtagtcggtacttgctggcggcgcggtgcaacggtttggccatttgggttgggctttaactgctaaaaatcaagcttgcattgtttgaatctccttttggcagccatgactgagcccaggtttgttgt

SEQ ID NO: 148716 - DNA, 1800 bp, Zea Mays
accaccgccactccgccacagttcgaatattcctagcttgagattgcaagaggtctccaagaggagggtaggggagccgagcgctcagctctaattttctccatctattgctaacaggtgcgccgctttcttcgccttccgccttatctttgcctggtccatccttaaatccgggcattctggctgttgcgttcgagggctgctgcgcccgccgattggagtcactcttcttgacgctctccactgtcattgccttgtgctagtttcgtgagcagtatttggttcaagctaactgccagctgttatgcgaaggctgttatttttccttatccagttgtgaactgtgtttgtgttccgattggggatatataacctgcggccctgcgccttctgaatcgtatcccaatgcatttcgatgcaacggccgttgttctgcagtggcagcacagtgttgccatcattattaccgtgattcagtatgcgttctgccgttctttagtttcggcattcatcattatgccatcatcggttgcgattcgttctagtgaaaaaaaaatctgccttgcttacattcaaaggcttctattggctggaattcttttcaacccttgtttcgcaatacgctcagccaatcagttgattggctcttcctaacgaaatcgtttgcttcgcacggtttacctgggcttcttttttttctgtctggagaatacctgttgattttagaaaaaaaaatggaaatgattgcccttacatcataatggaaagcaggcgtggttggtgcttttgttattgtgtttggtgttgtggttggcatgaactgaaattccactctaatctgttagctctggccaatcatataaaaaaacgttggttacaagccaaatggcacttcctggtagctgctgattttctatcgacaagatcagaggtaaactgtatggggttgtttgttggtttttagttgagactgcttatttctgagaatggtgtggttatattcctttaatgatggcaatttcttcttctatagcagctcagacctcaggcaagggaggtacaatgccaagagcaaatgagatgttgagggcagattcaagaatgatggtggtctttggtgccttgtcatcgaaaccagagcaactgacatttgaagaatccctcatatttgtcaagaaagttaaagcccgtgactacatgctgtacctgtcattattcgacgttctcggcagaacggaattaccccagctcgacgcctaccgagagttacagcagatgtttcaaaaccacccagatctgcgcgaagagctcgagaggttcagaccgccgccgccgccgccggtgcctacctcaaagcaggcagcaaacaacaacatctggccctgggtcatcgtgtgcgctgctgtcccgttggtcgcagccagcctgctcccgtcactttgaaacccagtgctgtggcttgctcaacaccctgttggccaaaaaatggccgtctgatcgaagaaccgctgcatgcagtacatacattacatgtgcagtggaccgaaccggcctcctgttgctattcgtgccatcacaactgaatcacagtattgtctgtgtatatatattagagtagtgttctggaagggaacctgcgttcttggtcatcaggtaccactgggcaagaaatgtagtcggtacttgctggcggcgcggtgcaacggtttggccatttgggttgggctttaactgctaaaaatcaagcttgcattgtttgaatctccttttggcagccatgactgagcccaggtttgttgt

SEQ ID NO: 148717 - DNA, 540 bp, Zea Mays
atggactcatggtcatggccggagaagcaaaagagatggcgcagaaaaagggacatcattgtggatcttgaatccgcgcaagggggtgccttcagctgcaccacgcgatcggtttgcttggatcgtgatcggtttgacctactggacatgacctactcgtccttctccagtgaccggccggacgcggacggcggtggcgcgaaaaacccgccggggccgtcgccgtcgccgtcggtggaggacgcgatgagcttcgtgcagatggtgaaggaggcgttcaaggagcgacagccggacaagtacggcctcttcctccgcgtcatggaggacttcaggaatcagcggctcgacatcgccgaggtggcctccaccgccaaggccctgttccaggacaaccctgacctggcgctgaggttcaacgtctttctgcccaagggccaccagatccagctcgggcttgatgagctcgccgcctatctcgtcagggacataaacctgggcgccgacaacaacgacgacgacagcgatggcggccaatga

SEQ ID NO: 148718 - DNA, 2881 bp, Zea Mays
ccgcctcctcagctaatcttggtcccggcctccccaagattctcttgttcttttggaattgcgtcttcctttgctgcctctgcttcgcagcagcatccgcgtgcggcggcgtggaacaagtgctgtgcgtgccaatttgaacttctcgtgcggtactcgaggtgagatttcacctcgtccacgttcttcctcaccgccaaagacccaagggggagaaggaagggaagaggcggaatttcgattggttggttgctgcgtgaatccgcgggattcaggctcgagtctcccttgaattgcggcgtgggccatggttctctcctccaattccaccaccaaggcagcagctcagctgtgaaagtgacagcccgcagtgtagtgctctctagcagcctgctgctggcctgggctccaatggcgtcctcaccttcgccttccccgatcaccatcagagccacctcgccgccttccaccgcaaccccgtcgccggcaaccaccacgcccaagccggattccccggccccggtgacgcagcccaatgctaccccggccgaccctccctcatcgccggccgcgcctcctcccctcccgcctcccgcgtccacgccaccgccacagctcccttctccaccgccctccttgcctccgccccctccggacgccgtgccaccaccgccggttgtcgttgccactccgccacccgccccagcagccgtagtgcctccaccctcgtcgcctgctgcagtacccccaccgcctacacctgctgccccgccaaaggcgtcgcctatacgcccccctgcggccgcgtcgccacccccatccaatctgccagcgcccaacccgccggcggacccaacgccgccgacagtagcacagccacctccgccacggcgccggccaccaagatcgcctcagacagaacctccacccctggcaccaccaccttctggaattcctgtcgaaccttccccaaccagtccctcaccgacgtccgcagatccttcgatccccactccctctagcccctcgtctccagggacgacaccgtctacaccaggctctgatggcactccatcggtgccagccccagcaacgccaggtgactcagttagcccggtaacaaccgggggccaaggttccaacaagtcgtcgagtccagcctcgcagagcagcagctcctcagtagacagtggtggactgtcttctggtgcaaaggcaggcattggggtagtcgttgccattattgtgcttagtttggttggagcagcattttggtacaagaagaaacggaggagagtgcatggataccatgctggttttgtaatgccttcaccggcctcgactcctacacaagtgttagggtattcggccaaaacaaacttcagtgccgggagtcctgaatcgaaagattcaatgccagagttcagtatgagcaattgtcggttcttcacttatgaggaattgtatcagatcacaaatggcttctcatcacagaacctgctaggggaaggtgggttcggatcagtgtataagggttgcttggctgatggaagagaggttgcggttaagaaactgaaagatggcggcgggcagggggaacgtgagttccatgctgaggtggatattatcagtcgtgtgcatcatcgccatctagtttctcttgtggggtattgcatttcagatgaccagagattgcttgtctacgattttgtgcccaacgacacacttcactatcatcttcatggacgtggagtaccagttttggagtggccagctagggttaaaattgcggctggttcggctcgtggaatagcctatcttcacgaagattgtcaacccagaataatccacagggatataaagtcctccaatatcttgctggataataactttgaagcactggttgctgattttggtcttgcaaggttagctatggatgcttgcactcatgtaaccacacgagtgatgggaactttcgggtaccttgctccagagtacgcgtcaagcggcaagttgactgagagatctgatgtattctcattcggtgtcgtcctcttggagcttattactggtagaaagcctgtcgacgcatcaaagccattgggtgacgagagccttgttgagtgggctaggccattgctcacgcaggcgcttgagaccggcaacgccggggagctggtggacgcccggcttaacaagaactacaacgaagtcgagatgttccgtatgatcgaagctgctgcagcttgcattcggcattcagcatccaggagaccgaggatgagccaggtcgtgcgggtgctcgacagtctcgctgatgtcgatctaactaacggcgtgcagccaggcaagagcgagatgttcaacgtcgcgaacacggctgagatcaggctgttccagcggatggcgttcggcagccaagatttcacgacggatttcagccagtccagctggaacaacagccagagcagaggtcttgatgcctctggttcaaggccattgtaatcctcctcctcgtcgtcgtcgtaaatttcgtagatctaactagctagggtgtttcgtgatgatttttttacctcgtgtaattctttctgagtggatcaatagtgattgttctttcgccatccctgtcttctacccactaacatagatcatggattgaggtctgcttgcttgtgcaaatactcgttgaccgatgaagagagaccgctgcgtttagtccctactagtgaattgctgtatcgattttttctctttcaaggttttgcaatagtcatgtaatcagcagttcgctttgaaatcggggttttggcaagaaactcttagttcgagttgaacttttgggcaaagtttattcagatgtgcgcctttcagttttttt

SEQ ID NO: 148719 - DNA, 1620 bp, Zea Mays
atggctaacgctagccgtggtcgtgtcggcggcggcgggcgaagttccgtgctcgcgctgcttctcctgctttccgccggaggagcccgagcgtcctacgacggcgagggcgaggcagcacgggcaggggcagaggagaaggagaaggctgcggcgtggacgggcgggctgagccggcggagctttcccaaggggttcgtgttcgggacggcggcgtcggcctaccaggtggagggcatggcgcacaaggacggccgcgggccgagcatttgggacgccttcatcaagatccccggcgagatcgcaaacaacgccaccgcggacgtgactgttgacgagtaccatcgctacaaggaggacgtgaatatcatgaagaatatggggttcgacgcttaccggttttcgatctcttggtcaagaatattcccaaatggaaccggagaagtgaactggaaaggagtggcgtactacaacaggctgataaactacatggtgaagaaaggcatcacaccctacgcaaacctgtaccactacgacctaccggaggcgctggaggtccggtacggagggctgttgagcagagaagtggtgagatcgttcgcagactacgccgacttctgcttcggggcgttcggcgacagggtgaagaactggctgacgttcaacgagccgcgggtggtggccgccctagggtacgacgacggcaggttcgcgccggggaggtgcacggggtgcgaggccgggggggactcgggcaccgagccctacgtcgtggcgcaccacctcatcctctcccacgccgccgccgtccagaggtaccgccgcaggcaccagccgacgcagaggggcagggtcgggatcctgctggatttcgtgtggtacgagcccctcacggcggactcagccgccgaccgggccgccgctcaaaggtccagagacttccacgtcggatggttcctgcaccccatcgtctacggcgagtaccccaagtcggtccggagaagcgtcaagggcaggctccccaagttcacggctgaggaggccggtctagtccgaggctccatcgactacgtcggagtcaaccagtacactgcctactacgtgcgtgatcgacggccaaacgctacggcggcgccgcccagctactcgtccgactggcacgctgagttcgtctctagcttgacacctatccacgccacgctgcatgcagatgaacgcgacggtgtgccgattggaccaagggcgaactcagactggctctacatcgtgccttggggactgtacaaagccgtcacctacgtcaaggagaagtacggcaaccccacgatgctcctgtcagagaacggtatggacgacccgggcaacgtcacggtgggccagggcgtgcgcgacgcggccagggtggcctactaccggagctacgtcgccgagctgaaggcggcgatcgacggcggcgccaactgcgtgggatacttcgcctggtcgttgctcgacaacttcgagtggaagctggggtacacgtcccggttcggcctcgtctacgtcgacttcaggacgctccggcgctaccccaagagctcggcgtactggttcagggatgtcatcgccggcaccaactga

SEQ ID NO: 148720 - DNA, 1126 bp, Zea Mays
acgcaccgccctcgtcaccacacttttgcaaaatgcgcgccgcgtgccatgctcatgccagcctgggcaaagcaaaaatgtcgcagcgaatcctcaacaccgccaagcagacgccagcgccgacgcagcggcacaacccttcgccgccgcctaagctcggccgccgcgctgccgccggcgcgtcaatcgccatcgcggccgcgccggctctcctggccgtctcgccggcgccgtccaaggcgcgggaagccgaagccgcggtggcgccgtgcctcgccgagctgcccgtgaccgcgaaggccttcctggacgtgtcgatcggcggcgagccggcggggcgcatcacggtggggctgttcgggggcgcggccccggcgggcgcggcccggttcctgtccctggtgacgggcgtggggtaccggcgcaaggagttcgtgaaggtggtgccgggctacgtgcagcacggcggcgtggtgtcgtacccggccgtgcccgcggtgacggagcggctggcggccgaggcggaggcggtgcgcgcgcggtgcggggccggggccggggccgtgcacgcggcggccggcgcggtgtcgatcgtggtgcgggacccgagcctgccgccgccgcggccgaagctggtggccaggggcgggaagctggaggtggaggaggagcaggccggcgtggtgcccaacgccaccgagttcgtcgtcaccaccggcgcggcccccgagctggacgcggccgcggtgctggtcgggagggtgctggatggcatggacgtggtggccaagatcgccgccgtgcccaccgtcagggacaacaccgactcgccgtacttcagagtggccaagctgatcggcgacaagagagcggtggttgcggaacgaggcttcaaccgcccgtacaccaagatcctagtcaccaactgtggtgtgctcagttgaagcgcgcggtcgagtgctccgtctcaattctcaaaggaagaattctggaggacctgatggagattatcagaccttgttggtatagagtgatttgcctgggtgcacgacgaactcgtttctcaacggtggtgatcgatatacttataaaagctccaagtgctgctagcttgtgttttgtacat

SEQ ID NO: 148721 - DNA, 1403 bp, Zea Mays
attattagctagtagatggcacaggcgagcaagcgcagtgcgtttctccggccagtgatgtacgacgacgacgaaccttcgtccatctccatgtccctcgagctattcggctaccacaacggcggcgtcggcgtcgttgtggacgacggcgacgaggccgccgacggtggctccgcctctgctctctcgctgcagctcgccttcgacgacgacagcttcgtcaagggcgggtgcgagtgcgacgacgccggcggcggcggtgcctcggctgcagactactactactacggcagctgggctggcgcctacggtggctccggcgccacgtccagcggctccaactcgtcggtgctcagcttcgagcaggccggcagcggcggcggacagcgtcatcacctggtctatggcgaagacgggtgcgctctctggatggacgacgcgggcgctggcatggtcgtcgagcatccgccggcacagcagcagcagcagcacggatccggctgcgacttcggactcatcggcagctcgcctgatgatgccggcttaccaatccagctggagccggggactgtccagctgccggccaaggcgccgccgcacaagcgtgctcgccgggacggtgatcaggtgcaagctgctgcagcggcgaagaagcagtgtggtggcgtgggggccaggatgaagagcaagcaggccaagctggctgctcctgctcctaccaaggaccctcaaagcgtagctgcaaaggttcgaagagagaagatcgccgagaagctcaaggtcctgcaagatctcgtgcccaatggcaccaaggtggacttggtcaccatgcttgagaaggcgatcacctatgtcaagtttctccagctgcaagtgaaggtgttggctgccgatgagttctggcctgcacaaggaggcaaggcaccagacctctcccaagtgaaggacgccttggacgccatcctgtcatcgtcccagcagtgccctaaataataatcagctcatgcactgcatgcttgcttcgttttagtttctctctaggagccgcgcctaagacgatggtgaagatgctactaactaggaaatctatccatgcttggctgcccaagaaacagatcagcaaataacaaaaagtagtgaagagagtgatatgatgatggttaagttacctcaagttaattttagcggcgaataattcagccgttgccaatatgttcgctcgcgacgatcccttttttttcaagataatcacacatcttgttttgtatcgcatcagctacgttattatctctgaataaattcttcaaccacacttggttagcaaaacaaatatacatgcatatttgccatctctcatcgcgcgtgaccaaattataagctaaccaaaggcaaaatttggaagt

SEQ ID NO: 148722 - DNA, 901 bp, Zea Mays
atgtcgcaccacgcacgctcgcacaccagagttctgcgcccccactccccctcccacccgagattgtcgccgatccgagatagccgtgtgcgtggtatcgattttgccccaaccaccaccacagacggagaacctacctctcatgtcgacgccgccggaggaggagcaggtggtgtcacgatcagcaaggaggtggacctcaagcccgttgtcatgaagtgggaggtgctgcaggccgaccacttccacaacggaacgcctaggccagacaactggggaacatctcggccctcctttgggttcttctcactcgacctcggctactcactcctcttcaccgaggcgctcctcgcccccgccatcccctccgtcttagcgcacactgacgatatcttcctacctctcgttaggcatgcggctctcgcgccggcgacggcaaggagcgctggcttaactcagagctggctcatgctcacgtgcttccagacctccgtcgtctcatcagccatgttcctcaccgcgatggtagccaaatcactctcacccaacctcacgactgccaccatcggccaggggattgggtggaagctctaggcaaaggccaccattgtgtcaggactactatcgctcatgctcgtgccgcttattttgtatgtgatctactcgccggatgtgaaggatagccccgatgcgccacgcctggccaaggagcggctcaccaagatgggacccatgagcaagaaggataaaataatggctggcttgctactacttacggtataattatacacacttgtcattttggcattatgagggggtcacattttgtgtttctatactatgggggtgtttggtttctagggactaatgtttagtccctttattttattcctttttatgt

SEQ ID NO: 148723 - DNA, 1046 bp, Zea Mays
cttcatttggtgagagctaacacagcgctcctgcgtgttacatgggtggttttcttgtcatggttaggctttcttggcaccggtcggatgttctggcttgacaattcgggtacctagtattccagaggtgatttctcctcattgacagagagcaaatctggttcgtgatccctagtaccagagagggacacggttttcctatcgatgtgttagagtcaagtactcaagcttttgtggttccaatggagtctaagcgtgtgagtgatcaggatgctttgatcgacctggagagtggcaatggcactacagtaagcaactacaccaattgtggggatgctagtttcacagtggggcaagcaagaacagcgcctaatggtgcgtggaatggttgtgtgtgtgccaacgggtgtccgagggacgacaggaatcagcacatggattgctcccctcctgcttcggatgctgttgctagaagtggagatgacaggaagtctgagggggaggagaagcttatggacagctcaggaggggagaagacgaagaagaagcggtccaagaagccaccgcggccgccaaggccgctgacacctacgccgttggatgtttctgaccagaagctcctcaacgaactgagtgagcttgcggtgttgaaacgggcaaggattgagcggatgaaggctttgaagaagatgaagaatgccaagcaagggtcctcgggtggcaatttgtgccccctgatcattaccattatcttctgcatcgtcatactgtggcaaggtatatagatctgttcactactattgatagtggtgccgtgtttgtatgcaacaatagaagtttgcgcctcatgaataaaacattgactcaaacgtcgaattgaacctttctggttgctatattaatagctgccaatccattttcttttccttttctttttgcgttcacctcacaggtaatatcttgtcagaccttagtaaacctagctacatagttttgaactagtacaccgttagccgttctatgttctactatgtgagtctacaaag

SEQ ID NO: 148724 - DNA, 736 bp, Zea Mays
cacgagtatctcgctctcgctcactctcccaggcccagcttataaagcttctcgcacgggccaaaagccgtagtctgtgccaagaacagagccggtgtgtgtgcccgcgctgacgtgcacgggcggcggccatggcgaggattctgctccagcccaacaaagacgatcacgcaaccgcgttccactcccacaccggggcgccggcgacctccctcctcctcctgctcgtcgtcgccgccgctgtcgtcgtgtctctttgcaccagcggcaagaacgccaggccatggaagcagcgccggtcgtccctcgcgccagcgccgcagcaggagcacgagcacgagcaggacggcggcggcggcatgagcaggaacaagcagctgctcgccagcctcagcggcatcggcgtcaaggcggccgcggtggccaagatggtctcgtggaaccggcgctcgccgccggcgagcgcctggagcagcggcggcggagacgacgcctacgtggacgccgacggcgacggcaccgccgaagaagaagcgctctggaagaagaccatcatcttgggcgacaagtgccgcccgctcgagttctccggccacctcgcctacgattgcgacggcaacccgatgcagcctcaaccgtcagcgatcaacaaagatgccaccgacgatgcggcaaccaagggttagcgaaccactccgggtgcctacgtgcatttgggagtttgatttgcatggtg

SEQ ID NO: 148725 - DNA, 1504 bp, Zea Mays
ttcctgtccttttcttcctcccgaagccctaaccccttctcgaccgttgccccctctcgtcggcgccggcaaggcggcaagaattcaaatgaccctcctcgcagctatcactaaccccgccaccggctccagcgagaaggcccatcctatcgtgatcaccccgggtgccacgccgccgccgccgacatcctccgcgctccccacctcaatcccgccctccgcctggtcgctctcccccgccgaccccgccatcgccaccgccgcctcctacctcgcagcctccctcgactcctgctcctccctcccgcgcctccgcatccttctcaccgacttcatcaccactctgtcccaatccctcgcactctcaaccccggcggcagcccttcccgccaccatccgcgccgtcgccccttacttccccgctgctatttcctcccttgtggcctccaaggcggcaagcctcgccgggcacgacatcctccttgctcttgcggaatcccgcctcctcccgcacccgccaccggaactcatctcctcgctatgcaagaaggaccaggtcgaccttgtctgcgccctacttcgccaggccgccgacatccgctcctccgagatcctcgccgcgctccgctgcttcctctcgccggcctccgataaggcctacgacgccatgatcgacgtcaagggccgatggaaggacgctgcagtgctcgcggtcaacaggtgtcaggggaagagcgccgggaagaggaagagagttgacgctgcgacgaggcgggtggcgctgctgctcatgatggggtacgataggttcacctctccagaggtgtgcctgcattacctatttgcatcagagattgtggattccgtggtgcttggagcggctgtggctgaactcgatggtgaggaggtaatcaagctgatgagatatctcaacatgtggattggcaagtatcggaggttcttggaagctcacatgtgtccggaggctgtggaaatgcttgaattggaccagtgtgacattgtgccatcgtttggagcagtggctagggcgctgggagtgttgctggataatcatttctcccatcttgtgttgaatgctgatgcgagggaggacttgagggctgcggagttgatagtgagagagctcactgcggaagcggagtcttctgggacaatactggacttgctgcatagattgcagctgaataagtgagagattaatattatctcttgaatctatataccttctgtagctctgaagccgatgtgtagaaattctgactgttttgttgcattgaagcgatgagatatgtgttgcgttattgaatattgaagtatattagtacatgttttggttggaaactgttgttttcagatttcattgtagtgatagtgtgatactgtagttggtaatattgtatattgtgctatgcttgcttaattgttgtgaaattctaacatctaattatgatccaatcatccagatccaaacatgtctgttgca

SEQ ID NO: 148726 - DNA, 1521 bp, Zea Mays
cgacggcgccaccataccgcctccgccctcaaccctagccgtatcgcgccctcgccctgcctccagccccgcgcagtatgctgctcgctcgtcgttggctactcgcctgctcccatgctccctccggatctgctgctctcggggatttggcgcagcggctttgcgcctccacacttggtcgccggcctcctcacctccacaagcccacgtcatcgccgtctcctcttcgccatcgccccgctcgcctcctgtgccaacgacccgaccaacctcgccgccaagcagggccacaccgtgatataaaaaagttgaaactttcatagcttacctgccgagaatgcattgttgaagttgcaaagatgtatgtctaagtttattttcacataatagtatatttttttctattatcaagaattgtttctcaatacattcatgagttggaaattgtactgtgagcctttctatattatatagtctagctagctctacaatagagctctagtacagacagaacacatgctttcatactcctatggaatagtagaatcaggtagcagaattaggtgttcattaaccatgcaaataattaattcaagttatctaaataggcccttagtttataatgctgaaagtataaaaagtgttccactctcaataccgagaataggaagactccaccatgtatatgtgttcttatcaggtgctcttctttcccgataaaataaaaatcctttgcttcaatatgctacatgatactttgtgtatagataaaggaatacatccatatgatgttcctgggagttagtttgatgtccatatactccatgcttgctgattggaaaggaaactagttatttcgtttgaagtcatatgctgcttggcgtcattctaatccaagtagctgaggggtcaacagtggctaacttccctgtcactttattccaaagagcaaaagggaatcccaccctagctgtgatattttccctggattatggttgtccaggaatcctacatggagtggaatttatctccgggttaattaaccttggttgccaaactagccctcaatgtgcgggacaagaagggaaatactgctttgcacatagctacacggaaatggaggccccagggatctggaataacaggagcctgatggttgcatcagtagagttgaccacttctcagtattgcgagatgcatcttacatggtcaagaagataattcctattctgagctacttgctcgtgtacaagtctccttatcatgtcctcctttcaagccagtctattctttgcttgattcatcacgggtgcacattattgtaattagaatcttcagagtactcgaaggatagttaaagctgtttagctagtccttcagattactgaaaatatagttaagaacatttgtattttgctatttcgatttccaacagtacaactattgagtacaactattggggatgattgtttatgtgatgtggatctatcattgtgcaatactaattaaatttgtatatct

SEQ ID NO: 148727 - DNA, 1635 bp, Zea Mays
ctcttctccccttctcccgacggcgccaccataccgcctccgccctcaaccctagccgtatcgcgccctcgccctgcctccagccccgcgcagtatgctgctcgctcgtcgttggctactcgcctgctcccatgctccctccggatctgctgctctcggggatttggcgcagcggctttgcgcctccacacttggtcgccggcctcctcacctccacaagcccacgtcatcgccgtctcctcttcgccatcgccccgctcgcctcctgtgccaacgacccgaccaacctcgccgccaagcagggccacaccggtgagctccccttctgttgatgttgtgggagcggatcgaaggcccggattcgtttggggtttgctttttatggacgggactgggtagaactctttgttgtcttcagctgataggctttactcttggcatcattcggctggcctaggctggaatttgtttgacatccggagcttcgaagttcaacttgttggcattgactgggtgggctgtagatggaatttttcgagttctgcaattcagttcacaaaggggaaatagaaatggttgcgggtgatcccaacctgctgacagttctaactgttttggtatgttttaagttgattcactgtcagctgatgaggttcctaccataacacttaagcaaggaatcctgtacacttctctcctggtaaatagactgatagtagagtaatacatattgttgccatgataaaatgctaactgtgctgcatagactgatagtagagtaatacatactgtcagcttcaattcgtttggtttgattggcaggtgtgaggtgctatgagcatgtgactctaaatctactagtcctagaatggattacagttgtcaggaatttttgttgggactggtgagcttcagtaccgtagaaagacacagctacattatttgtactctagtacagtaccgtagagtcattatcaggccaataggatggtttaatattcaaagactagtttcttgcctgttcatgttagctgattttaaacctaactatttgatttttgtcttgcagtgatataaaaaagttgaaactttcatagcttacctgccgagaatgcattgttgaagttgcaaagatgaatcctacatggagtggaatttatctccgggttaattaaccttggttgccaaactagccctcaatgtgcgggacaagaagggaaatactgctttgcacatagctacacggaaatggaggccccagggatctggaataacaggagcctgatggttgcatcagtagagttgaccacttctcagtattgcgagatgcatcttacatggtcaagaagataattcctattctgagctacttgctcgtgtacaagtctccttatcatgtcctcctttcaagccagtctattctttgcttgattcatcacgggtgcacattattgtaattagaatcttcagagtactcgaaggatagttaaagctgtttagctagtccttcagattactgaaaatatagttaagaacatttgtattttgctatttcgatttccaacagtacaactattgagtacaactattggggatgattgtttatgtgatgtggatctatcattgtgcaatact

SEQ ID NO: 148728 - DNA, 930 bp, Zea Mays
ctcttctccccttctcccgacggcgccaccataccgcctccgccctcaaccctagccgtatcgcgccctcgccctgcctccagccccgcgcagtatgctgctcgctcgtcgttggctactcgcctgctcccatgctccctccggatctgctgctctcggggatttggcgcagcggctttgcgcctccacacttggtcgccggcctcctcacctccacaagcccacgtcatcgccgtctcctcttcgccatcgccccgctcgcctcctgtgccaacgacccgaccaacctcgccgccaagcagggccacaccggtgtgaggtgctatgagcatgtgactctaaatctactagtcctagaatggattacagttgtcaggaatttttgttgggactgtgatataaaaaagttgaaactttcatagcttacctgccgagaatgcattgttgaagttgcaaagatgaatcctacatggagtggaatttatctccgggttaattaaccttggttgccaaactagccctcaatgtgcgggacaagaagggaaatactgctttgcacatagctacacggaaatggaggccccagggatctggaataacaggagcctgatggttgcatcagtagagttgaccacttctcagtattgcgagatgcatcttacatggtcaagaagataattcctattctgagctacttgctcgtgtacaagtctccttatcatgtcctcctttcaagccagtctattctttgcttgattcatcacgggtgcacattattgtaattagaatcttcagagtactcgaaggatagttaaagctgtttagctagtccttcagattactgaaaatatagttaagaacatttgtattttgctatttcgatttccaacagtacaactattgagtacaactattggggatgattgttta

SEQ ID NO: 148729 - DNA, 1548 bp, Zea Mays
ctcttctccccttctcccgacggcgccaccataccgcctccgccctcaaccctagccgtatcgcgccctcgccctgcctccagccccgcgcagtatgctgctcgctcgtcgttggctactcgcctgctcccatgctccctccggatctgctgctctcggggatttggcgcagcggctttgcgcctccacacttggtcgccggcctcctcacctccacaagcccacgtcatcgccgtctcctcttcgccatcgccccgctcgcctcctgtgccaacgacccgaccaacctcgccgccaagcagggccacaccggtgtgaggtgctatgagcatgtgactctaaatctactagtcctagaatggattacagttgtcaggaatttttgttgggactgtgatataaaaaagttgaaactttcatagcttacctgccgagaatgcattgttgaagttgcaaagatgtatgtctaagtttattttcacataatagtatatttttttctattatcaagaattgtttctcaatacattcatgagttggaaattgtactgtgagcctttctatattatatagtctagctagctctacaatagagctctagtacagacagaacacatgctttcatactcctatggaatagtagaatcaggtagcagaattaggtgttcattaaccatgcaaataattaattcaagttatctaaataggcccttagtttataatgctgaaagtataaaaagtgttccactctcaataccgagaataggaagactccaccatgtatatgtgttcttatcaggtgctcttctttcccgataaaataaaaatcctttgcttcaatatgctacatgatactttgtgtatagataaaggaatacatccatatgatgttcctgggagttagtttgatgtccatatactccatgcttgctgattggaaaggaaactagttatttcgtttgaagtcatatgctgcttggcgtcattctaatccaagtagctgaggggtcaacagtggctaacttccctgtcactttattccaaagagcaaaagggaatcccaccctagctgtgatattttccctggattatggttgtccaggaatcctacatggagtggaatttatctccgggttaattaaccttggttgccaaactagccctcaatgtgcgggacaagaagggaaatactgctttgcacatagctacacggaaatggaggccccagggatctggaataacaggagcctgatggttgcatcagtagagttgaccacttctcagtattgcgagatgcatcttacatggtcaagaagataattcctattctgagctacttgctcgtgtacaagtctccttatcatgtcctcctttcaagccagtctattctttgcttgattcatcacgggtgcacattattgtaattagaatcttcagagtactcgaaggatagttaaagctgtttagctagtccttcagattactgaaaatatagttaagaacatttgtattttgctatttcgatttccaacagtacaactattgagt

SEQ ID NO: 148730 - DNA, 2994 bp, Zea Mays
atgtctgcagcgtctcatcgctgctgtgcttcttccttgagagctttaaccgtgttgtttgtgttggcagctcttgtttcagatgtaggcggccgacatcatcatcatgtttgtcgtccttatttctcctgcggtggttttagcaatatatcgtatccattccgtcggcaaggtgatccatctgggtgtggtgtccaatcgtatgagctggtttgcacggatacagacgccacaattcgcatcggcagtggaacatacaccgtgcttagcatcaactccacgtattcttacttctgggttgtcgatgccaacctggacatccagagcagttgcccccttccctggtgggattaccatggtgagaccagtactgccaactcatatcgtaggaggactgagttcaggccttatttcctttatccgaattcgatgtcgattatctttgtgaattgctcgaagccaatagagaacaatgatatatatgagccggtgccttgcttgagcaattcttctttcatctacttgctaactcactactcgtatggctatgctcttgctgagattctggagccctcatgcggttacctagccatgatttatttgggtggtccaggcataccggtgcccaagaatacaagctatccagatgttgttaagttaatgaggaatggatttggccttagatttccttcttcgattggtgaccgcggcatcagagaatgtttcgcagagtctgtgcgtaatttccttaaagagccaagaaagtatcagattgtggacattctaatggtcgaggaattatggtcttgttttctcgatcaacatggatcaactaataatgttgtcacttctgttatcatcgacattatcaaaacaataccaatatttttttgcaggcttgtattgatgccgctagcagtatttgtcttcctagcccataaatactggaaagcaaggattacaatagatgcagtcgagaagttcctgcggatgcagcagatgctcgttccgatgagatatgcatacacaaacatcattgctatcaccggtcatttcagagaaaagctcggacaaggaggctacggttctgtatacaagggggtgctacagccaggtgaagtacatgttgctgtcaagatgttaggcaactccaactgtaatggagaagagttcatcagtgaggttgccaccattggcaagatccaccatttcaatgttgtgcgcctcattgggttttgctccgaggaaaatagcagggcacttatctacgagttcatgccccatggatctctcgataagtacatcttctcgtcggagaagagtttctcatgggacaaactcaatgagatcgctctgggcattgctagaggtctcaactacctacatcacgggtgcgatatgcaaattgtacacttcgacatcaagccacacaacatccttcttgacagcaactttgttccaaaagttgctgattttgggcttgccaaactgttcccaagagacgacagtttcgtgccactgagcgctatgcggggaacgataggctatatagctccagagatggtatctcgaagctttggtgtcatctctagcaaatctgatgtgtatagctttggaatgctactgttggagatgacgggcgggcgaaggaacgcagatcctcatgcaggaagctctagtcaagcatactacccatccttggtgtacaaccagctaagccaaggagatgtgggcgagatcagtgaaggtgttgatatgcacgagttaaagaagaaactatgtatcattggactttggtgcatccagatgaagccgcaagatcgaccaacgatgagcgaggtcatagagatgcttgaagctggtgtcgatggcatccaaatgccttcaagaccattcttttgtgatgacgaggttatttgcaggttcgtattgatgccgctgatagtatttatcttcctagcctataaatactggaaaacaaggataacaatagatgcaatcgagaagttcctgcgaatgcagcagatgctcgttccaatgagatatgcatacacgaacaacatcgctatcactgcccatttcaaagacaagctcggacaaggaggctacgatactatatacaagggggtgttacagtcaggtgaagttcaagtttctatcaagatgttgggcaactccaactataacagtgaagagttcatcagtgaggtcgccaccattggcaagctccatgatgtcaatggtgtgcgcctcatcgggttttgctccgaggaaaataggagagcactcatatatgagttcatgccccgtggatccctcgataggtacatcttctcgtcggagaagagtttctcatgggacaaactcaatgaaatcgctctgggcattgctagaggtctcaactacttgcgtcacgggtgtgacatgcagattgtacacttcgacatcaagccacacaacatccttcttgacaacaactttgttccaaaagttgctgattttgggctcgccaaccaaactattccaaagatatgacagttttgtgccattaagcgctatgcggggaacgataggctatatagctctagagatggtatatcggagcttcggtgtcatctctagcaaatccaatgtgtatagatttgggatgctactattggagatggtaggagatcgaagaaacgtagatcctcaagcaggaagctccatccaagcatactacccatccttcagctgagccaaggagacgttgatgggatcagtgaaggtgttgatatgcatgagttagagaagaagttatgtatcattgggctttggtgaatctagatgaacccgcaggatcgaccgacgatgagcgaggtcataaagatgttttgtgataatttgatgtcatctaaaatacctccatgaaccccttttttatcaaaaactcctcaagaacaatttgtttgcctacaaacagaggatcacggtcctagacgttgtattcttgaa

SEQ ID NO: 148731 - DNA, 159 bp, Zea Mays
ccccgtgcaggggaggtgctgccgaatttttttgttgacatacttgtttattttttttgcagaggtcttcctagccgctgcgggtctgcctcgcgtcgccactgcaccgacccgccacagccccactagcctgactccaccgccaccctaggtataacc

SEQ ID NO: 148732 - DNA, 330 bp, Zea Mays
atgacgggcgagcaaaggaacgtagatcctcatgcaggaagctccagtcaagcatactacccatccttggtgtatagccagctgagccaaggagatgcgaatgggatcagtgaaggtgttgatatgcataagttagagaagaagctatgtatcattgggctttggtgcatacagatgaagccacaagatcgaccgacgatgagagaggtcatagagatgcttgaagctagtgtcgatggcatccaaatgcctccaaggccattcttttgtgatgatgagggtgatagttcttactctgcaatctctaaacttgatataatagaagagtag

SEQ ID NO: 148733 - DNA, 2478 bp, Zea Mays
acacatcgccacgccactgattggctcgcgattatgtgattcttgaaccttcttgccatggggatgtctgcagcgtctcatctctgtgcttcttcgtccctgcgagctttaaccgtgttgtttttgttggcagctcttgtttcagatgtagaggggcgacatcatcgtcatgtctgtcctcatttctcctgcggtggtttaagcaatatatcgtatccatttcgtcggcaaggtgatccatctgggtgcggtgtccaatcgtatgagctggtttgcacggatacagatgctacaattcgcatcggcagtggaacatacaaggtgcttagcatcaactccacatattcttacttctgggttattgatgccgacctggacatccagagcagttgcccccttccccggtgggattaccatgctcgttggatcaatctctacttacatctttggaggattgagttcatctatcagtatttctatccttcttctttttatattgattcggggcggtgggctatctttgtgaattgttctcagccaatagagaacattgatactgataaatatcatatatatgagccggtgtcttgcttgagcaattcttctttcatctacttgctggtaactcactactgggatgctgacaactgggatgttactgctggggttctggagccttcatgcggttacctagccatgactcctttgggtggtccaggcatgcaggtgccctggaatacaagctatccagatgttgttaagttcatgaggagtggatttgcccttggatttcccgtttggtatggtgataacatcagagaatgtctcgcaaacaatatgcgtactttccataaagaaccaagaaatagtacaggcatcaggcaacagatcttggacattcttacgttcgagacattatggttttgtgttattgaacaacttggatcaactaataatggtgtcaaatctgttctcatccacatcatcgaagaaataccatatgttctttccggtctgaaatctgcacatgttatttgcaggttcatattgatgccgctggcagtatttgtcttcctagcctataaatactggaaaacacggataacaatagatgcagttgagaagttcctgcgaatgcaccatatgctcgttccgatgagatatgcatacacaaacatcattgctatcaccggccatttcagagacaagctcggacaaggaggctacggtactgtatacaagggggtgctacagccaggtgaagttcatgtcgctgtcaagatgttgggcaactcaaactgtaatggagaagagttcatcagtgaggtcgccaccattggcaagatccaccatgtcaatgttgtgcgcctcattgggttttgctccgaggaaaatattagggcacttatctatgagttcatgccccgtggatctctcgataagtacatcttctcgtcggagaagacattctcatgggacaaactcaacgagatcgctctgggcattgctagaggtcttaactacctgcatcacgggtgtgatatgcagattgtacactttgacatcaagccacacaacatccttcttgatagcaactttgttccaaaagttgctgattttgggctagccaaactgttcccaagagatgacagtttcgtgccactaagcgctatgcggggaacgataggctatatagctccagagatggtatctcgaagctttggtgtcatctctagcaaatccgatgtgtacagctttgggatgctactattggagatgacgggcgggcgaagaaacgcagatcctcatgcaggaagctctagtcaagcatactacccatccttggtgtacaggcagctcagccagggtgatgcgaacaggatcagtgaaggtgttgatatgcacgagttagagaagaagctatgtatcattgggctttggtgcatccagatgaagccgcaagatcggccgacaatgagcgaggtcatagagatgcttgaagctggtgtcgatggcatccaaatgcctccgaggccatacttttgtgatgaagagggtgaaagttcttactctacaatctctgaactggatacaatagaagagtagtagtagtaaaatgcacttgtgtctatgtgctcttaatgtatcagactattaagattgcaaggttgccataagctaaggtattggttgtatacttttattgagagtgtgataatgtgatatcatataaaatacctccatgaagttttttacaaagaattcctcaagaacattttgtttgcctacaagcagaggatcagagtcccagccgttgtatcttccaaagggctgcagttcctatatacgaatccttgcaaaggcttagtgtacaatttctatgttatgcataataaattaagtaaactagtatattgcttgtgctaacactgcaatagtatttggcaatacaaatcaaataaccaaaatattcaaaaa

SEQ ID NO: 148734 - DNA, 1413 bp, Zea Mays
gccgacacaacgccactgttcgtcgcactttttttttgtgtgcgtcgcccgctaaactgcgctacggctacacggctacggatttcactagtacctcgtagccacaacgaaggaagtcgccaatcccaatgccaggaaggaagtctcacgaattccctcatgtgccgatgtgcgcaccgcctccgaatgctggaacgggtattcctcttctcgccgccgtcctccgctccggtaagggtcgctaccgctttccggatgcgcttcctactcgttactgacagagggtactgggattccctttgcaacaacctcgcagcccatgggaagagtagacatatctgtagaaggatccaccaggtaccagagctggcttgcattgttaatgaggcttaaacaagagcttgggccgacaataccatcttgatttgttgcttctcttgagcatcctacaagtactgagaaaggatgtgctacaggagccaagaactggatgatcaaggatggtgtcatgcccagagcatgataattgcatcccaggtgcgccacatgatggagggtggcttggaagccgaaaggggaaccggatctctggtccatgcttgtggcatcgatgcgatgggcaagttttgaggaagtcatcatcttccttcgatgtggcagcataggatgcatagttgtgaagcaaaagcagcagcactgccagaagaaatttatgcgagttcatgggatgtatttggagatgaaggtgggcgaggagaaggttgcaagtgtttcagaatgagcacctatttctatttgctttaacctctcgggaggagagattctgtgaatgtcatgaccgctacgcggtggcaaggaattcctgctgccagtattgctttaccaggaagatgcctttcttcttcagtcttattcctcccttctcgaatattatatttattgtctgttactgctccctccgtttctttttagttgtcgctggatagtgtaatactaatttgtgcacgcctaatgacttggcttttattttcctagtcaagtcactataagactttttaatttcggatagggcttgtgatagatgagtgactggcgtgagtagaagttcagctatcagacgggacctctgccgtgttccagcttccagtgattgacgtgttccagcttccagttgcgtgaaagacccaaaagagagacccatgcgaaccaaaaaagtgaatacacaaaagaagaaaggactctaagtcaatggcatcacaatcatgtagggccagttgaagtgtgattctcttgttcaaatagctgttacgtggaaggtgcatacgaaccataagacagacaaaagaagatagactaccaagtcagcggcatcacaatcatgtagggccaattgaagtgcgattttcttgcaag

SEQ ID NO: 148735 - DNA, 1932 bp, Zea Mays
atgccgatgtctgattcttccttgagagttttaaccgtgttgtttgtgttggcagctcttgttttagatgtagaggggcgacatcatcgtcatgtctgtcctcatttctcctgcgatggtttaagcaatatatcgtatccatttcgtcggcaaggtgatccatctgggtgcggtgtccaatcgtatgagctggtttgcacggatacagatgctacaattcgcatcggcagtggaacatacaaggtgcttagcatcaactccacatattcttacttctgggtcattgatgccaacctggacatccagagcagttgcccacttccacggtgggattaccatgctcgttggatcaatctcaactcacatcgtttgtggattgagttgagccattattctttctattctttttatatggattcggggcagtgggctatctttgtgaattgttctcagccaatagagaacaatgatactgataaatatcattatgagccggtgtcttgcttgagcaattcttctttcatctacttggcaactggctactggtatgatgactatgtttctgctggggatttggagccttcaagcggttacctagccaagactcctttgggtggtccaggcatgacggtgccctcgaatacaagttatccagatgttgttaagttcatgaggagtggatttgcccttcgatttcccttttcatatggtgataacatcagagaatgtctcgcaaaggatatgcgtactttccataaagaaccaagaaatagtataggcatcaggcaacagatcttggacattcttacgttcgagacattatggttttgttttattgaacaacttggatcaactaataatcgtgtcaaatctgttctcatcaacatcatcgtcagaataataccatatgttctgtggggtctaaaatctgcacatgatacagttgagaagttcctgcgaatgcagcatatgctcgttccgatgagatatgcatacacaaacatcattgctatcaccggccatttcagagacaagctcggacaaggaggctacggttctgtatacaagggggtgctactgccaggtgaaattcatgttgctgtcaagatgctaggcaactccaattgtaacggagacgagttcatcagtgaggtagccacaattggaaagatccaccatgtcaatgttgtgcgcctcattgggttttgctccgaggaaaatatcagggcacttatctatgagttcatggcccgtggatctctcgataagtacatcttctcgtcggagaagacattctcatgggacaaactcaacgagatcgttctaggcattcctagaggtcttaactacctgcatcacaggtgtgatatgcagatagtacactttgacatcaagccacacaacatccttcttgatagcagctttgttccaaaagttgctgattttgggctagccaaactgttcccaaaagatgacaatttcgtgccactgagcgctatgcggggaacgattggctatatagctcgagagatggtatctcgaagctttggtgtcatatctagcaaatccgatgtgtacagcttcaggatgctactattggagatgacgggcgggcgaagaaacgcagatcctcatgcaggaagctccagtcaagcatactacccatccttggtgtacaagcagctgagccagggtgatgcgaataggattagtgaaggtgttgatatgcacgagttagagaagaagctatgtatcattgggctttggtgcatccagatgaagccgcaagatcggccgacgatgagcgaggtcatagagatgcttgaagctggtgtcgatggcatccaaatgcctccaaggccatacttttgtgatgaagagggtgacagttcttactctacaatctctgagctcgatacaatagaagagtag

SEQ ID NO: 148736 - DNA, 2460 bp, Zea Mays
tctcaaaaacagtgaagatgctcaggctgtctgtgactctgggtgactcttgtcttccacatcgccacgccactgattggctcgcgattatgtgatccgtgaaccttcttgccatggggatgtctgcagcgtctcatctctgtgctccttcatccctgcgagctttaaccgtgttgtttgtgttggcagcttttgtttcagatgtagaggggcgacatcatcgtcatgtctgtccacatttctcctgcggtggtcttagcaatatatcttatccatttcgtcggcaaggtgatccatctgggtgcggtgtccaatcgtatgagctggtttgcacggatacagatgctacaattcgcatcggcagtggaacatacaaggtgcttagcatcaactccacatattcttacttctgggtcgttgatgccaacctggacatccagagcagttgcccccttccccggtgggattaccatgctaggaggaccagtcgtaatcgtaacttacatcgtcggaggattgagttcagccatgatttttccaattctactccgacgatgtgggtttacgcttacttttaccctgattggaccagtagcaactcatatcgtcagagggttgagttcagccatgatacccctttttcttcttatatggattattcggggtgggctatctttgtgaattgttctcagccaatagagaacaatgatactgataaatatcatatatatgagccggtgtcttgcttgagcaattcttcttttatctacttgctggtaactgactactggtatgatgacaatgtttctgctggggatctggagccttcatgcggttacctagccatgactcctttgggtggtccaggcatgccggtgcccatgaatacaagctatccagatgttgttaagttcatgaggaatggatttgcccttcggtttcctctttcgattgaatattaccccaacatcagagaatgtctcgcagagaatatgcggtgagtatctgtctgatcatcctatttcctctcttatgcatgactttctcatctcaaaagcgccggttgcatcccctatgtaattcttttatatggtatggcatgccatggttttgcagtgctttccatgaagaaccaagaaatagtacaggcatcagggaacagatcttggacattcttacgttcgagacattatggttttgtgttattgaacaacttggatcaagtaataatggtgtcaaatctgttctcatcaacatcatcgtcagaataataccatatgttctgtggggtctaaaatctgcacatgttatttgcaggtttgtattgatgccgttagcagtatttgtcttcctagcctataaatactggaaaacacggataacaatagatgcagttgagaagttcctgcgaatgcaacatatgctcgttccgatgagatatgcatacacaaacatcattgctatcaccgcccatttcagagacaagctcggacaaggaggctacggtactgtatacaagggggtgctacagccaggtgaagttcatgttgctgtcaagatgctgggcaactcaaactgtaacggagaagagttcatcagtgaggtggccaccattggaaagatccaccatgtcaatgttgtgcgcctcattgggttttgctccgaggaaaatatcagggcacttatctatgagttcatgccccgtggatctctcgataagtacatcttctcgtcggagaagacattctcatgggacaaactcaacgagatcgctctgggcattgctagaggtcttaactacctgcatcacgggtgtgatatgcagattgtacactttgacatcaagccacacaacatccttcttgatagcaactttgttccaaaagttgctgattttgggctagccaaactgttcccaagagatgacagtttcgtgccactaagcgctatgcggggaacgataggatatatagctccagagatggtatctcgaagctttggtgtcatctctagcaaatccgatgtgtacagctttgggatgctactgttggagatgacgggcggtcgaaggaacgcagatcctcatgcaggaagctccagtcaagcatactacccatccttggtgtacagccagctgagccaaggagatgcgaacgagatcagtgaaggtgttgatatgcacgagttagagaagaagctatgtatcattgggctttggtgcatccagatgaagccgcaagatcggccgacgatgagtgaggtcatagagatgcttgaagctggcatcgatagcatgcaaatgcctccaaggccattcttttgtgatgacgagggtgatagttcatactctacaatctctgaactgaatacaatagaagagtagtagtagaaaaatacacttgtgtctatgcgctcttaatgtatgagactagtaagattgcaaggttgtcataagctaag

SEQ ID NO: 148737 - DNA, 525 bp, Zea Mays
ggttgcaaaaaaactgactcttcgaaaccttgggctgctattccaatgcagtcccactccattgagcctctaatgtgggagatggcaaaactactcttttttggcaagatagatggctgttgggtcagggactggtggacttggcccctcgcgcgtccgcccttgtcccaaaaaggattgctaaaacaaggacggttgcagaggctttggaaaattcacgttggattaatgatttcaggggggttcctgggaggtcatcccggacttcttgaccctttgggaagctatctttggttgtgtgctaggattcatgataagcattttttgaggctttccaattgtggacaatactcttctaagtcggcttatgatttgttgtttagcggctctacttttggtccttttgagcgcatttggcactcttgggcgtcagccaaatgctgttttttctttggcttgtgatgcacaaccggtgttggacagctgataggttggctaaaagaggccttccggatctggcctttt

SEQ ID NO: 148738 - DNA, 295 bp, Zea Mays
aggggttggggacacatatttatagccctaggggctgcactaccacaccttctcacacacactatacaacaggattgtcctctagatgctaaagagactacagaggacagtcaaaagcgactgctgtcctatagatgctaaagcgactacagaggacagtcaaaaagcgactgctgtcctctagatgctaaagagactacagaggacagtcaagctgtcctctagatgctaaaggactacagaggacagtcaaaagcaggctgtcctctagatgctcaagacttattccatcact

SEQ ID NO: 148739 - DNA, 90 bp, Zea Mays
gtttgtcaagtcattctgtttgctatccgtttgagctcgatgcatgcccagttcatacagagcggactacgcgctgcgcacgccgtgcgc

SEQ ID NO: 148740 - DNA, 1821 bp, Zea Mays
atggcgacgatgtctgcagcgtctcatcgctgctgtgcttcttccttgagagctttaaccgtgttatttgtgttggcagctcctgtttcagatgtagaggggcgacatcatcgtcatgtctgtccttatttctcctgcggtggtttaagcaatatatcgtatccattccgtcggcaaggtgatccatctgggtgcggtgtccaatcgtgtgagctggtttgcacggatacagacgccacaattcgcatcggcagtggaacatacaaggtgcttagcatcaacttcacatattcttacttctgggttgttgatgccaacctggacatccagagcagttgcccccttccccggtgggattaccatgctgggaccagtggcaactcacgtcttgggaggattgagttcagccatgatttcacatatttttgttatcctaattctaagtgggctttctttgtgaattgttctcagccaatagagaacaacgatatatatgagccggtgtcttgcttgagcagttcttctttcatctacatggtaactgacttcttgtatgatggctatgttcctgctgatagtctgcagccttcatgcggttacctagccatgactcctttgggtagtccaggcatgccggtgcccaagaatacaagctatccagatgttgttaagttcatgaggaatggatttgcccttggatttactgtttcgattcctgaccccaacatcagagaatgtttcgctgagtttatgcggttcgtattaatgccgctggcagtattcatcttcctagtctataaatactggaaaacaaggataacagtagatgcagtcgagaagttcttgcaaatgcagcagatgctcgttccaatgagatatgcatacacaaacatcattgctatcaccggccatttcagagacaagctcggacaaggtggttacggttctgtatacaagggggtgctacagccaggtgaagttcatgttgctatcaagatgttgggcaactccaactgtaatggagacgagttcatcagtgaggtcgccaccattggcaagatccaccatgtcaatattgtgcgcctcatcgggttttgctccgaggaaaatagcagggcacttatctacgagttcatgccccatggatctctcgataagtacatcttctcgtcggagaagagtttctcgtgggacaaactcaatgagatcgctctgggcattgctagaggtctcaactacttgcatcatgggtgtgatatgcagattgtacacttcgacatcaagccacacaacatccttctcgacaacaactttgttccaaaagttgctgattttgggcttgccaagctgttcccaaaagatgacaatttcgtgccactgagcgctatgcggggaacgattggctatatagctccagagatggtatctcgaagctttggtgttatctctagcaaatccgatgtgtacagctttgggatgctactattggagatgacgggcgggcgaaggaacgcagatcctcatgcaggaagctccagtcaagcatactacccatccttggtgtacagccagctgagccaaggagatgcgaacgagatcagtgaaggtgttgatatgcacgagttagagaagaagctatgtatcattgggctttggtgcatacagatgaagccgcaagatcggccgacgatgagcgaggtcatagagatgtttgaagctggtgtcgatggcatccaaatgcctccaaggccattcttttgtgatgacgagggtgatagttcttactctgcaatctctaaactggatacaatagaagagtag

SEQ ID NO: 148741 - DNA, 1030 bp, Zea Mays
gccgacacaacgccactgttcgtcgcacttttttttggtgtgcgccgcccgctaaactgcgctacggctacggatttcactagtacctcgtagccaccacgaagtcgccaatcccaatgccaggaaggaagtctcacgaattccctcatgtgccgatgtgcgcaccgcctccgaatgctggaacgggtattcctcttctcgccgccgtcctccgctccggtgagggtcgctaccgctttccggatgcgcttcctactcgttactgacagagggtactgggattccctttgcaacaacctcgcaacccatgggaagagtagacatatctgtataaggatccaccaggtaccagagctggcttgcattgataatgaggctccggcaagagcttgggcctgcaatatcatcttgatttgttgcttctcttgagcatcctacaactactgagacaggattcactacaggagccaagaactggatgatcaaggatggtgtcatgcccagagcatgataattgcatcccaggtgtgccacaggatggagggtggcttggaagccgaaaggggaaccggatctctggtccatgcttgtggcatcgatgcgatgggcaagatttgcggaagtcatcatcttccttcgatgtggcagcataggatgcatagttgagaagcaaaagcagcagcactgccagaagaaatttatgcgagttcatgggggatgtgttcggagatgaaggtgggcgaggagaaggttgcaagtgcttcagaatgagcacctatctctatttgctttaacctctcgggaggagagattatgtgaatgtcatgaccgctacgcggtggaaaggaattcctgctgccaatattgctttaccaggaagtttcctttcttcttcagtcttattcctcccttctcgaatattatatttatcttctgttagtattattttgactgctttgtgcacgcctaacgacctggcttttattttcctagtcaagtcactataagactttttaatttcggataaggc

SEQ ID NO: 148742 - DNA, 2049 bp, Zea Mays
atggcgacgatgtctgcagcgtctcatcgctgctgtgcttcttccttgagagctttaacggtgttatttgtgttggcagctcttgtttcagatgttggcgggcgacatcatcatcatgtttgtcctcattatttctcctgtggtggtttaagcaatatatcgtatccatttcgtcggcaaggtgatccatctgggtgtggtgtccaatcgtacgagctggtttgcacggatacagatgctacaattcgcatcggcagtggaacatacaaggtgcttagcatcaactccacatattctcacttctgggttgttgatgccgacctggacatccagagcagttgcccccttccccggtgggattaccatgctcgttggatcaatctcaacttacatcgttggtggattgtgtcgagccaatattatttctattcttcttctttttatatggattcgtggcggtgggctatctttgtgaattgttctcagccaatagagaacaatgatactgataaatatcatatatatgagccggtgtcttgcttgagcaattcttctttcatctacttggtacctgactactggtatgctggccttgttcctgctgggagtctggagccttcatgcggttacctagccatgactcctttgggtggtccaggcatgcaggtgccctcgaatacaagctatccagatgttgttaagttcatgaggagtggatttgcccttggatttccctcgtatggtgataacatcagagaatgtctcgcaaaggatatgcgtactttccataaagaaccaagaaatagtacaggcatcaggcaacagatcttggacattcttacggtcgtcgacatattctgggcttgtgttatctatcaacttcaatcaactaattataatggtgtcacaactgttgtcatcggcatcattgaaacgatacaatatgttagcggggtcctggattatacagctggtgtttgcaggttcgtattaatgccgctggcagtattcgtcttcctagtctataaatactggaaaacaaggataacagtagatgcagtcgagaagttcttgcgaacgcagcagatgctcgttccgatgagatatgcatacacaaacatcattgctatcaccggccatttcagagacaagctcggacaaggtggttacggttctgtatacaagggggtgctacagccaggtgaagttcatgttgctattaagatgttgggcaactccaactgtaacggagacgagttcatcagtgaggtcgccaccattggcaagatccaccatgtcaatattgtgcgcctcatcgggttttgctccgaggaaaatagcagagcacttatctacgagttcatgccccatggatctctcgataagtacatcttctcgtcggagaagagtttctcatgggtcaaactcaatgagatcgctctgggcattgctagcggtctcaactacctacatcatgggtgtgatatgcagattgtacacttcgacatcaagccacacaacatccttcttgacagcaactttgttccaaaagttgctgattttgggcttgccaaactgttcccaagaggcgacagtttcgtgccactgagcgctatgcggggaacgataggatatatagctccagagatggtatctcgaagctttggtgtcatctctagcaaatccgatgtgtacagctttgggatgctactattggagatgacgggtgggcgaaggaacgcagatcctcatgcaggaagctccagtcaagcatactacccatccttggtgtacaaccagctgagccagggtgatgcgaacgggattagtgaaggtgttaatatgcacgatttagagaagaagctatgtactattgggctttggtgcatccaaatgaagccgcaagatcggccgacgatgagcgaggtcatagagatgcttgaatctggtgtcgatggcatgcaaatgcctccaagaccatacttttgtgatgaagagggtgacagttcttactctataatctctgaactggatacaattgaagagtaa

SEQ ID NO: 148743 - DNA, 1212 bp, Zea Mays
tattcttcatatatacaaacttggtttttttacagttatttgcaggtttgtattgatgctgatggcagtatttgtcttcctagcatataaatagtggaaaacaaggataacaatagatggagtcgagaagttcctgcaaatgcagcaagtgctagttctgatgagatatgcatatacgaacatcattgctatcactgaccatttcagagacaagctcggacaaggtggctacggttctatatacaagggagtgctacagcgaggtgaagttcatgttgctgtcaagatgttgggctactcaaactgtaatggagaaacgttcattagtgaggtggccaccatttgcaagatccaccatgtcaatgttgtgcgcctcattgggttttgctccgagaacaatatcagggcacttatctatgagttcatgccccgtgggtctctcgataagtacatcttctcatcggagaagagtttctcatgggacaaactcaatgagatcgctctgggcattgctagaggtctcaactgcctgcatcaggggtgtgatatgcagattgttcactttgatatcaagccacacaacatccttcttaacagcaactttgttccaaaagttgctgattttgggtttgccaaactgttcccaagagacgatagtttcatgccactaagtgctacgccaggaacggtaggctatatacactacaagaaacaaggcaaagagtgtcggccaaaaacctacactcttactgaaataagccgacactcttagccgacactctaaaatccgatgtgtagagctttgtgatgctactattggagatgacgggcgagcaaaggaacacagatcctcatgcaggaagctccagtcaagcatactacccatccttggtgtatagccagctgagccaaggagatgcgaatgggatcagtgaaggagttgatatgcacaagttagagaacaagctatgtatcattgggctttggtgcatacagatgaagccacaagatcgaccgacgatgagagaggtcatagagatgcttgaagctagtgtcgatggcatccaaatgcctccaaggccattcttttgtgatgatgagggtgatagttcttactctgcaatctctaaacttgatataatagaagagtagttgttgtagtaaaatacaattgtgtctatttgatcttaacgtattatactactaagaatg

SEQ ID NO: 148744 - DNA, 2114 bp, Zea Mays
acacatcgccacgccactgattggctcgcgattatgtgattcgtgaaccttcttgccatggggatgtctgcagcgtctcatctctgtgcttcttcgtccctgcgagctttaaccgtgttgtttgtgttggcagcttttgtttcagatgtagaggggcgacatcgtcgtcatgtctgtcctccttatttctcctgcggtggtttaagcaatatatcgtatccatttcgtcggcaaggtgatccatctgggtgcggtgtccaatcgtatgagctggtttgcacggatacagatgctacaattcgcatcggcagtggaacatacaaggtgcttagcatcaactccacatattcttacttctgggttgttgatgccgacctggacatccagagcagttgcccccttccccggtgggattaccctgctcgttggatcaatcgcaactcacatcgttggaggattgagttcagccattattatctctattcttctttttatactgtttcgaggtgggctatctttgtgaattgttctcagccaatagagaacaatgatatatgtaataatatatatgatgacgatgtgtatgggccggtgtcttgcttgagcaattcttctttcatctacttgctggtaactgacaactgggatgttatttctgctggggatctggagccttcatgcggttacctagccaagactcctttgggtggtccaggcatgacggtgccctcgaatacaagctatccagatgttgttaagttcatgaggaatggatttgcccttggatttcctttttcgattagatcttaccccaccatcagagaatgtctcgcagagaatatgcgttatttgcaggttcgtattgatgccgctggcagtatttgtcttcctagcctataaatactggaaaacacagataacaatagatgcagttgagaagttcctgcgaatgcagaatatgctcgttccgatgagatatgcatacacaaacatcattgctatcaccggccatttcagagacaagctcggacaaggaggctacggtactgtatacaagggagtgctactgccaggtgaaattcatgttgctgtcaagatgctaggcaactccaactgtaacggagaagagttcatcagtgaggtcgccaccattggcaagatccaccatgtcaatgttgtgcgcctcattgggttttgctccgaggaaaatattagggcacttatctatgagttcatgccccgtggatctctcgataagtacatcttctcgtcggagaagacattctcatgggacaaactcaacgagatcgctctgggcattgctagaggtcttaactacttgcatcacgggtgtgatatgcagattgtacactttgacatcaagccacacaacatccttcttgatagcaactttgttccaaaagttgctgattttgggctagccaaactgttcccaagagatgacagtttcgtgccactgagcgctatgcggggaacgataggttatatagctccagagatggtatctcgaagctttggtatcatctctagcaaatccgatgtgtacagctttgggatgctactattggagatgacgggcgggcgaagaaacgcagatcctcatgcaggaagctccagtcaagcatactacccatccttggtgtacaggcagctgagccaaggtgatgcgaacaggatcagtgaaggtgttgatatgcacgagttagagaagaagctatgtatcattgggctttggtgcatccagatgaagccgcaagatcggccgacgatgagcgaagtcatagagatgcttgaagctggtgtcgatggcatccaaatgcctccaaggccatacttttgtgatgaagagggtgacagttcttactctacaatctctgaactcgatacaatagaagagtagtagtggtagtaaaatgcacttgtgtctatgtgctcttaatgtatcagactattaagattgcaaggttgccataagctaaggtactggttgtatacttttattgagagtgtgataatgtgatatcatataaaatacctccatgaagttttttacaaagaactcctcaagaatattgtgtttgcctacaagcaga

SEQ ID NO: 148745 - DNA, 2312 bp, Zea Mays
ttctttctcaaaaacagtgaagatgctcaggctgtatgcgactctgggtgactcttgtcttccacacatcgccacgccactgattggctcgcgattatgtgattcgtgaaccttcttgccatggggatgtctgcagcgtctcatctctgtgcttcttcgtccctgcgagctttaaccgtgttgtttgtgttggcagcttttgtttcagatgtagaggggcgacatcgtcgtcatgtctgtcctccttatttctcctgcggtggtttaagcaatatatcgtatccatttcgtcggcaaggtgatccatctgggtgcggtgtccaatcgtatgagctggtttgcacggatacagatgctacaattcgcatcggcagtggaacatacaaggtgcttagcatcaactccacatattcttacttctgggttgttgatgccgacctggacatccagagcagttgcccccttccccggtgggattaccctgctcgttggatcaatcgcaactcacatcgttggaggattgagttcagccattattatctctattcttctttttatactgtttcgaggtgggctatctttgtgaattgttctcagccaatagagaacaatgatatatgtaataatatatatgatgacgatgtgtatgggccggtgtcttgcttgagcaattcttctttcatctacttgctggtaactgacaactgggatgttatttctgctggggatctggagccttcatgcggttacctagccaagactcctttgggtggtccaggcatgacggtgccctcgaatacaagctatccagatgttgttaagttcatgaggaatggatttgcccttggatttcctttttcgattagatcttaccccaccatcagagaatgtctcgcagagaatatgcgtactttccataaagaaccaagaaatagtacaggcatcaggcaacagatcttggacattcttacgttcgagacattatggttttgtgttattgaacaacttggatcaactaataatggtgtcaaatctgttctcatcgacatcatccaacaaataccatatgttctttccagtctgaaatctgcacatgttatttgcaggttcgtattgatgccgctggcagtatttgtcttcctagcctataaatactggaaaacacagataacaatagatgcagttgagaagttcctgcgaatgcagaatatgctcgttccgatgagatatgcatacacaaacatcattgctatcaccggccatttcagagacaagctcggacaaggaggctacggtactgtatacaagggagtgctactgccaggtgaaattcatgttgctgtcaagatgctaggcaactccaactgtaacggagaagagttcatcagtgaggtcgccaccattggcaagatccaccatgtcaatgttgtgcgcctcattgggttttgctccgaggaaaatattagggcacttatctatgagttcatgccccgtggatctctcgataagtacatcttctcgtcggagaagacattctcatgggacaaactcaacgagatcgctctgggcattgctagaggtcttaactacttgcatcacgggtgtgatatgcagattgtacactttgacatcaagccacacaacatccttcttgatagcaactttgttccaaaagttgctgattttgggctagccaaactgttcccaagagatgacagtttcgtgccactgagcgctatgcggggaacgataggttatatagctccagagatggtatctcgaagctttggtatcatctctagcaaatccgatgtgtacagctttgggatgctactattggagatgacgggcgggcgaagaaacgcagatcctcatgcaggaagctccagtcaagcatactacccatccttggtgtacaggcagctgagccaaggtgatgcgaacaggatcagtgaaggtgttgatatgcacgagttagagaagaagctatgtatcattgggctttggtgcatccagatgaagccgcaagatcggccgacgatgagcgaagtcatagagatgcttgaagctggtgtcgatggcatccaaatgcctccaaggccatacttttgtgatgaagagggtgacagttcttactctacaatctctgaactcgatacaatagaagagtagtagtggtagtaaaatgcacttgtgtctatgtgctcttaatgtatcagactattaagattgcaaggttgccataagctaaggtactggttgtatacttttattgagagtgtgataatgtgatatcatataaaatacctcca

SEQ ID NO: 148746 - DNA, 2412 bp, Zea Mays
ttctttctcaaaaacagtgaagatgctcaggctgtatgcgactctgggtgactcttgtcttccacacatcgccacgccactgattggctcgcgattatgtgattcgtgaaccttcttgccatggggatgtctgcagcgtctcatctctgtgcttcttcgtccctgcgagctttaaccgtgttgtttgtgttggcagcttttgtttcagatgtagaggggcgacatcgtcgtcatgtctgtcctccttatttctcctgcggtggtttaagcaatatatcgtatccatttcgtcggcaaggtgatccatctgggtgcggtgtccaatcgtatgagctggtttgcacggatacagatgctacaattcgcatcggcagtggaacatacaaggtgcttagcatcaactccacatattcttacttctgggttgttgatgccgacctggacatccagagcagttgcccccttccccggtgggattaccctgctcgttggatcaatcgcaactcacatcgttggaggattgagttcagccattattatctctattcttctttttatactgtttcgaggtgggctatctttgtgaattgttctcagccaatagagaacaatgatatatgtaataatatatatgatgacgatgtgtatgggccggtgtcttgcttgagcaattcttctttcatctacttgctggtaactgacaactgggatgttatttctgctggggatctggagccttcatgcggttacctagccaagactcctttgggtggtccaggcatgacggtgccctcgaatacaagctatccagatgttgttaagttcatgaggaatggatttgcccttggatttcctttttcgattagatcttaccccaccatcagagaatgtctcgcagagaatatgcgtactttccataaagaaccaagaaatagtacaggcatcaggcaacagatcttggacattcttacgttcgagacattatggttttgtgttattgaacaacttggatcaactaataatggtgtcaaatctgttctcatcgacatcatccaacaaataccatatgttctttccagtctgaaatctgcacatggtactcactctagatagcatttttttttgtataaacatcgtgtgtggcttctgaaattattgttttttattctttatatatacaaacttggtttttacagttatttgcaggttcgtattgatgccgctggcagtatttgtcttcctagcctataaatactggaaaacacagataacaatagatgcagttgagaagttcctgcgaatgcagaatatgctcgttccgatgagatatgcatacacaaacatcattgctatcaccggccatttcagagacaagctcggacaaggaggctacggtactgtatacaagggagtgctactgccaggtgaaattcatgttgctgtcaagatgctaggcaactccaactgtaacggagaagagttcatcagtgaggtcgccaccattggcaagatccaccatgtcaatgttgtgcgcctcattgggttttgctccgaggaaaatattagggcacttatctatgagttcatgccccgtggatctctcgataagtacatcttctcgtcggagaagacattctcatgggacaaactcaacgagatcgctctgggcattgctagaggtcttaactacttgcatcacgggtgtgatatgcagattgtacactttgacatcaagccacacaacatccttcttgatagcaactttgttccaaaagttgctgattttgggctagccaaactgttcccaagagatgacagtttcgtgccactgagcgctatgcggggaacgataggttatatagctccagagatggtatctcgaagctttggtatcatctctagcaaatccgatgtgtacagctttgggatgctactattggagatgacgggcgggcgaagaaacgcagatcctcatgcaggaagctccagtcaagcatactacccatccttggtgtacaggcagctgagccaaggtgatgcgaacaggatcagtgaaggtgttgatatgcacgagttagagaagaagctatgtatcattgggctttggtgcatccagatgaagccgcaagatcggccgacgatgagcgaagtcatagagatgcttgaagctggtgtcgatggcatccaaatgcctccaaggccatacttttgtgatgaagagggtgacagttcttactctacaatctctgaactcgatacaatagaagagtagtagtggtagtaaaatgcacttgtgtctatgtgctcttaatgtatcagactattaagattgcaaggttgccataagctaaggtactggttgtatacttttattgagagtgtgataatgtgatatcatataaaatacctcca

SEQ ID NO: 148747 - DNA, 1635 bp, Zea Mays
ggaaacctcgtctgcctgccaccaacccagttcctctcctcgtgaaaccaaagcgccgaccgaccgatcgcgtacgcacctgacgaaccagaccaactcgggaccaaccgatggctatggcgacggcgaagctgagctccccggcgaccagcttgctggctggcggccgcgcgcgccggtccgcgcccgcccgccgcgcgacggtgatccgcgccgcggcaggctcctactccgacgagctcgtctccaccgcgaaatcggttgcttcccctggacgtggtattctggcaattgatgagtcaaatgcaacatgtggaaagaggctatcgtcaattggtttggacaacacagaacctaaccgccaggcttacaggcagcttttgctgacaactgctggtcttggtgaatacatttctggtgctattctttttgaggagactctttatcaatcaactacagatggcaggaagtttgttgactgcttgaaggatcagaatatcatgcctggcatcaaggttgacaagggcttagttccattgcctggatccaacaatgaatcgtggtgccaaggtcttgatggtttggcttcaaggtgtgctgagtactataagcagggggcgcgcttcgcaaagtggaggactgttgttagcatcccttgtggtccatctgcattagcagcgaaggaagcagcatggggacttgctcgatatgctgctattgctcaggataatggcttagtgccaattgtggagccagagatccttcttgatggagaccatgggatcgaaagaactcttgaggtggcagagaaagtgtggtctgaggtgttcttctacttggcccagaacaatgttctgtttgagggtatcctgctgaagcccagcatggtcactcctggagccgaccacaaggagaaggcttctccagaagccatcgcaaagtacacgctaacaatgctcaggcggagagtgccacccgctgttcctggaatcatgttcctttctggtgggcagtccgaggtggaggcgactctgaacctgaatgcgatgaaccagtctccgaacccatggcacgtatcattctcctacgcccgggctctgcagaactcggtgctgaagacatggcaagggcgccccgagaacgtcgaggcggcgcagaaggccctgctggtgcgcgcaaaggccaactcgctggcacagctaggtcgctacactggtgagggtgagagcgacgaggcgaagaaaggcatgttccagaagggctacacctactaacgtgccagcgagaatatttccatgacgttatacttattgttttggtgtttacattatacttatcgttttggtgtcacggttttttttttttttggggggggggggggggggggggtcattcgagtgaataaaagccaaattgttggtgccaacaacctctaccgttgtaaaaccctgagaaggaacatgtactctgagatcgtcaaatgatatttgcaatctggtaaattgtgttcctagccacgttgccacctgtgccaagcacaacagatgagaaactgccttgactttttgtatgcacaagtatcgacaactctcgctctgttaacccctacgctttctctagtttggtctttgggtg

SEQ ID NO: 148748 - DNA, 391 bp, Zea Mays
cccatgttgtctcgtagttccattttgcagcaagtaatttgctttctttgtggatatattattgggagtcatgtttttagttgctgcaagtgctttgactgtactacaagtaggcaatatttgctttgtttaatacacggtggtactacaagtagggaaattggaaaagaacaaggaaaaggaagagataagactggtgtgtaagaaaaacagaatgaagtatcatgtgttgaggaagaaccttgaatcttccataaattttataaagaaagggtggcataaagctcccttagtagttgagtggtcccagaaacaactcaatttgaatactgctcttattgctattattttcaaagcaaaatttacaaaatccattaaaagaagaatatag

SEQ ID NO: 148749 - DNA, 180 bp, Zea Mays
aggattactaaagataggaaccttgatcacggcaacatcctgaaaggatctgtcaccattacttgcactgtgaagatgattctggatcttctcttccctttgtgtaagccacgttcaggggctattcctagcctatataaacatgcaggctgcacgagacaaagtgcacgcttcaagccc

SEQ ID NO: 148750 - DNA, 1537 bp, Zea Mays
acaaattacccattgccatcggttatgtacgtactagttcgttttttttcctatcttccctcggttcgtcacccggcaatatcacgttgtacggttccagtctcttgctcgcggcggcgcgtgtcccagccgttggtgctcctgcgcctagcggcggcgggcctcccagcgtcgttggcttgctcgcagttgcgcttcccctgtcgcggcggcgcgtcccagcttccctgtctcggcggcgcgtcccagctttccctgtcgcgacgtcgcttcctgcaacctgcatgtctctcgctcgcgcaaaattccctgcccatgtcgtcgcagcaccagcgtaaaaggtcctcccagccaaaactaggaccggcaacacctcctgtacattgcaggatttggcagcaccggtgggcgtcgcatctcccagccaaaaaaactagcacgcctacagcacctgcaagttgcaggcagttataaccaacaaattggaagacgacccataagaaaaatatttcagttgtgctttactaatgtatggttgagaaggcggtttgggataatgcaactttgaagcacttgattgacatttgtaaggaggagattttagctggtaatagacctcaaggttgtttcactagaaatggttggaagaacctagaggaaaagtttttttgcaaggtctggaacgaagctagtgaagacacaattgaagaataaattagataatatgaaaaaggattatacctagttcatggaattgaagaatgctgccactggattaggatgggatgaagcaaataaaactgttgcttgcgataatgcatggtgggctgaacatcttgagagatgcaacaacaatgagagaggtgtgaagtgcaaccacgtgaggtttcgaaaacatggacccaaacaccttgatgatttacactttttgtttgataaggtgcatgtcactagagctaatgcatcctgccttggagaaatttcctcaggtgaatcatcaagtgatgatgatgtgttggagatgtcaaaaaaattgaagatagtgctgcttttaagaaacctaaaccagcaggaaagaagcgcaagcaaatgtccggggcaactgaagaggaggaggagaagagccccttctttcggatgtacaagaacacatgcttgaagattaaaagtgcagctaacaagatcacatagagtgttgaagcatcgttagctcctgctccatccaatcttgtccctactatggcagatgctatgaggttggttaaggagtgtggtgtgcaagaaaaaacttctttgatgcacacagctgtcatgttgatcatgaaggatgaatttagacagatcctcagtttacttgacacaaatgaaggcagatatgatttgattgagagagagcatgagaaagagatgaagaagccagcatgaaggcagctaaactattattttctttgaataattaatttatgtaatattttttaactagcgtattgtgtactattgcttccaaccattattacctgtgacttgtttgttgaaa

SEQ ID NO: 148751 - DNA, 1356 bp, Zea Mays
atgcgcggcggcggcgaggcaaagccggggaagagccaaaagagctcggcgcagaggcacctcaacgccggcttcgtcgtcgtcgggcttctcatgctcctcgcctacctcgtcgctcagcacttcgtggtcggctcccgccatgttgtcattacggaggcacaagtgatcatggacaatgtaaaggcgccggatgaaacagagaatggcaaggtggtgtgtaacatggagggccgctcggacacctgcgaagtcgacggcgacgtccgcaccaacggcacggccctgtcagtgacactcgtgccggcgagccggtcggagcgccacgagtggatgatccggccgtactcgcgcaggttcgccagcgtcaggaaggtgacggtgacgcagctgcaggaccgggcagacgcggcgccgtgcgcggtgacccacgacgtgccggccgtcctgttcgcgatcggcgggtacgcgggcaactactggcacgactacgccgacatcctggtgccgctgttcgtcgcgtcgcggcggtacaacggcgaggtcaagttcctgatcagcaacatccggttccagccccggtggctggccaagtacaaggcgttcctgcaggggctgtccttgtacgacgcggtggacatggacggcgacgcgcaggtgcggtgcttcccgcacgtcacggtggggctccgcctggacaaggagttcagcatcgtccccgaactggtgccgggaggccgccgcctctccatggcggacttcacgcggttcctgcgagagacctacgcgctcccgcgcggctcggcggcgagccgggaccgggagcagccgcacaagaagcctcggctgctgctgatccaccggggccactaccgccggatcacgaacgagccggaggtggcgcgggcggcggaggcggcggggttcgaggcggtggtggcggagctgcgcggcgacgcgacggaagcggagcaggcgcgggtggtgaactcgttcgacgtggtgctgggcgtgcacggggccgggctgacgaacgcggtgttcctgccgccgggcggggtgctcatccaggtggtgccgtacgggaagatggagtacatcgcgagggcggagttcagcgagcccgccacggacatggggctcaagtaccttgactacagcgtgagcgcggaggagagctcgctgatggagacgctggggccggagcacccggcggtcaaggaccccgactccgtccaccgcagcggctgggaccaggttttcgagctgtacctcgccaagcagaacgtccgcatcaacgtcacccgcttcgcgccgacgctggcgcaggcgctcgaccacctacgccagcagtag

SEQ ID NO: 148752 - DNA, 2161 bp, Zea Mays
ctgccgtattcacttttcactcgttcgtccatccttccacgccccccacagaaccgtctccccagcggagcccggcgcctcacggtcgcaatttattgcttgcgcaccgcctcgccgctttggcgtggggcgtttgcctgtgtggcgcttcgcaggtgccgtggcttgccgcttccttcgccgtgctcactagtcaccagagagggaggaggctctggcgctctgcttctgctgccgcttcttcttcttctcctgctgctgctcttacggagataagcagggggggccgggccggggcagggggaggtgacagctgagctgactagctgagtgaagcatggggatggacgccggcggcggcaagctgccgtacagctacgccggccagcaggacggagggaagctggtgaagagcgtcagccgcgtggagccgcgcaggttcggcctgggcctcgtggcgggcttcctcctcgtcacctgcgcctacttctccaccgccaagttcgacgccatccagatcgccatgagcggtcttgaggacgaggagctacaggtgcaggatgcagttgccagtggttccaagaggagcaaagactctgccgccgccgccgccgccacacgcagcgccaatgtcagctcaccctctgtggttcactctcaccatgccatcctccctgctcccgcgcagcggattccagaggttaagcaagcagactcggagacgacgccggcgcgggagcgggagtggaagccgctgtgcgacgtcacctcgaaccggcgcatcgactggtgcgagctggacggcgacgtccgcgtggtcggcgccaacgccagcgtgacgctggtggcgccgccgggcgcggacaaccggaccttccgcgcggagtcgtggcgcatcaagccgtacccgcgcaaggcggacccgaacgcgatgcgcttcgtgcgcgtgctgacggtgcggtcggtggcgtcgggctccggcgaggcggcgtgcacggacggcggcgacgacgacgtgccggcgctggtgttctcggaccgcgggtacacgggcaactacttccacgcgttcacggacgtgatcctgccgctgttcctgacggcgcggcggtacgcgggcgaggtgcggctgctggtggccgacctccagccgtggtgggtgggcaagttcctgcccgtgttcaggagcatctccaagtacgagctggtggacctggaccgcgacccgcgcgtgcgctgcttccgccacgtccaggtggggctcaccagccacgccgacttcagcatcgacccgcgccgcgcgcccaacggctactccatgctggacttcacccggttcatgcgcgccgcctacgggctcccgcgcggcgacgtcgtcgcggcggcgccggcgaggcggccgaggctgctggtggtggcgcgcgcgcggacgcggcggttcgtcaacacggaggagatcgtgcgcggcgccgaggccgtcgggttcgaggcggtggtgtcggaagggacgcacgaggtggcgcccttcgcggagctggccaacggctgcgacgccatcatgggcgtgcacggcgccgggctgaccaacatggtgttcctgcccacgggcggggtggtgatccaggtggtgccgctgggagggctggagttcgtggccggatacttccgaggcccgtccgtggacatggggctgcgctacctcgagtaccggatcgagccggaggagagcacgctggtggaccagtacccgcgcgaccaccccatcttcacggaccccaacgggatcaagagcaagggctgggagtccctcaaggacgcctacctcgacaagcaggacgtgaggctggacatggagaggttccggccgacgctccaggaggccatcgcgcacctcaggaaggccaaggccaaggccaatggcgacggaaacaactaggcatcgccgtgcgtatgtagcgtgttcattcgtcctcttattaatctactcttctttttcttctttccttttcgggttatgtcggtgtatgtagcgtgcagaaatcgagcaaatgtatgatatgtggcagggaaagaagctagagcgaataatatattctctctcttgtcatccagttttcgattgaatggcgtatgccaagtgatcaggtgaaggtcgacccgg

SEQ ID NO: 148753 - DNA, 2440 bp, Zea Mays
ctgccgtattcacttttcactcgttcgtccatccttccacgccccccacagaaccgtctccccagcggagcccggcgcctcacggtcgcaatttattgcttgcgcaccgcctcgccgctttggcgtggggcgtttgcctgtgtggcgcttcgcaggtgccgtggcttgccgcttccttcgccgtgctcactagtcaccagagagggaggaggctctggcgctctgcttctgctgccgcttcttcttcttctcctgctgctgctcttacggagataagcagggggggccgggccggggcagggggaggtgacagctgagctgactagctgagtgaagcatggggatggacgccggcggcggcaagctgccgtacagctacgccggccagcaggacggagggaagctggtgaagagcgtcagccgcgtggagccgcgcaggttcggcctgggcctcgtggcgggcttcctcctcgtcacctgcgcctacttctccaccgccaagttcgacgccatccagatcgccatgaccagccgacccgtctccagcaatgcgggcggcgtcggggtcggctcgctggaggtgggcggcgtcgtcgccgccgccgacacctacaacgcctccaggcagggattagatttgggcaagaaaggcccgggcgcgacgtccatggccgacgagggaagcgaggccgaggcgctcgagaaagacggcggcaaggcttcttcaccttcggggccaggcgttcctgccgctctccttcctcccgtgtcgtcagaggaagccgcgaacagcacgctggaatcaggcggtcttgaggacgaggagctacaggtgcaggatgcagttgccagtggttccaagaggagcaaagactctgccgccgccgccgccgccacacgcagcgccaatgtcagctcaccctctgtggttcactctcaccatgccatcctccctgctcccgcgcagcggattccagaggttaagcaagcagactcggagacgacgccggcgcgggagcgggagtggaagccgctgtgcgacgtcacctcgaaccggcgcatcgactggtgcgagctggacggcgacgtccgcgtggtcggcgccaacgccagcgtgacgctggtggcgccgccgggcgcggacaaccggaccttccgcgcggagtcgtggcgcatcaagccgtacccgcgcaaggcggacccgaacgcgatgcgcttcgtgcgcgtgctgacggtgcggtcggtggcgtcgggctccggcgaggcggcgtgcacggacggcggcgacgacgacgtgccggcgctggtgttctcggaccgcgggtacacgggcaactacttccacgcgttcacggacgtgatcctgccgctgttcctgacggcgcggcggtacgcgggcgaggtgcggctgctggtggccgacctccagccgtggtgggtgggcaagttcctgcccgtgttcaggagcatctccaagtacgagctggtggacctggaccgcgacccgcgcgtgcgctgcttccgccacgtccaggtggggctcaccagccacgccgacttcagcatcgacccgcgccgcgcgcccaacggctactccatgctggacttcacccggttcatgcgcgccgcctacgggctcccgcgcggcgacgtcgtcgcggcggcgccggcgaggcggccgaggctgctggtggtggcgcgcgcgcggacgcggcggttcgtcaacacggaggagatcgtgcgcggcgccgaggccgtcgggttcgaggcggtggtgtcggaagggacgcacgaggtggcgcccttcgcggagctggccaacggctgcgacgccatcatgggcgtgcacggcgccgggctgaccaacatggtgttcctgcccacgggcggggtggtgatccaggtggtgccgctgggagggctggagttcgtggccggatacttccgaggcccgtccgtggacatggggctgcgctacctcgagtaccggatcgagccggaggagagcacgctggtggaccagtacccgcgcgaccaccccatcttcacggaccccaacgggatcaagagcaagggctgggagtccctcaaggacgcctacctcgacaagcaggacgtgaggctggacatggagaggttccggccgacgctccaggaggccatcgcgcacctcaggaaggccaaggccaaggccaatggcgacggaaacaactaggcatcgccgtgcgtatgtagcgtgttcattcgtcctcttattaatctactcttctttttcttctttccttttcgggttatgtcggtgtatgtagcgtgcagaaatcgagcaaatgtatgatatgtggcagggaaagaagctagagcgaataatatattctctctcttgtcatccagttttcgattgaatggcgtatgccaagtgatcaggtgaaggtcgacccgg

SEQ ID NO: 148754 - DNA, 2488 bp, Zea Mays
ctgccgtattcacttttcactcgttcgtccatccttccacgccccccacagaaccgtctccccagcggagcccggcgcctcacggtcgcaatttattgcttgcgcaccgcctcgccgctttggcgtggggcgtttgcctgtgtggcgcttcgcaggtgccgtggcttgccgcttccttcgccgtgctcactagtcaccagagagggaggaggctctggcgctctgcttctgctgccgcttcttcttcttctcctgctgctgctcttacggagataagcagggggggccgggccggggcagggggaggtgacagctgagctgactagctgagtgaagcatggggatggacgccggcggcggcaagctgccgtacagctacgccggccagcaggacggagggaagctggtgaagagcgtcagccgcgtggagccgcgcaggttcggcctgggcctcgtggcgggcttcctcctcgtcacctgcgcctacttctccaccgccaagttcgacgccatccagatcgccatgaccagccgacccgtctccagcaatgcgggcggcgtcggggtcggctcgctggaggtgggcggcgtcgtcgccgccgccgacacctacaacgcctccaggcagggattagatttgggcaagaaaggcccgggcgcgacgtccatggccgacgagggaagcgaggccgaggcgctcgagaaagacggcggcaaggcttcttcaccttcggggccaggcgttcctgccgctctccttcctcccgtgtcgtcagaggaagccgcgaacagcacgctggaatcaggtgtgaaagcaaccactcaacctccaactgccagctttactgccattagcggtcttgaggacgaggagctacaggtgcaggatgcagttgccagtggttccaagaggagcaaagactctgccgccgccgccgccgccacacgcagcgccaatgtcagctcaccctctgtggttcactctcaccatgccatcctccctgctcccgcgcagcggattccagaggttaagcaagcagactcggagacgacgccggcgcgggagcgggagtggaagccgctgtgcgacgtcacctcgaaccggcgcatcgactggtgcgagctggacggcgacgtccgcgtggtcggcgccaacgccagcgtgacgctggtggcgccgccgggcgcggacaaccggaccttccgcgcggagtcgtggcgcatcaagccgtacccgcgcaaggcggacccgaacgcgatgcgcttcgtgcgcgtgctgacggtgcggtcggtggcgtcgggctccggcgaggcggcgtgcacggacggcggcgacgacgacgtgccggcgctggtgttctcggaccgcgggtacacgggcaactacttccacgcgttcacggacgtgatcctgccgctgttcctgacggcgcggcggtacgcgggcgaggtgcggctgctggtggccgacctccagccgtggtgggtgggcaagttcctgcccgtgttcaggagcatctccaagtacgagctggtggacctggaccgcgacccgcgcgtgcgctgcttccgccacgtccaggtggggctcaccagccacgccgacttcagcatcgacccgcgccgcgcgcccaacggctactccatgctggacttcacccggttcatgcgcgccgcctacgggctcccgcgcggcgacgtcgtcgcggcggcgccggcgaggcggccgaggctgctggtggtggcgcgcgcgcggacgcggcggttcgtcaacacggaggagatcgtgcgcggcgccgaggccgtcgggttcgaggcggtggtgtcggaagggacgcacgaggtggcgcccttcgcggagctggccaacggctgcgacgccatcatgggcgtgcacggcgccgggctgaccaacatggtgttcctgcccacgggcggggtggtgatccaggtggtgccgctgggagggctggagttcgtggccggatacttccgaggcccgtccgtggacatggggctgcgctacctcgagtaccggatcgagccggaggagagcacgctggtggaccagtacccgcgcgaccaccccatcttcacggaccccaacgggatcaagagcaagggctgggagtccctcaaggacgcctacctcgacaagcaggacgtgaggctggacatggagaggttccggccgacgctccaggaggccatcgcgcacctcaggaaggccaaggccaaggccaatggcgacggaaacaactaggcatcgccgtgcgtatgtagcgtgttcattcgtcctcttattaatctactcttctttttcttctttccttttcgggttatgtcggtgtatgtagcgtgcagaaatcgagcaaatgtatgatatgtggcagggaaagaagctagagcgaataatatattctctctcttgtcatccagttttcgattgaatggcgtatgccaagtgatcaggtgaaggtcgacccgg

SEQ ID NO: 148755 - DNA, 2268 bp, Zea Mays
ctgccgtattcacttttcactcgttcgtccatccttccacgccccccacagaaccgtctccccagcggagcccggcgcctcacggtcgcaatttattgcttgcgcaccgcctcgccgctttggcgtggggcgtttgcctgtgtggcgcttcgcaggtgccgtggcttgccgcttccttcgccgtgctcactagtcaccagagagggaggaggctctggcgctctgcttctgctgccgcttcttcttcttctcctgctgctgctcttacggagataagcagggggggccgggccggggcagggggaggtgacagctgagctgactagctgagtgaagcatggggatggacgccggcggcggcaagctgccgtacagctacgccggccagcaggacggagggaagctggtgaagagcgtcagccgcgtggagccgcgcaggttcggcctgggcctcgtggcgggcttcctcctcgtcacctgcgcctacttctccaccgccaagttcgacgccatccagatcgccatgaccagccgacccgtctccagcaatgcgggcggcgtcggggtcggctcgctggaggtgggcggcgtcgtcgccgccgccgacacctacaacgcctccaggcagggattagatttgggcaagaaaggcccgggcgcgacgtccatggccgacgagggaagcgaggccgaggcgctcgagaaagacggcggcaaggcttcttcaccttcggggccaggcgttcctgccgctctccttcctcccgtgtcgtcagaggaagccgcgaacagcacgctggaatcaggcggtcttgaggacgaggagctacaggtgcaggatgcagttgccagtggttccaagaggagcaaagactctgccgccgccgccgccgccacacgcagcgccaatgtcagctcaccctctgtggttcactctcaccatgccatcctccctgctcccgcgcagcggattccagaggttaagcaagcagactcggagacgacgccggcgcgggagcgggagtggaagccgctgtgcgacgtcacctcgaaccggcgcatcgactggtgcgagctggacggcgacgtccgcgtggtcggcgccaacgccagcgtgacgctggtggcgccgccgggcgcggacaaccggaccttccgcgcggagtcgtggcgcatcaagccgtacccgcgcaaggcggaccgcgggtacacgggcaactacttccacgcgttcacggacgtgatcctgccgctgttcctgacggcgcggcggtacgcgggcgaggtgcggctgctggtggccgacctccagccgtggtgggtgggcaagttcctgcccgtgttcaggagcatctccaagtacgagctggtggacctggaccgcgacccgcgcgtgcgctgcttccgccacgtccaggtggggctcaccagccacgccgacttcagcatcgacccgcgccgcgcgcccaacggctactccatgctggacttcacccggttcatgcgcgccgcctacgggctcccgcgcggcgacgtcgtcgcggcggcgccggcgaggcggccgaggctgctggtggtggcgcgcgcgcggacgcggcggttcgtcaacacggaggagatcgtgcgcggcgccgaggccgtcgggttcgaggcggtggtgtcggaagggacgcacgaggtggcgcccttcgcggagctggccaacggctgcgacgccatcatgggcgtgcacggcgccgggctgaccaacatggtgttcctgcccacgggcggggtggtgatccaggtggtgccgctgggagggctggagttcgtggccggatacttccgaggcccgtccgtggacatggggctgcgctacctcgagtaccggatcgagccggaggagagcacgctggtggaccagtacccgcgcgaccaccccatcttcacggaccccaacgggatcaagagcaagggctgggagtccctcaaggacgcctacctcgacaagcaggacgtgaggctggacatggagaggttccggccgacgctccaggaggccatcgcgcacctcaggaaggccaaggccaaggccaatggcgacggaaacaactaggcatcgccgtgcgtatgtagcgtgttcattcgtcctcttattaatctactcttctttttcttctttccttttcgggttatgtcggtgtatgtagcgtgcagaaatcgagcaaatgtatgatatgtggcagggaaagaagctagagcgaataatatattctctctcttgtc

SEQ ID NO: 148756 - DNA, 908 bp, Zea Mays
ctgccgtattcacttttcactcgttcgtccatccttccacgccccccacagaaccgtctccccagcggagcccggcgcctcacggtcgcaatttattgcttgcgcaccgcctcgccgctttggcgtggggcgtttgcctgtgtggcgcttcgcaggtgccgtggcttgccgcttccttcgccgtgctcactagtcaccagagagggaggaggctctggcgctctgcttctgctgccgcttcttcttcttctcctgctgctgctcttacggagataagcagggggggccgggccggggcagggggaggtgacagctgagctgactagctgagtgaagcatggggatggacgccggcggcggcaagctgccgtacagctacgccggccagcaggacggagggaagctggtgaagagcgtcagccgcgtggagccgcgcaggttcggcctgggcctcgtggcgggcttcctcctcgtcacctgcgcctacttctccaccgccaagttcgacgccatccagatcgccatgaccagccgacccgtctccagcaatgcgggcggcgtcggggtcggctcgctggaggtgggcggcgtcgtcgccgccgccgacacctacaacgcctccaggcagggattagatttgggcaagaaaggcccgggcgcgacgtccatggccgacgagggaagcgaggccgaggcgctcgagaaagacggcggcaaggcttcttcaccttcggggccaggtacacaccacgggcaagggcgcaaagcatcgcgtgttgttgtttcgagatgcgtggccgtggccgtggccgtgctttcccttccgttggggtcaagctgaccggcctcgtgtgcaccgtactcccaccgccgttcctgcacgcaaatcccaaaaatcagataaaaaa

SEQ ID NO: 148757 - DNA, 1431 bp, Zea Mays
atggcatgcgagaagaaacccgtcagtagttttaccgtcaggttggggttggcgcttcttgcaggatgcgttcttgtggcgatgatatcacttgccgcaatgttccggcatgacgcggttcctctgcagacattgagcttgttgttctcagtaggtccggtttcttcagtgatgtggggagaggaaagattaggctctcatcgtttcggcagaaacagagtgccggtgctgtgcgacttttcgagctcgaggtccgacgtgtgcgagctgagaggcgacgtccgcgtcctccccaacgctacgatcgtcctccaccatccgttggcgaggcgccagtcatggaggatgaagccgcacggcaggaagaacgaccggcacgcgctcgcccgcgtcactgaggtgacggtgactgtggcgacggcgtcggcgtcgccgcaccacacctccggcgccgccgccgctgctgctccccgatgcacggccaaccacaccgcccccgcggtcgtcttctccgtcggaggctacgcggggaacatgttccacgacctgaccgacgtcctcgtcccgctgttcatcaccgcgcgccggttcggcggcgacgtgcacctcctcgtcggcgacgcccagccgtggtggctggacaagttccggccgctgctcggcgggctctcccggcacgcggtggtggacatgagcagggggagcagcagcgggggcgtgctctgctacccgcacgtgatcctaggcctcgagttccacaaggagatgagcgtggacgccgcgaggaccgccggcggcggcgagtactccatggccgacttcacgctgctcgcccggcgatcctacggcctgcctcgggacaaggccatccgtgtccacggccgcggcggcggcggcgtccggcccaggctgctgctcatctcccggaagtcgacgcgggcgttcaccaacgccggctccatcgcgcgggccgccgcctcgctcgggtacgaggtggtggtgggcgagccggcgcggcacgcggacctggcgtcgttcgcgcgggtggtgaactcgtgcgacgtgctggtgggcgtgcacggcgccgggctggcgaacctggtgttcctccccgcgggggccgtggtggtgcaggtggtgccgctgggcgggctggacgccatggccgcggacgacttcggcgcgcccgcgcgcgacgcggggctccgctacgtgcactacggcatcgccgaggcggagagcacgctggcgacgcggtacccgcgcgaccaccgcgtgctgagggaccccgcggcggtgcggagcgaaggctggatggcgctgcgggccgcgtacctggtgggccagaacgtgacgatcgacgtccgccgcttcagtggcgccttgcgccgcgctatggagctcctgcgccagacccacgaccacgagtga

SEQ ID NO: 148758 - DNA, 1156 bp, Zea Mays
cagaagatgacttgcccttgacccttcctgaattggatgatttcactccaactggtactggggagccacctttgaccaaagcaacaaattgggttagaaccattgacccttcatctgggaagcctgcgagaagagaaacaagcaccatgccacaatgggctggatcttgctggtactatttgaggttcatggatcccaaaaactgcagtatattggttgataaggctaaagaaaggtattggggtccagttgacatctacgttggtggtgctgaacattctgtcttgcacttgctttatgcaagattttggcacaaggttctttatgacatgggtgtagtctccactaaagagcccttcaagtgcctgataaatcaaggattgatactaggagaaagacaatgaaggcagatgggtttctgcagactcagactcaagtttgattgattgctaccaagaaaaagtagctccagacaaggttacaaaagttggagatcattatgttctgaaggataatccaaacattcgtctgaatgctcgtgcctacaagatgagtaaaagtcgagggaatgtcatcaaccctgatgatgttgtttcagaatatggcgctgattctcttcgcttgtacgaaatgttcatggggccattgagagattcaaagacatggagcactgggggaatcgaaggtgtgcaccgcttccttggacgaacgtggagactcatagttggtccacaattatctgatggatcatataatgatggaaccatgactaccgaagatgaaccaaccttggatcagcttcgagttcttcacagatgtattgcaagggtcacggaggaaattcaggaaacaagatttaacactgcaatatctgcaatgatggagtttgtgaatgctgcatacaagtgggaaacccagccaaaatctgttattgaatcctttgttctgctgctttcacccttcgcgccacacttggctgaggagctttggtttcgcctcggacatccacaatcattggcctatgaacagtttccagaggcaaaaagtgagtacctggaggaatcaaagcttgtactccctgtccaaatcaatggaaagaccaggggtacaatccttgttgacaaagcgtgctctgaggatgatgtttttcaaattg

SEQ ID NO: 148759 - DNA, 1176 bp, Zea Mays
cagaagatgacttgcccttgacccttcctgaattggatgatttcactccaactggtactggggagccacctttgaccaaagcaacaaattgggttagaaccattgacccttcatctgggaagcctgcgagaagagaaacaagcaccatgccacaatgggctggatcttgctggtactatttgaggttcatggatcccaaaaactgcagtatattggttgataaggctaaagaaaggtattggggtccagttgacatctacgttggtggtgctgaacattctgtcttgcacttgctttatgcaagattttggcacaaggttctttatgacatgggtgtagtctccactaaagagcccttcaagtgcctgataaatcaaggattgatactaggagaaattgagtatactgcatatagagacaatgaaggcagatgggtttctgcagactcagactcaagtttgattgattgctaccaagaaaaagtagctccagacaaggttacaaaagttggagatcattatgttctgaaggataatccaaacattcgtctgaatgctcgtgcctacaagatgagtaaaagtcgagggaatgtcatcaaccctgatgatgttgtttcagaatatggcgctgattctcttcgcttgtacgaaatgttcatggggccattgagagattcaaagacatggagcactgggggaatcgaaggtgtgcaccgcttccttggacgaacgtggagactcatagttggtccacaattatctgatggatcatataatgatggaaccatgactaccgaagatgaaccaaccttggatcagcttcgagttcttcacagatgtattgcaagggtcacggaggaaattcaggaaacaagatttaacactgcaatatctgcaatgatggagtttgtgaatgctgcatacaagtgggaaacccagccaaaatctgttattgaatcctttgttctgctgctttcacccttcgcgccacacttggctgaggagctttggtttcgcctcggacatccacaatcattggcctatgaacagtttccagaggcaaaaagtgagtacctggaggaatcaaagcttgtactccctgtccaaatcaatggaaagaccaggggtacaatccttgttgacaaagcgtgctctgaggatgatgtttttcaaattg

SEQ ID NO: 148760 - DNA, 570 bp, Zea Mays
cagaagatgacttgcccttgacccttcctgaattggatgatttcactccaactggtactggggagccacctttgaccaaagcaacaaattgggttagaaccattgacccttcatctgggaagcctgcgagaagagaaacaagcaccatgccacaatgggctggatcttgctggtactatttgaggttcatggatcccaaaaactgcagtatattggttgataaggctaaagaaaggtattggggtccagttgacatctacgttggtggtgctgaacattctgtcttgcacttgctttatgcaagattttggcacaaggttctttatgacatgggtgtagtctccactaaagagcccttcaagtgcctgataaatcaaggattgatactaggagaagtaggtgccacaagtgtctaccagaatttctacatgttcatgaatgattttattgttgctaataaatgctgtaatagattgagtatactgcatatagagacaatgaaggcagatgggtttctgcagactcagactcaagtttgattgattgctaccaagaaaaagtagctccaga

SEQ ID NO: 148761 - DNA, 421 bp, Zea Mays
atcggcgaggggctcgacacctccaagcccaagtgctacatcctcgacatgttcccctaccccagtggggctgggttgcatgttgggcacccccttggatacacggcaactgacattctgtcaagattcaagcgcatgaaaggcttcaacgttttgcatccaatgggatgggatgcatttggtcttcctgctgagcagtatgctattcagacgggaacccaccctaagattaccactgaaagaaacattgagcgctttcgcacacagcttaaatcgttgggtttttcatatgattgggatcgtgaaatctccacgacagagccgggttattataaatggacacaatggattttccttcaactgttaaagagaggacttgcttatcaggctggcattgatatcttacaatcaggctgaggta

SEQ ID NO: 148762 - DNA, 1461 bp, Zea Mays
aacctgctcccgtaattaggcgaccttgcagaattcctttttttatctccaggaaagttcagagacaaacagaaagctgggcgaagaacgaaggcacctcgaaaccaagcctggccatgagaccatcaaaatctgtaaacagcacgtagtcacggtggggcgcgggcctatatattgtcttgtcaggccttgttcgtctcttcagaatcttcagacatccgagcgtcttgcgcgttcgatttgaaccacttggcgctgctgcctgaccggtcctcacccctcaacccgccgaacttcctcgtcaccgccggcggcgatcgatcgttgccaagtctcccaccatcgcctccacgggaaaaaatggcgcaggaggctgcaccggcgaggccggtgggccccaccaggctcgtctacttcgatgatatgggggcactccaccactcatccgccaccgttctctccgtccaccaggaggagggcggccgggtagcggtggtgctggacgccacggtcttccacccgcagggcggcggccaaccggcggacacgggcgtcatctccgccggcggagccaggttccttgttgaggatgtgcgggcgaaagacggagtggttttccactacggaagatttgagggcacggagcaaggatgtgggactgtatttaaggaggggggaaccgttagcttgcaggtcgacgcagaacgacgcagctttaattcaaggcttcattctgctggccatttgttggacatctgtgttcacaatgtaggcctctttcatctggagcctgggaaaggctatcattttcctgatggaccgtttgttgagtataagggaataattcctccagatcaaataccggttaagaaaaatgaactggaaagagaggccaatagactaatttcagaaggagcgaaggtcttagcttctgtttttccttatgaggaggcagccatattatgcggaggttctttgcctagctacatttcaaaggatagcaatcctcgcattgttaagtttggggataaccctggtggtccttgcggtggcactcatgttgccgacatttcaatcatcaacagcctaaaggtgacaaacataagagtcaagaaaggcctcactaaagtctcatacagcatcagcccatgatccttttccagcagccgcagcagacaacacctggaatttattggagcgagaattattaattgaatcagaaggctgtactttagtttcgtggcatcacatgtatacgtagggtggcaaataaacaatttctatgtagtaaagtctgccagttcctcatgtacttcaatagatgatttgtttctgtactgagtcgtagcagagccgttaaggttctgatgtagatgatgacacatgtaaaactgccacggcaccatcatacaacaacatgaaggagatttaaatttgttagagcaactccaatagttatgt

SEQ ID NO: 148763 - DNA, 1912 bp, Zea Mays
aacctgctcccgtaattaggcgaccttgcagaattcctttttttatctccaggaaagttcagagacaaacagaaagctgggcgaagaacgaaggcacctcgaaaccaagcctggccatgagaccatcaaaatctgtaaacagcacgtagtcacggtggggcgcgggcctatatattgtcttgtcaggccttgttcgtctcttcagaatcttcagacatccgagcgtcttgcgcgttcgatttgaaccacttggcgctgctgcctgaccggtcctcacccctcaacccgccgaacttcctcgtcaccgccggcggcgatcgatcgttgccaagtctcccaccatcgcctccacgggaaaaaatggcgcaggaggctgcaccggcgaggccggtgggccccaccaggctcgtctacttcgatgatatgggggcactccaccactcatccgccaccgttctctccgtccaccaggttttttctcttccctcctccgtaggcgcgcaaccctaggctggaaccggcgggcggcggcctattggcctaagctaagctccgggtgtccacaggaggagggcggccgggtagcggtggtgctggacgccacggtcttccacccgcagggcggcggccaaccggcggacacgggcgtcatctccgccggcggagccaggttccttgttgaggatgtgcgggcgaaagacggagtggtgagcatccggggggggtttcgctaccctcacgaaaagctgcaaacttgtctatgaaccatgctgctgtcgcagggattttgattttcctctttttttcccactttccgtgccccactcattttgtgattgcacccaggttttccactacggaagatttgagggcacggagcaaggatgtgggactgtatttaaggaggggggaaccgttagcttgcaggtcgacgcagaacgacgcagctttaattcaaggcttcattctgctggccatttgttggacatctgtgttcacaatgtaggcctctttcatctggagcctgggaaaggctatcattttcctgatgggtatgattggttacctttgatgcatttattcttttgctctttgtatggatagcatttgggtccagttgttactagctgctggcatttcatctcattttagcatttaccagttttgctctcttgtgcctctgttctttgtagaccgtttgttgagtataagggaataattcctccagatcaaataccggttaagaaaaatgaactggaaagagaggccaatagactaatttcagaaggagcgaaggtggataagcaagctgactatgttgaagttcacatcatccattctgtcgtcttttaagtgttcaccctttttgcaggtcttagcttctgtttttccttatgaggaggcagccatattatgcggaggttctttgcctagctacatttcaaaggatagcaatcctcgcattgttaagtttggggataaccctggtggtccttgcggtggcactcatgttgccgacatttcaatcatcaacagcctaaaggtgacaaacataagagtcaagaaaggcctcactaaagtctcatacagcatcagcccatgatccttttccagcagccgcagcagacaacacctggaatttattggagcgagaattattaattgaatcagaaggctgtactttagtttcgtggcatcacatgtatacgtagggtggcaaataaacaatttctatgtagtaaagtctgccagttcctcatgtacttcaatagatgatttgtttctgtactgagtcgtagcagagccgttaaggttctgatgtagatgatgacacatgtaaaactgccacggcaccatcatacaacaacatgaaggagatttaaatttgttagagcaactccaatagttatgt

SEQ ID NO: 148764 - DNA, 1130 bp, Zea Mays
aagagttcagcactcctctcgcgtcctcattcttcaaccgccacacaaacccctcgcttactgcacctttgcagcaccgctctctcgatcgaatcccaaggaacgaagacgacgacgatggcgtcgtctgcctgcttgctccaagcttccacggccttcgctccacgcttctccctcccgtcccgaccccagcccccgctacacctgcgtctccgcggctcccccaaccgtcgccgtggcatctcactcactgcttcctccgccgcgtccccggaagtcgagaaagagtcctcgccctcgtcctcgccgcaggaatctctgtctgctgtcgcggacagtgtgaaggtgctcaaggtggcagccaagacgaggaaagtacctgccccggaaattctctcggcgctgtccaagatcaagaaggcaaaactcgacacgtcggcattctttgagacactcggtggtaccgagtctccaggcaggacgtggatgcttatcttcactgcaaagggtcggctggagaaagggcagtatttcccagtgacagcagtccaacgcttcgatgctgcgggcaaacgcatcgagaatggcatatatttgggccccatcgggtgcttgaccttcgaagggaggctgtcatggaaaaagaaaatacttgcgttcatcttcgagcgggttcgcatcaaggtcggaccgtttggtcccctggaaatcagcctcggaagcggtgacggtggtagggagcccagcacgaaggaccccttcttcgtttggttctatgttgacgaagagatcgctgttgcgcaaggcagaggcgggggcgtagcttactggtgccgatgtcagcgtgtcccctgaagatccagacatcctcatctcgcttcaatgatcactgtacaatatcaggataaatggataatgttgagtctctagtttgtagggttcatgttcatctttgtactatctgctttgtctccgaaaacgagaaaaaaaggcaattggaggtgtaaataatgaaatgctattaaaatgatacacttatgtttgtgtagtatacggttgataatgtttgcaattaactagtaccccttccatcccataagtatacatctcatttatcagtgagtgaaact

SEQ ID NO: 148765 - DNA, 1013 bp, Zea Mays
aagagttcagcactcctctcgcgtcctcattcttcaaccgccacacaaacccctcgcttactgcacctttgcagcaccgctctctcgatcgaatcccaaggaacgaagacgacgacgatggcgtcgtctgcctgcttgctccaagcttccacggccttcgctccacgcttctccctcccgtcccgaccccagcccccgctacacctgcgtctccgcggctcccccaaccgtcgccgtggcatctcactcactgcttcctccgccgcgtccccggaagtcgagaaagagtcctcgccctcgtcctcgccgcaggaatctctgtctgctgtcgcggacagtgtgaaggtgctcaaggtggcagccaagacgaggaaagtacctgccccggaaattctctcggcgctgtccaagatcaagaaggcaaaactcgacacgtcggcattctttgagacactcggtggtaccgagtctccaggcaggacgtggatgcttatcttcactgcaaagggtcggctggagaaagggcagtatttcccagtgacagcagtccaacgcttcgatgctgcggtgagctgagcttatcatggcaacccctctatgaatatatgatatgcttgttctgatcagtggtacctgaacaatctagtacttgagtttctatgcatgctgaaacattccagttatggctgtgttcacagttcaacagcttcttgtccgacactgtatagttcttttcgctgaacaatgcaagaaatgcaggcactagaatatttttgctcttcatctctaggtatggggattgaggggattaaaactctttctattcaattttgactagcaagagatttaatacccttcaatccacttgtaaccttcaatccacttctaaccgaacaagcttttataagaatgcatcatatgttctcatttctctaagaaacaatgttcatcaatatgcccattgttatgtactaatgctcaattgaggtcaaccattaccaaaagctagcacc

SEQ ID NO: 148766 - DNA, 1101 bp, Zea Mays
gtgcacctgctgtcttataaaattgtcggccttggcccaagccaaggaccctttcgcttctctcagtctacgactaggcggcggcggcggccttcacgcacgagccttcgccgcctatacttgcgcttcgtcgagccggtgaattgtggtctaagaacaagagggaaggatctttctccagacttcgcaattttggacgacgagatgcacttccttgcatcatttcatgtccctacaggttttgtgttatctggtttgtcgggatggatgccaaaaagttcctgcagctggtcgaagagaagaaaaggaggatcctcgagaagaaagaagccccactaaagtggcagcagaagctagaagcagcagttaacgtcaaagctgatgcagaagcgaaggcgaaaaaactaaaatcaagaaagcataggaggagaggagattcttcctcggactctgacagtgactatgacagcgatgttgatcggaaacaccggaggaggaaggatcgtagaaggaacaagaagcatgagcattctgactctgatgatgccaggagaggcaagcgtaggtccaaaaagggctcagactcaagtgatgagagcaaccgtgaatatgaaagcgggtctgaagaagaacatacaaagaagaagcgtttgcacagaagaaggcatcacagacactcttcaaggtcagactctgaagacaacagtgatgaggaagagcggagatctgccaaggaccattctcagccccgcagacgccaccatcagtcttctgatgatggctcggacaaggtcaggttgagacatgggaagcgtctgagatcaagtgacgagaatgctcggccagattccaacagccataagcatctcaggagccaatccttggaggagtcatcagatgatagagatgatgatggaccagagaagataagaaatggcaaaaggtatcacaagaatcatcaccgtcaccaccatcatcatcgtcaccatcggcaccaccatgaaagacataataactcagcagaacctaatgacaggaggcaagtactgaaagatgaccagagggcccttgaaggtagcagtgcagactgaaggtatccac

SEQ ID NO: 148767 - DNA, 1067 bp, Zea Mays
gtgcacctgctgtcttataaaattgtcggccttggcccaagccaaggaccctttcgcttctctcagtctacgactaggcggcggcggcggccttcacgcacgagccttcgccgcctatacttgcgcttcgtcgagccggtgaattgtggtctaagaacaagagggaaggatctttctccagacttcgcaattttggacgacgaggttttgtgttatctggtttgtcgggatggatgccaaaaagttcctgcagctggtcgaagagaagaaaaggaggatcctcgagaagaaagaagccccactaaagtggcagcagaagctagaagcagcagttaacgtcaaagctgatgcagaagcgaaggcgaaaaaactaaaatcaagaaagcataggaggagaggagattcttcctcggactctgacagtgactatgacagcgatgttgatcggaaacaccggaggaggaaggatcgtagaaggaacaagaagcatgagcattctgactctgatgatgccaggagaggcaagcgtaggtccaaaaagggctcagactcaagtgatgagagcaaccgtgaatatgaaagcgggtctgaagaagaacatacaaagaagaagcgtttgcacagaagaaggcatcacagacactcttcaaggtcagactctgaagacaacagtgatgaggaagagcggagatctgccaaggaccattctcagccccgcagacgccaccatcagtcttctgatgatggctcggacaaggtcaggttgagacatgggaagcgtctgagatcaagtgacgagaatgctcggccagattccaacagccataagcatctcaggagccaatccttggaggagtcatcagatgatagagatgatgatggaccagagaagataagaaatggcaaaaggtatcacaagaatcatcaccgtcaccaccatcatcatcgtcaccatcggcaccaccatgaaagacataataactcagcagaacctaatgacaggaggcaagtactgaaagatgaccagagggcccttgaaggtagcagtgcagactgaaggtatccac

SEQ ID NO: 148768 - DNA, 1382 bp, Zea Mays
cacacagcgcgcagagagactagagagagagggtttgtcctcctgcctgccttggcttggctagcttggcctcccctccacctccatcggtgtattacatccgagggcactccatctcttgcgtcccttaacccctccaccaatccaatccaatcccttaaccccgcaccgaatccagacttcgaagcttcctcttcctcccggtcccggccccggccccggccccggagccctgttcttggtacttaggacaaggactgatgggcgaccatctcgcgttgatcgtggaccggctgctgacagagtcgacgctggaggcggcgatcggcggtgggaagcacatggtcgatctgcgtcaggagacggtggatgtcgagtactgccatcgcgggctaggcggcggctcggcgaccaaggtggtggagtgcaggatttgccaggaggaggactgggacacctgcatggaggccccctgcgcctgttgtggcagcctcaagtatgcgcatcggaaatgcattcagcgctggtgcaatgagaaaggcgacactatgtgtgaaatatgcctgcaggccaggttatacttctccacaacagctgtttcactatggaagtataccaatgaatttcagagggaactgggagattgccaggcaagatctcaatgattcccagataataacaatgatgcccacggagcgtgattttatggacaattacgatgactactttcctatcaggacaagaagcagcaccttgtgttgccggacaattgccataattttcatgtcactcctggtccttcgccacactcttcctcttgtgattggtgacaatggggagtactcattggccttattctcgcttctggtgctgagaactgcgggaatcctctttccaatcctggtgatggtgagagcattggcaagcttccatcatcgacggcggcagcagatcatttaacactgcaggaaagccaggaagcatatatatcttcatcagagagcgaggaggaagaggaagagtatacagttgccaattctgcacaaacaaactactcgcaaccgcgcttcataccagtctactgacatggccaagaacaagccttccaacctcacatctgacagggaattccagcgcctgagtttagctgacagatgcaaggatgaatggatgatcacaaggggggaaattacaaaattgtgaatgtggtgacatagtaagatagcctgaagccactcgcttctatgcccatagagaagaatgtagtggccctgctacttgtacataggagagagtacagcagcagagtgctgacaaacccggatactgtgactcgagtctctactgcagtaacccttgtgcactgctctccccgtctcaaa

SEQ ID NO: 148769 - DNA, 1709 bp, Zea Mays
ctcttctaatttaaacctctgctgcaagggagcgagagagagagagagaggagaggcacacagcgcgcagagagactagagagagagggtttgtcctcctgcctgccttggcttggctagcttggcctcccctccacctccatcggtgtattacatccgagggcactccatctcttgcgtcccttaacccctccaccaatccaatccaatcccttaaccccgcaccgaatccagacttcgaagcttcctcttcctcccggtcccggccccggccccggccccggagccctgttcttggtacttaggacaagacgctccgagaccctcgagattgagagctcgctcgctcgctcggtgtcttcgccagctgcccaccctccttcctgctcgtccccccgctcgcgcctcctcttcctcggactgatgggcgaccatctcgcgttgatcgtggaccggctgctgacagagtcgacgctggaggcggcgatcggcggtgggaagcacatggtcgatctgcgtcaggagacggtggatgtcgagtactgccatcgcgggctaggcggcggctcggcgaccaaggtggtggagtgcaggatttgccaggaggaggactgggacacctgcatggaggccccctgcgcctgttgtggcagcctcaagtatgcgcatcggaaatgcattcagcgctggtgcaatgagaaaggcgacactatgtgtgaaatatgcctgcagcaattcaggccaggttatacttctccacaacagctgtttcactatggaagtataccaatgaatttcagagggaactgggagattgccaggcaagatctcaatgattcccagataataacaatgatgcccacggagcgtgattttatggacaattacgatgactactttcctatcaggacaagaagcagcaccttgtgttgccggacaattgccataattttcatgtcactcctggtccttcgccacactcttcctcttgtgattggtgacaatggggagtactcattggccttattctcgcttctggtgctgagaactgcgggaatcctctttccaatcctggtgatggtgagagcattggcaagcttccatcatcgacggcggcagcaggtaatttcgttactgagctgcaccgtgtcatgcatcctgatcatgttcagttcagcagaagcagatatcgcataattgcatgtcacacctgtggaaatttctccattcgtagtagtagaaacatagatttgtatgaggcataactctcggatctagatcatttaacactgcaggaaagccaggaagcatatatatcttcatcagagagcgaggaggaagaggaagagtatacagttgccaattctgcacaaacaaactactcgcaaccgcgcttcataccagtctactgacatggccaagaacaagccttccaacctcacatctgacagggaattccagcgcctgagtttagctgacagatgcaaggatgaatggatgatcacaaggggggaaattacaaaattgtgaatgtggtgacatagtaagatagcctgaagccactcgcttctatgcccatagagaagaatgtagtggccctgctacttgtacataggagagagtacagcagcagagtgctgacaaacccggatactgtgactcgagtctctactgcagtaacccttgtgcactgctctccccgtctcaaa

SEQ ID NO: 148770 - DNA, 1516 bp, Zea Mays
tacatccgagggcactccatctcttgcgtcccttaacccctccaccaatccaatccaatcccttaaccccgcaccgaatccagacttcgaagcttcctcttcctcccggtcccggccccggccccggccccggagccctgttcttggtacttaggacaagacgctccgagaccctcgagattgagagctcgctcgctcgctcggtgtcttcgccagctgcccaccctccttcctgctcgtccccccgctcgcgcctcctcttcctcggactgatgggcgaccatctcgcgttgatcgtggaccggctgctgacagagtcgacgctggaggcggcgatcggcggtgggaagcacatggtcgatctgcgtcaggagacggtggatgtcgagtactgccatcgcgggctaggcggcggctcggcgaccaaggtggtggagtgcaggatttgccaggaggaggactgggacacctgcatggaggccccctgcgcctgttgtggcagcctcaagtatgcgcatcggaaatgcattcagcgctggtgcaatgagaaaggcgacactatgtgtgaaatatgcctgcaggtaagaacttttaggagatctatgcatattgtttataggttagaaaatttcaactggtgatacagttttaagttttaacatatgtgcaactatggaaacatgcctatggatttaattttgatatgtttctttagcaattcaggccaggttatacttctccacaacagctgtttcactatggaagtataccaatgaatttcagagggaactgggagattgccaggcaagatctcaatgattcccagataataacaatgatgcccacggagcgtgattttatggacaattacgatgactactttcctatcaggacaagaagcagcaccttgtgttgccggacaattgccataattttcatgtcactcctggtccttcgccacactcttcctcttgtgattggtgacaatggggagtactcattggccttattctcgcttctggtgctgagaactgcgggaatcctctttccaatcctggtgatggtgagagcattggcaagcttccatcatcgacggcggcagcaggaaagccaggaagcatatatatcttcatcagagagcgaggaggaagaggaagagtatacagttgccaattctgcacaaacaaactactcgcaaccgcgcttcataccagtctactgacatggccaagaacaagccttccaacctcacatctgacagggaattccagcgcctgagtttagctgacagatgcaaggatgaatggatgatcacaaggggggaaattacaaaattgtgaatgtggtgacatagtaagatagcctgaagccactcgcttctatgcccatagagaagaatgtagtggccctgctacttgtacataggagagagtacagcagcagagtgctgacaaacccggatactgtgactcgagtctctactgcagtaacccttgtgcactgctctccccgtctc

SEQ ID NO: 148771 - DNA, 1362 bp, Zea Mays
cacacagcgcgcagagagactagagagagagggtttgtcctcctgcctgccttggcttggctagcttggcctcccctccacctccatcggtgtattacatccgagggcactccatctcttgcgtcccttaacccctccaccaatccaatccaatcccttaaccccgcaccgaatccagacttcgaagcttcctcttcctcccggtcccggccccggccccggccccggagccctgttcttggtacttaggacaaggactgatgggcgaccatctcgcgttgatcgtggaccggctgctgacagagtcgacgctggaggcggcgatcggcggtgggaagcacatggtcgatctgcgtcaggagacggtggatgtcgagtactgccatcgcgggctaggcggcggctcggcgaccaaggtggtggagtgcaggatttgccaggaggaggactgggacacctgcatggaggccccctgcgcctgttgtggcagcctcaagtatgcgcatcggaaatgcattcagcgctggtgcaatgagaaaggcgacactatgtgtgaaatatgcctgcaggccaggttatacttctccacaacagctgtttcactatggaagtataccaatgaatttcagagggaactgggagattgccaggcaagatctcaatgattcccagataataacaatgatgcccacggagcgtgattttatggacaattacgatgactactttcctatcaggacaagaagcagcaccttgtgttgccggacaattgccataattttcatgtcactcctggtccttcgccacactcttcctcttgtgattggtgacaatggggagtactcattggccttattctcgcttctggtgctgagaactgcgggaatcctctttccaatcctggtgatggtgagagcattggcaagcttccatcatcgacggcggcagcaggaaagccaggaagcatatatatcttcatcagagagcgaggaggaagaggaagagtatacagttgccaattctgcacaaacaaactactcgcaaccgcgcttcataccagtctactgacatggccaagaacaagccttccaacctcacatctgacagggaattccagcgcctgagtttagctgacagatgcaaggatgaatggatgatcacaaggggggaaattacaaaattgtgaatgtggtgacatagtaagatagcctgaagccactcgcttctatgcccatagagaagaatgtagtggccctgctacttgtacataggagagagtacagcagcagagtgctgacaaacccggatactgtgactcgagtctctactgcagtaacccttgtgcactgctctccccgtctc

SEQ ID NO: 148772 - DNA, 1426 bp, Zea Mays
ctcttctaatttaaacctctgctgcaagggagcgagagagagagagagaggagaggcacacagcgcgcagagagactagagagagagggtttgtcctcctgcctgccttggcttggctagcttggcctcccctccacctccatcggtgtattacatccgagggcactccatctcttgcgtcccttaacccctccaccaatccaatccaatcccttaaccccgcaccgaatccagacttcgaagcttcctcttcctcccggtcccggccccggccccggccccggagccctgttcttggtacttaggacaaggactgatgggcgaccatctcgcgttgatcgtggaccggctgctgacagagtcgacgctggaggcggcgatcggcggtgggaagcacatggtcgatctgcgtcaggagacggtggatgtcgagtactgccatcgcgggctaggcggcggctcggcgaccaaggtggtggagtgcaggatttgccaggaggaggactgggacacctgcatggaggccccctgcgcctgttgtggcagcctcaagtatgcgcatcggaaatgcattcagcgctggtgcaatgagaaaggcgacactatgtgtgaaatatgcctgcagcaattcaggccaggttatacttctccacaacagctgtttcactatggaagtataccaatgaatttcagagggaactgggagattgccaggcaagatctcaatgattcccagataataacaatgatgcccacggagcgtgattttatggacaattacgatgactactttcctatcaggacaagaagcagcaccttgtgttgccggacaattgccataattttcatgtcactcctggtccttcgccacactcttcctcttgtgattggtgacaatggggagtactcattggccttattctcgcttctggtgctgagaactgcgggaatcctctttccaatcctggtgatggtgagagcattggcaagcttccatcatcgacggcggcagcaggaaagccaggaagcatatatatcttcatcagagagcgaggaggaagaggaagagtatacagttgccaattctgcacaaacaaactactcgcaaccgcgcttcataccagtctactgacatggccaagaacaagccttccaacctcacatctgacagggaattccagcgcctgagtttagctgacagatgcaaggatgaatggatgatcacaaggggggaaattacaaaattgtgaatgtggtgacatagtaagatagcctgaagccactcgcttctatgcccatagagaagaatgtagtggccctgctacttgtacataggagagagtacagcagcagagtgctgacaaacccggatactgtgactcgagtctctactgcagtaacccttgtgcactgctctccccgtctc

SEQ ID NO: 148773 - DNA, 1114 bp, Zea Mays
ctcttctaatttaaacctctgctgcaagggagcgagagagagagagagaggagaggcacacagcgcgcagagagactagagagagagggtttgtcctcctgcctgccttggcttggctagcttggcctcccctccacctccatcggtgtattacatccgagggcactccatctcttgcgtcccttaacccctccaccaatccaatccaatcccttaaccccgcaccgaatccagacttcgaagcttcctcttcctcccggtcccggccccggccccggccccggagccctgttcttggtacttaggacaagacgctccgagaccctcgagattgagagctcgctcgctcgctcggtgtcttcgccagctgcccaccctccttcctgctcgtccccccgctcgcgcctcctcttcctcggactgatgggcgaccatctcgcgttgatcgtggaccggctgctgacagagtcgacgctggaggcggcgatcggcggtgggaagcacatggtcgatctgcgtcaggagacggtggatgtcgagtactgccatcgcgggctaggcggcggctcggcgaccaaggtggtggagtgcaggatttgccaggaggaggactgggacacctgcatggaggccccctgcgcctgttgtggcagcctcaaggtacctgacctttttactcacgctatttttttttatttgagaccaaaataaatgctcttggttagacagcagattcatgatcttgctatggtgattatgcaactgtgtctcagtttctaaaaaattgtcttacagttcctgttgtcaaatgaaaagccgatccttcttttcagtagaagatgtagttgttgccacttgttgctacagtacaattatgttgggcctctttagattttaaaattgggcactagttaatatagttgacctagcatgagaaattgttggcttctatggttggggttagatgttgtaggttgggcagttaggacttgggggagttccatgttaacttgaggttgaggccttgagggtcatcggggacaagatctgtgaaccaaatcaactgtgtttgtgtcaatgtagcttagaaggcactgtctattatgttatgtag

SEQ ID NO: 148774 - DNA, 1830 bp, Zea Mays
ggccttgtggtgtgcactttcattgtttgcatttccaataaaactaattacttcatgtcactgactacatttattcttattgtccttgtacacatcaaaattccaatattagctatgctgaaacttttgaaggttaattgttgcatgtttgtaccatgcacatgcagaatgcctctggtctctgtctatttgggttttgatcaataagaaactgtgccttttcttttgttacataaatggccaatataccatgatgctgattttaattttgttactatcgcccattgataacttgagttttgatgatttattaggtaccagtgtccagatcatatgaaccctgccgagttcttggctgatctcatttccattgattatggctcaactgaaagtgtacagtcatcacagaaaaggatcgagaatctcattgaggcgttttctaacaaatctgtggtcactgaaggtaacaatttaattgcaattccagaggatcctgaattgtctgccaaacttgttcggaagactacagtgaagaaaagacatggttggtggaggcaatttcgtttgctttttaagcgagcatggatgcaggcttttcgtgatggaccaacaaacaaagtgagatcacgaatgtctgttgcttcagcagttatatttggatctgtgttttggcgaatgggaaaatctcaaacatccatacaagacaggatgggactacttcaggtggctgccataaacacagcaatggctgcattgacaaagactgtgggagttttcccaaaagaacggagtatagttgacagagaacgagcaaaaggttcctatgcacttggaccatatctttcatctaagttgttggctgagattcccattggagcagcatttccattgatatttggatcaattctctatccaatggctaaacttcacccaacattttctagatttgccaaattctgtggtattgtgactgttgagtcatttgctgcatcagcaatgggtctcactgttggagcaatggctcctacaactgaagctgcaatggctcttgggccatcccttatgacagtgtttattgtatttggaggatactatgttaaccctgacaatactccagtcatatttcgttggatcccaagaatatctctcattagatgggcctttcaagggctttgcattaacgagttcaagggtctgcaatttgagcaacaacattcatatgacattcaaacgggtgaacaggccttggaaaggttttcattgggaggaattcgaattgcagatactctggttgcacagggtaggattctgatgttctggtactggtcaacctaccttcttctgaagaaaaacagaccgaagtatcagcagctccttccaccattggaacaagataaaaataagccgcaggtggaataagcttttcatttgcagacttcgaaagaataaattaaggtagggcatctttgaatcaatcatttctttgcagtggtcctaattcaacaaaaaggctttatgtggggggaacatattgcaattagcaacgcaatcaatgtactatattgaatctccattacttctatacctttctgttcgttatcgtttccttcactaagtttttctcatgggaaaattatcgccaataaaacttgccctgggccctggttagagttaatggaatatgaactcccagtctcatgatgacagttctgccatgatatagttattacagtatctggttattccctatagtttatagttatttcagtgtctggttattccctatagcccctgtttgtttcggcttttcgcagcttctggccaccaaaa

SEQ ID NO: 148775 - DNA, 2616 bp, Zea Mays
atgccgcaacaaactcatcacgaccacacaaactggcggaactgctctcagctctcctcacgccttgcagaagcgcagaggctaaacccccgtctaaccctgctgccgcttgccactactccgcttcgttctccgccgcctccccggacgtccggaaacttctagattgaagggggatagccattggcgtcagcgtgtgtgatggaggtcaggggactggggcagctcctggcggcgctggccgcggcgttcttcgtccgcgccatcgcgggacccggtcccgccctccttccgccggcggaggacacggagaccgacgaggccgacgcggaggctggcgagggaggtggtggtggtgtgccgcccgtgaccatccggtgggctcgcatcacctgtgcattgaagaacaagcgcggggaagtggcaaggtttctgttgtcaaatgtgtcaggggaggcgaaaccggggaggctgcttgcactaatggggccatcgggctctggcaaaacaactttgctcaatgtgctagcagggcagctcgccgcatcgtcttccttgcacctttccgggtttctgtatatcaatggtcggcctatctcgaagggcggatataagattgcttttgtcaggcaggaagacctgttcttctcacagctcactgtgcgggagacgctctcacttgctgctgagctccagcttcctgacttgtgggctcctgagagaaaggagagctatgtcaatgatcttttgttacgtatggggttggtcaattgtgctgattctattgttggtgatgcaaaagttcgtggaataagtgggggtgagaagaagcgcctctcacttgcatgtgagttgattgctagcccttcagtcatctttgcagacgaaccaacaacaggccttgatgccttccaagctgagaaggtcatggagactcttcgtcaacttgctcaggatgggcacactgttatctgttcgatacaccagccaagaggttcagtctatggcaaatttgatgacatcgtactactgtcagatggagaaactgtatacatgggacctgcaaaagaagaacctctaacatacttctcatcattagggtaccagtgtccagatcatatgaaccctgccgagttcttggctgatctcatttccattgattatggctcaactgaaagtgtacagtcatcacagaaaaggatcgagaatctcattgaggcgttttctaacaaatctgtggtcactgaaggtaacaatttaattgcaattccagaggatcctgaattgtctgccaaacttgttcggaagactacagtgaagaaaagacatggttggtggaggcaatttcgtttgctttttaagcgagcatggatgcaggcttttcgtgatggaccaacaaacaaagtgagatcacgaatgtctgttgcttcagcagttatatttggatctgtgttttggcgaatgggaaaatctcaaacatccatacaagacaggatgggactacttcaggtggctgccataaacacagcaatggctgcattgacaaagactgtgggagttttcccaaaagaacggagtatagttgacagagaacgagcaaaaggttcctatgcacttggaccatatctttcatctaagttgttggctgagattcccattggagcagcatttccattgatatttggatcaattctctatccaatggctaaacttcacccaacattttctagatttgccaaattctgtggtattgtgactgttgagtcatttgctgcatcagcaatgggtctcactgttggagcaatggctcctacaactgaagctgcaatggctcttgggccatcccttatgacagtgtttattgtatttggaggatactatgttaaccctgacaatactccagtcatatttcgttggatcccaagaatatctctcattagatgggcctttcaagggctttgcattaacgagttcaagggtctgcaatttgagcaacaacattcatatgacattcaaacgggtgaacaggccttggaaaggttttcattgggaggaattcgaattgcagatactctggttgcacagggtaggattctgatgttctggtactggtcaacctaccttcttctgaagaaaaacagaccgaagtatcagcagctccttccaccattggaacaagataaaaataagccgcaggtggaataagcttttcatttgcagacttcgaaagaataaattaaggtagggcatctttgaatcaatcatttctttgcagtggtcctaattcaacaaaaaggctttatgtggggggaacatattgcaattagcaacgcaatcaatgtactatattgaatctccattacttctatacctttctgttcgttatcgtttccttcactaagtttttctcatgggaaaattatcgccaataaaacttgccctgggccctggttagagttaatggaatatgaactcccagtctcatgatgacagttctgccatgatatagttattacagtatctggttattccctatagtttatagttatttcagtgtctggttattccctatagcccctgtttgtttcggcttttcgcagcttctggccaccaaaa

SEQ ID NO: 148776 - DNA, 427 bp, Zea Mays
cgccaggccaggccgcctgcgccgcgtctgacgtatctgccctttcccgcggcacgcggccgaaggcgtcgttcccccttccccaccgcctcttcgcccgccggacgcaagccgccgcagctagcccgacgcggactgaggaagccaacagggcgccaaccgctgccacagcaactcgccagccgagttctgaaaccaccgaaggacctaggcttcccacctattcatggcccgctgcctcgtcgcccgccacttactcccgcacctccgcctccgtgcgccgcgtctcctgtctgttccaccgccgacgctgggcatgcttatccgcggtgtcgaagtgtcgtttccttcggttcaggcgcttcaaggtgcaggctgttcgaattcagttgctttctctttcccccttccggtctttggtgaagaa

SEQ ID NO: 148777 - DNA, 1308 bp, Zea Mays
aatttcacatctctgttcgaggagtttataggcctggttcatattgcccacgctcctagggtctttaaacaccctgcaagttcaacggaaacatcaactgcacagggtagctcggttccatgtatcgaataaatcatttggggccatattttccaaatgtttgacggaaacaacaaactttgaatgtacatttatacgaaaacagcctggtggtattaagtcaccatcttttctgaaacccgaaaaaagaacagatataaaaggcaaaagatccaagtacaagtcactcaatgatcagctctctctaacggggtctgttttgccaaggtgctcgtattggtcgcaatcagctccatgctccttcagggctgtaatcaaccttggtaaaatctttgctagtgcaagcttgaagccgacagagctcgagtgctccgtgcttctgttggtggtgcatgcgtcgtcagtgagagtgccaacaacatttccttgcaaatatgcctcacaggctttaaggatgtagtggccacgcttgcggaaatggctcttcacaaaatcctcaaaatgctgcagaggccgtctcaatatatacagcatggatttcacgctcagcaggtacgtattctcattatacggcactgcattcttctccccttcaacagtaccaacttgcttctcgtacccagcctcattaaaatagggtttttcattgagaaccaatccctgaagtgaaaccagtacttgtagaatacttgatgatgatgggtcccacacttcgttccctctgccggtccaagtatttaagagacttaagcaaacctttccatccacatacaggtttggatttacacgcaaaccaccagaatggtagtatgctgactgcagattcaacaatgaatgccaggatgagaatattgcagcaatgtcagcagagttcttccaatgtatttatttacagtttcaatgtacagcagttatggaaaccaagacaaagcatagatgagagatgttgcgattaccggaggaacttgcggatactcaggtggaaggtagaaatcaaagaagaacaggccatcttggtagggtgttccacttgctccaacaatcacggctctcaagagatccatgcgatcctcaaagactctgacataaatatagtctacaaatgcagtgaaaggaacatcagctaatcataagttgtccttggttgcttttagtgtttgtattgagtaatagcagacctggtaggttcttctcaagtatgctccattcctgctgtactttttttacccactttcttccacccgtgcc

SEQ ID NO: 148778 - DNA, 521 bp, Zea Mays
ataccggcaaacccgcaaagcgcccggaactccgtgatggcgatggccatctccggcttgtgattttcgtccttgtaagtggaaggccgcagcgcgtgcagcacctcggcgagtttcttgtccgggtgcgcctggatcgagagcgccttggccaccgacaggacctgcaaccgaatggggaggtcacctccccagcgcgcggcgacggcggggccgagcgcgtcgtgattccgcgcgagccagtccctgagaagcgagccatcgtcgacgagcgaggatgggccggacgggtgagtgcccatccaaagctctgcgtaggggcgggcagggtcggggttgttgtggtcggcgaggcgcgcgacgagggaggctgctccacgctgaccccactcgtagtgctgcaccgcgcagcgcagccgcagcagccttcgcggcggcgcctgggagacctcggtctcgggctcgggctccggcgaaggaagcgctggtgggttctccattgggcggggatttgagctggg

SEQ ID NO: 148779 - DNA, 575 bp, Zea Mays
aaaagatgctggaccgctgacaggcttgcgaagagaggcttagatcatccagctaggtgcctcttttgtgaccaggaagctgaaactattgatcacatcctcgtctcctgtgtgttcacaagagtattctggtttactcttcttaaaccgtttgggtttcagagactggctccccagcctggacattcttcatttatggcttggtgggagcagatttctgggttggcttctggtatccgtggtaaaggtcttaattctcttgtggccttaggagcttggataacctggaagcatcgtaatagttgtgtttttgatggttgtactcctagtttagatctgtccattaatttagccagggaggagaggcagtcttgggagatggctggggctaagggtctttcataccttgttgccctaattcctggagactagggagttgtttagtttgatggattttttcagtttgctgtgtttctggcccccctgaggaggccttgtaatttgtccagatctctttgatctggatttatctcttcttcttaatatattgatgcgcagttctcctgcgttttccc

SEQ ID NO: 148780 - DNA, 114 bp, Zea Mays
gttggtgccaaatttgaagaagaaaacgcgtactttcgttcggccttctcatgtgcattctatggtttgaacttgatagccgatggttcgacgacaaatggttgggtgggaaat

SEQ ID NO: 148781 - DNA, 1696 bp, Zea Mays
tgcagctaggtccctcctctcaactctgcttcttcttcttccaactgatcatctcctaccttttcttttccaatccctaaacctacacacagctttacggtagctgctagtgctagtgcatggccatatatatgcatctataagtagataggttgcaccctccaaggggttcatatcatccaaggtgcatgccaggagacaggccacaataatgtcccagaggaaaggcgccatggcggctgcagtgacggccagcaagcatcgcgaggaccaggaggcgatgatggtggagctcaggagaggcccctggacgctcgaggaagacaacctcctcatgaactacattgcttgccacggcgagggccgctggaatctcctcgcccgctgctccgggttgaagaggaccggcaagagctgccggctcaggtggctcaactacctgaagcccgacatcaagcgcggcaacctgacgcctgaggagcagctgctcatcctcgagctccactccaagtgggggaacaggtggtcgaggatagcgcagcacctgccggggcgcaccgacaacgagatcaagaactactggcggacgcgcgtgcagaagcaggcgcggcagctgcgggtggacgccaacagcgccgtcttccgcgacgccgtccgctgctactggatgccgcgcctgctggagaagatggccgcgcaccaccacggcgacggcgagctgccgccgccactgcacccctcgcacaacatcgccggcacggcctcctcgcgctcgccgccggcccacggcagccagcaggaggacccgagtagtagcgcgccggcggccagcggccactacctgcagcaggtcgacccgagcccgagcacgtcgacgacgtccgggtcgacgacctcggccgcgctcccgccggtgccctgcttctccgaatccgaactaaggtgggtcgtggaccagtacggcgccgcttacggttacaccgacgacctcgacctcgacggcggcgccggcgtggtcgacgacgactcggctgccgccgccgcgctggacagcctcgggctggacgggctggacctggggccggccgacggcggcgtgtactcggacgcgacgctgctggactacctcaacgccacgtgcgccggcggcaccaccgtgatgacaatgatgggcggcgtccacggcgccgcgggcggtggcgacggcgactacggtccgtcgccgtggcggacggacgagctcggccagacggcgaggaagctcggcgatcctcagcatcaatggagaggaggtatctagaagcaatcgagagagctaggtgagctagctcgctcgctcgctgctaaagcctagctagctacaaggatggtggatgatgctgatgatgggcgcaggttgcttcttgcgacgtctcactctcagctccccctccctctctcccaagcgatgatcgagatgtcacgccagttattaattgggattagcggcgatccaaagtcgatcttattaggtgacgttcccatcgatcgatcgatcgagacatctctgctgttaatttgttcgatcgatcgtggtttgtgtagcgcagatgtagtagtttgatggttgcgtgctgtcacttttatttattagtggcgcgtatgatcaattattcacgtacatatacatatttgttattcctcccattcttttttt

SEQ ID NO: 148782 - DNA, 894 bp, Zea Mays
gttacaaattcatgccaatttattgatgtatagacgacgtaatggacaaatccttgtaatagctatgcttccttttattagagctgttactgtacttgtagtggtatatcatccgcttcacctccaccaaatatccgattaagtaccaacgccaatctgattccagcctgcgctaacctcttctccacaatcgggtacctactgaaaaaataatcatctgcgcccagatgatgtcttgctccacatctttgtaggcgtagttgcaggaataatggatgctctcaatcgcatagctgcaagtcgtatggccaaggtcatataatgtcagttctgcatgacagtagtaacacatgaacgaaatggaagcttctagatcgaacgcgagtcctactcgttcgcgcaggtcgcgtgtttgttcttgcaattttcccagtggacgatgtcgtcagaccatccatcctacagattcatcttgagagcctctaccatggtatccatgctcttgttgtagaagtccttgatcgccgtatcaataatgctgacatcccacacctagcaaaaacacaggattctgactctcagagactcagacgggctatacctggtgagtacacatctgaaatctggcatcgaagaggtgcagcaggcacagacgtgatggaggtttgctttcctccggtaccagtggacggtgatggtgttaccgccctcgtcatcttggaagcctacgtgcagcggctggtggacgtcgccgacgaagtgtgccaggaacatcaggctctccgtcaggttatctggttgcgcacgtctgtagagctggtccgtgtagttgttgatagccccgacgacgcacatcccttgctggccacgagaattgtggcagtcccctgaaag

SEQ ID NO: 148783 - DNA, 2806 bp, Zea Mays
ctctcacagtcacagcatccttccttgcttctcgtctcgtcgcctctcggagatcagaaagagaacaccggacacctagcctgcgcccttgccttccctccgcgcgcgcgtgctatctatggcgatggaagacgtcgcgggtgcctcctcctcctcggtggcggccgccgcctccgaccccacgcacggctggcagacggtgtcgtaccccaagcgccaccgcaagcaggcgcatcagccaccccgcgccatggctcccgatctggcgctgcaggccaacggcaaaggctccggtgtcttcgacgccgtcgagaagcgctcccaggagcgccaccgcgcgctgcagcagcagctcgcatccagggcggccgacctcgacgacgcgcggatcgccccggtcacaggcggcgcttactccgacgactccgactccgacgaggccaccgccccgcgccaggtgggggaggtgaagaagcctaagaagcctaaaaagcctaaggtgacggtcgccgaggctgccgccctgatcgacgccgagaacctcgcagcgcacctcgtcgagatctcgtcatcatacgagaatcaacaggacattcaactcatgaggtttgctgattactttggccgggcatttgtagctgtaagcgcatcccaatttgcatgggcaaagatgttcaaggaatcaacagtgtctaagatggttgacatcccactgtgccatattcctgaggctgtcatcaagactgcgagtgattggatcagtcaaagatcttatgatgccctgggagactttgttttgtggtgtatagatagcatcatgtctgaattgtcaggcccatcagcaggacctaagggttcaaagaaggttgcccaacagtctccaagggcccaggttgcaatctttgttgttcttgccatgactttaagaagaaagcctgatgtacttgtaaatgttatgccaaagataatgggaaacaataaatatcttggacaggaaaagcttcccatcattgtctggtttattgctcaggcatctcaaggtgacctagtgactggcatgttttgctgggctcattttctatttcccacgttatgtgcgaagccaagtgggaatccccttgcaagagatttggttttgcagttgcttgaaagaattttatctgtcaccaaagctcgttctatcttattgaatggtgctgttagaaagggggaacgcctagttccccctgtttcatttgacttgttcatgagagccacatttccggtttctggtgctcgggtgaaggctacagaaaggtttgaagtagcttatcgaacaatcaaggagttggctcttgccggttctcctggctctaaaactgtgaaacaagcatcacagcaacttttacctttgtgtgcaaaagcaatgcaagaaaacaatgcagagctcaccagggaggctgttgatgtgttcatttggtgcttgacacaaaatgcagagtcctacaagcagtgggaaagaatttatcctgaaaatactgaagccagtgttgctgtcctgagcaaaattgtgattgattggaaggatgtgtctcctaagctcagttctgaagctctcaaggcaacagtgaagaacttgaaggctaagaatgaggcagcgctggagtcagcaacagatgctggaaagcaggcatctatcaagaagcagacaagcactgcaagacttgagcaggggtcagagcagctgctcggaggccggcctggccctgccctgggtgtgctcgccactgtcgcagagtgctcagtggaacccgcggcacaaactacaaagggacctgactcgaatggcagctcgtcacctctcccacctgtcctccccagcgtctgcttccctcctcggccccgagccatggcgccctgcgcgtccccgtccgccctcgcgctctccgccagcacgcgggtcagcagcttcccactgacgctgcgcccgcggccgcggccggaggcgcgtgtgccgcgcgcgcccggcggcgcccagctccgcccggcgaccgcgtgctcttggccgcgccccttgctgcccgagctcgcgccggcgttccctcgtgccggcgcccgcagcgccggcagaccgcagccgctgttccggccccgcgcaatgatgacgacgtctcagatcgccagctgcgccttcaccgtgggcacggtcgccgtcctccccttctacacgctcatggtcgtcgcccccaacgccgacatcaccaaacgcacggtggagagcagcgccccctacgtcgccctaggcctcctctacgcctacctgctctacctgtcttggacccccgacacccttcgcgccatgttcgcgagcaagtactggctccccgaggtactgctgcagcaccatttgctgaaacagttacgcgctctctgaatgtgtctgctgctgttaaagattaagctgctgctaataggaatgggatgcactttgcagctgccgggcatcgtcaggatgttcgcgagcgagatgaccgtcgcctccgcatggatccacctcctagcagtcgatctcttcgcggcgaggcaggtctaccacgacggtctcaagaacaacatcgagaccaggcattcggtctcgctgtgcctgctcttctgcccggtcgggatcctggctcatgtggtaaccaaggtattggcaggggcagctggccgctcacattgatgattggaattgggtggttgtatctaggattcccgttttgtttagctggtggagtttatgagatctggatatgaataaagcttgttcaaggcactgattctttca

SEQ ID NO: 148784 - DNA, 2293 bp, Zea Mays
ctctcacagtcacagcatccttccttgcttctcgtctcgtcgcctctcggagatcagaaagagaacaccggacacctagcctgcgcccttgccttccctccgcgcgcgcgtgctatctatggcgatggaagacgtcgcgggtgcctcctcctcctcggtggcggccgccgcctccgaccccacgcacggctggcagacggtgtcgtaccccaagcgccaccgcaagcaggcgcatcagccaccccgcgccatggctcccgatctggcgctgcaggccaacggcaaaggctccggtgtcttcgacgccgtcgagaagcgctcccaggagcgccaccgcgcgctgcagcagcagctcgcatccagggcggccgacctcgacgacgcgcggatcgccccggtcacaggcggcgcttactccgacgactccgactccgacgaggccaccgccccgcgccaggtgggggaggtgaagaagcctaagaagcctaaaaagcctaaggtgacggtcgccgaggctgccgccctgatcgacgccgagaacctcgcagcgcacctcgtcgagatctcgtcatcatacgagaatcaacaggacattcaactcatgaggtttgctgattactttggccgggcatttgtagctgtaagcgcatcccaatttgcatgggcaaagatgttcaaggaatcaacagtgtctaagatggttgacatcccactgtgccatattcctgaggctgtcatcaagactgcgagtgattggatcagtcaaagatcttatgatgccctgggagactttgttttgtggtgtatagatagcatcatgtctgaattgtcaggcccatcagcaggacctaagggttcaaagaaggttgcccaacagtctccaagggcccaggttgcaatctttgttgttcttgccatgactttaagaagaaagcctgatgtacttgtaaatgttatgccaaagataatgggaaacaataaatatcttggacaggaaaagcttcccatcattgtctggtttattgctcaggcatctcaaggtgacctagtgactggcatgttttgctgggctcattttctatttcccacgttatgtgcgaagccaagtgggaatccccttgcaagagatttggttttgcagttgcttgaaagaattttatctgtcaccaaagctcgttctatcttattgaatggtgctgttagaaagggggaacgcctagttccccctgtttcatttgacttgttcatgagagccacatttccggtttctggtgctcgggtgaaggctacagaaaggtttgaagtagcttatcgaacaatcaaggagttggctcttgccggttctcctggctctaaaactgtgaaacaagcatcacagcaacttttacctttgtgtgcaaaagcaatgcaagaaaacaatgcagagctcaccagggaggctgttgatgtgttcatttggtgcttgacacaaaatgcagagtcctacaagcagtgggaaagaatttatcctgaaaatactgaagccagtgttgctgtcctgagcaaaattgtgattgattggaaggatgtgtctcctaagctcagttctgaagctctcaaggcaacagtgaagaacttgaaggctaagaatgaggcagcgctggagtcagcaacagatgctggaaagcaggcatctatcaagaagcagacaagcactgcaaggtgatccttggaaagctgacgcgcagttccacctgcctgaagagcagccttgtgggcatcgccctcgcagttgcagctagtctcgtgctatcatctcccgacatggaccttccgctcgagtgggagaagatccaggcgatggtctcatcgcacctgtcgttctgaacatacctgtccaggatctccagacgtgggtggatctaagtcatggatggctgactcagcagtgaagagagctcaacgggtggtgagaataaggaggggggggggtggataggtggtagaaccgaaaggttacagttttcatgagtcgccgttttttcccgcgcttcctccagcagcagcggtgcatggtaggagggagatgcagtagtcgactttgcagagagttggtttaatcggtagactggtgggtgcgaagaaggttgagtcaaatggctcgaccagaggattaacaccttttgcttttctctttgtgcatctgagatgatgttggcaaacagttttggttatctagaatcttgaatcgtattccgtgatgtgtgcttgtcggctacatgtatctgttgcgttgatatctgcttaaattgtg

SEQ ID NO: 148785 - DNA, 608 bp, Zea Mays
atggaaggtgttcttagccatcaactgaagcaatctgtgattgatggtaacaaagttgtgctaagtgtctccaatgctgatacaaaggttgacgatgctgaatttgaagaaaatgaagtctatgcaatcgatattgtcaccagcactggggaggggaagcccaagttattggatgagaatagaccactatctacaaaagggctgtagacaagaactataacctgaaaatgaaagcatcaaggtttattttcaatgaaatcagccagaagttcccaaccatgcccttcactgctagggcatcagaagagaagcgtgcacgcttaggcttggtggaatgcatgaaccatgagctattgcagctgtaccctggacttcatgagaagccaggagtgttcagaactttagccatcactgaaatatccaaagttggactgaacaatatctacctaggggagccttatctaactgtcccctaccgtggtgagctccatcatttgtactgccttgctgcgttcatgagtcgagcgtggatccctggatcgagccacgcactcatgctcatgcagttgccaacccctcaagagtatgcttcgttctacatcccttga

SEQ ID NO: 148786 - DNA, 717 bp, Zea Mays
atggaaggtgttcttagccatcaactgaagcaatctgtgattgatggtaacaaagttgtgctaagtgtctccaatgctgatacaaaggttgacgatgctgaatttgaagaaaatgaagtctatgcaatcgatattgtcaccagcactggggaggggaagctatcaaaagactgggtgaaacatattcagcaggagtggaaagtagttgttgtttatgattgcaaaattgtggaaggtgttcttagccatcaactgaagcaacctgtgattgatggtaacaaagttgtgctaagtgtgtccaatgctgatacaaaggttgatggtgctgaatttgaagaaaatgaagtctatgcactcgatattgtcaccagcactggggaggggaagcttatggactgcaatagggcatcagaagagaagcgtgcacgcttaggcttggtggaatgcatgaaccatgagctattgcagctgtaccctggacttcatgagaagccaggagtgttcagaactttagccatcactgaaatatccaaagttggactgaacaatatctacctaggggagccttatctaactgtcccctaccgtggtgagctccatcatttgtactgccttgctgcgttcatgagtcgagcgtggatccctggatcgagccacgcactcatgctcatgcagttgccaacccctcaagagtatgcttcgttctacatcccttga

SEQ ID NO: 148787 - DNA, 560 bp, Zea Mays
ccatctcccgcctaagatgaccaaaattcccctcctaccttatcctctcggctgcccacccccgacctctgggaaacccggaatctaagtccgagccgccggtaccagtcgctcccgaaaccctagcctcgacggtgatggcagcggcggcagtgaggctggttaaggagcgtgagaggaagaatcaggtagcgccaccggcatctccattaatggaggagcccgtgtggcaggaggaaaagcagcgtaagataaggaagcacggggacgccgcactggtggttccatcgccgctgactcctgatgcggcccaaaacttgcggatggaagccaagatgatggctgagggggcgacggtgaggaagaagcagaggcggccgaatgcggggcaggagcaatccggcgagccactattttcaattgatgtccatccacagggaggggaagaagctactgatggtggtggcattggcgtcatggtcactcagtgtgtcaagaggagcaaaagcaagaactcccaggttttgaagacgcagcagacactgccccaagttatttag

SEQ ID NO: 148788 - DNA, 1858 bp, Zea Mays
atatcggcggacgaggggcgtggcctgccccttttgctcctgtcgccgctttgggtcggggtttaagcgagtgttcagggaggccgggacggaggcgacgacgacggacggtgccggcgtcggaggagaagaaagaacaagtagccagctctcgtatatgccttcttgccccatctccgatctggtcgtcgtagcgctcatcgcccccgtcgtcgccggcctcctcctcctcctcctccgctccctcgcctgctccagccgatctatgcgcaaggggctcaacggatggaacaaatcctcgtcgatgctcagggacgggttcggggtcaagtattccggattcctccacatacggccgtgcggtttctgtagaggagactgacggattcgtcctcaaggccgtgccgtttctgtagaggagactgacggattcgaccgatttgcgctcgtctccgttatatttttgcgccagagtttttttgttttttttcttcagaagcttttccccgtagttttggctggagttctccccggcagaggagatacaagagacatggccccgttgaaccaccagcagcatgttctcctcaagaaggccctggcgaagaaacccaaagctaagaggatgtccaggtttggccttaaaccctccgctgcagccctcctgaagtcccggccgcagcagccggcgcctgccccggcccagccgaggcgccgcgtccgggttctcttcgaggatcctgacgccacggactcggactccgacgacgaggaggccggcgcctctacgtgcccggcgaaggccaagcgcttctccttcgagacgttcgtcggcaaggtcccagccaggccggtccttccggcggccgctgtcgccgcgtgcgccagtggcggggccccggagagctaccgcggagtgaggctccgcaagtggggcaagtgggcggcggagatccgcaacccgttcacgggcaagaggcagtggcttggcaccttcgacacggccggcgcggcctccgcagcctacctatccgcttcccggagcttcgccgacgagaagcgccgccgccgcgggcagcctgtgccctcttcctcaccagttccttcggcaagcgccaccccgacggcctcctcttcgtcgtccacctcgactgctccgttcgcgcacccgtcgccgtcgtctgttcttggacccgccaccaaggaggcgccgctgaacccgcagtccccggagctggtcgcgacaccaacgctcgtcctgccgtccgatgagtccgcggagctgccggacgacccggagttctaccaggaccttctccgcggcctgcagctgccagacatcagcccgatggacttccgtgccgggcttgacgctctggacgtctccgatgcgcccttcggcctggacgatgagcaggacctgctgcttggggacttcggggacgaggaactggagatcgacctcgacctcgacgatatcaacgacgtcttcccggagatgcctggctgcgacctcggccgcggcatggacgatttcctgcaaaccgttgatttctgcgtgtgaattaagtcagtgccttaatatgttagggttgatggtttgataagcgtgcttggaaggggggattgtcttgggtttttccctcgggcatttcagtctgctcgggcccaagatttctcttcttcccaaacagcacattagcttccggagaggtaattttgataggttacattatgttaagttatagtggttgtgttttttctgttatttggtaatgcttgtcaagacattatgaacaagtcattgagctgttactattggtgacgactactgtgcaagagagaagcttcttcgtga

SEQ ID NO: 148789 - DNA, 619 bp, Zea Mays
ttcctccagtgcactgctgttggcgcaacgaagcttgcttctacgagaggatatagagaggaagaacagctcgtccgagaccatgaagagcagcccacacctggtgctgatcctgtgcctccaggccgctctggtcatgggcgtcttcgccgctttggctaaagaaaatgccctggttgagagcaaggccatcgacatcaacccggggcagctcaagtgctgcaccaactgcaacttctccttctcggggctctacacctgcgacgacgtcaaaaaggactgcgaccccgtctgcaagaagtgcgtcgtcgccgtgcacgcctcctactcgggcaacaacaagttcaggtgcaccgacaccttcctcggcatgtgcggccccaagtgctagctagagaggaagaacgcgcgctgctgctagctgctatagcttcgttcttccgccgccggccggccgccggccggtgcatggttcacgtactgtgtgttgtgctactacgtactggcttcttgtgtgttcggttcttgttgttctctcgacagtgcaccttgcgcgccaacaataaaccgttgtttgccatgaataaatagtgctatgaagcactaccgaaatcaatag

SEQ ID NO: 148790 - DNA, 382 bp, Zea Mays
acaaaaatacaaaatatgggccgttttaggtgcacccgggccctctctttctctccgtccgccgatacgcgggccgcgtgcttcaggaatcaggagaccatacacgtccgttctaatcgtccccacgggcgtcggcgcggccgtcgggggcttcgccggcgacgcccttccggttgcgcgggccgtcgattgcatcggcaactgtataatgtatctcacccaaacgtgctgaacgctgcgatgctgtactgctcgatgtccgataaacgttgcagggtacgcccttgacaggttctcctgggagtgggacctgggcactccagcctgttcaccagaacatggtaggcttggtgttggactctggaacgaagacttctcgctg

SEQ ID NO: 148791 - DNA, 662 bp, Zea Mays
tgcaagatatagtagtattgcttacagcatttcaaaatatgattacagatcctccccttgtttggcagaaatacttctaacctttgctatgtttctcatctcaccaaaatgtgtcaaactaactgaaacaaatatcacgaacgaagggcctcgtccgttgtttgtctggatgaagcaagcaactctttgaactgtgctaatgccttctctgttatttgcttaaacggtatgcgctttatcacatgggctccaaagaagtataacagggcatctgttgcagtttccgtgttgatgcctctagcctggaagtagaagagctcgtttggatcaagctcaccactgatggcggcaccatgagtacacttcacatcatcagcaataatctgaaggttcggcttgacattaacaagtgcctttggtgataggataaggcacttggtttcttgccccgcatcagtttgctgtgcatacctgtgaatcaagactaccacatcattaggacacaaatatagaattgcagcttcagatatagctgtgtgtcatgactcatgagtaaaacatagattttggacatcctaggaattatataattgcatctatgtatcaccgatatgcgatacggtgacacactgatacaggtacggtatgtgatacatcgtttg

SEQ ID NO: 148792 - DNA, 1352 bp, Zea Mays
gactgtgttcaacggtgtgcccttggctccccctcccctaccactgtagccgatttaggggctacagtgcgcccctaaatccttcaccggcttcctcctcctcctctcccctcccgattccttctctctcccgctaaatggatgggcacgctacgccggatttctcccccgcggtcggttcgttgggccacacaatcgcgcggtcggaaaactccgcggagggcaaaggaggcgaagcaagggcgacgtatccgccgccggagaaggtagccgtcgatccgcttcattggagcttcaaggtccacccgcgatgagcaaagcaggcggtcgatccggcgcggcggccgggtatggcggccgcggagcagctgaaggagctgggggagaagctgcaggcggtggtgccggctcctgcggacgaactcgccaagctcctcgagatgacggaggaaaaggtggggcggatcttcgtcggcgggctgtcgtggaacaccacggagcgcacgctcgagcgcaccttcggtcagtacggcaaggtcatcgaggctcagtcttacaatttcattctaatagcagctgctgattcacagagactgcagtcagttcaatttctgcatgttaggaagttagcaaagttgctggaaaagaaattcactaatcatttgagctcactgaggtttgatatagggggaaccgctgtagaccgtggaggtatagggggagagagaacgctgacgtggcaccttatgcttgaatcgtcgaaggccaacgcggaacgacacggcgtgcaggtgatggcactgacgcgtgggcccacggatttcggacccgcgtgtcagtatgtatggtgcatggtgccattctggtctggtctggtctggagtctggacgtctcagccagccggccggtggctgtggctctggttcgaatgttcacaaggggtcaaggcgaggggccgagggcgttgccgctgcgggctgccggatgcggcgggcgttcacgtgagccgctcgccgccggcgccgggcgactcgttgttgacgctgcgcgcggctgtcagccagtctgtagccccacctcattcgatgcagaggcagagcgcgattcgttcgtggttacgtattttgattctacgattgattctagggagctgagacgccgtggacgacaatccatatcatcgtcttcacaggtgtctcgttctcgatcacccgcccaggacatagagattgcagtgttgtatcagcagatagattatcatcaatcatttttgaggcaacagatggagtatcagaggcagcacgctgagtaccggaagaaggacgggtactatttgaacctactggcctag

SEQ ID NO: 148793 - DNA, 877 bp, Zea Mays
gactgtgttcaacggtgtgcccttggctccccctcccctaccactgtagccgatttaggggctacagtgcgcccctaaatccttcaccggcttcctcctcctcctctcccctcccgattccttctctctcccgctaaatggatgggcacgctacgccggatttctcccccgcggtcggttcgttgggccacacaatcgcgcggtcggaaaactccgcggagggcaaaggaggcgaagcaagggcgacgtatccgccgccggagaaggtagccgtcgatccgcttcattggagcttcaaggtccacccgcgatgagcaaagcaggcggtcgatccggcgcggcggccgggtatggcggccgcggagcagctgaaggagctgggggagaagctgcaggcggtggtgccggctcctgcggacgaactcgccaagctcctcgagatgacggaggaaaaggtggggcggatcttcgtcggcgggctgtcgtggaacaccacggagcgcacgctcgagcgcaccttcggtcagtacggcaaggtcatcgaggctcaggtacagcaaaggctctggcctgccgtgatgcttgtaatttgaggggattggggttagtttgtgttagcaacgttatgagtttggggcttgtttggatgcagtaggcgcagaaataaatgatttctgctcgatctgggggaaacagatgattaaagattaaactgttgtaacttgggtatgtttaatttggttaccaggaactatagagtttcattgaattgttaccagttgcatgctgtcaccattttgattatgtttccagtttccaccattcctagttataggtaactgaaatgtgtctcatgacttcagtaaagttattgtta

SEQ ID NO: 148794 - DNA, 1844 bp, Zea Mays
caaagcaccggaagacgaaacggcacggaaccaggagtggatcaaagcacatggaagtcgaaacggcacgactgctgagcgaggacgccgaggagtcgagttatatatcatctgccgtgccgagccgaactgaaccatctttccggtttccacttccacggttccaccaaacagtcgtcagcgatgtcggcgccacagccggctggcaagtaccaagacgacgagcctctggagcgttcgaccgtaccggcgcaggcccccacagccaacggcgggctggccctgagcacgcagtgcgagttcccggccatcgcgaggagcgcgtcccgggacagattcgcggtgctcgtgcacgccaaggcgccgtccgacgtggcgcgcgctccgctcgacctcgtcaccgtgctcgacgtcagctccagcatgaagggccagaagctggagctcctgaagcaggccatgtgcttcgtcatcgaccagctcagtccaatcgaccgcctatccgtcgtcaccttctcgaacgacgccatccgcctgacccgcctcaatcgcatgtcggacttgggaaaggcctgcgcgaagagggccgtgttgtcgcttggtgtccggtacagtaccaacatcggtagcggcctccgtgtgggcgcccaggtgctagccggtcgcagggagaagaacgtcgtggccgggatgattcttctctcggacggtcaagacaactccggctgctggccgaccgtccttgtgccgccctcgttcacgagtgccggcggcggtggctggcccgcgccgatccacactttcgggttcggtaccgaccacgacgccgcggcgatgcacgccatcgcggaggccacgggcggcaccttctccttcgtcggcaatgaggcggcgatccagagctcgttcgcgcgctgcgtcggcgggctcctctcggtggccgtgcaggaggcgcgcgtcgccgtcacgtgcctgcaccagggcgtccggatccaggaggtcaagtcgggcgcctacgtcagccacttgggcgccgacggcatcgctgccaccatcgacgtcggcgagctctacgaaggagaggaaaggcggttcctggtgctcgtgtacgtgccgagggtccggtcgacggaggaggtcacccgcctcgtcaaggcgaggtgcacctaccgagagaccgcgacgggcctggcgcgccacgtcgccgcgcccgccgccgtggtgcagaggccgctggagctgacgacgctgcccgctccgtccgtggacgtggagcgggagcgcgtccgcctcgcggcgaccgaggacatcgcggccgcccgggtagccgccgacgacgggcagaacgccggcgccgtgcggatcctcgagtcccggctcagggccgtggaactgtcggcgccgggggaccccacgtgcgaggcgatcaaggaggagctgcgcgacctcagcgcccgcgtcggcgaccgggcggagtaccagaagacggggcgcgcgtgtatgctggttggcatgagctcgcacgcgcagcagcgcgcctcggggatggacgtggaggcgacgagcaaggctagcgcgtacctgactcccaagatggaggagatggtggatctctcgcgtgagagtgagagcaccaggaagcagaagcagccagtcaaacaggccaaggtagaagaagtgtaagggacgatcacgttcgtttcgtattctggtcgagctaatcaagtcttcaactatccatgccctctcctgtatgcgtagggctttcagtttgatctaccccaagtctgcagctcgttgctgatgtcgttgcaataaacttggcatgtcatgttatcggaatc

SEQ ID NO: 148795 - DNA, 627 bp, Zea Mays
cttttacctcttgtagtctcactatttcaggttctgcttcaaaataccttataggtaccctttggcgaagacagtgccactgatgtgtgctggattcaccgtatatacgctcatgattcggcacagcatgaaccaaccaagtaaatcacttggcgtaggcgtaattggactgggtggattgggccacatggacttcaaatttgggaaggcattttggttgaaggtcaccgtttttagacgagtgaatcgaagagagctcaagccattaatctcctcggcgcagatacttttgtcatatcatttgacgagaaatagatggagtttgacactgttgtgggtaaccacccattcgatccctacccatcgcttctgaaagctggtggtatattgacgatggttggctttccaagtgaactcaacgtgcatcttgtaagcctgattttcggtagtgcttaattccatgcgcaaatttagtcagcccattatttaagaaaaataaaatagattttacacattcctttctagcagtggaggtggaggaaccaatgggatccatgaaatgctgaacttttgtgcatcaaacaaaatatatccaaagatcgaggtcattaaaatggacaatatcaa

SEQ ID NO: 148796 - DNA, 654 bp, Zea Mays
ttaaatccatgtcggggctttccttccctaggctattagccacttgatgccaaacaaggcccaagatctggcctcatcactgggtttgcttcaaggggcattttgcccgttgcagtgacgatcagctgcagttctaggcgctcgacaagccgaagcaccacaacgtgaaggtggcgaggggatgggagacgcctacgcgaagcgggtgctgctcactgcagctggtgacacagctggtaaacagtactcatgccatgccttgtgtactacgcaattcacagaaccagaaaagtgtgtgcaagaaaggatcagaaaaggagtgtgctaatagttcctacgacacacatgatattgtgataggatcagcttggttggactacctgagctgctaaacgtgatcagcttggctgtctgagctcccaatccacagtcttgatccttttcgctattcatatgtatactagatcagtggtttttattttcttctcatataatatgagaaaagttatttatttttactttattctgcttacattatataacaagaaaatgtggagtgttgtttacaagttcaccttgatcttaatttgactgcttatgtacgacaacaaatagtcatgttccaaaatcatgcatttctggtcatgataagtg

SEQ ID NO: 148797 - DNA, 333 bp, Zea Mays
ttgacacaggttgtagaaaataaagtttctccccctttaatagtcattgccccagctggtcatgtggagtcagttcggaaatgtctggtaaagaatgactattttggttttgacactcaaaaggtgtgggtgctggaagagctggagcttccagttgtcagtatatgctcggagggaaacagaaaaaaagttctgatgaagtctccctgggagataataaaaaagccaacaggttctggagcaatcttcagcttactgttatcaaacaaaattttggaaaccctcaatgaaatgggtgtacagtaaacacaggtacgatcatgtgccagtcgt

SEQ ID NO: 148798 - DNA, 735 bp, Zea Mays
agcagcatcacaaaagtaaagcaaaattattatttccagacaaacgagaaagcaataatctgttgcgtttataagaatcagaccatgcaattacttatctctcctctaaccccaattttgggcactgcaaaggcataacaatcacgatgttctataccaaaacggcttcgaaaccatgtttcagaaccaaatccgctaacgatcggtgggcagcgagtaggtccataccatgcgggcggcgcgcatctccatctggaaggcctcctgcgagttgcgcactggcggatcgttgacctaaccatggcattccgagctagggttagtgcggagtgcttcaggctgccagattcgagggtgaacggaggcgcacggacatactcgggcgatgttgatgagggaggagaaattgtcgacgaggctggagacgtcggcgtccgccttctgcagcagcgacttctgcttctgcaccgcggccgccgcggccgcggccgtcgggcccggggccgagccggggccgccgcctgctttgctcattgcgggtgggtgccgcttcgacctggctgccgctgcgccaaagagtcgccaaccagcatggcattgggcattggcagcatccagcatccgtgccaaagagtcgccgctgctgggagcctgcgtcgcctgggccgcacccccacgccatcggcttgggccgccgctgaacctagtccccttgggccgccgctgcccattggc

SEQ ID NO: 148799 - DNA, 1938 bp, Zea Mays
ttaccattcttttcaactggacttcctaaagaagtatcatttgagaaagatgcttcaaggactgatgttggacttggctgattgggctcattgtttagcgatgtagcagaagaatcaacatcttgttcaccctcatttctgaaaatcaggtgattgctcattggagaatatacaatgcgctggattgatgcagtcaacatttccattgcagcgtaagggtgctgatgcaccagagtagttgctacattgggagattgaagtgctcatgtcagttgcaagggcagaaatgagctcttgcagcacaggcacagtcaattttcctgaaggtgaatcatttggtgtacactcgatcctgtccgacatgccaagctcattgatttttgctttcaacagcctgctaaattcatctttctcagaagtagacataacacaaggtgaagcttcgacacatcctttttcaggagccggcactcgtgtgcgagttgtctcatgtgctagcctacttggggatccgccctttgatagattgcttcgcggagacgaagctctggccacgggctttgtagatgatctagaagcaactgcaactgcatttctgtcatctctgctactgattgctgcatcatgccccaccttcctccctggtccccttttatgtgcagatccattgcttaaaatcctacttgtggatgataatccattttggctgttcaaatctctgcgtgtcattctcccttgcccaacgatccgtcccgcgagctctcttatcggaccagaaccaccgtgtgcgaccttcctagtagcagataccgattcacgagcgcgtccaaccaggcgcgtcgatccagccaagcccccaggctctgtaatcccagaaccagaaacctccggccgagtaggtgttgctcgtttgcgcaacgacctctcgtctccagtttgaacggcagcaccgctcgatctaaccctggcacaagtgcgcactacctcatctcttactccactctcattgtgcttggcatccatatcagagccccgtttgctcctgttcccatccccaaaatccattcttggcaacactatcgtactggtactggtcgctgcatcggcgttgctgttaccggaaaaatggccgtgcctacgcgggacagcagcggtgtctgtctccgcaggaagaccaggaggctgtacctgtacatgtacccgtgcggaacgctcctccaagagcaagctgtcggagcgagataggaagtcgtcggccattctcgagccttgaagcaaggcgctggcgtggccatccctgcggtgctgcggggaagagcaagcgtaggcgagggccagcctggcgcttgcccgtgagccggcgcgcgcgcccgggtccagcagcttcgccgcggccgcgtgcacgagccgggtccgcctcgggctccgcgccggcaggtcggccccgtggtggctcctcgccgccggcgcgggcgcgggcgcgggagggcgacggctgcgggtcttaggcagcaccagcacgaccgccgagtcggcgccgtccgcgcgcgacgcctccaccttcctctgcttctgcggcctcggcggcgcgggccaggactccaggcccatgaggcgcgcgacgaggcccggggcggcggcatcggacgggcgcggcggtggcggcggcggcggcggggaagcgggaggtggcgggcacgggggcctgcgtggggaggaggaggagcggagggacgaggggagcaggcggcgcggggagaagagcctgcgcttgcgggcgaggcggcggtgccagtcgaggaggtggaagagcacgccgccgccgccgccgccggggaacggcggcggcttcttctccactatggcgaggctgctgctgctgctcataccgtctccgtctccgtgccaagtcggcctcccgtctccgtgccaggccca

SEQ ID NO: 148800 - DNA, 3584 bp, Zea Mays
aattctcttcagaattcttgtcggtcatttaaaattttgtctcacaacatcagaggcattaactctgactccaagtggaactctctgcggaacaatattttggaatccaaatgtgacattatttgtattcaggaaacaaaaaaagaatccttcgatgacgcttatattcgtctcttctgcaatcatcattttgataaatttgcccttggcccttctattggtgcctctggaggattcatcaccatctggaaaagctccctctttgcggctgaggtagttgatcaaaaccagtttgggcacaccattcgtttccaatccaaccttaatgggcaaatctggtggctctccaacatttatgccccttgttctcctcatggtagagaagattttcttgcctggttttctaaccttcaaattgatgacgacaaactttggattttccttagggatttcaacatgattaggttccctgaaaatcgtaacaagcagggtggtgaccctatcagaatgctcaattttaatgcggcaatcagtcagctgggtttacaagaaattcctcttaaagggcaagcattcacttggtctaatatgcagcgtcatcctttgcttgaaaagctggattggtgcttcgtctctcctgtctggtctaccatattcccggccacctctgccttttccctggccaggatcgcctcggatcatgttccctgggttgtcaacattcaatccaacgttcccaagccgcccattttcagatttgagaactattggcttcagcttgaggactttcatttcaaattccaagattcctgggaacaaaatctctttcagcctgatcctgcaaaacggcttatggccaaatttaaaagagcaagaaaagtgatcaatgggtggcagaaatctttacccaatctagctaagttgattgttaagacagagttgattattcaattgatggattttattgaggaaagcagagatctaacaattcaagaatggaactttaagcactctctagtccaacacctgcagggtcttctctccaatcagcgtgcctattggaagcaaagaggccaaatcaaatgggcctcgttgggggatgcgggcacaaaaaattttcatgctaatgccacttccaaacatcgtcacaacaatatcttgtctctgtcttgcgacaatggctcggtggctgtctctcataaagacaaagaggaggttctgtttcaagcctttaaaaatcgattagggtcttctcagccaacatctatggttttcaatctttctgaattgattcagtctgctcataacctctctacactggatttgcctttctctcgcagcgagatagatcagatcatcagaaaccttccttccaataaagccccaggtcctgatggttttaatacggattttgtaaaaaatgttggtcggtaattgcatcagacttctatgagctttgtgataaattttatgagggatcaatctgcttagaaagcatcaatggttcttatgtgactctcatccctaagcatagtacgcctacttcagtgggggattatagaccgattcctctcctcaatacaagcatgaaaatcctgacgaagcttctggccaatagactacagctggttattactagtctaattcatcagaatcaatatggtttcctgaaggggaggacaattcaagattgtcttgcatgggcctttgaatacatctctatttgtcataaatcaggaaaggaaatggtcatcctaaaattggactttgagaaggcctttgataaactagaacatgctgccatccttgatattctgaaacataagggctttggagacagatggcttcactggatttcattgattcttggatcgggcacatcacaggttcttttgaatggggttccgggcagacgctttcactgcaggcgtggagttaggcaaggggaccctttgtccccccttctctttgtcttagctgctgatcttcttcagtcaattatcaacaaggcaaaggattgtggcatcctcaagctcccgatcccaacctcctgtggattcgacttcccggttattcaatacgcagatgatacaatcctaattctggaagcctgccctagacagctcttctttcttaaagcaacgcttaattcttttgctgattctacagggctccatgtgaattataacaaatctaacatttaccccatcaatgtttcggagcagaaaatggctttgctagcaaatacattccactgcaaggtcgggactttgcccttcacgtacctgggtcttcctttggggtttaaaaaacccaacttggaagctttccttcctctcattcagaagattgaaaaaagactagctgcaacctctatttttctatctcaggctggcagactccaaatggtcaatgcggtattttcttctcttccaacctattacatgtgcaccctgaaactcccgaaaactgtgatcaatcagattgataagcttcgacgacattgtctctggagaggggcagatataaatgcaaaaaaacctccccaagttgcatggaaatcggtttgcaggacaaaaattcaagggggtcttggagtcattaaccttgagtggcagaataaagctctccttatgaagtgtctacacaaattctttaacagagtcaatatcccatgggtcaacatcatctgggacactcattacaacaattctctgccctcatctagactagtgggctcgttttggtggaaagatattctcaaaatccatggctcattcaaggaaattgcccaagtgcaaattggaaatggtaagtctacgcttctctagcatgatcgatggaatgggcaatgtttatctgaaaagttcccggagctctggtcttttgcctcggtcaaagagattaacatccatcaagctcgattagcttccccgaatgaaatgtttcatacccccctttctgctgaagcgttcgagcaacttctccaacttcaagacacccttggtaatattcagttgcttgatcacaatgatatttggagatgcagtgcctcctccactcggttttcctcttagtcggtttatgcacacctgactgtctcccgtcaaacgctccctctatttgtttggttatggaaatctaaatgccagcccaagcacaaagtcttcttctggctgctgcttaaaaatcgattgaatactcgctccattctcaggcgtcgcgcaatgccataagactccttcacctgcgataattgtatcctccagattgaagaaacatctatccatctcttcttcaggtgcaactttgctaagagatgttggcttcttttaggcctccttccgccatgtgctacggatcttctgcataccctattgagaattagaagacgtttgcacgtcccttggaggcttgaagctattatcatcatgacgtggtgcatttggaggtgcagaaataattggaccttcaatgaaattcctccttcggttcctgagtgtaaggctatgtttaggagtgaaattgctatgttatgccatcgcatcaagcctgctcttaaagaagacattacatcttggcta

SEQ ID NO: 148801 - DNA, 633 bp, Zea Mays
gcgattaatatatctattcaatccattaataaaaaatagtgaactagataacggttactgattcaactaggattccaagccaacgttgatgattcttgtgcaggccttctgtcgagcacttggtaaatatcacgcggctagcttcgtattcatccgacgcttggaatttcttgacgacgcatgaaacgacgacgaccttcgattgaagtctggagcgagctggtgaggtggggatcgagcaggggataacgggttcgacaactcgacggcagcgtaacaccaccatgggatggaggcaaactgactacgatagcctaggacgggtgcggaggctgacagcaggggacttcacgatgggtagtgagcctcaatgacgaacgacgcgacgacgaacgacgacaaccgacgaggtcggcgatgcgatggggattaaagccgaacgaaccgagagggcgcgctagcgagcaggaaacaggacgcgcggcgaggctcgacgtggaaactcgacgcgccgtggcgagcagagaggaagtgctggtgggaactcgatcaggccgacatcgagctgcaaaaatgaacaaggcggcgtccatggccaaagcgagcatagccgaatatgatcgagctggggct

SEQ ID NO: 148802 - DNA, 298 bp, Zea Mays
ggaaaatattttttgtgactctaaaataaaatttccgagtcaacaatttaacatttgtacatacgatggctcgaccgaacaatcatatcctgaagaaaacgtatacaaagtaatactccctctgtttcgttttagttgtcgctggatagtacaaaatttgcactatccagcgataactaaaacgaaacggagggagtagcgtattagtgtaattgtagcctagagatgaatcgatagtatcttaatagcaaaaaaatacgaactgtgggcgaaagaaagagctgtttgaagaatatat

SEQ ID NO: 148803 - DNA, 567 bp, Zea Mays
gtagcatgtacttggtcttaaaatatactgtgatgttttaatttcccctacccactgcaggcgtatgcagaggaagcgaaaatgctgattaatgaagtaaacaatgcactatcatctttcttaacagtagacaaattggaaacattatactcaagggtttcagaattcccagttaagctaacagaatcatcgactttgttttgggagttatcttctgcaaaggagctggagggttttctccttgctgcggatggtgccaactttagcattccagagctgaacattcttaagcaacgttactcaaattgttgctcttgggtgagtcgtgctaagaacatactcggaaaactttatgctatgagtgactatcacaatgctgttgaggagttgacaggcattctgaaggaagcagaattactaggactattatcctatgcagttgatgaattgcctattgtggagaaagaactaaagaggtccttatgtaggaagcaagcatctgaggcacttgcaacagtaatgtcaatggaggtggttgaagaagttttaaaagaagctttgatgtaa

SEQ ID NO: 148804 - DNA, 1448 bp, Zea Mays
attaagaaagatatgactaaatatatttctcttaaattttctcgtcctcataaattccagaataaggacaagacgtcaagtcttgtgataatatttctaatttattcactaaattctaatcgatgcgaccacgtgccttgcggacccatgaggatatgagtatgacgcttttggtagtacgtactacgtactgacgtgggcggtaaattcaggctgcccgcctcctcgacgcgcttctgcttttccgggaagctgccggctggagcaaggagacacgccgagatccgcaccggccgcgcggcctctccaccggccgtacatgtggctcggccgcggcgcgatgcctggcagattcgccgaccgaggcaggcgccacgagaccccatctggcagtcgtcacgtacgtacgactacgagaaaagtcggcgccctgccactgcgtgtcaaaaccgcgtcgtcgccagcggctattaatacctccggcgagaccactcgccgttacaaccatcaggacgcggacgcggctcacatcaaacacccccttcagctgtgctcggtgctcactgccgcaaaaccacaaccacacagggaagcgcccagcgcccagcaccctttcaaatcaccacatccacgctcctccgttccatggccatgtcgagcagcgccagcaagaagcaagcccaggcccaggcccagaaggccgggcggaggcccccggcggtgtcgtcggccgcggccgcggacgcggacgcggagatgcagagggtgttctcgcgcatcgacgcggacggcgacgggcggatctcgccgtcggagctggcggcggtgtcgcgcgccatctccccgccggcgagctcctcgcacgggcggcgcgaggtggcggccatgatggacgagctggacacggaccgcgacggcttcgtggacctgggcgagttcagggcgttccacgcgcgcggcgttggcggcggcggggacgacggcgacgacgcggagctccgcgccgccttcgccgtgtacgacgccgacggcgacgggcgcatcacggcggccgagctgggcagcgtgctcgcccgcatcggcgaggggtgcagcgccgaggagtgccgccggatgatcgccggcgtcgacgccgacggcgacggctgcgtcgggttcgaggagttcaagatcatgatgcgcggcccccagccccagccccagcctcagcctcaggccggcgccggagtgacagccgtgccggacaaggccaagaaggagtgacgggtgtaggtgtaggtgtactcatctgggcatcagtcggggggaagggatcgagttcctctgcctcttctgttgctttcacctagtctggactggaggaatggaaatactcaacttcctgcataagactacttattatctacagtattattatgtatattgtggcgtgtccgatttcctgagcc

SEQ ID NO: 148805 - DNA, 242 bp, Zea Mays
cgaacggacaagttttctgtcgtttcactatgtataaatacacaccatcattgaatgaaaaagttacgcatcatttgcttcagtcccttctttttctaacagcgctgcagcggaggatgttcgctgcgtcttctacgcatttgctctgtttgtgctgtggtcgtcttccccgtatatggtttgtgtattgtcccttatcgataataataaataaaatcaggctttacgtctatttactgttg

SEQ ID NO: 148806 - DNA, 757 bp, Zea Mays
caacccacaccaccaaggagaaattgcaaagctctatacctgacctgccactagcgaagcatacttcgtcgacgtcgagcacactcttgcaattaatccaccgagttcggtttagtgttttactctcagacgtacgcataaatatagcatagcatcgacaataataatgtcgctcgtgagtcggcgcagcagcaacgtgttggaccccttctccctcgacctctggtgggaccccttcgacatgttccgctccatcgtcccgtcggcggcctcctccgggggttccgagaccgccgccttcgccaacgcccgcgtggactggaaggagacgcccgaggcgcacgtgttcaaggccgacctccccggcgtcaagaaggaggaggtcaaggtcgaggtggaggacggcaacgtgctcgtcatcagcggcaagcgcagcagggaggaggaggacaagaacgacaagtggcaccgcgtcgagcgcagcagcggccagttcgtgcggcgcttccgcctgcctgagaacgccaaggtggacgaggtgaaggcgggcctcgagaacggcgtgctcacggtcaccgtgcctaagacggaggtgaagaagcccgaggtgaaggctatcgagatctctggttgagcgtccgttggacgtcgattggagccccgttgtactgctactggtccgtggatgtcctgcatgttgcgcttgttaaggataaaatgatttcgtccacgtcagcaatccggaggaagaaacaca

SEQ ID NO: 148807 - DNA, 432 bp, Zea Mays
atggccgccgtcaggctcctaaagctaaacaagcagcccagggcgaagagcttgtggaccctcgtgcgccgcctgctcctcctccgcagaagccgcaagcagcagcagcagccggcggcggcggagcaggatagcgaaggagagaagagccacctgctgagccggagctctctggagcagctgcttgtcacgtcgtcgacggatggcgctgcctgccggtgcgccaagaagctcgggcagcctgtggcgccgcttcgcccggaggcggcggatgcggatgcggatgcggctgcgggtgcggcgtcgccgactggtggtgcgcaccgtggcgccgcgccggccgcgcaccggaggttcatgttcggcgggttccgccgacggctgctcatgcggaggccgtggcggccgatgctcgtcgccatcccggagtga

SEQ ID NO: 148808 - DNA, 545 bp, Zea Mays
aggaaaagagcgccaaggaagaatacaactaaaggttggtttcctaaagaagtgcctacatcatcacaggcagcacccaatattactcctccaagtgatgatgtgcctgcatcttcagagattgtgctcacaatgcctcctccgccaggagaggatgtgcttgcgtcttcacagatagtgcaaccaatgtctcctccaagcgaggttgtgcctacagaaccaatctctcctccaaaagacgcgtgaagaaggttgttcgttaaattacacctaggaagagctagacatatatgtattcttagggtgcatgttagttaggacagttatctgcaaaactgctaatgttagattaatgtatgtcagtttatttgattgtcagtttggacagttaactgcaaaactggtaatgtcatcagctattgggtgcatttgtctccaaaactggtaatgtcatcagctattgggtgcattatctgaaatatatagttgatgccttgatggcgtgcaatatagtttgagagaaaggagtgctatttcttctgtta

SEQ ID NO: 148809 - DNA, 225 bp, Zea Mays
atggagaacgacatcaccgccgccgagatcttcggcgtggtcgggatggagaacgacatcgccgccgccgagttctccggcatggtcgggatggaggacactgctgctacgccggtgtgccacggctcggcttgtccggttgtctgccacagcgaagaacctggaggatcaaaggttataattcctttgactaatacaacagcattagaaattctgtgttggtaa

SEQ ID NO: 148810 - DNA, 1790 bp, Zea Mays
ctcgctcgtcttctttcgccgcttccccgcgaatcccgccgcccggcttccggtctccgcttcccccgtacgcagtgggcaccatggacccttcggtctcctcgtcgcctctccggctctccgccggaacccgcgcgagccccgcccctaccccgaggccgcccagcctcgtcgtcgcggccggccgccaccagcccgcggccgccaccgccaccacccgcctccgcgccgtctcgccgtccccgcccccgccctcccccgtgggctcgttcggcttcgacgcgctcaaggagaccttctccgtggacgtggcggcggccggcgcgcgcccgctccgcgtcccgctcgccgcgcccttcaccatcgcgtcctcgcgcctcgccgcgctctccaacgtcgccgtgcgcgtcgagctccgcagcggcgccgtcggctggggcgaggcgcccgtgctgccctccgtcaccgccgaggaccagccggcggcgctcggcgccgcggcccgggcgtgcgccgcgctcgccgccgcccccgcggcgcccctcggcgccctgctgcaggacgttgccggtgtgctcccgggacacgccttcgcctcggccagagcaggagtggagatggcgctgattgacgcggttgctaatagcattcgcatacctctatggagattatttggaggagcatcagatagcgtgacaactgacatcacgattccaatcgtgaccccaaatgaagctgctcaattggctgcaaaataccgcggacaagggtttcaaactctaaagctcaaggttgggaagaacttgaattcagatatagaagttctgaaagctatacggcttgtccatccagattgctcgtttattttggatgccaatgagggatacacagcaaatcaagcaattgaggttctcgatagactaaatgaaatgggagtgacccctgtgctcttcgagcaaccagttcacagagatgattgggaaggtctccgagatgtcagcgctgtggccatggagaaatacaaggtcgctgttgctgctgatgagagctgtcggagtttgcttgatgctcagaaaataatacaagggaatattgcccatgttattaacatcaagttggcaaagttaggggttcttggagcccttgaaataattaatgctgcaagaaaatccaatactgctctgatgatcggtggcatggtcgagactaggattgctatgggctttgctggtcatttagctgctggccttggttgctttagtttcgttgacctggacacacctcttttactgtctgaagaccctgtgtatggtggctatgaagcctttggacctctgtacaagttcacaaatgcccgtggccatggtggtttccttcacttggacaacaatgatgcctcgaaatgaagctggttaatgattttgtctgtccttctggagcttcaccgaagcattgcagtgcattccacacaaatgcagtgttccactggacaaccatgacataaccaaaaatcaaacaagcgattgcaagcatatagccatacaggtacagcctgctgttgcgagtccagtcgggcctggaaccctggactgaattggtcagccagcctgtagatagatagatattcgtatggctgttcccgtcggctctgttgttttattttacccagatagatacagtattttagtgacttctgtgcaataaacgcatatggttgtaaatgtcactacatgcagccgtgccgtcccaagcttttgttgttctatcgttcggctttccttgattacgct

SEQ ID NO: 148811 - DNA, 223 bp, Zea Mays
ttttttttctgtttgtttgtcatcttgagggaaggagacctcagctagttccttgattcctacatgaaacccggaacagatcaaacctgtaaaaccttaaggtattattttgtattttttattcaggcagggaaaatggtgataaacacaacatattggttgaaattcataccgtaaatatccatttgatcaccctttgcttgatatccttactgtttgtcta

SEQ ID NO: 148812 - DNA, 2728 bp, Zea Mays
cttcctcgcttcctctttgctttccccctcatatcatatattcccctttcccccaaaatctaaataaaaatccccacccaaaaacccacggaggagacaagcacagcaagccaccctcccgcccgttcgtttcactcatggagccgctgccgtcggcaacggccgccggcgtgggggcccccggccctggtcccgggtaccccgagtccacggagtcttctccgcgcagccggggtggggattcgtgggacgagccctttccgtcctctgcagcggcggctgccggcggcgggggccggctccgcctgatgtgcagcttcgggggccggatcgtcccgcgcccgaccgataagtcgctctgctacctgggcggggagacccggatcgtggccgtggaccggcacgcgtcgctcgccgacgtccacgcgcgcctctcgcggtcgctgctgggcggtcgccccttcacgctcaagtaccagctacctaacgaggacctcgactccctcatctccgtctctacggacgaggacctcgacaacctcgtcgacgagtacgaccgcatcgccgcgacctcctccggcagcggatcctcgcgcacctcccggatccgcctcttcctcttccccgccacccccgagtcctcgtcctcgctcggctccctgctggacgactcttcgaagtccgagaactggttcgtcgacgccctcaacagcgccatctctggctccctcgacggcatcccgagagggatctccaccgactcagcttctgtcaactgccttctcggcctagaggacgactcctccgtgcactcccgcagcggcgtgaccaactcggctcccgcggaggaccagcgcgccagccagccgaagctcccggcgggcgccaccgccgtcgctgccgccgccggtgccgggaggcacccgcacgacgtccagtccgtgccagactcgccgatgctggataagaactcttcgttcgggtccacctcctcggccccgtcgctatcgaaccttccgcctatacgcgtgcggccggaggaccgcccgtcggacgcccgcatcatgcaacctaccgccgtggaggaccacttcgcgcagatggggatctccgagcagcagctgccgccgtacatgcaacatcaacagcaggtgccgatccctgccatgaccggcatgtcgccctctgaggcgtccagcagagtgttctctgacgatgataagtccgatcacggtggcggaggtcggaaagcacaacttctcaagcaggaggttccggcaattgttgatcccaccaacagagccgtctactataatgacagatctcctccggccgacttgaaacgagacatgccggtgggaacggaagctgccagctaccgcctccctgtatcagctccggacgctgcagctgccgctgcaacacaggtcccagctggatatgtccttgcccagatgcacgcgccacagcaacatccaccaccgcagcaacatttaccaccgcagcagccacagcaaccagctcctcagcagcagattgtttctgccggaaaccagcatttcatccacaacccggccactggcaccttcattccaatccagtcctattaccaccaccaccctgttccacagcaggcaccccagaccgtgccgaggcagcagcaggcacccgcattcgacccaaacacggggatgtactaccttcctatgcagcagaacgcacaccagccatacagcatgcctcctggcgcccaggccaccttgccaccacctcctcctacccttgttgacacagcgccaaagccgaccgtgccaatccctcagatggctgtaaggcctgaactgcaacaacagcctggcgtctatcgaacaacagctgccgccacgcctgctccagcgcccagcgcagctcctcctggatatgctgggatggcataccaccacatcattcagtcgcaccaccacccctcgccacagcctgtctcaaacatgatggctggcaactttggttacgagtacgctgatcctacgcgcccacaggtctactactcgcaggcggctgcagcacctccaacgttgccaccgcagtatcagcccatcgtctctcctgatgccggacaggccgaaaaacattgagcagaaccctgccccccccccccccccccccccccgcggtggtctatgttgcaaaatcctagaggcgtatttatatccatctgtcatcatttgctgttgcttactgcatgctgctacatgactccgcggcggagagtcgaaggtttgggatcgaaaaagagtatgcatccgaggtccgaggatgggttggaaacaagattttcaatcggatggttcttgtgttggtgaggcggtgaccatgctggatttagattggtgggggggggggggggagccaagtgtctggatccctgttccagtgtttttttttccttctccctctcttgttgttttgaataaaatatatataagtgtccaaaagaacctggcgaaaacgaagagctcgtcgtcatttgtgtagccatctgtatatttgatgtgatttgatctcatggatgtcattcaggttgaggtgcagataagtgtgttgttagcttgcgtgcagaaaccttgttcaagctaaataatatatatactccctacatcggtcccgttctgtactacttggatgtcgatgttgatatgtttattttttttgttttaatacattgact

SEQ ID NO: 148813 - DNA, 1946 bp, Zea Mays
cttcctcgcttcctctttgctttccccctcatatcatatattcccctttcccccaaaatctaaataaaaatccccacccaaaaacccacggaggagacaagcacagcaagccaccctcccgcccgttcgtttcactcatggagccgctgccgtcggcaacggccgccggcgtgggggcccccggccctggtcccgggtaccccgagtccacggagtcttctccgcgcagccggggtggggattcgtgggacgagccctttccgtcctctgcagcggcggctgccggcggcgggggccggctccgcctgatgtgcagcttcgggggccggatcgtcccgcgcccgaccgataagtcgctctgctacctgggcggggagacccggatcgtggccgtggaccggcacgcgtcgctcgccgacgtccacgcgcgcctctcgcggtcgctgctgggcggtcgccccttcacgctcaagtaccagctacctaacgaggacctcgactccctcatctccgtctctacggacgaggacctcgacaacctcgtcgacgagtacgaccgcatcgccgcgacctcctccggcagcggatcctcgcgcacctcccggatccgcctcttcctcttccccgccacccccgagtcctcgtcctcgctcggctccctgctggacgactcttcgaagtccgagaactggttcgtcgacgccctcaacagcgccatctctggctccctcgacggcatcccgagagggatctccaccgactcagcttctgtcaactgccttctcggcctagaggacgactcctccgtgcactcccgcagcggcgtgaccaactcggctcccgcggaggaccagcgcgccagccagccgaagctcccggcgggcgccaccgccgtcgctgccgccgccggtgccgggaggcacccgcacgacgtccagtccgtgccagactcgccgatgctggataagaactcttcgttcgggtccacctcctcggccccgtcgctatcgaaccttccgcctatacgcgtgcggccggaggaccgcccgtcggacgcccgcatcatgcaacctaccgccgtggaggaccacttcgcgcagatggggatctccgagcagcagctgccgccgtacatgcaacatcaacagcaggtgccgatccctgccatgaccggcatgtcgccctctgaggcgtccagcagagtgttctctgacgatgataagtccgatcacggtggcggaggtcggaaagcacaacttctcaagcaggaggttccggcaattgttgatcccaccaacagagccgtctactataatgacagatctcctccggccgacttgaaacgagacatgccggtgggaacggaagctgccagctaccgcctccctgtatcagctccggacgctgcagctgccgctgcaacacaggtcccagctggatatgtccttgcccagatgcacgcgccacagcaacatccaccaccgcagcaacatttaccaccgcagcagccacagcaaccagctcctcagcagcagattgtttctgccggaaaccagcatttcatccacaacccggccactggcaccttcattccaatccagtcctattaccaccaccaccctgttccacagcaggcaccccagaccgtgccgaggcagcagcaggcacccgcattcgacccaaacacgggggggggggagccaagtgtctggatccctgttccagtgtttttttttccttctccctctcttgttgttttgaataaaatatatataagtgtccaaaagaacctggcgaaaacgaagagctcgtcgtcatttgtgtagccatctgtatatttgatgtgatttgatctcatggatgtcattcaggttgaggtgcagataagtgtgttgttagcttgcgtgcagaaaccttgttcaagctaaataatatatatactccct

SEQ ID NO: 148814 - DNA, 2086 bp, Zea Mays
cttcctcgcttcctctttgctttccccctcatatcatatattcccctttcccccaaaatctaaataaaaatccccacccaaaaacccacggaggagacaagcacagcaagccaccctcccgcccgttcgtttcactcatggagccgctgccgtcggcaacggccgccggcgtgggggcccccggccctggtcccgggtaccccgagtccacggagtcttctccgcgcagccggggtggggattcgtgggacgagccctttccgtcctctgcagcggcggctgccggcggcgggggccggctccgcctgatgtgcagcttcgggggccggatcgtcccgcgcccgaccgataagtcgctctgctacctgggcggggagacccggatcgtggccgtggaccggcacgcgtcgctcgccgacgtccacgcgcgcctctcgcggtcgctgctgggcggtcgccccttcacgctcaagtaccagctacctaacgaggacctcgactccctcatctccgtctctacggacgaggacctcgacaacctcgtcgacgagtacgaccgcatcgccgcgacctcctccggcagcggatcctcgcgcacctcccggatccgcctcttcctcttccccgccacccccgagtcctcgtcctcgctcggctccctgctggacgactcttcgaagtccgagaactggttcgtcgacgccctcaacagcgccatctctggctccctcgacggcatcccgagagggatctccaccgactcagcttctgtcaactgccttctcggcctagaggacgactcctccgtgcactcccgcagcggcgtgaccaactcggctcccgcggaggaccagcgcgccagccagccgaagctcccggcgggcgccaccgccgtcgctgccgccgccggtgccgggaggcacccgcacgacgtccagtccgtgccagactcgccgatgctggataagaactcttcgttcgggtccacctcctcggccccgtcgctatcgaaccttccgcctatacgcgtgcggccggaggaccgcccgtcggacgcccgcatcatgcaacctaccgccgtggaggaccacttcgcgcagatggggatctccgagcagcagctgccgccgtacatgcaacatcaacagcaggtgccgatccctgccatgaccggcatgtcgccctctgaggcgtccagcagagtgttctctgacgatgataagtccgatcacggtggcggaggtcggaaagcacaacttctcaagcaggaggttccggcaattgttgatcccaccaacaggtatgttgatttgaccaattttaacgtatatatattgttcgaccttgattatccactgcctgagagagtgctttccagacgagctaggatgaaaccttatgtggaccgtatgtttgatctattgtttcagagccgtctactataatgacagatctcctccggccgacttgaaacgagacatgccggtgggaacggaagctgccagctaccgcctccctgtatcagctccggacgctgcagctgccgctgcaacacaggtcccagctggatatgtccttgcccagatgcacgcgccacagcaacatccaccaccgcagcaacatttaccaccgcagcagccacagcaaccagctcctcagcagcagattgtttctgccggaaaccagcatttcatccacaacccggccactggcaccttcattccaatccagtcctattaccaccaccaccctgttccacagcaggcaccccagaccgtgccgaggcagcagcaggcacccgcattcgacccaaacacggggatgtactaccttcctatgcagcagaacgcacaccagccatacagcatgcctcctggcgcccaggccaccttgccaccacctcctcctacccttgttgacacagcgccaaagccgaccgtgccaatccctcagatggctgtaaggcctgaactgcaacaacagcctggcgtctatcgaacaacagctgccgccacgcctgctccagcgcccagcgcagctcctcctggatatgctgggatggcataccaccacatcattcagtcgc

SEQ ID NO: 148815 - DNA, 459 bp, Zea Mays
atgtgtctccggatcaactcctgcttcggcgcgccccccgccgatgaggcccactttcatgccccgccgaacaagcacggcgcgagcaggacgacgcagcgcaacggtggccactacaacagcaacggccacggcgacggctaccccgcgcgcacggcggctgccggcgccgaggcgggccgcaaggcgaccaacgacgtgaggagcggccccgtgcacgccggcgcgcaggagaaggcggcgtcgtacccgtacgccggagccgacgggacgctgaagcagcagcagcagcagcccgccgccgccgccgaaggccatggagcgcgcggtgccgcgccgcacagctacggccactacgaacgtgcacagccgccgcctgcccacagagacagaggggacgccgcggactcctactactacccgcctgccgccgctactgccgatcacgaaagggtttag

SEQ ID NO: 148816 - DNA, 126 bp, Zea Mays
gtttcaattcaaattccaagaaaaaaagatgcatcattcaataatgatcgagcatgtaaattagaattttgtactatttattcatttatcttattcacttatccaaatacttttaaatatatagtt

SEQ ID NO: 148817 - DNA, 2080 bp, Zea Mays
aatgaatgccacctattcttttttctccgcagccaaaacacgcttctcccttcccatcttttcctttcctctccctcgtctcgtctcgtcttcgttcccctttcctcctgcgcaccccgtcttctcctcaccgcgtcaaaccccagcacaaatcaaccgcccgccgcctccgctcccctcccgtcccgaatcagccgctgcggtgcccaatccggccgatcccccctcctatccgccgcagaggcggcgcctctgggcctaccccgatgtatagcaacttcaaggagcaggcgatcgagtacgtcaagcaggcggtccaggaggacaatgccggcaactacgtcaaggcgttccctctctacatgaacgcgctcgagtacttcaagacccatctcaagtacgagaagaaccccaagatcaaggaggccatcaccgccaagttcaccgagtacctccgccgcgccgaggagatccgggccgtcctcgacgagggcggcgcggggccgggggccaacggaggtgacgcagccgtcgccacgcgccccaagaccaagggcaaggacggcgacgggggcaacggaggggatgactccgagcagtccaagctcagggcggggctcaactctgccatcatcaccgagaagcccaacgtcaagtggaacgacgttgctggcctcgagagcgccaagcaagctctgcaggaggccgtcatattgccggtcaagttcccacagttcttcacgggcaagcggaggccttggagggcgtttcttttatatggccctcctggaacaggaaagtcttacttggcaaaagccgtcgcaaccgaggctgattcaacatttttcagtatatcttcttcagatctggtttcaaagtggatgggtgaaagcgagaaattagtcgcaaatcttttccaaatggctcgtgaaaatgccccttccattatctttattgatgaaattgattctttatgcggtcaacgtggagaaggtaatgaaagtgaagcatctaggaggattaagactgaacttcttgtgcaaatgcagggtgttggtcataatgatgataaagttcttgttcttgctgccacgaatacgccatatgctctggaccaggctgtgcggcgaagatttgacaagcgtatctacattccgctacctgacacgaaagcaaggcagcatatgtttaaggtccatctcggggatacaccacacagtttaactgaaagcgatttcgagagcttggcccgtcgaacagatggattttctggttctgatgttgctgtttgtgttaaggatgtcttatttgaacctgtgcgcaaaacacaggatgccatgttcttcttcaaggcagacggtgacatgtggatgccatgtggaccaaaacaaccggggtctgtacagaccacaatgcaggagcttgcatccaagggcctcgctgcaaagattcttccaccacctatctcaaggacggattttgagaaggtcttgtcgaggcagaggccgacagttagcaagaaggatctggaggtgcatgagaggttcactaaggagttcggcgaggagggctgatacaccgcgcgcggacacacacccatgcacagctgcaccacagaaatgtatattgtttatcacttcgattgttctgcttggaagttgcattcacaggattgtacatttggtagcccaactatgagtaatcatggcagctgctttaccgtgttgggctaccgatgggcctctgttgtcaacttatttcaatttttatttatgcacatgaaaattttccgcaggtgtattattgaataataattcttaacgtggagcccttgtggttgctagtttctttttctaacgttccttagttttcacgccgagtttcttttccttcagtttggtttacttgcagggccattttattagacgctacatactgaaggtgaacttcttgttctcaggcgttttatttgaggtatctagctctggtagaatctggccatgtcagtaatggtttacatttttatagtttgtatgtatctaccacaaacttcatcagttttgaatgatctgaatctaca

SEQ ID NO: 148818 - DNA, 2128 bp, Zea Mays
gaccaaccgcctcgcctgccgttcccctccacgtctccccattcccgcctcccgagacctgaaccctgttggggacacatgggccccacaacccgcgctcacttcgtctacaatcgccgccgccgccgccgccgaggcgggcggcacgctgtcgaggaggcttccgacgaggagcagcagcagatggatagctcctcctcatcctccgacgaagaaggagatcaggaagaagatgccgaagcctccggagaggacgtcgatgacgaggaagaagaggaagcggtcgctgccgagcctgcgcccaagcagccacccgcagctgcggcggcgggggagaagaggggccgaaggaagggctcgatcaccattagcctgaagaaagtgtgcaaggcgtgcaaaaggacagggcaccaggcagggttcaagggggctgtgtacatcgactgccccatgaagccttgcttcttatgcaagatgccaggtcatacaaccttgacttgcccacatagagtaacaatggagcatggtgttatcccagcgcctaaaaggaatgcaaacacttctctggattatgtcttccagagccaagtcaagggaaagattcccatggttaagcctaagtttctgatacccaaccaactagagcatggaaacataaaatttcatcagagacgtgtgacatgcttggagtttcatccaactaagaacagtgttcttttatcaggagacaagaaaggacttctgggtatctgggattatgttaagttgcatgagaaaatcacttatgattctgtgcactcctgcattctgaatagcatgaagattgataccaccaacgatggtatgatatatacagcttcctctgatggtactatcagttgcactgatttggatactggtattggctctcccttgttaaatctcaacccaaatggttggaatggtccaagctcttggcacatgatatacgggatggacttaaacactgacaaaggtcttcttttggtggcagataactttggttttctttacttcctggatagacgatcaaagacgagaattggacatccaattcttatccataaaaagggtagcaaggtaaccagcctacattgtaaccctgcacgacctgaagtgcttctaagcagcggaaatgatcactatgcccgtatttgggatacaaggaagcttgaagccaactctccccttgccagccttgctcatggacgggttgttaattcaggatacttttctccacgaagcggaaataagatcttgacaacttgtcaggacaaccgaattcgtgtatgggactatattcttggtgatctgcaatccccaagtagagaaattgtgcacagtcatgatttcaatcgtcacctgactcccttcaaagctgagtgggatccaaaggattacaccgaaacagttgcagtgattggccgttacataagtgagaactacaatggtgttgctctgcatccaattgattttatagatactagttctgggaagcttctggctgaggtgatggaccctgacataataacaatcagcccagtgaacaagctacatccgcaagatgacatcctagctacaggaagctcaaggtctattttcatatggaagccaaaaattgaagatgaacttactgaagaaagagccaagcatgacaatagtagtgatgacgactcaggtggtgattctggcggaaagaacaagaaagcaaagaagactcgcttcactcatgcagtaaagggaaagggcaaatccaaagtctgatgcttggtgtacatagtcggcagcattttgacaagaaagcgtccattaaccagctcctgatgcatctccttttgtaccatcttgccaactccctcaccccccccagctaaggtgctgaagacccgtatgaaacgcatgctgatagaccccatagttgtctcctgcatcaatgctcctaaggagttagccagttaggtttcggactcttttgaatcctgacatgcttatgatcacttgtcatttgtcaacgaggccttttaacggtttaatcctgtatcaacatataaatctcctgtacagttgcctgaatgcaatttgtgcttgtaaaatgtttattggtgctctc

SEQ ID NO: 148819 - DNA, 538 bp, Zea Mays
agctgtttcttcctgcaggaccttcggcgacgaagcatagtcccaacaacattattacaggacataaggcgcagcatcccaaacaatttacggcctcttatgacaagcatccccgcatcatctgttcatagtgcacgttcagcatccacaaggagcagaccaatgagtgtttcagactcaccgctcgcaacgagcagaaacgctagctccgagccgagtgtcaacaacaacctgatgtgcctggacagtattgatatcgatgatgagttgtgcagcgacagagtaggactctatggacggtgattcacttatttgcgaaaggtatacaaaaagtcataattatggctgttcgcatcggagtaaagctgactgtttggactgttgcagctgcaatctatagagataaaaacactgtagaagccggtacggattaaagtcaaacgaacagctgcaatccataatagttctggtggaactatttggctacgtaatgttcagagcagcagggtggaagatcaccaatatgatccttagtatc

SEQ ID NO: 148820 - DNA, 658 bp, Zea Mays
aactctttactcgctcactcccccgcgccactgatctctccttccgggaccctaattccgcaggaggccgcgccgggggagtgacgccgatgcagcgccgggtgggcatggcggacggcgaggctaggtgtcggacgctcggcgccgtcatcaaggagaaggatgaggagttcgcgctcttcctcgagatgcgccgacgcgagaaggagcgcggcgctgcggccgccgcggcggaccagcttctgctctccggggacgtcgcggcggagaacgggatgctgctcctcgacccgccgccacccgctggtgggagcttcatttcggcctcttcttcgggtttcctgcagccgtgagccgttcctttgcattttactcatgtgcttatgaagccctagcttatcgtggtttgaatttttggttctttgtggtcgtagagcccaaaccggcggcgtacaaggtggctggcggcggatttaggagggcgcctgggggagtggacgacttcctcaatgcagacgccagcgacaagaacgattacgactggcttctgacaccaccaggaactccattattctcatctctaaaagttgagccaaaaaggtccctggtgagtcaagctggaacgccaaaggctcgtccaactgccttgaaatcaagg

SEQ ID NO: 148821 - DNA, 530 bp, Zea Mays
aactctttactcgctcactcccccgcgccactgatctctccttccgggaccctaattccgcaggaggccgcgccgggggagtgacgccgatgcagcgccgggtgggcatggcggacggcgaggctaggtgtcggacgctcggcgccgtcatcaaggagaaggatgaggagttcgcgctcttcctcgagatgcgccgacgcgagaaggagcgcggcgctgcggccgccgcggcggaccagcttctgctctccggggacgtcgcggcggagaacgggatgctgctcctcgacccgccgccacccgctgagcccaaaccggcggcgtacaaggtggctggcggcggatttaggagggcgcctgggggagtggacgacttcctcaatgcagacgccagcgacaagaacgattacgactggcttctgacaccaccaggaactccattattctcatctctaaaagttgagccaaaaaggtccctggtgagtcaagctggaacgccaaaggctcgtccaactgccttgaaatcaagg

SEQ ID NO: 148822 - DNA, 560 bp, Zea Mays
aactctttactcgctcactcccccgcgccactgatctctccttccgggaccctaattccgcaggaggccgcgccgggggagtgacgccgatgcagcgccgggtgggcatggcggacggcgaggctaggtgtcggacgctcggcgccgtcatcaaggagaaggatgaggagttcgcgctcttcctcgagatgcgccgacgcgagaaggagcgcggcgctgcggccgccgcggcggaccagcttctgctctccggggacgtcgcggcggagaacgggatgctgctcctcgacccgccgccacccgctggtgggagcttcatttcggcctcttcttcggagcccaaaccggcggcgtacaaggtggctggcggcggatttaggagggcgcctgggggagtggacgacttcctcaatgcagacgccagcgacaagaacgattacgactggcttctgacaccaccaggaactccattattctcatctctaaaagttgagccaaaaaggtccctggtgagtcaagctggaacgccaaaggctcgtccaactgccttgaaatcaagg

SEQ ID NO: 148823 - DNA, 965 bp, Zea Mays
aactctttactcgctcactcccccgcgccactgatctctccttccgggaccctaattccgcaggaggccgcgccgggggagtgacgccgatgcagcgccgggtgggcatggcggacggcgaggctaggtgtcggacgctcggcgccgtcatcaaggagaaggatgaggagttcgcgctcttcctcgagatgcgccgacgcgagaaggagcgcggcgctgcggccgccgcggcggaccagcttctgctctccggggacgtcgcggcggagaacgggatgctgctcctcgacccgccgccacccgctgagcccaaaccggcggcgtacaaggtggctggcggcggatttaggagggcgcctgggggagtggacgacttcctcaatgcagacgccagcgacaagaacgattacgactggtgagtgcttcggcagtagctaccaactttccactaattagctagtatcaaatttctgctttttcggttgtgggcagcatagccattggtgtgacaatgattctagccaaaccacattgtagcattgtgaacttcaattttgttctgctcttttgtcgtttaaggcttcagagaatttggtgaggtgttaagttttaaccattttaaggcttcagggaatttggtgaggttttaacagtgtaatatttagtacgggttccctaaatcttgattcctcattcccaatgctgaatgcaaagctgcaggactgacaaaactgagaactctacagcttcataagtttcaagctaaatcttcattcttcagttgccttgctagaagcggagcgatgagttccatttttctgtaattttgccttctgtgcatacagtctatctgctgtccatgcattgtctgttaagttgacggtgtaccataaagtttgtctttcgtgaaacttgatgttagttagaattcagctggtgttgctgggaaggatgggtcatggaca

SEQ ID NO: 148824 - DNA, 683 bp, Zea Mays
aaacactgtcgccgtccttctgtcgacgtacagcagatggagaactgcgaggtactcttcccgggaggcagcagcggggccaacgcgttcaccaggccagagcaggagaggaagcgcgggcagccatggacggaggaggagcacaagttgtttctcttgggcctgaagaaatatggccggggggattggaggaacatatcgcgcaattttgttcagaccaggacgcctactcaggtggtcagccatgcgcagaagtacttcatgaggcacaactccggcggcaaggacaagagaagatccagcatccacgacatcaccacagttaagctgagcgacgaccaggaccagcctccgtcctcgccatcccagtcctctctgatcactgaccagttcaacgaattagctctgacacccggcgctgcggattcgccctccaattaacctttgcggctttgccggactactgggatatgtatatgccaatctttggaatggggtttgcaagatcaacgcctgcagtgtggcccgttcaattggatggaagctagaacatattttttttgggtgcagttcagtgtgcagcaccatgaatctatcagatggctatctacttgtttagtacactgggagtgtttccatgtttgttgtatcatcttgtgtaataaacctggaatttaataaaa

SEQ ID NO: 148825 - DNA, 1967 bp, Zea Mays
ggtggtatataaatactgcaaaagtcggccacaagctccaagccacggcccaatcgccggccgacactcacaagaacctgcctccctctggatcgctatctcttttctagtgcccagggaaagctagctagctcacagtcacagctgagctgagggaagaaagcaaggagagggagccagggaggaaggggaaaaacacgcggagagggtgagcaagaaagaaccgaggcggatcgccttctgttcctcctgccggctccgcgagaggaggcactgctcaggggggaagaaagaggtggaacaacgccccggggcagagcagagatgatgcgggagacgtacatggacgtgctgccgccggtggaccacatagccgcacggagcaactggttcccggcggcggcgcgtctgtggacggcggcggagaacaagcagttcgagcgggcgctcgccgggctcgacctctgccgcccggactgggaggaggtggcgcgggccatccccggccggacggtgcgcgaggtcgtcagccacttcaagcacctcgaggtcgacgtccagcagatcgagagcgggcaggttcccttgccggcctacggcggcggggccagctcgttcaccctgcagtgggacggctacggccccggtccgggggacttcaggcacgggtaccgcttcgccggaggctgcgggaggcggcaccacggccgcacgccggagcaggagcggaagaagggcgtgccatggacggaggaggagcacaggttgttcctcctaggcctgaagaaatacggcaagggggactggaggaacatatcgcgcaactttgtccagaccagaacgcctactcaggtggccagccacgcgcagaagtacttcatcaggctcaactccggcggcaaggacaagaggaggtccagcatccacgacatcaccacggtcaacctgacggacgaccagccgccctcgccgtcccagtcctccctgatcaccagccagtcgaacgcaccagctccatctccagctccggctccagccgcggggatatgccaggtcccattggcggccgacgtcaagcgacacggtgccggaactctgcccttcagctcaccgaaccggacctctgcggtaccggcctacaggatggagtttcatgaccaacaaggcctgcagtgtggccctctgcatgatcagttgctcgccagccagagcgtcctgttctaggcgcggtggcagcccaccctgcgccatggatcgaccaggtgcctattgtataatacttgtggtatcgctgtagcttcagcgcctgtattgaagggattagcctttcgggagcataacagaaaggagatcttcatttcatggtggtccataatttgttggagaatgtaacaaaaagaacgccgagaattcgatgccatggtattttcagactgttgctcgagtggtacggctggaaatgtatcatgcatcctatgaagtggacttgcattcaatcatggatgatcctatgaagtgtcagttaaccttggttgtgaccatctgattctgctgctgtctctgaagatggtgccttatattgaggccttcagagttcaaaccattatgtagtgtccagacatatttatccgtagtaatcagtttgcctattggtgcctgcctgcctcaatctatgtttggagtttggacaagtttaattttctcggatgaacgaatttctgtgaagagaagataaacgaagctgagtttgcaatgagtcactcagcattgctgctacttgtcaatatctctcatatagtcaacttctgctttggttcatcattttcttatagaaaataacagctttcttaaacccgctccactgttaagtgctcatatgtggcgtttttctgtcgatgatgctagctccaccgaatgcctgtatgtgattggcaatgagtcagagttccactaccttggcatctgca

SEQ ID NO: 148826 - DNA, 1984 bp, Zea Mays
ggtggtatataaatactgcaaaagtcggccacaagctccaagccacggcccaatcgccggccgacactcacaagaacctgcctccctctggatcgctatctcttttctagtgcccagggaaagctagctagctcacagtcacagctgagctgagggaagaaagcaaggagagggagccagggaggaaggggaaaaacacgcggagagggtgagcaagaaagaaccgaggcggatcgccttctgttcctcctgccggctccgcgagaggaggcactgctcagtcccgtgattcctacaggggggaagaaagaggtggaacaacgccccggggcagagcagagatgatgcgggagacgtacatggacgtgctgccgccggtggaccacatagccgcacggagcaactggttcccggcggcggcgcgtctgtggacggcggcggagaacaagcagttcgagcgggcgctcgccgggctcgacctctgccgcccggactgggaggaggtggcgcgggccatccccggccggacggtgcgcgaggtcgtcagccacttcaagcacctcgaggtcgacgtccagcagatcgagagcgggcaggttcccttgccggcctacggcggcggggccagctcgttcaccctgcagtgggacggctacggccccggtccgggggacttcaggcacgggtaccgcttcgccggaggctgcgggaggcggcaccacggccgcacgccggagcaggagcggaagaagggcgtgccatggacggaggaggagcacaggttgttcctcctaggcctgaagaaatacggcaagggggactggaggaacatatcgcgcaactttgtccagaccagaacgcctactcaggtggccagccacgcgcagaagtacttcatcaggctcaactccggcggcaaggacaagaggaggtccagcatccacgacatcaccacggtcaacctgacggacgaccagccgccctcgccgtcccagtcctccctgatcaccagccagtcgaacgcaccagctccatctccagctccggctccagccgcggggatatgccaggtcccattggcggccgacgtcaagcgacacggtgccggaactctgcccttcagctcaccgaaccggacctctgcggtaccggcctacaggatggagtttcatgaccaacaaggcctgcagtgtggccctctgcatgatcagttgctcgccagccagagcgtcctgttctaggcgcggtggcagcccaccctgcgccatggatcgaccaggtgcctattgtataatacttgtggtatcgctgtagcttcagcgcctgtattgaagggattagcctttcgggagcataacagaaaggagatcttcatttcatggtggtccataatttgttggagaatgtaacaaaaagaacgccgagaattcgatgccatggtattttcagactgttgctcgagtggtacggctggaaatgtatcatgcatcctatgaagtggacttgcattcaatcatggatgatcctatgaagtgtcagttaaccttggttgtgaccatctgattctgctgctgtctctgaagatggtgccttatattgaggccttcagagttcaaaccattatgtagtgtccagacatatttatccgtagtaatcagtttgcctattggtgcctgcctgcctcaatctatgtttggagtttggacaagtttaattttctcggatgaacgaatttctgtgaagagaagataaacgaagctgagtttgcaatgagtcactcagcattgctgctacttgtcaatatctctcatatagtcaacttctgctttggttcatcattttcttatagaaaataacagctttcttaaacccgctccactgttaagtgctcatatgtggcgtttttctgtcgatgatgctagctccaccgaatgcctgtatgtgattggcaatgagtcagagttccactaccttggcatctgca

SEQ ID NO: 148827 - DNA, 2474 bp, Zea Mays
ggtggtatataaatactgcaaaagtcggccacaagctccaagccacggcccaatcgccggccgacactcacaagaacctgcctccctctggatcgctatctcttttctagtgcccagggaaagctagctagctcacagtcacagctgagctgagggaagaaagcaaggagagggagccagggaggaaggggaaaaacacgcggagagggtgagcaagaaagaaccgaggcggatcgccttctgttcctcctgccggctccgcgagaggaggcactgctcaggtgaaatttcgctttgttttggttgggtggggtctcgagttccctgtggcgtttggtggtgtgatttggagcgggattggaagggaaggtggttaggctctctgctagtttaggtgaggcggtttggttgtggcggtcaaattgttttcagggatgagcgattttggggtcacatggttcacgattccggctgtgttccgtgttcaggttcagttcagaggtgttcttgagtccagtctaattctttcgtaaaagtcgatccctttttcaggcaggtgctgcaactgattccagttttcacgcacaaagattccacctttctccaatcctatgttcatcgtatttgatctgcagcgacgataggagttcctgttcagagcaagagacagagaaatcgtttaataataatcgttacagtgctctcggaatctttatcgtgttcggactgagatgcccagaaaggcaaaaagaaatctaacctttctttcagtcccgtgattcctacaggggggaagaaagaggtggaacaacgccccggggcagagcagagatgatgcgggagacgtacatggacgtgctgccgccggtggaccacatagccgcacggagcaactggttcccggcggcggcgcgtctgtggacggcggcggagaacaagcagttcgagcgggcgctcgccgggctcgacctctgccgcccggactgggaggaggtggcgcgggccatccccggccggacggtgcgcgaggtcgtcagccacttcaagcacctcgaggtcgacgtccagcagatcgagagcgggcaggttcccttgccggcctacggcggcggggccagctcgttcaccctgcagtgggacggctacggccccggtccgggggacttcaggcacgggtaccgcttcgccggaggctgcgggaggcggcaccacggccgcacgccggagcaggagcggaagaagggcgtgccatggacggaggaggagcacaggttgttcctcctaggcctgaagaaatacggcaagggggactggaggaacatatcgcgcaactttgtccagaccagaacgcctactcaggtggccagccacgcgcagaagtacttcatcaggctcaactccggcggcaaggacaagaggaggtccagcatccacgacatcaccacggtcaacctgacggacgaccagccgccctcgccgtcccagtcctccctgatcaccagccagtcgaacgcaccagctccatctccagctccggctccagccgcggggatatgccaggtcccattggcggccgacgtcaagcgacacggtgccggaactctgcccttcagctcaccgaaccggacctctgcggtaccggcctacaggatggagtttcatgaccaacaaggcctgcagtgtggccctctgcatgatcagttgctcgccagccagagcgtcctgttctaggcgcggtggcagcccaccctgcgccatggatcgaccaggtgcctattgtataatacttgtggtatcgctgtagcttcagcgcctgtattgaagggattagcctttcgggagcataacagaaaggagatcttcatttcatggtggtccataatttgttggagaatgtaacaaaaagaacgccgagaattcgatgccatggtattttcagactgttgctcgagtggtacggctggaaatgtatcatgcatcctatgaagtggacttgcattcaatcatggatgatcctatgaagtgtcagttaaccttggttgtgaccatctgattctgctgctgtctctgaagatggtgccttatattgaggccttcagagttcaaaccattatgtagtgtccagacatatttatccgtagtaatcagtttgcctattggtgcctgcctgcctcaatctatgtttggagtttggacaagtttaattttctcggatgaacgaatttctgtgaagagaagataaacgaagctgagtttgcaatgagtcactcagcattgctgctacttgtcaatatctctcatatagtcaacttctgctttggttcatcattttcttatagaaaataacagctttcttaaacccgctccactgttaagtgctcatatgtggcgtttttctgtcgatgatgctagctccaccgaatgcctgtatgtgattggcaatgagtcagagttccactaccttggcatctgca

SEQ ID NO: 148828 - DNA, 234 bp, Zea Mays
atgccgcctaaactcgacagcctggtgtccctcaacgtgctgaatctcgcacacaaccagatctcaggtctgattttgatggcggtcacaaaactgagcagtctctatgagctaaatctatcacaattcacaaaattacctgtccggtctgatcccttcggatatcggcaagctataatagtcgcagagtctgctggacttgagcagcaacaatctcagtggacacatccctga

SEQ ID NO: 148829 - DNA, 133 bp, Zea Mays
gtgtgcgttgacaattgcattacatgtgctgctggtgcgcctactgctacttctaatccaagcgttcagattatgtgtatatacctatgctacttctaaagcaatttgtcgttgattccaggttcctcaaaat

SEQ ID NO: 148830 - DNA, 915 bp, Zea Mays
atgacgcagtattggattcccacagggatcttccaaagagggatccatggccggttgggaccacaggcgggagccaggcgcgtggaccttggaccgggagtgaagaagagattggggagaatgtgggttcccaaggtgaatttgaacacctgcaactttacacctttggcgccttccccagactgttgtggggctcctccttctcctgttgctcaaagggaggaggccactgatgttgctctaggtccccaggttacacttatccccctggaggatctgcctacagttgtggctactgagaatctggttgatcttgaagagggtgatgggaggatttctccctgcagcccagttgaggaatctgaaagtaggttggcacctttgaaccctgtggtgagagcacactctgctggctgtgaccttccatccatagccgcaaatacgggtctgagagtgtatgctaggaggagacttgagtgcaagaaggcagacatgttgcaggaccattatgataatgtaccccatgaggatccgtcgactgtttccccaacattgatggcctttgaagttaatgtgctttcacccccacatcctaattctgagaatttggtcctgaatgccagtgtaaatgaggtggaacagcccggtgatgttgttgaactgccaagttttgatcatttgtcgatgacaccaccacctttgcaaggctgctcccccactccttgtcttgtgtactcaagaatgaggctcaaaaagaagctgctgtcagatgacaatgaagaaggggtgaatgttgcttcaaatgagagtgatgaaggtatgggtcatggttcccaggtccttccagtttgcagcagagttgttgtccctcctgttcctcatttggctagtccaacctcactaacagcagaatag

SEQ ID NO: 148831 - DNA, 528 bp, Zea Mays
atgacctggcttgtgcttggtgagtcaagggccggcaaaccgctacagcctcagccggcactggccgccaaatggtgtcacggacctgctgcagcgtcatcgtcggttgaaggtgttgccctcgacagggggtttacagcatccctccctgctgccattgaggttgaagggacaacaagggtggtggaagagcaaacgactatgcagatcttgttggtctataggaaaatgaggatcttattgacagtttgtgttcagtacaggtgtttcagattcaaagcagtcccttccttttttgtactggactatagcatcgacgacttatttattctttacaggactattgaaactgactacaacaagttctttgaaatttgcgcttcagcaagggtctccaatccattcccaaatgtagatctcttccttgtcgtctatgaggatgctctcaagcggaagaccaacgctgccaagtttgtggcgaccaacggggctgaagaggaggagttgttggagaagaaatcaacttag

SEQ ID NO: 148832 - DNA, 1183 bp, Zea Mays
aagcaaagccctcctctcccctctccctcgcggcctcgccttatcccctccgtcactcacctcgaccaccgccatggccatggccatggccttggcctccgcgaccgccgccgcactcttccgctccgccctgtccgcgccacacggcgccggcgcgcgcgtccggccgcagcgccggcagccgttcttggctccgctccacgcggcgaagggccccggctcggcgccggtggtgctggagggcaaggccaagggaaagaagaagaaggggcccagctccgggaaccttcccgcagccctcgacgtcgagatcagggaggcgcaggagtacctcgacagcgaccagcaggaacctgttccagacaacttcccatttgaattaatcgacgaagagggcatgagcgtggttattttgagaagggactacaaggacgagaaggtcgaggttactgtcagcatgcctaatttagaaggaggccccgagtttggtgatgaggatggcgagggcgatggtgagagcgctgtcaaggacgacggagaagcagaagaagatgacgagagtgccggggatagcagcatctctcttaaggtggtagtttccaaagactctggcccaaagctcgagttcacatgcacagccttccgcgaggagatcaccatcgatgatatgctgatagttgagaaaacagacgacgacgacggagaagagaagttcccctacgagggccccgagttcaccgagctccctgtgaatgttcagaaaggcctgttcaagtacctggagcaaagaggggtaacgctgtcggctaccaactatatgcacgattacatggtgactaagcaggctcaggagtacatccggtggatgactaagctgaaggatttcgtgacgcagtgaggaacagcgtcgtgattcggcagcattgtttggttagcctagccttagcatgtgttacagccttacaggaacactacgactacaccgaattggccacactccccaaaaaacaaaaaagggggagcattgtatctgcttcaatgtatctgtatcagctggcaaaacagtagcaagtagatttccagtaatgtttagtggtgggcattaggtattacgatacgtatctggatgaatgttttggaattctggtggctgttagaaataaatgcgacacaaaataggatc

SEQ ID NO: 148833 - DNA, 1022 bp, Zea Mays
cttaagataacagatgatgcatggatgatccttaaatatgtgctaatgcaatatcagatgatacaaggaagaaccttgaaagtagtatgtgtttctatcttaagatgacagatttatatctggggtactgcaacatcagatgatactattcggtcaaaaaaaaacacaccagatgatactaacgtcttggagaccaaagtgttatcaacttttaaggtgtgttctctgaagtaggtaggtacattgattgaactcttgtggtgggtactggagctgaaacttttctgctcaaacagatctatattcttttttgagtagtcattcaaagttggcaatatgctagtaatgtccacctaggccctgaataatgctttactcctgttctttttataccattatcaaatgtttaaacataactttttgtggtatacgtggatggcttagatcatctgagaaatgtttgtttcatttcttctttacaggcaatcctggtcaacagaaagctaaggtctcagaactaccaaaatttggaagaccggcaaaactgcggagttcctcgtggtggacaagatactttgtccagactggcttaacagagaacgaagggccactgaagaaatttgaagaggctacatcccagaacaaataccaaccagattgtcagatcttccacttaagttcgccaaggtgatgcgcatccagaacaccttgggttgttgtcagttgtcacatcagttctgtaagcagcacctttgcttacccctgttgacttgcgcatctttcgtgcggaggaatggtcacacaaacagagccagccatcagcagtaggttagcttgtgtagagagggagagagagagagagagaggcctcgacacttgttcctagaaaatcgttctggaaattaaattatgtgtaaccaatgactgaaaactggagcccgctgggatatatatgtaagaacttcacgctgttgtactactcagctatgagctatccatggtgtgtcaggtgttcacgctgt

SEQ ID NO: 148834 - DNA, 1475 bp, Zea Mays
actaatcctcatctctcggtcgctaatggcgtgctgatctttccaccgtcgcatacaggcagcaggatgctctttattcccctgtgtcagcttcagcgaagctaatcccattccagtgcccgtaccgcgccgtccctatcgtgccggatcgccacccgctcgctgcgcccccacctccccccctcgccggttcgccacttcgccccacctccgcgcctcagatccatccccaatccggcaaccctagcgccgggttcctcctcctcgtctccgcccgccgccgcctccattgccagaggtgatcgagggggagagatagagcttgggtggtcggattagggagagagagagggaggggaggatgtccagaaggtcggtgaacccgagccggcgggtggcggacgggggcttgccgtccttcggcggcccgttccaccctaagtcacgctcgcctcccgtgctcaccattgccctcgtcgtcctgggtgtcatttttctcattgcctacttcaacagcagcccaggtgtaactgttacgagcaaagagaccgtgaccaggtctgaaggttcttgcacatcagaagttatgcgggcgcttccatatcttaagaaggcatatggcaatgccatgcaaaaggttctccatgtaggccctgatagttgtacagtagtttctaacttgttgaaggaaggaaaggttgaagcatggggagtggagccttatgatttggaggatactgacagtacttgcaaaagactcgtgcgcaagggctttgtccgtatgtctgatattaagttcccccttccataccgtccagattcttttaatcttgttatcgtgtcagatgctttagattatctgaccccaaggtatctgaacaaaacacttcccggtttagcaagggtttccacagatggccttgtgatttttgctggcaatcctggtcaacagaaagctaaggtctcagaactaccaaaatttggaagaccggcaaaactgcggagttcctcgtggtggacaagatactttgtccagactggcttaacagagaacgaagggccactgaagaaatttgaagaggctacatcccagaacaaataccaaccagattgtcagatcttccacttaagttcgccaaggtgatgcgcatccagaacaccttgggttgttgtcagttgtcacatcagttctgtaagcagcacctttgcttacccctgttgacttgcgcatctttcgtgcggaggaatggtcacacaaacagagccagccatcagcagtaggttagcttgtgtagagagggagagagagagagagagaggcctcgacacttgttcctagaaaatcgttctggaaattaaattatgtgtaaccaatgactgaaaactggagcccgctgggatatatatgtaagaacttcacgctgttgtactactcagctatgagctatccatggtgtgtcaggtgttcacgctgt

SEQ ID NO: 148835 - DNA, 99 bp, Zea Mays
cctttgttgtttcacgagcgatctttgatgtctcaaacttgtcattattcatcttctcttgcttttcaaaaagcttgagacgattaacattgcaatcag

SEQ ID NO: 148836 - DNA, 837 bp, Zea Mays
agcctagaaggaaacaggaacagacagctctgaaagactgaaactcacggccatggccatcctgggtgccctcaggctcgcgccgtctccacccgccctcgccggcgccgcgccaccggcgacgtcgccgtatacggctgtacgctcctccgtgcacttccgcctcgccaatgccggcgccgccgcgctcgtcgccgcctcgctcctcgccgccgaccccgccgtggctttcattggaggaggaccgtacgggaagcaggtgacgcgggggcaggacctcaccggcaaggacttcagcggccagacactcatcaagcaggacttcaagacgtctatactgaggcaggcgaacttcaaaggcgcgaacctgctcggcgcgagcttcttcgatgcagacctcacaagcgctgatctctctgacgctgatcttagaggcgctgatttgtcgctggcgaatttaacgaaggcaaacttatcaaatgccaacttagaaggggcacttgccactgggaacacttctttcaaaggtgccgacataactggggcagattttaccgatgtgccgctgcgagatgatcaacgggagtacctctgcaaaatcgctgacggagtaaattcaaccactggaaacccaacaaaggagactctgttctgcagctgatcgacggaaggacctgggacttgtgacttattcaacgtcttgataaacttgcatctgctgctgtaagcacgtgaggaatgtaaattgagttatagagggttcctagaaataataactggtaattacgtgtaaatcaaccaacaatataagtgtgtgctgccctttgaatgtgcaaa

SEQ ID NO: 148837 - DNA, 2556 bp, Zea Mays
atgtcatcggtgacccgccctcagcgggaggccgactttgcacgcttcccgtcgtccacccccatcgtcatcgacaacggcgcttctaccttccgcatcgggtgggcgggcgaggcggagccgcgcctttcgttccgcaatgtcgtgcagaggccgcgccaccgcagcactggtgaaactgtctcaattgttggggacactgacccatctctaatgaaattctttgactgcacaagatcggcagttcgctctccatttgacgatgatgttgtctatcagttcgagtacatggaatatattcttgactatggctttgatcgattaggtgtcgattcagaggtgggccatccaattcttatgacagaatgtgaatgtaatccgtccttttctcgagcccgaatgtcagaactacttttcgagacatatggtgtaccatccatagcatttggcattgacaacgcgtttagttataagtacaatcagaaacttggaaactgtaacgaagacgggctggctatttcatgtgaacatggaacttgtcatgttgttccagacaggcctggcgcagtggtgagaagccttcccactgagccaaagtaccattttacattgaacagggcaagtatttcatgggaaaaggctgaagagctgaagaaggaacattgttatatagctcctgattatatggcagagttgcagatatttaaaaacaataaggaagaagctgatgagaaaatgaggtattggcagctaccatgggtccccccaccaaaggaagaaccaccatctgaggaagaacttgcaaggaaagcagctttgaaggaaaaggctggtcagcgtttgcgagacatggctgctgcaaagagatctcagaagatagtggaactagaaaaacaactttcctatctggaggaactaatggaacaacttgatgaagctgaggaagaagaagcaacagctattctaggtagctctggatatctttcccagcaggaaatcagatctgccattttaaaagcatcacaatctttaaggaaagcaaaaggggagtccaatggcaatgatgagaaaacagatgcctcagcagttgataagtatccacttgtatctgttcctgatgagacactgacgccagaacagttaaaggaaaagaagaaacagatattacttaaaaccacaacagagggcaaattgcgcgcaaagcagaaacgtgctgaagaggaggctttgcgggagaaacaagaagaaaagaggcgtgcggagaacccagagttataccttgaagagcttcgggcccgatattcagaactttctgataaatttgagcagaggaagcgacagaaagttaatggtagtcagacaaatgggaaccatagttcatctgcaggtgtaggccgtggagaaagactaaatgcagctcagaaagaaaggatgcggctgcttgcctcagctgcttttgatcggggcaaaggtgaggacacttttggaatgagagacgaggattggttagtgtacaacaagatgagcaaagacaatgatgatgacagcaatgatgatgatgaatcggaacttgttcgaatttcatcgaagctccaggagattgatcctacatttgtgtccaaatccgaagctgttcaactgactccggagccacccaaagtccggccactaaccgctgaggattacagaattgccattgggatcgagcggttccgttgccctgaagtcctcttccagccaggcatgattggaatcgaccaggccggcatcgatgagatggtcagcatctcactcaggagattaatggaggacgagtctgtgaaggagcgcctctgccagtcgatccttgtcactggcgggagctccctgttccctggcatgatccctcggctggagtctgggatacggcaatatcggccctaccttgctcccctgaagcttgtcggagcagctgaccccattttagacgcgtggaggggtgctgccgcctttgcggcatcaagcaagttcggcaaacaaacgttcagcctagctgattacggagagcatggagagaacctgtttcatcggtacaacattgtttactcactataaccggaaaatgacatagtgatcgaaccatctcagtcaggctatttatttaacagctgatacaaattgatgtagcaacaaagtttttcaaaactgcaattgatatttttatgtgattggaattggagggttcaaatggtgaaggaatttcataaacctataatatgtgtgcctttttttagtcttcccagggcacaacttgtttaagaacaggtgagctgaatcctctataaagctaaggtcactatcgactatatggatggataaaaagaacaaagttgtccatggttacttgcataggggcatttctttttcattttcttttttagtctctattttgttatatctaccattaattaaaaaaaggaacacagtcttatatagggggtatgcctttttattttatttttaaatcttctgtttcttcagggttcctaaatctattttttgttttctttaacacac

SEQ ID NO: 148838 - DNA, 2931 bp, Zea Mays
atttaataatttgctaaatctgagttttttagtaaccagggtagatatgatagtaaagattgttcagctcgacgcaaacgacaaaaccatcttgaaaatggcagaaagaaaaaattcagaaggagccctcgaatcccggtcctaggaaccgtctgtcaacgcggtcggggtacttgagtgcctttttcttctctcacgtgcgcccctaaaccccagtgtgctgtgctaatggggatcgaacgccctgcgcttaaatcctcgggtagaactctcgcctcttccgactccgccataccaccaatagatccagctatggcggtgtagtcgaattcaatcctgtgcgagaaaacacgaaatcgccgctggctcgatattggccagggctttctccgcccaactgcatcttgcagcgactgtgctccagttcgggggaaaaaaaggaaccgtatctgcttgaatccctgcgctccggggcggggatggatcttgacctggacgactacgtggacccctacgaggaggccgaggccgaggctgccgcggcggaggacggctccgacgaccccgacgaggacgactcggatgcggagagcgactacgaggaggagtcgtttggcctcctcaagtccggcaagcaccgggtgcgcaacccggacggcaccttccgctgccccttctgccccggcaagaagaagcaggggtacaagataaaggacctcctccagcacgccgacggcatcggcgtctccagcaagcaccgccgtcacggccgcgagcgcgcgaaccaccgcgccttcgcgcgctttgtccgcaccgagccgtcatttgcggaagacctcgtcggtatcactggcattcaaggtgccattaaacccacccctgctaatagagatggcagtaccaatggcgacgggaaggccaaggctaatgtagatactgctggatccagttctgtggcggcgaaagtgggtctgccgcgggaggttgagaggttttcttggccgtgggcttgtgtccttgcggctggggcagggttcaatactgaggactttgctggtagagtagccatgtttagttcggttgaggttgtgcctttgtttgtcgatgaggtcgaagtcgcagaaacctttgcagttgtgaggtttaccaatgattggagcggattcagcgacgctcttacgctggagaaccatttcagcatcaataagctagggaagaaggaatttgagatgagagataatggtataggttccgtggagggagatggtggcgaaggtgaggtcaaggtttatgggtgggttgcccgagctgaggattatgattcgccgagtgtggtagggagattcttgagaaagcacaccgtcctgaaaacaatagacgaggtttccaagactgaattagagaaatcaggggagatggtggcaatactggcatccaagatcgaggaaaagaaccgacacttgcaggatttggaaacaaagaagaatgcgacagaactctccatctcaaggcttgaggaggacaacaggaaactacatgaggcatataatgaagaaatgcgcaatcttcatcgtagggctcgtgaaaatgctttgcggattttccaagagaatgaaaacttgaggattgacttagaaagtaagaagagagaactgaacttgcgagctaaggagcttgacaaaatatcaactgagaatgctaacgacaggaagacacttgataatgagaagcagaaggcaaaatacgataacagtgaacttgagctagcaagtatagagcagcagagggctgatgcagatgttctgaagctattggctgaccaggagagggaaaaggaagatgtacttgctagaatgcttcaactagaaaaagagctgcatgagaagcagcagcttgagctcgaagtagaacggttgaatggtacactccaagtgatgaaacatttagagggagatgatgacgggggagatatccatgagaagatggagaagctgagcgaaagatttgagcgtgaaaagaagcgtctggaggaattgagtggggatctcgtgaggaaggagcgtgaaagtaatgatgagctacaagaagcccgaaaagaactgataaagggtttggaggaagagctaaatggacggacagctatcggggtcaaaagaatgggggaactcgatgaaaagcctttccaaaatgcatgtaaaacaaaatacggaaaggatgagtacgagatcaaagcagcagagctagtcacaagttggcaggatgaactaaagaagccatcctggcatccttttaagatggttgaggttaacggagaaaataaggaaattctggatgacgatgacacaaaactgaagttcctgtggatcgagtacggcgatgatgtgtgcaatgcggtgaagaccgcactgatggagattaacgagtataaccctagcgggaggtatgttgtgccggagctctggaactttaggaaaggccggaaggcgacggtgaaggaggtgctcaagtacctgttcagtcagatggacacgacgacgaagcgcaggaggggctgaggaggtgcctgatgccgagtagtgccttctatgttgttgcatcagtcgtgtgctgctcgatccccaagtggcagtctggcataggagatgcccctcttgtgtagtgaaatctggcacgataaagtgcccgcgatccaggcttgggtatgccttatgcatcatgttcatatgcttgtgcatgtggtgctgttgccgcaggcgccctagcctaacctgtatgattgttgagatgagtagtctttcttgctgctgttactcccttcgcccctcaatgtctctgaataaatcaattcctaaagttatcataaaatcgagcttttttaatcagactttttaaagtttaactgaacttatagaaaagagtcaggatttatga

SEQ ID NO: 148839 - DNA, 1560 bp, Zea Mays
atgagaggccacaaacctcactccgcctgtgttatcatttgcaccttctcttccttcctcttcctctgcaagaagccaaatacaatttagaagcgcccttcctcctctcccccatccgtacccaatctaatcgacacccggccgagatgggccgcaagttcttcgttggtggcaactggaaatgcgtaatttctcttcccccgtcgaactgcctatttttctttcgtggatgggatgtggacctttgaatggaaccacagatcaggttgagaagattgtcaaaaccctgaatgaaggaaatgttccctcttcagatgttgttgaggtcgttgtcagtcctccttatgtgttcctcccggtggtcaagagccagctgcgccaagagttccaagttgctgctcagaactgctgggtgaagaagggaggtgcattcaccggtgaaattagtgctgagatgctcgtcaaccttggcgttccctgggtcattcttggacactctgaaaggagagctctgctgggagaatcaaatgagtttgttggagacaaggttgcttttgctctgtctcagggactaaaggtcattgcatgtgttggtgagacccttgaggagagggaggctggttcaaccatggatgttgttgctgcacaaacaaaagcaattgctgagaagatcaaggactggagcaacgttgttcttgcctatgaaccagtctgggctattggaactggcaaagtcgccaccccagctcaggctcaggaagtgcacgcctccctgagggattgggtaaagatcaatgtcagccctgaggtctctgaatctacaaggatcatctatggaggttcagtaactgctgcgaactgcaaagagctggcagcacagcctgatgtcgatggtttccttgtgggcggtgcttctttgaagcccgagttcatcgacatcatcaacgccgccgccgtgtgaagtccgctgaagatgttccaacccttcaccctgttgcggtgatgtgctgaagacagatcagactatttttttgtttaaccgtgcagtgctatgtaagctactaactttgcgctggtgcggatgctgatttccctccccctagctttttgtgaggctactctacagcttgattcagcttgctaataatgtttgcctctggacatagcgatagtggtgtttgtgtagccttttttttgtgtgtgtgaattacgatggatccgtcttcgcccgacgcccttttgtggcactagtctacaacgtctacacaaatttgtgagacattgtttgggcattttagtttgtgagactagtttgggcctttgttgtgcccacagccccacattggtcgaatgctgccaagattgtactgatcgttgatgccctgtacggattaacctggtctccgaatgcaatcgttgcacggaggcaggcagccaattattgtacgatatgcgatatcctcagccataggacgctaggatccctgccaagcactcgtatttgcactatggccgcgattatttggggttcggcctattcggttctatactaaggtgtta

SEQ ID NO: 148840 - DNA, 1507 bp, Zea Mays
atgtctcacatgagaggccacaaacctcactccgcctgtgttatcatttgcaccttctcttccttcctcttcctctgcaagaagccaaatacaatttagaagcgcccttcctcctctcccccatccgtacccaatctaatcgacacccggccgagatgggccgcaagttcttcgttggtggcaactggaaatgcaatggaaccacagatcaggttgagaagattgtcaaaaccctgaatgaaggaaatgttccctcttcagatgttgttgaggtcgttgtcagtcctccttatgtgttcctcccggtggtcaagagccagctgcgccaagagttccaagttgctgctcagaactgctgggtgaagaagggaggtgcattcaccggtgaaattagtgctgagatgctcgtcaaccttggcgttccctgggtcattcttggacactctgaaaggagagctctgctgggagaatcaaatgagtttgttggagacaaggttgcttttgctctgtctcagggactaaaggtcattgcatgtgttggtgagacccttgaggagagggaggctggttcaaccatggatgttgttgctgcacaaacaaaagcaattgctgagaagatcaaggactggagcaacgttgttcttgcctatgaaccagtctgggctattggaactggcaaagtcgccaccccagctcaggctcaggaagtgcacgcctccctgagggattgggtaaagatcaatgtcagccctgaggtctctgaatctacaaggatcatctatggaggttcagtaactgctgcgaactgcaaagagctggcagcacagcctgatgtcgatggtttccttgtgggcggtgcttctttgaagcccgagttcatcgacatcatcaacgccgccgccgtgtgaagtccgctgaagatgttccaacccttcaccctgttgcggtgatgtgctgaagacagatcagactatttttttgtttaaccgtgcagtgctatgtaagctactaactttgcgctggtgcggatgctgatttccctccccctagctttttgtgaggctactctacagcttgattcagcttgctaataatgtttgcctctggacatagcgatagtggtgtttgtgtagccttttttttgtgtgtgtgaattacgatggatccgtcttcgcccgacgcccttttgtggcactagtctacaacgtctacacaaatttgtgagacattgtttgggcattttagtttgtgagactagtttgggcctttgttgtgcccacagccccacattggtcgaatgctgccaagattgtactgatcgttgatgccctgtacggattaacctggtctccgaatgcaatcgttgcacggaggcaggcagccaattattgtacgatatgcgatatcctcagccataggacgctaggatccctgccaagcactcgtatttgcactatggccgcgattatttggggttcggcctattcggttctatactaaggtgtta

SEQ ID NO: 148841 - DNA, 1424 bp, Zea Mays
atgagaggccacaaacctcactccgcctgtgttatcatttgcaccttctcttccttcctcttcctctgcaagaagccaaatacaatttagaagcgcccttcctcctctcccccatccgtacccaatctaatcgacacccggccgagatgggccgcaagttcttcgttggtggcaactggaaatgcaatggaaccacagatcaggttgagaagattgtcaaaaccctgaatgaaggaaatgttccctcttcagatgttgttgaggtcgttgtcagtcctccttatgtgttcctcccggtggtcaagagccagctgcgccaagagttccaagttgctgctcagaactgctgggtgaagaagggaggtgcattcaccggtgaaattagtgctgagatgctcgtcaaccttggcgttccctgggtcattcttggacactctgaaaggagagctctgctgggagaatcaaatgaggtatgatccatgtcacaacttatgcaacatgtcttttgtgttattttcattgcgcttgtaatgtgtgcatatttttatctgggactatgttgtatctactttaattctcccctgagacaccaaccaattatttagctgttccctgtcttcggcatagccactgccattcaatgaatgttcacatctaatggttttactcttctgcttggatgccagtttgttggagacaaggttgcttttgctctgtctcagggactaaaggtcattgcatgtgttggtgagacccttgaggagagggaggctggttcaaccatggatgttgttgctgcacaaacaaaagcaattgctgagaagatcaaggactggagcaacgttgttcttgcctatgaaccagtctgggctattggaactggcaaagtcgccaccccagctcaggctcaggaagtgcacgcctccctgagggattgggtaaagatcaatgtcagccctgaggtctctgaatctacaaggatcatctatggaggttcagtaactgctgcgaactgcaaagagctggcagcacagcctgatgtcgatggtttccttgtgggcggtgcttctttgaagcccgagttcatcgacatcatcaacgccgccgccgtgtgaagtccgctgaagatgttccaacccttcaccctgttgcggtgatgtgctgaagacagatcagactatttttttgtttaaccgtgcagtgctatgtaagctactaactttgcgctggtgcggatgctgatttccctccccctagctttttgtgaggctactctacagcttgattcagcttgctaataatgtttgcctctggacatagcgatagtggtgtttgtgtagccttttttttgtgtgtgtgaattacgatggatccgtcttcgcccgacgcccttttgtggcactagtctacaacgtctacacaaa

SEQ ID NO: 148842 - DNA, 112 bp, Zea Mays
tttgcaatgaaattcaagtttaacgtaacgcagaaaaacaagtggcacaattgtcaactaattgcaacaactttcctagtggtagcaataacatgtttctcttacaatgaaa

SEQ ID NO: 148843 - DNA, 685 bp, Zea Mays
cggccttataaaacgggagcaaggccgcaggtcgtctgtccactgcgactgtgcagcaagatgtacccggacatggctgagcaggtgaccaccaccacccaggctctcatcatgggtgtcgcaccatccaaggggcacgccgagggcgggttcgaggcggccgccggagctgagaacggcgggtgcaagtgcggcggcaactgccagtgcgacccctgcaactgcggcaagtgagctaggtgctccaccctgcaggccggccggaggaagctagctaattataaagcttaataaagtatagcggcgtcgctgtgtgtgtttcgagtcagtcagtcagttgcgtgccatggcatgctctgagtctgagatgatgatgatggctgatggcggcgtcgtgtcctcccctggcctcctggggcgcttctggcgagcagtgtgttgtgttgtgtgggtgccgcacgctagcaggctagccatgtgccctgctgtgttgtgtcaccatccatctataatcttatccataccccaccttttgtgtgatgcgtgtaccctttcctgatgtctgttcccgggagtataaggggggtgtttggttcctctcctaatttttaatcgcgtcagatgtttgaaggctatttttaagtacattatacatgtatactaaaaatcttaggagagcttttag

SEQ ID NO: 148844 - DNA, 808 bp, Zea Mays
cggccttataaaacgggagcaaggccgcaggtcgtctgtccactgcgactgtgagcttcgttcgttcagttcatccgtgttcttgtttgcgaggtcgagagagagaggatgtcgtgctgcggaggcaactgtgggtgcggctccggctgcaagtgcggcaacggctgcggagggtgcagcaagatgtacccggacatggctgagcaggtgaccaccaccacccaggctctcatcatgggtgtcgcaccatccaaggggcacgccgagggcgggttcgaggcggccgccggagctgagaacggcgggtgcaagtgcggcggcaactgccagtgcgacccctgcaactgcggcaagtgagctaggtgctccaccctgcaggccggccggaggaagctagctaattataaagcttaataaagtatagcggcgtcgctgtgtgtgtttcgagtcagtcagtcagttgcgtgccatggcatgctctgagtctgagatgatgatgatggctgatggcggcgtcgtgtcctcccctggcctcctggggcgcttctggcgagcagtgtgttgtgttgtgtgggtgccgcacgctagcaggctagccatgtgccctgctgtgttgtgtcaccatccatctataatcttatccataccccaccttttgtgtgatgcgtgtaccctttcctgatgtctgttcccgggagtataaggggggtgtttggttcctctcctaatttttaatcgcgtcagatgtttgaaggctatttttaagtacattatacatgtatactaaaaatcttaggagagcttttag

SEQ ID NO: 148845 - DNA, 1266 bp, Zea Mays
cggccttataaaacgggagcaaggccgcaggtcgtctgtccactgcgactgtgagcttcgttcgttcagttcatccgtgttcttgtttgcgaggtcgagagagagaggatgtcgtgctgcggaggcaactgtgggtgcggctccggctgcaagtgcggcaacggctgcggagggtaagccccgtccagtccgcgttgcgctctcggccggagtcagatctgacggcggatgaacatgtgtatatatatatatatatatatatatatatatatatgtggtttccggccctgatctgcacgccttcctccatggctggctggctctgcttttcgtcttgctgcatgcgcttcgattcacgtccatccatccatccacggatcggaaccgaacctttgctgcctttttttctcgtcatgctcatcgttatcgatctgtatgtctgtctgtctctacatgtatgcaggtgcagcaagatgtacccggacatggctgagcaggtgaccaccaccacccaggctctcatcatgggtgtcgcaccatccaaggggtatgtgctccctcacccctctctctcgatcggcgccaaataacatgtggtgttgagttattatgagctgtgtactactgtcggcatatggatggataggcggtgccagtatggtagagaacagaacgcgccaaatatctctttatgttctctttatggtggtgatggtatggatgcaggcacgccgagggcgggttcgaggcggccgccggagctgagaacggcgggtgcaagtgcggcggcaactgccagtgcgacccctgcaactgcggcaagtgagctaggtgctccaccctgcaggccggccggaggaagctagctaattataaagcttaataaagtatagcggcgtcgctgtgtgtgtttcgagtcagtcagtcagttgcgtgccatggcatgctctgagtctgagatgatgatgatggctgatggcggcgtcgtgtcctcccctggcctcctggggcgcttctggcgagcagtgtgttgtgttgtgtgggtgccgcacgctagcaggctagccatgtgccctgctgtgttgtgtcaccatccatctataatcttatccataccccaccttttgtgtgatgcgtgtaccctttcctgatgtctgttcccgggagtataaggggggtgtttggttcctctcctaatttttaatcgcgtcagatgtttgaaggctatttttaagtacattatacatgtatactaaaaatcttagg

SEQ ID NO: 148846 - DNA, 2193 bp, Zea Mays
atggcccagctgttgcaccatcaggattctgggttctatgacaaggaattacatgggtgccgatggggtattcttcaattctttggatttcgccgtcgccagcggtccgcaaagatgcaacctgacaagaaacatggtccggagaaaaacagtcgtggaagtagacgccgaagccgctcctatgctccattgaaaaacgaagacagtgaaattttggatgatgacaaaaatactgaggttacaaaaaaacagaaggcctcccaaaaaaattctggcaaggctagtttgaggtccttgattctaaggaaattatatggaaaggaaggtcaggaagaaaagatgcttccagttgcaccaaagctactccgcactatttcggtatactatctggaaaataatgaatatgttcttgatggtgaatccacttcgagtggtgatggttcttcacatagtactaactcatcgatgcaaaatgctaccaatatgaatttgcaccatgctagatgtagcatcccagatggttgtggtagtgattccagttcttcacttcttttaaagacagacgacatctccatgaagcgaaagagccaccgtagcatttcaatggacggggttcttcacaaggtcccttatgggaagaaggtgtctggagatgtgatcagtgaaggtctcccccgatcagcctctgcgacgtatgatagggatggtgtgaaaccttactttggtactgctacaaagaggcatgtaaaccaaggttttcggcgttcacgttccctcagtgaatcttgggaaagttactcacgcttacttgattccatctcaagcaatgaatctaaaagagtactgacaagctctaagtctactagggttcattccccagatggccctagtgtgattgcttcactgcaaagaacttctgaagccttcaggtcccaaggtttggataaacgtgatgaaaatcttgtaactgcagaagatgcatcggcaccacattttgaagagaaaactgacgtcgatgtagatgtggaagttgctaagggtgagagctcaagcgatacggttcctggtggctctgagaatcctcctttacctgacgagtacgttgatcacaaaagtgaagaagacacatgcactgctccttcaccttcagaagctgttgatgtttcagaagaacagacagtaagttgtgatgataacaatcaggttccctcatctgaggtcaagctgtatggcgactgttcaacatcatcaggaattgacatcccagaagaacatgcagagatttatgacgataaccaaatccactcatcaacacaggctgattcatatacttctctatcttcaaagggcatcaccatttcagaagagcacacttcaacttctcatgaaaaccaaatgcacccattccagatttcaaaacccatagaaggtaccttttgtgctccttaccccggtggcgagtttgaagcagacataagtctaagctgtgaacaagaaactgaaagcccaatgtctattcttcacgtggccttctcagatgatcctgatagtccggtgaaacacaccccgctggatgatacgttgttgaacccaagaattctccatttagataatgctgatgcttcagctggcactgctgccatacaaaaaggcgattttgacggtctccaagtagatccaaggcatgaaattgagttcaaccatgtgaaggatatattcaagaagtcaagtttcagcaatgagatactgtttgatgaatggtgttcacagaacatcacagctctccaagaggtggattgccagcactacgaggccgccgcagcatcatttgacttcacggacatgtctgctgatcagctacttctgttcgacctgacaaacgaaggtctgctggacatctacaagaaatactctgtttccgagtccagattctcctggttctcctcttttgaccgaccaaaacctgtcggaaaccgtgtcctcaaggagctgtggtctggattgagctgtcatctggatgaacggccacggtccagcatcgaagtcgacacgattttgtcgaatgacctagtagccaggagcgacccctggacgactttttcgggagatgctgatcatgtggggaacaagttggtagactttgtatttgacaagcttctgactgagctcgttcttcagcttgcagagttttga

SEQ ID NO: 148847 - DNA, 88 bp, Zea Mays
catgtctcgagtgacatgtggagtcatttttcatcagtgtgttctctccacttgtgaaactttgaccaatcatactggtgtctctcac

SEQ ID NO: 148848 - DNA, 1768 bp, Zea Mays
atgatcgtcgggtcagccgccgagctgaacggaggtcgctcaccgttggggggccgttgggccgcccgcgctactccccaaccaactgcggccagatcacgctgcgcagcgcaggccctctttactcagctgtccatgctgctgctgctcagagtgtggggcgccgtggacacggtccacatcaagatgctgagccacataactccggtgggtgtgggtccaacgccccccacctgcacgctgccctcccccgccccgccgcgggatcaaatacgccgcctccgcccgtccactccctcgccgcccccgtctcctctcctctcctctcctctcccccgcatccacggccgcaggcagcaggcagccactcgacgatctagtcgtctctctccccgctctgccgcctcgctgccgcggcttcccgtcggcgggaggatgaaggtcacggtcgtgtcccggagcggccgggaggtcgtcaagggcggcatcgacctcaaggactcggccaaggtcgcggacctgcaggaggccatccatgccaggactaagaagtattatccttctaggcagcggctcaccctcccccttcaacctggaaaaggcgggaagccagttgtcctcagtccgaaggccagcctgctagaatactgcgagaagggttctgggtcactgacagtggtcttcaaagatttagggccacaggtctactacagcacactgttcttcttcgagtacctgggtcctctcatcatctaccccatgttctactatctgcccgtctacaagtacttcgggcacgagggggagcgggccatgcaccctgtccagacctacgcaatgtactactggtgcttccactacttcaagcggatcatggagacgttcttcgtgcaccgcttcagccacgcgacgtcgccgctctcgaacgtcttcaggaactgtgcctactactggaccttcggcgcttacattgcttactactgcaaccacccgctgtacaccccagtgagtgatctgcagatgaagattgggtttggttttggggtcgtctgccaggtcgcgaacttctactgccacatcctgctgcggaacctcaggagcccaagcggcagcggcgggtaccagatcccccgcggtttcttgttcaacatcgtgacctgcgccaattacaccaccgagatctaccagtgggtcggcttcaacatcgccacacagaccgtggcaggttacgtcttccttgtcgtggcggcgggcatcatgaccaactgggcgctcggcaagcacagccgtctgaagaagctgtttgacggcaaggatgggaggcccaagtaccctcgccggtgggtgattctccctccgttcctgtgaagaggcggtggtggtggctcactgttggtggtcggcccattgtgattcgatgtctacagacagttgtactgtactaatcgtgcctgtttagcggttgaacttggattccgttgtccgaagtttctaatccgaaagatggatttcattttcttcttcttcttcttagcattatgtcactgtctcacgtcgtcctgtctcaatacagtctaaggttcatgtgatgttatccccatttgtccacgcagaagtgaagtgaatgcagtcactatttcgattcgacactttttctgctgtcgtgtcctatgaccctgcttatctcatctgaggcttgtgatgcttgaactggacgttcagtcactaaacccttatgcagtcgctatgattgatttctagatggtac

SEQ ID NO: 148849 - DNA, 747 bp, Zea Mays
agatgatgcactaacttatttcttaaaccaaacactctacaaatctacatcaatcgctagaagaaaactcattgtttcttatagtggagaccactgtagcatggtcagtggtgagtacgaagcaaaatgattgatgaagaccgtgcaacattacagtgtatatcaattctgtttaccgaggtttcaatgataatgctctccttagttaatgtatggtattttttgacgaagtacagtcttaccatagacatagcagaagatatcttccatgtttaccttcttcttttcttagttgatggtcaatgtgacatatgtctttttccttctttttcctagcctaccatacgacattagcactggattgtgtcttatggtccttagatacaccatcatttgtcggtttttcaacatcaagaaaatctaacaagttctcaacaaatatgttttcctcttgtgtttaagagccgtgacgaaattccttttaagctataggtaatttggcaatgagatatcccttgccacagatgaatcaggcaagacacacaccattaatgagttgtatctgttgggtgtgtcctctacagctggtcaacagtgaccggattgggctaaacccaactatctatctctttaaatgggcccttgattgggagggcccacgctaacctcggttggagcccccagacacacgacgctatatataggactaaggggtcgcaggaaagactaacgctagtacctcgcccc

SEQ ID NO: 148850 - DNA, 642 bp, Zea Mays
atggagcctgcagccgaggacaccacatctgccatgccaaactcgtgggagacggccgacatcgatgctcacatgagccgactcatcctctccgcgtgtcattgtggaactcaggtccaagacaataatttgctgtcttcagaaacttgtgtccatttcctcctcaaattgttaaaccctccggtgaatgttgttgatgccaaagcaccatcaataggttccaaacttcttggaatcggtaaatttcagatgcttaacggttccaataaggatgtggactcttgttcagaggacatactttcaaaagttgaagaaatcttcttaagctgcaaagagatcaaaccagcagacagggattataagagaacaacaaggccggaactatgttcaaagtggcttgctttgttgacaatggaaaaggcgtgcttgtctgttgttgcattagaggatacatctgacatggtgttagaactcggaggaaatttcaaagaaacattaaggcagttgggtggccttgatgatatttttaatgtcatggtgaattgccattcagaactggagtatacttggagctgcaatctgatgaatattattttgagcaacatgaaaaacatgttgcaagacaaggatatgttgcagtaa

SEQ ID NO: 148851 - DNA, 1021 bp, Zea Mays
ggcttgccttcttctccacgcaaaacacggggttctctcctccacaaaaataaaacaaagcaacacacatacataattaatcataggaaaataatgtcgatgcggaatcgaacaaggagcgtcgcggtctcaccggggtgaacgacgacgacgacagggctgcgcaaaaacagcaaacaaccgacgagtatcgacggcgtgctgttcactgcgctttataaaacagcgagcccgcagagcgcggaggcgtcggggctgctgcgccaacggggaaaacagaggggttgcgcgttgacggacaacgagcagtgacaatgtggctgtgcaatacatcaagcgggtggcatgcaagcgacacagagggaatctggggctgttgtggtcttgctgttttgggggaggagaatggcgaaactcgacgacgcaaggcgaagaacggtgttgctgcagcgcgcgtcttgctgcgcagaaaagaccggccagaggtagaagaaaaggggggcgctggggaggggatggagcagcggcgctgcgtagggctgctgctgggcgccagccatggagcaaggaagtcgctggagattgttgtcgctgcgagcagggaggaagaaggggcgctgtgcagggcgtcggctacaccaagggagctcctacagcaagggacagagggaggagggcgccatccatggaagctcggctgccatgcagagaggagccaacctccatgcctgctgccgtggggagaagaagacagggagtcggctgaaattttctgggcgccatgggtggagcagacctgcgtaggggagggaaagggcgagcagcagcaggggagggacgttgtccttgggagggagctcggttgtgctgagggagatggccggctgctgttgcgcgagggagaagaagcagggggcgtcgagcagctggaggagagagctcgcggccatgggggagaaggaagtggcgccgtcgagggaagtgcaggactgctgcacgactggaggaggaagaagagcgt

SEQ ID NO: 148852 - DNA, 1463 bp, Zea Mays
gttatttccgtttcaaatagtaaggaagtcattgatgatccgccaaatgttctctataaaaagactcagatacaagttcttcggaagtattctctgtcttttgtcttgagattgagaagtacagaaagcagccctttgttgttcgtcaggacaaagaacaatgcagcacgtaatcctttgcctgcaaatctctctgctactctccagcttctcctattcgatgcaagcccagtacacctcgatctttagcttcggcgactcctacaccgacaccggcaacaagatcatcctctacggcccggcggcggcggatctgtggatcaacaagccgccgttcgggatgaccttcttcggccatccggccgggcgcctctccgacggcagactggtcatagatttcatcgcccaggcactggggctacctctccttccgccctcgctggcgaaggaccagagcttcaagcaaggcgcgaacttcgccgtggctggcgccacggcgctgaagacgagcactacgagcccagcgctctacccgcagttggccgtcgccggcggtgccgtgcctcctccgaacaacatctccctcgctgacgagctgggctggttcgatgccatgaaacccgcgctctgcggctcaccccaagcatgcaaggactacttcgcgaaggcgctgttcgtcgtgggcgagctgggctggaacgactacggggtcatggtggtcggcggcaaaagcgtcgccgaagcgcaatcctacgtgcctcagatcatcgcaacaatcgtcgctgccacggagaagctcatcaacgacggcgccaccgcggtcgtggtgtcggggatctcgccgatgggctgcgcgccggggaacctggtgctgctggcgagccaggaccccgccgactacgagaccgacacggggtgcctcaagggaatgaacgagctatccagggaccacaacgcgcagctgagtcaggcgctgacgacgctgggcggcaggtaccccggcgcgctcgtcacctacgccgacctgtacggccccgtcatcgccttcgcggccgcgccggcgcgcttcggcttcgactccgtgctgagagactgttgcggcggtggcggcggcaagtacaacttcaacctgagcgccgcgtgcgggatgcccggcgtggccgcctgcccgaacccgtcggcgtacgtcaactgggacggcgtccacctcaccgaggcggcgtaccaccgcgtcgccgatggctggctcaggggaccctacgccaacccgcccattctcgccacagcgtagcgaactaggcgatgcggatgcgtgtattaattcaatttcttgcggccggaatcacgtaaataatttgctgagttttgtgtctgatcgtctgattcacgaggcactgatcgatgaacgtttttttgaatttaaagtaaggaggaggagggcctcgacattttcggcatgtatt

SEQ ID NO: 148853 - DNA, 1461 bp, Zea Mays
acatgtccacatgcctctgcgccgcgcgatgacgcggatccgaatccataaagataatgcgagtgcgccagtagacaaacagcgaggaccttggatttcacctcactcttcctcttcagttcatccacacaaccacctagatccaaagccaatcgtgagctcgtgacgatcaccaccaaccaaccaaccaaccaaccaacatgtccggcgacacagcgccgcacgtcgtggaggacttcttcggggccatccagctccttagcgacggcaccgtcgtccgcggcgacgaggcggcgctgctgccgccgaagcccttcccggacgtcccgggggttcagtggaaggacgccgtgtacgacgcggcgcgcggcctcaaggtccgcgtgtacaggccaacggcggacgccggggacagcaagctcccggtgctggtgcacttccacggaggcggctactgcgtcggctcctacgacgagctcggcggggccgactacctgcgccgacgcctcgcggccgacctccccgcgctcgtcctctccgtgcagtaccggctcgcccccgagcaccgcctcccggcggcgatcgaggacggcgcgacgttcctggcctggctgcgcgggcaagcggcgctcgccggcgcgggcggcgccggcgccggcgtcgagcagtggctcgcggagtcggccgacttcgcgcggacgttcctgtcgggcgtctccgccggcgccaacctggcccaccacctcgcggtccgggccggctcggggcaggtcgacctggcgccggcgcgcctcgcggggctcgtcctcctgtccctgttcctcggcggcgtcgagcgcacggcgaccgagtcggccccgccggacggcgtctcgctgacggtcgccatgtccgaccagctctggcgcatggcgctcccggtcggggcgagcatggaccacccgctggccaacccgttcggccccggcagccccggcctggagcccgtggcgctgccgcccgtgctcgtcgaggcgcccggggtcgacgtgctccgcgaccgcgtcctgctctacgcggcgaggctcagggagatgggcaaggacgtggagctcgccgagttcccgggggagcagcacggcttctcggtccttaggtggggccaggcgaacgaggagctgatgcagatcttgaagcggtttctacaccggaagtgagaagtgaccggtgctgcggcctgaccttatggtagaggagtcgtcctcgtcgagtttggcgtctggtcgccttttcgtttgtgtttttcattcatcaagccgctgtcgttgtttaccctaagttcccggttggtggtctggttgttggaaaaaaaaattatttgcatccggatgcaaagaaacacttttgcaggctctcacattcactttctgctcgtccatataaatagaataaaaacaaattattaaaaggttaatttacaaa

SEQ ID NO: 148854 - DNA, 1368 bp, Zea Mays
aaaccttggatcatcggtgaactgccgtttcacgcagtcgagtcgagcaccatgtccagtgctccggcaccacgcgtcgtcgaggactaccgcggcgtcatccagcttctcagcgacggcaccgtcgtccgctccgaccccgccgtgctgcgaccgtccggcgagcacttccctgacgtcccgggcgtccagtgggaggacgtcgtgtatgacgccgcgcacggcctcagcctacgcgtgtaccgtccggccgcggccaccgccaccgccggtgacgccgccagggaggaggagaagaagaagaagctgccggtgctcatgtacttccacagcggcgggttctgtctggggacgttctcgcagcccaacttccacgccgggagcctccgcctcgcgtcggagctgcccgccgtcgtgatctccgccgactaccgcctcgggcccgagcaccgcctccccgccgccatcgacgacgccgcggccgccctgtcctggctacgcgagcagcgccatccgtggctcgccgagtcggccgacttcacccgcgtgttcgtcgccggcgagtcgtccggcgccaacatgtcgcaccacgtcgcggtgaggcacgggtcgtccggcggccagctcgccctcgccctcgcgccgctgcgcgtcgccgggtacctcctgctgacgccgttcttcggcggggccgtgcgcaccgcggccgaggaggcctcgccgccgcccggtgcgccgttcacgcccgaaatggccgacaagatgtggcgcctgtcgctcccggccggcgcgaccatggaccaccccgccacgaacccgttcggccccgacagccgcgcgctaggccccgtggcgttcccacgggtgctcgtggtgtccgccggccgcgacttcctccacgagcgcgtgctgcgctacgcggcgaggctccgggagatggggaagcccgtggaggtctacgtcttggaggggcaggagcacgccttcttctcccgccagccttggagcgagggcaccgacgaactcatccgagtcgtgcggcgctttgtttacacagagaacggcgtggagtgaaactactagtgcagaataagctggcgtttgctgtttggtcactttggtttttttttaaagtgaaatggtgtttggtcagttagtttaataaaaacgtctggttcttgaaaccttacttcgcttgattctctctgcacatgattggatggttgtttgtctaccggcctacgtgcaggttcgcatatatgtgggtgcagctaaatgatcttaaaacaatttactttgtaagaacagacagtacaggtaatcaatcacatggtctatgtaggagtatagagcatggcaagtttggat

SEQ ID NO: 148855 - DNA, 792 bp, Zea Mays
atggcgtctctcctcttggtcccgcgcctcacccggagcccatgttccaacccaggacccagtgccggtcacaagcctaggcccgtgtccatcacctgcgggccgcgcgacaaccgcgggcccctccagcgcggccgctccctctccacggaggccatcctggcgatccaatccctgaagcgcctcacctccgccgaccgctcgccggcggctgcctcggccgcagcagccaccgccctgggccgcctcctcaaggccgacctcgtggccgccatggccgagctccagcggcagggccactggtccctcgccctcgccgcgctccacatcgcccgcgccgagccctggtaccgcccagacccggcgctgtacgccaccttcgtgtcctccgcgccgcactcgccctccggcggcgagggagacgccgaggccgccgttgacgcgctcgtggaggcgttcctggaggagaaggcgagcggcggcgggttcgtggacggggaggaggacgtgtacaagctcacgaggctgctgcgcgcgctggtggccaagggcaggggccgcgcggcgtggagggtgtacgaggcggccgtcaggaagggaggcctcaacgtggacgcgtacgtgtacagggtgatggcgcgggggatgaagcggctgggcttccaggaggaggcggcggaggtggaggaggacttcgcggaatgggagaccacggtctcaccgcccgccagggacgtgctcgacgaaatgcgagcaagagacgagatcaaaaccactgctgctgcctcctag

SEQ ID NO: 148856 - DNA, 129 bp, Zea Mays
tgttttgtctatctttttttcatttggattatgttactgcctagtggcgaactactgccacaaggtgactgttgtgtaagtagattttaggtgtaagcgtgtgagtcttgtatacctattatatggtcc

SEQ ID NO: 148857 - DNA, 1095 bp, Zea Mays
aatcatcgctcgctgagcttccgttgttgcacagcacatcgatcgacgacgatatcgggaagcaatatggggttggccttgtcgcggctggaggagattaggacgcagtaccgcatggcagcggaagacggcgaggctgacagtccggcaccggcgccagtgtcgccgaccggtgctgctgctgcttccggcggcggcactgaaaagaagaagcaggcggacgactcgtcgtcgtcgtcaaagacgacagaatgggttcctcataagttctctgagatcgtcggtcaaagacgacctggtgaggatatgttccgagggatctaccttccacgatcggatcagcagccgaaaacaaagaagtactgggtagatgggagaaatgccaactgcttcatgctgttccctaaaggattcagcatcacctggggttcggacgcaaggtactggagttggcgcaagctcacacaagaagagaaaagagagatcgaccccgaggaggccaaaatggagatggaggtggcgtacctcaaggacgtgtgctggctggagatccgtgcgaagctggagatgtcccacctcactccgggattcacctacgtcgtcgactttgtagccaagctcgaacagaacggctacggctggtccgagccggtggacctccagatcaattgtcccggcgacgtcgacaggaagccgcggaaggagagtctatggaagacggttgacgggaaaaagtggtcgtacgtcaatgtcggggaggtggaggcggccgggcaaaatggggagatggagatcgccatgctcaggttaggtggggactggaagagaggactcgtcctcaggtgcatcaagattaccccaaaaccctagctagctagctaggttcaccggctataaacgacgacgacgacgatctacgtactccgactgcatgcatgcgcgcgcctctgctgccgtacgtgcaccgtaatacttagcttacttgtgctattagtgctatagtactacgtactactactatttataataagatgaataaatgccatattcatggccatgcgtggaataatatgcactcacactgtctactctctc

SEQ ID NO: 148858 - DNA, 726 bp, Zea Mays
aatcatcgctcgctgagcttccgttgttgcacagcacatcgatcgacgacgatatcgggaagcaatatggggttggccttgtcgcggctggaggagattaggacgcagtaccgcatggcagcggaagacggcgaggctgacagtccggcaccggcgccagtgtcgccgaccggtgctgctgctgcttccggcggcggcactgaaaagaagaagcaggcggacgactcgtcgtcgtcgtcaaagacgacagaatgggttcctcataagttctctgagatcgtcggtcaaagacgacctggtgaggatatgttccgagggatctaccttccacgatcggatcagcagccgaaaacaaaggtaaactaagagctagtccgggaacctcaatttctcaaaggattttcatttttcaaagaaaaattagtttatttttctataggaaatttgaaatctcttgacaaaattagagttcctaaactagtcctaaataattaattaatacgacaggagcgggggaggataggataggacaggagaagagagcgagcattatttaattggaaaacacatggatggatggatgtattttttaggctttgttcggttattcctattatacatggatcggatgagattggaaaaaatgtagaaattttttgatttgtttagaatttaaaaccatctaatatcacttaatccatatatatggattgattggtaaccgaa

SEQ ID NO: 148859 - DNA, 1241 bp, Zea Mays
ctgtgcaactcggcagtgcaatttcgtgcagcatcggtgcaactctgcacgccatcccgctggccaccctcagccgctggctagtagattctcctgtaaacaccaccaccgtctctgcgctacagaattttgtcatccggaatcagattcctcaggcaccatctcaagcggctctacgttattccctctgcacttcattgtcagcaatcctaaaagctcgcagcagcagcagctagcagctcgttcttgttcgtcagctctagcctaccctgcgctagctggctcttctttaattctgcagggagttccagtttcaggtagagtgcaggcggagaaccaataatgggggcggcgccgtcgtccgacgactcgtcacgcgccggagacggccgggctgtggcgagcagcgctgcctctggcactggcagcaacagccaccaggcccagtcgaagcgggcgccgccgcctcacaagttccacgagatagttgcgcaggaggcgacgacggccggcggcggcggcggcactgctgctgcagccgagctggaggatcaggcgtgcagcaccggggtgtacctggctgggaaaaccaagaagtactgggtggacgagaagaccaggtgcaactgcttcgtgctgttcgctagagcgctgtccatcacttggggcgacgatcccagatactggatctggcatcccgtcagagaaaccaatgacgccgagatcgtcgaggctgcgtcgctgcagaacgtgtgctggctggaggtgcacgggaggctggagctgtcgcacctcacgccggggtgcagctacgacgtggccttccaggtgatgctcacggagccggcgtacgggtggtcggtgccggtgaacctgcggctcaggttccccgacggcacggctcaggcgcggaaggagaagctgcaggggaggcccacgaagcagtggctggagctcagggccggggaggtgaaggcgccggcccagccggggggagcgggacgcagcggcgagcttgagatctccctgttcgagtacgacggcgggctctggaagaaggggctcctcgtcaagggcatcaagatcgtcccgaaggagagtgattattaattagtgtttgtaactttgtttcagggtgactgctcctgctcgcttttgcctgtcaggtgtgctaagaacttcgtctaagataattggaataattaatgtgtgtggcactgcgtatttcaacgcttcactcg

SEQ ID NO: 148860 - DNA, 1053 bp, Zea Mays
ctgtgcaactcggcagtgcaatttcgtgcagcatcggtgcaactctgcacgccatcccgctggccaccctcagccgctggctagtagattctcctgtaaacaccaccaccgtctctgcgctacagaattttgtcatccggaatcagattcctcaggcaccatctcaagcggctctacgttattccctctgcacttcattgtcagcaatcctaaaagctcgcagcagcagcagctagcagctcgttcttgttcgtcagctctagcctaccctgcgctagctggctcttctttaattctgcagggagttccagtttcaggtagagtgcaggcggagaaccaataatgggggcggcgccgtcgtccgacgactcgtcacgcgccggagacggccgggctgtggcgagcagcgctgcctctggcactggcagcaacagccaccaggcccagtcgaagcgggcgccgccgcctcacaagttccacgagatagttgcgcaggaggcgacgacggccggcggcggcggcggcactgctgctgcagccgagctggaggatcaggcgtgcagcaccggggtgtacctggctgggaaaaccaagaagtactgggtggacgagaagaccaggtgcaactgcttcgtgctgttcgctagagcgctgtccatcacttggggcgacgatcccagatactggatctggcatcccgtcagagaaaccaagtacgtgctatctatacgtagtgcttgctccagcaattacatatacatgcatgctcagttcagtgctcagctcgattcgagccatgtctgtacctgtactctctctccctctactctgtacagtgacgccgagatcgtcgaggctgcgtcgctgcagaacgtgtgctggctggaggtgcacgggaggctggagctgtcgcacctcacgccggggtgcagctacgacgtggccttccaggtgatgctcacggagccggcgtacgggtggtcggtgccggtgaacctgcggctcaggttccccgacggcacggctcaggcgcggaaggagaagctgcagggg

SEQ ID NO: 148861 - DNA, 1129 bp, Zea Mays
ccggcgccaccgccagtacacaccagctcgccggagatcacaagaagatacaagaccgtgctcctcgacgccgcccgacatggcggacgccgcctctggccgcggccacgtcgtctaccctccccgctccgccgaggacatcttcaaggactaccgcgcccgccggtccgccatcctccgcgccctcactcacgaggtcgaggacttctacgcgcagtgcgatccagacaaggagaacctgtgcctgtacggctacgcgaacgaggcgtgggaggtggcgctgccggcagaggaggtgcccacggagctgccggagcctgcgctgggaatcaacttcgcgcgcgacggaatgaaccgccgggactggcttgcgctcgtcgccgtccactccgactcgtggctcctctccgtcgccttttactatgccgctcggcttaatcgtaatgaccggaagcgcttatttggtatgattaatgaattgcaaactgtttttgaagttgtctccggtgcgagacaacaacaatctaaagagaggtccagtatggacaatggtggtagagccaagcctgtaaagatagaaaataatggaaaagtcacagacgaagcatacgaagatgacagtgatcacggtgaaaccctatgtggaacctgtggtgggatatacaacgcggatgagttttggatcgggtgtgacatgtgcgagcgatggtaccatggcaagtgtgtcaagataactcctgccaaggcagagagcataaagcattacaaatgcccgagctgcagctccaagagggcgaggcagtagcaaaacccatgaacgcaggaagcctccgaatgtgggatgtatggtgcagaagaggcgcattgcaaagtttgcaggcaggagaaggccaagaggcctccatttacaagattagaactatattgctatcttcccagtgccttatgcttgcgtttacctatgataagctgatgtgaggaaagataagacatttggcaaccagaggcacttagttaaatgccccttgatatacatgggggtaaaagaagaggaactcatgttttgtcgaatatatggaatctttttttcccctcttacagtaacatgtactccatcatacataattta

SEQ ID NO: 148862 - DNA, 3042 bp, Zea Mays
ggagagtctcagtcctcacagatcgcgcgcgcaccagcaccaccactgccgtctccggcgacgaccacgccgccggccatgccgtcctcctacgctgccgctgcagccggatcctcttcccgcaagccgaatcgcacctccagcgctgccgcacccactcttcgcccaccagcaccctcaccgtcgccggcacccgctcccctggcggtgaaccctagcgtcatctctgattccgacccctcctcctactcatcttcctctgcggatgaggccgatttcgccgcctccgactccgcaactgcctctgttgtctctgcctacctctcggttgctggcgagggggccgacctctcgaaagttggcattttcctctcatccgccgcgcgccgccgatcgccgccgtgccttatctgcttcgatcctatacgcccctctgacccggtgtggtcatgctcttcatcctgctttgccatcctccacctcccctgcatccagtcatgggcgcaccagtcagcatccgggcccgccgtgccgtgcccaacctggggatgccccaagtgccgcttcgcctaccccaagtccgagatcccctcctcctacgtctgcttctgctccaagaccatagacccggctccggacccctggatcctcccccactcttgtggcgacgtctgtggccgccgtcttgatgcgaatctcgactccggctgtgagcatacctgcctgctgctgtgccacccagggccatgcccgccatgcccggccgttgttcctaaagcgacgtgcttctgtggagtgcaccgggagccccgacgctgcgcacatcagcgttactcttgtggggggaaatgcaacaaacgtcttagctgtggactccaccactgtccagtggattgccatgatggcccctgcccgccgtgtgcagtgctggggagtcacaaatgtgagtgtggagagatattggaggagaaattgtgctctgaaaggattttccagtgcaagagggagtgtggtgggatgctagattgcggtaagcataagtgtgagagggggtgccatgggggcaagtgtggggaatgcccactccgaggtcgacgcacttgcccgtgtgggaagaaaaattatccaaggttggagtgtgatgcagaggctgccacatgcggatcaacttgtgagaaggtgcttgggtgtggacgacacaggtgccctgagcgctgccatcgtgggccatgtgatgggacttgccgtcttgtggttactaaggcctgccgttgcggggggttgaagaaggaggtgccctgctaccaagaattgacgtgtgaaagaaaatgtcaacgtttgcgaaactgtggtcgccatgcttgtaaacgacgttgctgtgctggagattgcccaccctgctctgagacttgtgataagaagctcagatgtggcaaccataaatgtctctcaccatgccacagaggcgcttgttcaccttgtcctctgatgaagaccatttcttgcgcctgtggaaaaacatgttttgaggttccttgtgggactgagaagaatcagaaaccacccaaatgctcaaagaaatgcaatatacctcgcctttgccgacacaagcttgaatgccggccccacaaatgccactatggagcctgcccaccttgcaagctgatctgcggggaagaatttccatgtgggcacacgtgtaaagaaaggtgtcatggccctatttctcctccaaactccgagttcacactgaaaccgacaaaaaagaaaatgggaaagcacatagaatgtacacctgggacaccgtgcccaccatgcaaagaggtggttttggtgtcatgctttgggcagcatcttggccaagaacgcactatgccatgttgcaaatggaggccttttccctgtgaaaatttatgtgggaatcctctcctttgtggcaaccattattgtacaaaatcttgccatgtgttagaagtcccattgaatcatcctgaaggagatcgtacaacatctatcagtaaagtgaacgcacttgctatgccttgtgaacaatgcaatcttccttgtcaaagggttagggagcctccttgttcacatccttgccctttgccatgtcatctgaacgattgtccttcttgtaaagtccttgttaaaagaccatgccattgtggtgctatggtgcatgcttttgaatgtgtgttttataacaacttaaatgcaaaggatcagattaaaataagatcttgtggtggcccatgtcatagaaagctaccaaattgcccccatctgtgttcagaagtatgtcaccctggtgtatgcccatcggttgatcagtgcatgaaaaaggtcaacacccgttgtgcatgcagcactctgaaacaagagtggcgatgtcaagatgtcctcaaggaataccgtaagtctggccgggatccaaaagaagtacctaaaagtcagtttggagttggcttacttgcctgcggtgaagattgcaagaagaagctgaaggctccagattcagagttgcatctccggaaaagtcaggagaacaagatccctgctgtggaagtcgtaaatgcacccaaacgcaggaagcggcgtgaccgtggacaagaagttaaaatttcgaaattccaggaagtgaagacttttgtgctgagagcgctactgattattttgctgtcaataatcgttgctgctggtctgtacctgttgtggaaaggtattttctggctttctgactggatgaacgaaatggaagagcagagggcgagtcaaaggtatccgaggggtgcaatgttgtaaaataaaacaattactttgagcctaataatcggtattgacatgtggattaattaatggttgttagggattcagttttgcaggatcataaacatgtcaccgttttctcactttttgtcactataaactagaaattgtatgcgtgatgtattgttgtatttttattttgctactctgcattgttaagtgaacaaacgatacaattactacatgattcatcgcttatatctgttaaaatgt

SEQ ID NO: 148863 - DNA, 2036 bp, Zea Mays
ttccgctctctgctttgtttacgcaggcgacgcaagccacgcagcgcgccgccgccgccgcgtctcctctccgccccgcgaagcttccggggggccctcttccttcctccgccccagccctcgagtcggtctccaccggcggcagcgggcttccgcgccggcgccggactgggtcggcccggccacgagattattaagggcaggcagacattacttgttttatggctagaaataatgagggtcatctccagctgccagagatggatcatattcaacccaagaacaccccgcacaatgaaccactgcctctaggccagaagcttatgctgcatcatggaagtgatgcaccccttagaattggtcattcaagtcatgagaatatgagacttagatcaaatgatcttccacctttaagtcacactgtgcaaactcaaggttatagagttgggaacccaggagcctcgcatgctccttttgttcattgtcatgctggaagttccagtagtcatttaccagaacctgctgtgaattatccacataggtcggaggaaggctttgctccagtgggttcccatatggacaacagaagggctgcaacgaagcgaaaagatcctattgtgcaccctgctgggatcagtgctactggttattatgttggaagttcttccaatactcagctatctaactctgtgcagccaaatcctgctccactttctgagcccttacttcgtcaaatacctttaagcattgaccgaagtggttgggatggcctacacttaattcatcaagaaggatttcagaggaatgtgagagcacgccagcgccacagccataatatttcattagagcccagaacagcttcaacctacccactaaacagtgttcatgtgccatcatttggttcaactacaagtgcttccttaagtatgtcagtggaaaggaaccaagcatctgtttctgtgccaacaagaaatgtaccatcaggtgcaccaggtatcactagcaggtccctgacaaggagggcttactatcctgtggttggaagtagcaactcaagcgttgatgtcgttccaactatctgtggatcatctggcgcagcaatatttgctaatggtggctatgctcttaatgctgatgctggaactgtttctatctaccctaatccagctcctgctacttcatctggctctataaccatgcccatgcccatgctccatcagatggtcattcagagccatccacctgctacctctgcagcaacctctacatccatgtggatcgctcaaccattacctgccagaactgctgcggcttctagacatgcaagacgcgtatcagcagggcttgccaacaatggaaggtacagaagggctaggagctcttactacagccttcatccactgatgatggtagaggcagagcggttcatgatggaccagttggtcttttacgaatcaagagcagcagccgctgacccccacagggacatgagactggacatcgacaacatgagctacgaggacctgttggctttgggagaatctatgggcaatgtcaacacaggcttggccgatgagaaaatttcgaagtgcgtgaaagaagtggtctgctgcagttccgaccagatgcaaaccgatcaagatgaccaggatgacgacggaagctgcgtcatctgcctggagggttacagagacaaggatatgctggggatactgaaatgcaggcacgacttccacgccggctgcatcaagaagtggctgcagacgaagaactcgtgcccggtgtgcaaagccgccgccgcctaggacgacaccagaggagcgagcaactattttgtgctcctcctcgatccattcattttttaggctcaggtcgaattatatatgccgttccattcttttgattcctggcagtcgtgtaaataaatgctctgtgttggttattttagttatcacttgggttacattagcccaaattctcctgttgcattgtaaacaatccagtggtgaaggcaattgatcaagtggttgcaagcg

SEQ ID NO: 148864 - DNA, 427 bp, Zea Mays
ttggtcaccttctccccaaggacggagccgtggtagctgacgatggcctagattcgggcctcatagtgcatgtccacgacgagcttcttacagctcgtggtggccaccacatctgctctagcctcgtatccagactcgcatctgaagaaatcttgcatacaaaaatgatgtatccatacattatttcaagaatttacaacgaatgtgacatattttacaatatactaagacttacccacaactcttgcttcacccgctccgccttgttattgaattcccggccgtcccggtctactgcatcaggggcgacggcgtagtggtcgaaggtgtaggctggactcatcactccggcgtactcaaccagtccagggaagtgttccctacacaataggctaaggatgccattggggaggcgacgatgaccccc

SEQ ID NO: 148865 - DNA, 2264 bp, Zea Mays
ccttctagcaggctcgctgagacgctgacacgcccagccccacgcagttccacccatagattttgtttctttgcgacacagctccaccgtaaaatgccacgggcacgacttccactggactccaacgctccaacccacccgacaaccatcctagtatacacgccaagtcgccagccagcatttcctcccgaaccatccttccactccctcgccgaccctccccccgcgcccgccatggacacggcgatcggctccgtcccggcagcctccgacgcggcgcgtcacccagcgccgtccgcgtccgccccgcgcgacgcgacgctgggccggcacctggcgcggcgcctggcggaggtgggcgcccgggacgtgttcacggtgccgggggacttcaacctcacgctcctcgacgagctggaggccgagccgggcggcgtccgcctcgtcggctgctgcaacgagctcaacgcggcgtacgcggccgacgggtacgcccgcgcgcgcgccggcggggtcggcgcctgcgccgtcaccttcaccgtcggcggcctcagcgccatcaacggcgtcgccggcgccttcagcgagaacctccccgtcgtgtgcatcgtcggcggacccaacagcaacgactacgggagtaacaggatcctgcaccataccatcggcttgcctgatttcacgcaggagctcaggtgcttccagaacgtcacgtgctatcaggctgtggtgaacaacttggaagatgcgcatgagcagatcgacactgccatctccacggcaatcaaggagagcaagcctgtttacattagcatcagctgcaacctcccttcgatcccacatcccaccttcagccgccatcccgtccctttcttcctctccccaaggctatcgaaccagatgaacctggaggctgcagtggaagccgccgcggctttcttgaacaaagccgtcaagccagtgcttgtaggtgggccaaagatgagggtgtccaaagcatgggaagccttggcagagctggcagatgcctgcggctatcccgttgccgtgatgccttctgcgaaggggctagtgccagtgcaccactctaggttcattggcacgtactggggtgcggtgagcactccattctgtgctgagatcgtcgagtctgccgatgcctacctatttgctggccccgtattcaacgactacagctcggttgggtactcgctgctcctcaagaaggagaaggccatcattgtccaaccagagcgggtggtggtcgggcatggacccgcgtttgggtgtgttctgatgaaggatttccttcatgcccttgcaacccgtctgaagaagaacactgtcgcgtatgagaactaccgtcgaatttatgtgcctccaggcgaaccactttcatctgaacctggcgagccgttgagagtgaacgtgctcttcaagcatattcaggcaatgctgtccggcgacatggctgtcatcgcagagactggggactcgtggtttaactgccagaagctgaagctaccggaaggatgtgggtacgaattccagatgcagtatggatcaattggctggtcagtgggcgcaactctaggatacgcacaggctgccaaggataaacgtgtcattgcctgcattggagacggcagctttcaggtgacggcacaagaagtgtcaacgatgctccggtgggggcagaacagcatcatcttcctgataaacaatggagggtacacaatcgaggtggagattcacgatggcccttataacgttatcaagaactggaactacaccggtctggtggaagcgttccacaatggcgagggcgcgtgctacacagcaaaggttcgaacagaggaggagctgacggaggcgctggaggcagctctaggacctaagaaggactgcttatgcttcatcgaggtcatcgtgcataaggatgacaccagcaaagcgcttctcgagtggggatctagggtttctgcggcgaatagccgtccacctaatcctcagtgaatacatcaggtctcccgaattgccctgtaaaccgatccgctttctggtgacgcccataacaagaagtctcggcgatgacatgctgccgatttctgaataaattgtccctgtaattcactgatgttgcaagtccttgttgtaaaactagagagccgcttggaggaatcatggacagtctaaactcgggtctgagtatatacaagctgattgagtcctagataaatacaatatggacttaaactagattt

SEQ ID NO: 148866 - DNA, 111 bp, Zea Mays
gatttctccaaggcaattccagtatgaaataattttgagccgtctcgcccaattcagcccgagaagtttatcttacaaaattctccaccgagaaagcttgaagctaacaat

SEQ ID NO: 148867 - DNA, 1828 bp, Zea Mays
atgacatccaacttcacgcccaatgtctgggcttggatcgccagcctgcccccattcacccagtggcgcaccaacaccatgtccctttgcatctgcgccacgccatcatcatcatcttcgtcgtcacagccacagccatcgataaacctctcggttacgaaaactacttccatcgcacagcctccttatgttatcttctccgtcttcgcaaactacagcatgccagtttcgctgtggaagtcacagccagtccacctgaaaacaaagacgcagcaaactctagacgaacaggatatcatacacatcttcgtcaacatcgtcaactccgtgctgaagtactgtccagacaagaactcgtcgtttcggttccctggggcacagcctcgtggcaacttcagcgacgtgttcaacatagctttcttgtccctggccttcctgctgtgcatcttcgaggtccctcgcgacctccgtccaggatgcttgggttcactaggagcccagctcactggttcgaggtgcagagatgccgcaaagagccttgtgaggatgctcggtgcaaacctcgaggaccagtggatgcagacgatgaacctcgcagtaaccaactggatagtcgagctgagatcctcgagccgctcgtccgggcccgccgtcgccgctcttctcatacgccgtctcagcaagcgggctctggaaggtgcagctgtactgcccggtcatagccatgggtatggaggaagctgcagagacaccacaggatgagcgtctcctcttctcactcatttatcaacaagtcgagtgtgtcattcagctggcctatagaacgacaagaagggataactggatcgatgtcgaggtgaaggtggacaacgtaaggtgtgatgtggactctttggtctccgagacccttatggcggagcgtggatatggctccgaagagaagcacttcccatctcgtgtgatgctgcaaatcacacctacgcaacaatctgatgtgctctctgtttctgtcggcaagtccaacgacaaccccacacacgaattcggcatcgagaagggctttgagggttcatttgaacccccaaacgcatttggcctgaaggcgtcagtaactgaaagccttacactagccatgaagccctggaaattcgagcagtctgtgcatgggaacactgcaaccttgaactggtttcttcatgacggtgtcaatgggagggaggtttattcctcgaaaccttcaaagatttctctgctccaaccgaaggcctggttccgtgacaggtactcaaatgcgtaccgccccttcacaaagcagggcggtgtcattttcgcacgtgacgagtatggagacagtgtctggtggaaggtatgtggtgcagcgttaggacagactatgaactggcaaatccgaggctggatttggctaacctactggcctaacaaacaacggaccttccacaacgaaacgagatggcttgaatttagagaatgcctgcagctcccccttaccaagttttcataaaccacttgtactctgaaatgaatggctgtatagcagtgtagaaccatagacatcgaaaaaatccatgcatatttggggggcacaaaaaagagtatgatactctattgtaactgaatgtactgttacatcgaaatgacttcctcatatgcctgccttgcgatttaatgcaatcctaaaaatttattcctttttcttgagctaatttagagttcaccccacccgaacaaatgtgcaatattaacagccaagagagctcattaaacacgaactcatccctactatagtacaggaactcaacacaaagga

SEQ ID NO: 148868 - DNA, 2107 bp, Zea Mays
ataaaagctaccgagggagattcctcaagttccaattgacaacaggaattcttcaactcagacacacccatcttcaaacagagaatccgttttacctgaaaactttgacgggccttattggacatcaatcatcgtcgaccagaattcccccaaaacactgccttccttcctctcctctataaaaccaacccaccagctcaaagtttcaagcaccagagcaaactaccagcttaagtttccagcaccagagcaagctaagtttccagcaccatagcaacgatgacatccaacttcacgcccaatgtctgggcttggatcgccagcctgcccccattcacccagtggcgcaccaacaccatgtccctttgcatctgcgccacgccatcatcatcatcttcgtcgtcacagccacagccatcgataaacctctcggttacgaaaactacttccatcgcacagcctccttatgttatcttctccgtcttcgcaaactacagcatgccagtttcgctgtggaagtcacagccagtccacctgaaaacaaagacgcagcaaactctagacgaacaggatatcatacacatcttcgtcaacatcgtcaactccgtgctgaagtactgtccagacaagaactcgtcgtttcggttccctggggcacagcctcgtggcaacttcagcgacgtgttcaacatagctttcttgtccctggccttcctgctgtgcatcttcgaggtccctcgcgacctccgtccaggatgcttgggttcactaggagcccagctcactggttcgaggtgcagagatgccgcaaagagccttgtgaggatgctcggtgcaaacctcgaggaccagtggatgcagacgatgaacctcgcagtaaccaactggatagtcgagctgagatcctcgagccgctcgtccgggcccgccgtcgccgctcttctcatacgccgtctcagcaagcgggctctggaaggtgcagctgtactgcccggtcatagccatgggtatggaggaagctgcagagacaccacaggatgagcgtctcctcttctcactcatttatcaacaagtcgagtgtgtcattcagctggcctatagaacgacaagaagggataactggatcgatgtcgaggtgaaggtggacaacgtaaggtgtgatgtggactctttggtctccgagacccttatggcggagcgtggatatggctccgaagagaagcacttcccatctcgtgtgatgctgcaaatcacacctacgcaacaatctgatgtgctctctgtttctgtcggcaagtccaacgacaaccccacacacgaattcggcatcgagaagggctttgagggttcatttgaacccccaaacgcatttggcctgaaggcgtcagtaactgaaagccttacactagccatgaagccctggaaattcgagcagtctgtgcatgggaacactgcaaccttgaactggtttcttcatgacggtgtcaatgggagggaggtttattcctcgaaaccttcaaagatttctctgctccaaccgaaggcctggttccgtgacaggtactcaaatgcgtaccgccccttcacaaagcagggcggtgtcattttcgcacgtgacgagtatggagacagtgtctggtggaaggtatgtggtgcagcgttaggacagactatgaactggcaaatccgaggctggatttggctaacctactggcctaacaaacaacggaccttccacaacgaaacgagatggcttgaatttagagaatgcctgcagctcccccttaccaagttttcataaaccacttgtactctgaaatgaatggctgtatagcagtgtagaaccatagacatcgaaaaaatccatgcatatttggggggcacaaaaaagagtatgatactctattgtaactgaatgtactgttacatcgaaatgacttcctcatatgcctgccttgcgatttaatgcaatcctaaaaatttattcctttttcttgagctaatttagagttcaccccacccgaacaaatgtgcaatattaacagccaagagagctcattaaacacgaactcatccctactatagtacaggaactcaacacaaagga

SEQ ID NO: 148869 - DNA, 2547 bp, Zea Mays
gtttttcatgattttcaaaaaatgggtgctggaaggaagattgaaaccttttttactgcaacaccaagtgcacagacacaaaatcaaaccaatgaaaggtatggaacatatcctgttgctgcccgtaatcttcgggaagatgagctaggaggagtgatttttggctgcaaacacaacacaatcggtgaatgcctctctaaacagctgtttggtttgccttcaagccatttctcatatgtgaagaatgtcaaacctggcatgcctctatttctgttcaattatagcgatcgaaaaatgcatggaatttatgaggctgcaagtgctggcaagcttaacattgaccaatttgcttggagtgatggtggtagaataaagacacaatttcctgcacaggtcctcatctctatgaagactgcctgccttccagttccagaatctcaattccaaagtgtgatcagtggcaattattacaaacctcggcacttcttctttgagctagaccatgaacaaacaagagctttgatatttttgtttaagcctgcccctgttcatgatgtttcaaacaaatgtcatccttccaaatctattcaatctccaatagtcgaagcatatgtcaatcctggtaatgtgaagtctgagtcctatataaaggatctcaacccatttgatgtttcttctgaatctcattgtattgacccttacaatttggttgatccagatggtgaatatgctagtgagagtagaacgtcaacgagccaccttgacaaggaggcttctaactgggatgatgttacgaccaaggaaggaactgaatttgtcaataatgaccatccacatattaatccaccacataaacaacaagatatgtttgttttacgacagcatgaggctgaatcctccaaggacactgtggattctgcttcaaataaatcaatgcctcaagaagcacagtttgatgccactctccccacagacccatctaattccacttcagtgggtgatgtatgtattaaagacctgacatcactggggcaatctcgtggaaatgctgagctgcttcacattgtcaaagagttatccaagaggaaccaagcaatggagaaaaaactgtctgagtcagataaagaaatactgtttctgagggaatcaatgaaggacacaggaagaagaattcaggagctggaatatcagtatgagaaactacaatcaaactataactctttagtcccactccttggtagtcgacatgataatatggaagggccatcaataatcttaatgggtggctacaggggcagtacttgcctgtcatcactagattccttttgccctacgacagacagagtagtgcctctgtgttcaatgagctcagcccgtgcatatgcagccgctgttgcattgaaggaccatctctatatttttggtggtgggaatggcagttcatggtatcacacagtggaatgctacaggatgggcagtaataaatggatagcatgcccccgtttgaaacatgcaaaaggaagccttgctggaactacattgaatgataaaatatttgctattggtggtggagatgggtctgcagttttctcagaagttgaaatgtttgacccagcacttgggagatggatagacaatgtgtcaatgcggcaaaagagatttgctgctgctgctgccgtattaagtggcacactctatgtaactggtggttatgatggcaacacgtacttacaatcagcagaaagatatgacccaagggaaggtttctggactctgctaccaagtatgagtgcaagaagaggatcccactccgtagctgtcatgggggaatccttattcgctgtgggagggtacgatggaaacagcaatatttccaccgtagaaatctttgatccgcgtgccaattcatggaggataggccgttcatgcagcattgcaagaggatacggatgcgcggtgacgatggacggcaatctgtacttcattggtggggtcaacgatgctggagaaactctcgggactgtggaggtctacaatgagaggcaaggctggtcgatctctggctgcaaatccgtagggaagagggcctttgcctgcgctatcaccgtttgacatgatcgcggatctcataccctacctttttttttttttttttttttttgcaaccagcagtcactcatggttcgcagcctttgccctcctgctggtcctactcctaccacgttggtccgagtatacctgggttgagagaaattttgctgcctccccccccccctacttatactacttccgtccgtgaacaaatcaacttctagaggtgaattgagccaaacttttgcaaacgttagaaatgttgaacttaaggtaactataaaagttaatttatttgggggatggagagagtattagacaaagccaccaaatgttctggtggtgcatttgggaattgacaatcacagagcaccaccaaatggctaagggccacagtagcatgttctgctgtgtaatgtccaggcagtctgctgctgtttgcgcttttgagaaact

SEQ ID NO: 148870 - DNA, 2457 bp, Zea Mays
gtttttcatgattttcaaaaaatgggtgctggaaggaagattgaaaccttttttactgcaacaccaagtgcacagacacaaaatcaaaccaatgaaaggtatggaacatatcctgttgctgcccgtaatcttcgggaagatgagctaggaggagtgatttttggctgcaaacacaacacaatcggtttgccttcaagccatttctcatatgtgaagaatgtcaaacctggcatgcctctatttctgttcaattatagcgatcgaaaaatgcatggaatttatgaggctgcaagtgctggcaagcttaacattgaccaatttgcttggagtgatggtggtagaataaagacacaatttcctgcacaggtcctcatctctatgaagactgcctgccttccagttccagaatctcaattccaaagtgtgatcagtggcaattattacaaacctcggcacttcttctttgagctagaccatgaacaaacaagagctttgatatttttgtttaagcctgcccctgttcatgatgtttcaaacaaatgtcatccttccaaatctattcaatctccaatagtcgaagcatatgtcaatcctgatggtgaatatgctagtgagagtagaacgtcaacgagccaccttgacaaggaggcttctaactgggatgatgttacgaccaaggaaggaactgaatttgtcaataatgaccatccacatattaatccaccacatgttgaacaatatggtgaagtggctgttacgcagaaacaacaagatatgtttgttttacgacagcatgaggctgaatcctccaaggacactgtggattctgcttcaaataaatcaatgcctcaagaagcacagtttgatgccactctccccacagacccatctaattccacttcagtgggtgatgtatgtattaaagacctgacatcactggggcaatctcgtggaaatgctgagctgcttcacattgtcaaagagttatccaagaggaaccaagcaatggagaaaaaactgtctgagtcagataaagaaatactgtttctgagggaatcaatgaaggacacaggaagaagaattcaggagctggaatatcagtatgagaaactacaatcaaactataactctttagtcccactccttggtagtcgacatgataatatggaagggccatcaataatcttaatgggtggctacaggggcagtacttgcctgtcatcactagattccttttgccctacgacagacagagtagtgcctctgtgttcaatgagctcagcccgtgcatatgcagccgctgttgcattgaaggaccatctctatatttttggtggtgggaatggcagttcatggtatcacacagtggaatgctacaggatgggcagtaataaatggatagcatgcccccgtttgaaacatgcaaaaggaagccttgctggaactacattgaatgataaaatatttgctattggtggtggagatgggtctgcagttttctcagaagttgaaatgtttgacccagcacttgggagatggatagacaatgtgtcaatgcggcaaaagagatttgctgctgctgctgccgtattaagtggcacactctatgtaactggtggttatgatggcaacacgtacttacaatcagcagaaagatatgacccaagggaaggtttctggactctgctaccaagtatgagtgcaagaagaggatcccactccgtagctgtcatgggggaatccttattcgctgtgggagggtacgatggaaacagcaatatttccaccgtagaaatctttgatccgcgtgccaattcatggaggataggccgttcatgcagcattgcaagaggatacggatgcgcggtgacgatggacggcaatctgtacttcattggtggggtcaacgatgctggagaaactctcgggactgtggaggtctacaatgagaggcaaggctggtcgatctctggctgcaaatccgtagggaagagggcctttgcctgcgctatcaccgtttgacatgatcgcggatctcataccctacctttttttttttttttttttttttgcaaccagcagtcactcatggttcgcagcctttgccctcctgctggtcctactcctaccacgttggtccgagtatacctgggttgagagaaattttgctgcctccccccccccctacttatactacttccgtccgtgaacaaatcaacttctagaggtgaattgagccaaacttttgcaaacgttagaaatgttgaacttaaggtaactataaaagttaatttatttgggggatggagagagtattagacaaagccaccaaatgttctggtggtgcatttgggaattgacaatcacagagcaccaccaaatggctaagggccacagtagcatgttctgctgtgtaatgtccaggcagtctgctgctgtttgcgcttttgagaaact

SEQ ID NO: 148871 - DNA, 499 bp, Zea Mays
gccatcatgtaacaaccgcgccgagcttgtcctgtggtcgacgatcaccgcgagcaggtgagtctctccttctccctcccagtccctcggcgtgcccaacccttcccttaccgagcagcccctgcagatcctcgcgttgccgtgctctgagcagccatggccggtgctgcccccgtcgtacagccacgccggagctccaacgcgtccccaggggcggcagctcgccgccctgccccctgcgcttgcgagccccgcgactcaactggccagggcacggcccctgggacacggcaataggccacagctgagccccattgcggcctcgcccagagcctctggttgtggcgtccagtgggcacacacccctgtggtgccccagtgcggcggcgcgaccagccagccccgttgtcgtcatgctcgtgtcctcgtcgtcgctcgtgcggtgcgtcgtgcactcaatatgtcgtcgtacctcgcctcgtctcgccgtcgtcgcgag

SEQ ID NO: 148872 - DNA, 666 bp, Zea Mays
atggcccaaagtccgtttcccacgagaaaggcaaaaagaaaatcgaaaccaaaacttctggcgcgatttcaatccccacgcgcgcaccgcccgccaaagccacgaaagccccacgcgctgctcgatccgccctcccgctcctcggccaataggagccgagccatctccatccaccggctggaggcatctctctcgcccctcacgcggatcgagtctccatccgacgcctcccagcactccactgcctctatattacacccccactctctatcaggccgtctccatccaattcacaggctcaccacaccaaccagcaagcaaaaattccccaatcctctcgtctccgcggcgaagatgtcggggcgcggcaagggcggcaagggcctgggcaagggcggcgcgaagcgtcaccggaaggtgctgcgcgacaacatccaggggatcacgaagccggcgatccggaggctggcgcggcggggcggcgtgaagcgcatctcggggctcatctacgaggagacccgcggcgtgctcaagatcttcctggagaacgtcatccgcgacgccgtcacctacactgagcacgctcgccgtaagaccgtcaccgccatggacgtcgtctacgcgcttaagcgccagggccgtaccctctacggcttcggcggctag

SEQ ID NO: 148873 - DNA, 276 bp, Zea Mays
atggactacatggtgtttgaggttgctgaattggatggagcagcaatgatttgtcacattaacagcaaaatgaaagtttacgtgggtattgttcccccgaaccccaagctgattaagataatcaggttgaggatcaagcaacttattcctccgagtggtattggtgacgtgggcagcagcacccgagctgacgaagtggtcagtgaggtgcgcgataacatagccctcgagctgatgagccagtggtgtggcctcccagagtcgacgaagcagtga

SEQ ID NO: 148874 - DNA, 520 bp, Zea Mays
agtggtggtggttgtgtacttgatctatttcgtactcgtcttgatcctaccatggtagaagcacttgtctgcaccaaagattggatagatggagcaagaaaaggttccaaggctaagtgtgttgctattcctgatatggtttgtgaaatggaggaactcgaggctattgctataaatctttcacttgaggatgaagacctagatgatgatcatgatgagggacccaaggcatcattgtaagcttgttgatgaagacctaaatgatgataatgcgacatgaatgctatgaatgtttcttattgtacttgttgcgtaatgtttagtgaccttgcgaacttctcacatgtggacttgtggcattgtgaactttgtgatcaacttgttatattgtgaactttgtgatcaacttggtggacttgtgatctttgtgatcaacttgttatattgtgaacttatgatctttgttatattgtgaacttgtgatctttgtgatcaacttgttataatgtgaacttgcgat

SEQ ID NO: 148875 - DNA, 1095 bp, Zea Mays
agtcctgacctcgccgttctctcttcttccctgccgatccccgctcgcatcacctcgctccagcctccatggcagccccagccatcaccagcaaggacaaggaggaggcggctgcggctccccagccgaagcaaggggagagcaaggtgttctccaggctgttcaccagggagagctccgcggcggcgccgtccttgcgggtgtactacggcgtcgcctcggcgggctccgtgcccttcctgtgggagtcgcagccgggcacgcccaagcacgacgacgacgccgtcgccacggccaccctgcagccgccgctcacgccgccgccgtcgtcctactacaccgccaggcagcagcggcagacctcctccgccacggtcgccaccggcaagaacaagaagctgtccaagcattattacaccagcgtcttcagcgccatcctgcccaagatgatcctgcacaggcggtcgtccaggccggcctcgtcgcgctccgcgtcctcccgctcctcctcctcctcgtggtctgcggcgctcgcctcctcggccgcgtcgtcgctgtcgttccgcagcgcgcggtcgcccgccgcgtgcagctcgtcgtcgaggcggagccgggtgttcgcgttctcggccgcggacgtggacggcagcgaggaggaggaggaggagcaggcggcggcgccgatgtgcttcagcgtgcgccacgagagcttccgggcgctccggggctgccgcgtcgccatgacggtgaagagcgccctggcgtccgtcggcggccacggccacgctgctgggcccaccgctgcacagaaggtgtagtgctcaagtgctctcgatctatctgcagttaacctcatggagtcatggtcacggtgccgccatcgccatgcatgttgtcgctgttgcttggatcgagaaacggcggtgtaccttgtgtatgcctgtctcagttcacggagtaatgttgaaattgaaacctactgtatctcaggaagaggagctcgtcaaagtgttatgtataatatggtcattactcattacgtctgtaaccgtacgtgtgtaacttgaacatcataatgagatgagtaaatagcac

SEQ ID NO: 148876 - DNA, 1784 bp, Zea Mays
caagccaccaccaagtcaccaacccgagtccgatgtatacgcgcggcaacaataatatcctttcctttcttttgtataaaaaacacccgcctccgtctccatctccggtgagcaggaagagggggagggaggaggccaagagcgcagcggcgaagccatagccaagctcacccgatccagtccctgccgctcccagcgtgccacagccagtcccgcgctagctcagctcagctcagattcacgagctcgtctcccagatccagcttcgtctggtgctggtgggcggcgtggtttggtgctttgggggcctgcgtgttaagtttctgcgttctccgggctatctgcctgtcttgctgcggcctgcggcggcggggtggagatgggggtggccggggagaagttccagctggggacggtgggggcgctcagcctctcggtggtgtcctccgtctccatcgtcatctgcaacaaggctctcatgagctccctccgcttcaactttgccaccactttgacaagctggcatcttctggtcaccttctgctctctccatgtagcattatgtatgaaactctttgagcacaaacctttcgatgcaaggaccgtcatgggattcggagtgctcaatggcatatctattggacttctaaacttgagtttgggtttcaattctgttggtttctatcagatgacaaagctggctattattccctgtactgttatactggagacccttttcttcaggaagaaatttagtcggaacatcaagctttcccttagtgtgctccttcttggtgttggtgttgcaactataactgatctgcaactcaaccttgtgggatctgtattgtccctactggcaatcatcacaacctgcattgctcagatcatgacaaatacaatacagaagaagttcaaggtatcttcgacacagctcctgtaccaatcgtgcccataccaagcattgactttgttcctcgtcggcccattccttgatgggtttttgactaaccaaaacgtctttgctttcgactacacaactcaagtcctgttcttcatcgtgctgtcgtgcctgatctcggtctcggtaaacttcagcactttccttgtgatcgggaagacgtcgcctgtaacctaccaagttctcggccacctgaaaacgtgcttggtcctcgccttcggctacgtcctgctccacgacccgtttagctggagaaacatacttggaatcctgatcgcggtgatcgggatggtcctgtactcgtacttctgcactagagagactcagcagaagccggcagaggcctccccgcaagccatcctgcaggcaaaggagggtgaatcgaaccctctgatcttggattccctgagcgccgccgaaaacgggggcagtgccaccgacgacgagcctctgaaggtgccaatgtggagctcgaagtactccaaggcgtgaaaggctgttctgttactggtgtactacggtgttatacagaattcagcttggtaggcagatactactactagggttggaaggcaatcctgttcctgttcctgttccatttttggccttctattttttttcttgttttcatcctttctggcatatactacaaatatatgtgttgctgttagtaaatggatctcactctttggaggatgatacctcagctcgagacgagtgatctgtctgaaagctatttccttgtgttccatccactccacagtataaactggtagatggacatgatatcaacagtagtggtttgcattcttttgtactagta

SEQ ID NO: 148877 - DNA, 1802 bp, Zea Mays
caagccaccaccaagtcaccaacccgagtccgatgtatacgcgcggcaacaataatatcctttcctttcttttgtataaaaaacacccgcctccgtctccatctccggtgagcaggaagagggggagggaggaggccaagagcgcagcggcgaagccatagccaagctcacccgatccagtccctgccgctcccagcgtgccacagccagtcccgcgctagctcagctcagctcagattcacgagctcgtctcccagatccagcttcgtctggttgaattctcttctttggaagtgctggtgggcggcgtggtttggtgctttgggggcctgcgtgttaagtttctgcgttctccgggctatctgcctgtcttgctgcggcctgcggcggcggggtggagatgggggtggccggggagaagttccagctggggacggtgggggcgctcagcctctcggtggtgtcctccgtctccatcgtcatctgcaacaaggctctcatgagctccctccgcttcaactttgccaccactttgacaagctggcatcttctggtcaccttctgctctctccatgtagcattatgtatgaaactctttgagcacaaacctttcgatgcaaggaccgtcatgggattcggagtgctcaatggcatatctattggacttctaaacttgagtttgggtttcaattctgttggtttctatcagatgacaaagctggctattattccctgtactgttatactggagacccttttcttcaggaagaaatttagtcggaacatcaagctttcccttagtgtgctccttcttggtgttggtgttgcaactataactgatctgcaactcaaccttgtgggatctgtattgtccctactggcaatcatcacaacctgcattgctcagatcatgacaaatacaatacagaagaagttcaaggtatcttcgacacagctcctgtaccaatcgtgcccataccaagcattgactttgttcctcgtcggcccattccttgatgggtttttgactaaccaaaacgtctttgctttcgactacacaactcaagtcctgttcttcatcgtgctgtcgtgcctgatctcggtctcggtaaacttcagcactttccttgtgatcgggaagacgtcgcctgtaacctaccaagttctcggccacctgaaaacgtgcttggtcctcgccttcggctacgtcctgctccacgacccgtttagctggagaaacatacttggaatcctgatcgcggtgatcgggatggtcctgtactcgtacttctgcactagagagactcagcagaagccggcagaggcctccccgcaagccatccaggcaaaggagggtgaatcgaaccctctgatcttggattccctgagcgccgccgaaaacgggggcagtgccaccgacgacgagcctctgaaggtgccaatgtggagctcgaagtactccaaggcgtgaaaggctgttctgttactggtgtactacggtgttatacagaattcagcttggtaggcagatactactactagggttggaaggcaatcctgttcctgttcctgttccatttttggccttctattttttttcttgttttcatcctttctggcatatactacaaatatatgtgttgctgttagtaaatggatctcactctttggaggatgatacctcagctcgagacgagtgatctgtctgaaagctatttccttgtgttccatccactccacagtataaactggtagatggacatgatatcaacagtagtggtttgcattcttttgtactagta

SEQ ID NO: 148878 - DNA, 1805 bp, Zea Mays
caagccaccaccaagtcaccaacccgagtccgatgtatacgcgcggcaacaataatatcctttcctttcttttgtataaaaaacacccgcctccgtctccatctccggtgagcaggaagagggggagggaggaggccaagagcgcagcggcgaagccatagccaagctcacccgatccagtccctgccgctcccagcgtgccacagccagtcccgcgctagctcagctcagctcagattcacgagctcgtctcccagatccagcttcgtctggttgaattctcttctttggaagtgctggtgggcggcgtggtttggtgctttgggggcctgcgtgttaagtttctgcgttctccgggctatctgcctgtcttgctgcggcctgcggcggcggggtggagatgggggtggccggggagaagttccagctggggacggtgggggcgctcagcctctcggtggtgtcctccgtctccatcgtcatctgcaacaaggctctcatgagctccctccgcttcaactttgccaccactttgacaagctggcatcttctggtcaccttctgctctctccatgtagcattatgtatgaaactctttgagcacaaacctttcgatgcaaggaccgtcatgggattcggagtgctcaatggcatatctattggacttctaaacttgagtttgggtttcaattctgttggtttctatcagatgacaaagctggctattattccctgtactgttatactggagacccttttcttcaggaagaaatttagtcggaacatcaagctttcccttagtgtgctccttcttggtgttggtgttgcaactataactgatctgcaactcaaccttgtgggatctgtattgtccctactggcaatcatcacaacctgcattgctcagatcatgacaaatacaatacagaagaagttcaaggtatcttcgacacagctcctgtaccaatcgtgcccataccaagcattgactttgttcctcgtcggcccattccttgatgggtttttgactaaccaaaacgtctttgctttcgactacacaactcaagtcctgttcttcatcgtgctgtcgtgcctgatctcggtctcggtaaacttcagcactttccttgtgatcgggaagacgtcgcctgtaacctaccaagttctcggccacctgaaaacgtgcttggtcctcgccttcggctacgtcctgctccacgacccgtttagctggagaaacatacttggaatcctgatcgcggtgatcgggatggtcctgtactcgtacttctgcactagagagactcagcagaagccggcagaggcctccccgcaagccatcctgcaggcaaaggagggtgaatcgaaccctctgatcttggattccctgagcgccgccgaaaacgggggcagtgccaccgacgacgagcctctgaaggtgccaatgtggagctcgaagtactccaaggcgtgaaaggctgttctgttactggtgtactacggtgttatacagaattcagcttggtaggcagatactactactagggttggaaggcaatcctgttcctgttcctgttccatttttggccttctattttttttcttgttttcatcctttctggcatatactacaaatatatgtgttgctgttagtaaatggatctcactctttggaggatgatacctcagctcgagacgagtgatctgtctgaaagctatttccttgtgttccatccactccacagtataaactggtagatggacatgatatcaacagtagtggtttgcattcttttgtactagta

SEQ ID NO: 148879 - DNA, 1805 bp, Zea Mays; identical to SEQ ID NO: 148878

SEQ ID NO: 148880 - DNA, 764 bp, Zea Mays
cgctgacctggcgcccctccagctcatcctatctacatatcagtgtccctctccctggcccagccgctcctaccatcagaatcagaccaccacacgcccgaggcccgactgcaagcgcctgagcccaagacccatggccatggccgccgccaccgtcgcagcgtctctgcccgtggcgcaggggctcgggaagcccctctgcgccggcagcaacgcgccgtcgctccgggccttcgcgagcgcgccccgtcgtcggtcggccaggaccaggatggccgtcgtccgggcgtccgcgcaaaagcagcacccggccaaggagtgggcggccgcggctgccgtggcggcggcgctggtgctgccggaggtcgcggaggccgcgccggggatctccccgtcgctcaagaacttcctcctcagcatcgtctccggtggggtcgtgctcgtcgccatcgtcggcgccgtcgtcgccgtctctaacttcgatcccgtcaggcggggttgagctgcatgcgtcgttgtgtgttgttgtacctatgtggctatgtactgagatctctccccccgtgtgcttcccaatgaaaacagtgtttaatgcgtgaatgtgtaaatttcatttcatgccatctgtatgtatgagacggattcaacagtgcattcggtttctttatgttgtggactaacctaagatatgatctcattgcatacttatcttactattactaaattatgactgcccttaatctgctctcaaatctttgtgtttc

SEQ ID NO: 148881 - DNA, 106 bp, Zea Mays
ctcatattctcatttaagggcacctcgctcgtttgtagtgtctgtttggaaatagtaatctttccttcactcattagtcctagtgttgattttcaccataatatcg

SEQ ID NO: 148882 - DNA, 2064 bp, Zea Mays
gattctattaccagtatcaatatgctgaaggagcaaagaccatcagccaaaatgtgcagtatattggatgaagcaggctatgaaaggagagaacagtttaactgttatttaccggattcatctaagagcctcaatgctgacctctatgttgaggacgaggacatgttttatgaacctcaagctgaaaaagattggcaatcaaagcatagtagatcagatggcaatcttgctgatgagaattatgatggactctggaggatggatgaatttaattcagaggatcatctttttactcaaagagacaaacatgttgatataagtggctatggatttaaagacggatactctccagagcgaagaaactcaacaagacctgtcacagtatttgagaatacaggaattcaatcctcacatgatctcttttctgatcattcattgatggatgatgaggacactgaacttttcaagtgggaaagtcacccaccaagtaagaaaaaatccaactcaaatagcaattttggtccttctgcttggccttatgacatggtcgatggttcagagaaaaggagtccaataagtgaagaatcatgctcatctgctgcagcgatgaaggatagaacgtgcaagaaacaatcaccatcaatgaagaatgatatgaacgagaatgacgagtttcatataagattggataagctggatattccaaacatggatgcacctcttcatgggaggtcactgtttaacaatccagaaaagttggataggaaagaaacagcacctcggaagaaacttgagacaaattggttgcaaagtgttactgggcagccaagaactcaagaaccaagctgtcggttatcacttaacgagaaattttctaattgggattctcctactttccgttcaaagagtactactggactaactgataaatcgagttgcaccatgttgcataaggataaatcttctttcgatgccgctccagatttggacatgtatcaaactgtggagtcaactcaaaagaggcctgtttcaaaagttcattctatttatcagaggcctgagaaacctatttttgaagacgaaattcacatgcagcatactgtttcagatatgtttcatgataaaattgaattatcgaacccatatcagaacaagaatctccagagtgacattgatatgagcactttcattgggcagaaggtggagaagcaagaagatgaatttccatgcttcagcagttcaagtgcagacaccttccgtgcagagaaagcagcgcgttctgtaagacaaactgttgatcgacacagtacatgctcacagccttctggcagggattcattcaggcacgggttcagtcctggtttcaatttccaggagtcagaaccaaacacgttttgggcagatagctatgtttgcaatggtacttttcaggcgggtcttgagttcagtggtgtggttgcaagaaaagacagtgataagaatgaagtcaagattgaggcatctgagaaaccagatactaagatattgacaggaacatgttggctctctgcagataacaggaatgtgattaatgggactgaaacatgttctgatggctcagaagcgttcaattgttctgaagcacagaaggaaacttcagcagtagtgacacaaattcctgcgaacttgagctctcttcgggaaacctcagcagaactgttccaagttcgtaatcacgtcatacctgtaaagagggaaaagatagataatcctggtgttgacttcgatgctgtgatgcattcaaaaagcaagatccacgatgttagagatcattctaaactaaatactacgtttcgatctcctttcattggagaggtggtggggattgagaagaagattgtagcgaacgtgtcacccgacaactctgatgttcagtatcagtttatgcttgaacaacgtgttcttcggcggctttgtgttcagaagatagtggtgcctacaccgatgaaggacaggctagacaaggatacaaacttcacgatagcggaggatggatctcttcatgtccttccaaaaagcgtctaa

SEQ ID NO: 148883 - DNA, 1409 bp, Zea Mays
caagcaagatcattgtcataccaatctctctcccttgcaatgaccctctcaagcgcctagggctgctaccctagaaccaagcctgcggcagaggggtataacctcgccggagaagacagctatccccatggactgacacctggtatcagctccaggttatcctcaccaccaccagccgcccatccctcaccaccaccagccgccgcaacgccctcccacccgccctctccaactccagatgcattcactcggctcgaagagagttttggccgtctcgcagagaagtaggatcagttcgttgtgatgttccaccggtacaaggagaagacagagaaggaactccaagcagcggtgcggcttcaggcggcagcgcgagggttcctggcacgccgccaggtacagtcccttcgtggggagaagcaccttgctgtggcctccagggccaccccatggtcgtcatcacatgagcaggtcgtggtgcgcctgcaagccgcagtgcgcggcttccttgttaggcgggcggtgcggaagctgcacttgctgatcagctcatcgctgcaccaactcgcagcctgcgcgcccaaccaccaggtctcgtctatactttttgaaccccctgcagaagtcgagatctgggtatgcagcccctctgcacggccaaagagggtcgtctccattcgggcaactgccttggtgctggacagacccaacataagaacgggctggttcctccttcacctttcatccaacgtgaaatccgcagttcaactctttccttgggatccaggaggacaggaggacatagctgcagttcaaatttatattttagttccacaattattttgtattttcgtcttaaataataaaggtaagccgagatgtaaaaggcttaaccttaagtcgtgtcaggtaagtctatggcagctcgaggacgagctggtcctcaagggagggggagatgtcatgggcatcatagggagcgagaggcaacagccaggctgggataaggctagagaataagattgagatgagctgggataaggctagagaataagattgagatgagagaattgtggagagttggttagcagcagataagtccaagaaagtaggagttagttgagagtttgtaggagaagttggttagccatagggctatttataagccgcatggcagcagggaataaatcaagcaagatcattgtcataccaatctctctcccttgcaatgaccctctcaagcgcctagggctgctaccctagaaccaagcctgcggcagaggggtataacctcgccggagaagacaactatccccatggaccgaaggtccatgacataagcagtgtttagttttacataaaatggtttttgtttgtggatatttctcaatggttggtttgagactact

SEQ ID NO: 148884 - DNA, 1531 bp, Zea Mays
aaaattcgtcacaggtctcctggtccaggccgccgccggttcaatctctcctctgacttctccggctgtcctcgactgcgaacccgatctcgattcgatccccaagccatcccatggcggctgccctctcctcgcggcgtgccctgcacagcctccaccgccgcctcctcttccacccctccccctcacccgccgccgcacgccgcgcgctacccacttccactcgcagccccatccccgcacactcccccaccttctccttctccttctactcctcctcccgcttcttcaccaccgcgcgccccgatgcgaggctgcggcacgggatgctgccgcagcggctgataggcggggtcaggtcggtggcgaacggtgggtcgaaactgggaccgctgggtcagggggtcaaggggctggggcggcccatggaggcggcgaggagcgcggccgcgcggtaccgcgcggccgtcggcctgcaggtcgaggccttctggcggcgcaactccatgatcctcgtcggtgcggggggagtcatcgtctgtttcttgctctggaggatcatgttcggcatcgccagcaccttcgtcggcctctccgagggtatggccaagtacggcttcctcgcccttgccaccgccattgtcgcctttgccggtatgtatgcccgggcaaggttaaccataaaccctgacaaggtttaccggctggctatgacaaaactcaatacatctgctgccatccttgaagttatgggtgcgcccctaactggtactgatgtcagagcatatgttatgtctggaggaggcccgaaactgaaggacttcaaatttaagcttggcagtaaacggtgcttcctcattttccccatcaaaggatcagaaagaaggggcctcgtaagtgttgaggccaagaagaaaaatggacagtatgacatgaagctactagctgttgacataccaatggcatcaggtcctgaccagcggctgttcctcgtgggtgatgaacaagagtacaaggtcggcgggggcttgatatctgagctacgagacccgatcgtaaaagctatggccgcggagaaggagtttgactatcttgacgagagagaggatgaggaggacgagcggagggagcgtgaggaggcggagcaagaggaggcggaagcattgaggcgcgaggaggaaaggctgcgccaggcgggtgaagagcgtaggcggcgggaggaggctgagagcctggagaaagctacgtgacatgacttactgtactgactttccaccttgcctcgtgcattgtctcctacctctgtccctcccggagtgtagcgatcagcggtttccacagcaggagattgcttccgagttcatttggagttcctggtggtcaattcggcgtcaccagtctcaaagttgttgagaaggaaggaataattttgaccgttacgcgacaggtcacttcggcgaagcaatgtaatttatagtggttgatcagttgttaacctttttttttgctgcacgtctgagcgcatggagtt

SEQ ID NO: 148885 - DNA, 1893 bp, Zea Mays
accaacaaaagaaggaccccagtaccccactaaagaagagaagaatgtggcgtgaacagagagacctgaccctgaggcaggtgaggaggtccagggagcaatgggtttcggcgtagtgcacctcctcgacgcggtgttccgccgcatgttccggtcggccggcctccgcccgggctcggccacggtgaacgccgaagacgacacggtcatccactactgggcccacccgtccctcctccgcccgccgccctccgactccgactccgagcagcggcagccggtggtggtgctgatccacgggttcgggccggacccgacgtggcagtgggcggcgcaggcgggcccgctgtcgcgccacttccgcctggtggtgccgacgctgctcttcttcggggcgtccggcacgcgcgcgcccgcgcggtccgacgcctcccaggccgccgcgctcgccgcgctgctcgcgggcccgggccagcagcacctcccgggcctcggcgccggccgcaccgtgcacgtggtgggcaccagctacggcggcctcgtggcgtaccacctcgcccgggagctggagcggcaaggcggcggcgttcgcgtcggcaaggtggtgctgtgcgactcggacgcgtgcaagggcgccgaggacgaccgcgcgctggcggccaggagcggcgtggcggaggtggcggagctgctggcgcccgccgacacccgggcgctgcgccgcctcatggcggtctgcgcccaccgccccgtcaagtacgtccccgagtgcctcctccgcgacatgctccggagatacttcgcggacaagagggaggagaagatggcgctcatcagagggatcgccaccggagaaggcttcgagcttgctccgctgcctcaggaggtgctcatcatctggggagagttcgaccagatcttcccggtggacaaagcgcacaaggtgaaagagaagctcggggagaaggcgacggtgaaggtgatccccaacgcggggcacctgccgcagcaggaggacagcaagctcttcaaccgagtcctcctcgacttcctgctgcgcccttcctccaccgccgcctgacctccaacggcagcgcccaagccaaacagcttatagctcgctcggctgccgccttttgtttccggcgttcttgtttgtttgtagagtggagaggaggcgctgccgccttttgtttttgtttttctccatggctggcttgttttgaaattcaagagggtggcaatgtgcagatcctaccttgtgtctaatgatgtaggtttgatttattactgtggcacagatttctcgacgccggccatgtctacgtacgtcagcgttgttttcatcgtccgcgatcggattcacagcgtgcggtgcggcgcattctccctccgccgcccatctcccgtcttttgctggtgtaatgttatgagagattacgaggccatgccctggtgtcctcttctagttcagaaggcaacgcccagcggccaacgccgcagaacttgcacggacaaaaggcaactcgtccacgccgaacgagagcggttaaaagattgcaaatttccagagcgcattcctttctggtgctacgtacaaaacagccgaatgatcaatgccatctgatcgagacgggcgtgcaagtgcaagccaagtcgggatcagccgacccgtacctacagaccaacggcaacaaccacgtcgacagtttctatacaccatggacgttaaaatccataggaaccaagcaattgctccatcgccataatttgatcaagtcaagggtaatgttgtcagaatgttgttgtgaatcttgaatgattgcttactggtacaataaacttccaggggaaaaaatgaactactttcacatgagcagagagagctaatgc

SEQ ID NO: 148886 - DNA, 96 bp, Zea Mays
caccggatgtgctactcctctacatacatcttgttcgaggacactcacacaacaacaatggtcatcattccagcgcacaagaattcatggtcggtc

SEQ ID NO: 148887 - DNA, 1088 bp, Zea Mays
ccgaggcagtgcagtcacacacacacgactagcaggcacagcagcaccgactagtcaatctctacttgcctacacagcagaaggaaccagacagggaagtagggaaccagagaaagcatagcaatggtgcggaagccgatccacgctgacgacgccggcgctaagagcacggaggcgagcaaggagaggaaggggttgtggtcgccggaggaggacgagcggctcttcacccacatcacctaccacggcgtctccacctggagctccgtcgcgcagctagcaggcctgcggaggagcggcaagagctgccggctgcggtggctgaactacctgcgcccggacctcaagaaggagcccatctccaagcgcgaggaggagaccatcatctccctgcagcagtcgctcggcaaccggtggtcgactatcgcggcgaggatgccaggcaggacggacaacgagatcaagaactactggaactcccgcatcaggaagcgcctcaacgccgccgcctccagagctgcaggctgcggcgacggcggtgacagcgcggccgagccatcgggggccgcggccgcgggaggaaaggaggattcggccaacgctgcgccgccgccagcggcccagcctacgcccatcccggcgcggttcccggtcttcgggtgccagctgcccgacggagccggcggcggcatttcgtctcccggcagcggcaagagtccacagtcgtcgactactgcgagtatgcggcagaacgcgggtgacgagagcgatgcgagcgacggtggcggtggcgacagcgacatggtccatttcctctcgttcgatgatctggattatcccggggatttgctcattgatgtgccgggcgccatggacgcgtgggagagccaactgtgctatgcgaatccgatgatgagctcgctctgttgatccacactaccaattgcatatagcacagccattgtcttgttcccgctaatcatatataggttgtatgaattgtttatgtgaaatttcactgggttttttggagaaggaatgcatgatgacgtgtgggtattcctattaaaaagaaattttgatcaatc

SEQ ID NO: 148888 - DNA, 2460 bp, Zea Mays
gccctcctcgtctagctggtccctgctgcagcactaagcttagcttagctttgagagcttctccattgtttgcagcactgctaataaagtgctgccgctcttttctctcctctcctctgctctcctagctatacgttctttcttccttacagtacccactgctgctgttcagctgagctaatgcagtgttaagctcagttactgtcgtcggtttcagcaaaagcctcgcagtgtacttgcgcctgaacctgacgagaaagagagcgaggtcaaaacagaggggaaccaaagctccaagaaaggggagggaccttcttcgacccgcttccatccagcatctcgctcgtccgccgctcgaggtccttcctaatcggcggccagccagccagccgcagccgcctcctttggcaagaaggacactagttccacctgttttcttgcaaaagagcttttttttttcttccatccctctctttttcttccccatcgttcgtgtgctgcccccaagaagccgggagctagctagctagcgagcggcccaccggccgagtttggagctagcacgagcaggctgctgtaggcgttggcagcacgctctctttctttccctctcggcggcatgccttcggcggcattaaatctcggcacggcggtcgagggcagcttccaaggcgccggcggcggcatggtgccgtccgcgcgcctcctcaccgctaacggcggcggcgcgccgagccgtcgggaggagacggccaacggcggagggcctggctctgacctggccgcgctccggcccaccaaaaggccgcgcgggaaagcccagctggccgggaagcccaggaggcgggcgccgatctggaacctgcaggccgccgtcttcgtctctgtcgtcctcaacgtcggcctcctcctccagcaccacgtcaacagcacagctccgtcgcaccacgaccacgaccacgggcaccggcaggagcaccaggcctgcccgacgcatctagacggtggcggcgtcagccgcagcagtagggggaggcaggaggtggaggcggcggcgtcggcggcgtccgtgcccaaggccgccggggcgccgtccaccggcaagccgccggtgacgccggactcggtgatcaacctcgaccacggcgacccgaccatgttcgaggagttctggcgggggacgggggccgccgcggagatcgtgatcccggggtggcagaccatgagctacttctcggacgtgggcaacgtgtgctggttcctggagcccgggctggaccacgaggtgcggcggctgcaccgcctggtcggcaacgccgccgtggacgacggctaccacgtcctcgtcggcaccggctccacgcagctcttcatggccgcgctctacgcgctgtcgccgcccgccgccgcgcccatgagcgtcgtgtccgcggcgccgtactactcgtcctacccggccgtgacggacttcctccagtcggggctgttccggtgggccggcgacgccagctcgttcacgggcgacgcctacatcgagctggtgtgctcgccgaacaaccccgacggcgccatccgcgaggccgtcctgccctccggcggctccggcgtagcggtccacgacctggcctactactggccgcagtacacggccatcaccagacgggccgaccacgacatcatgctcttcaccgtgtccaagagcacgggccacgccggcacgcggatcgggtgggcgctggtgaaggaccgcgacgtcgccaagaggatggccaagttcatcgagctcaacacgatcggggtctccaaggactcgcagctgcgcgccgccaaggtgctcggcgcggtctccgacgcctacgagctcccggaggcggcccagcaccgcctgttcgactacgggcggcgcaagatggtggagcgctggcgcgtgctgcgcgaggcggccgccgcctcgggcgccttcagcctgccccacgagacctcggccttctgcaacttcaccaaggaaacggctgccactaaccccgcgttcgcgtggctgcgctgcgacagggaggacgtggaggactgcgcgagcttcctgcgcggccacgggatcctgacgcggagcgggagccagttcggcgcggacccgaggtacgtccgggtcagcatgctcgaccgggacgatgcctacgacatcttcgtcaagcgcctctcctccctgcactgaacaggccgggtcggctacacgcatgcatggcatggagatgggaggaggatcgatgccatgccgcccggccggcgtcggcattgccggtccgtggaacagtgtgagcatgcgccatgatcgagtagtagagggcagcagtgttggtacttggtaggaacaagggcaggaggagcaacgctttgttttgctcttttctcctctatatgctgtgtgttgttcgggatccttataatggtttcatttttttc

SEQ ID NO: 148889 - DNA, 2324 bp, Zea Mays
gccctcctcgtctagctggtccctgctgcagcactaagcttagcttagctttgagagcttctccattgtttgcagcactgctaataaagtgctgccgctcttttctctcctctcctctgctctcctagctatacgttctttcttccttacagtacccactgctgctgttcagctgagctaatgcagtgttaagctcagttactgtcgtcggtttcagcaaaagcctcgcagtgtacttgcgcctgaacctgacgagaaagagagcgaggtcaaaacagaggggaaccaaagctccaagaaaggggagggaccttcttcgacccgcttccatccagcatctcgctcgtccgccgctcgaggtccttcctaatcggcggccagccagccagccgcagccgcctcctttggcaagaaggacactagttccacctgttttcttgcaaaagagcttttttttttcttccatccctctctttttcttccccatcgttcgtgtgctgcccccaagaagccgggagctagctagctagcgagcggcccaccggccgagtttggagctagcacgagcaggctgctgtaggcgttggcagcacgctctctttctttccctctcggcggcatgccttcggcggcattaaatctcggcacggcggtcgagggcagcttccaaggcgccggcggcggcatggtgccgtccgcgcgcctcctcaccgctaacggcggcggcgcgccgagccgtcgggaggagacggccaacggcggagggcctggctctgacctggccgcgctccggcccaccaaaaggccgcgcgggaaagcccagctggccgggaagcccaggaggcgggcgccgatctggaacctgcaggccgccgtcttcgtctctgtcgtcctcaacgtcggcctcctcctccagcaccacgtcaacagcacagctccgtcgcaccacgaccacgaccacgggcaccggcaggagcaccaggcctgcccgacgcatctagacggtggcggcgtcagccgcagcagtagggggaggcaggaggtggaggcggcggcgtcggcggcgtccgtgcccaaggccgccggggcgccgtccaccggcaagccgccggtgacgccggactcggtgatcaacctcgaccacggcgacccgaccatgttcgaggagttctggcgggggacgggggccgccgcggagatcgtgatcccggggtggcagaccatgagctacttctcggacgtgggcaacgtgtgctggttcctggagcccgggctggaccacgaggtgcggcggctgcaccgcctggtcggcaacgccgccgtggacgacggctaccacgtcctcgtcggcaccggctccacgcagctcttcatggccgcgctctacgcgctgtcgccgcccgccgccgcgcccatgagcgtcgtgtccgcggcgccgtactactcgtcctgccctccggcggctccggcgtagcggtccacgacctggcctactactggccgcagtacacggccatcaccagacgggccgaccacgacatcatgctcttcaccgtgtccaagagcacgggccacgccggcacgcggatcgggtgggcgctggtgaaggaccgcgacgtcgccaagaggatggccaagttcatcgagctcaacacgatcggggtctccaaggactcgcagctgcgcgccgccaaggtgctcggcgcggtctccgacgcctacgagctcccggaggcggcccagcaccgcctgttcgactacgggcggcgcaagatggtggagcgctggcgcgtgctgcgcgaggcggccgccgcctcgggcgccttcagcctgccccacgagacctcggccttctgcaacttcaccaaggaaacggctgccactaaccccgcgttcgcgtggctgcgctgcgacagggaggacgtggaggactgcgcgagcttcctgcgcggccacgggatcctgacgcggagcgggagccagttcggcgcggacccgaggtacgtccgggtcagcatgctcgaccgggacgatgcctacgacatcttcgtcaagcgcctctcctccctgcactgaacaggccgggtcggctacacgcatgcatggcatggagatgggaggaggatcgatgccatgccgcccggccggcgtcggcattgccggtccgtggaacagtgtgagcatgcgccatgatcgagtagtagagggcagcagtgttggtacttggtaggaacaagggcaggaggagcaacgctttgttttgctcttttctcctctatatgctgtgtgttgttcgggatccttataatggtttcatttttttc

SEQ ID NO: 148890 - DNA, 2100 bp, Zea Mays
gccctcctcgtctagctggtccctgctgcagcactaagcttagcttagctttgagagcttctccattgtttgcagcactgctaataaagtgctgccgctcttttctctcctctcctctgctctcctagctatacgttctttcttccttacagtacccactgctgctgttcagctgagctaatgcagtgttaagctcagttactgtcgtcggtttcagcaaaagcctcgcagtgtacttgcgcctgaacctgacgagaaagagagcgaggtcaaaacagaggggaaccaaagctccaagaaaggggagggaccttcttcgacccgcttccatccagcatctcgctcgtccgccgctcgaggtccttcctaatcggcggccagccagccagccgcagccgcctcctttggcaagaaggacactagttccacctgttttcttgcaaaagagcttttttttttcttccatccctctctttttcttccccatcgttcgtgtgctgcccccaagaagccgggagctagctagctagcgagcggcccaccggccgagtttggagctagcacgagcaggctgctgtaggcgttggcagcacgctctctttctttccctctcggcggcatgccttcggcggcattaaatctcggcacggcggtcgagggcagcttccaaggcgccggcggcggcatggtgccgtccgcgcgcctcctcaccgctaacggcggcggcgcgccgagccgtcgggaggagacggccaacggcggagggcctggctctgacctggccgcgctccggcccaccaaaaggccgcgcgggaaagcccagctggccgggaagcccaggaggcgggcgccgatctggaacctgcaggccgccgtcttcgtctctgtcgtcctcaacgtcggcctcctcctccagcaccacgtcaacagcacagctccgtcgcaccacgaccacgaccacgggcaccggcaggagcaccaggcctgcccgacgcatctagacggtggcggcgtcagccgcagcagtagggggaggcaggaggtggaggcggcggcgtcggcggcgtccgtgcccaaggccgccggggcgccgtccaccggcaagccgccggtgacgccggactcggtgatcaacctcgaccacggcgacccgaccatgttcgaggagttctggcgggggacgggggccgccgcggagatcgtgatcccggggtggcagaccatgagctacttctcggacgtgggcaacgtgtgctggttcctggagcccgggctggaccacgaggtgcggcggctgcaccgcctggtcggcaacgccgccgtggacgacggctaccacgtcctcgtcggcaccggctccacgcagctcttcatggccgcgctctacgcgctgtcgccgcccgccgccgcgcccatgagcgtcgtgtccgcggcgccgtactactcgtcctacccggccgtgacggacttcctccagtcggggctgttccggtgggccggcgacgccagctcgttcacgggcgacgcctacatcgagctggtgtgctcgccgaacaaccccgacggcgccatccgcgaggccgtcctgccctccggcggctccggcgtagcggtccacgacctggcctactactggccgcagtacacggccatcaccagacgggccgaccacgacatcatgctcttcaccgtgtccaagagcacgggccacgccggcacgcggatcgggtaagtcggtcggtcgctcgctcggcctcgatatcgccggccgatgcagtgcagactcgaggcaggcgtgcgtgcgtgcgtggatggggcaggagcaggacgaccggcgatggatggctgagcgttccggttgttgcgcgtgcgtacgtgcaggtgggcgctggtgaaggaccgcgacgtcgccaagaggatggccaagttcatcgagctcaacacgatcggggtctccaaggactcgcagctgcgcgccgccaaggtgctcggcgcggtctccgacgcctacgagctcccggaggcggcccagcaccgcctgttcgactacgggcggcgcaagatggtggagcgctggcgcgtgctgcgcgaggcggccgc

SEQ ID NO: 148891 - DNA, 2241 bp, Zea Mays
cttgtccggttctaccgtcccatctggattcctcttctgctccccttctcctcccttcccttcccttcctcgacttcacctcaccaccatctccagctccatccgcacgcagccgtttaccaaccgacgcagcgaggagatgaacgcgtcgcagttcatggacaagcagatcctcggcctggctgcctccgcttccccctccggcggcggcgcggggggcggtgggggtgtggatctcagcgatctgatgataccgatcccccaggaggacgccgagaaccgcctcggtcgccggcgtagcagcaccagcgtcaacggaaccgcagacgacatgctacccagttatgacttccagcccatccgcactagtggcggcgccgcggccgccgccgcgcctcaggcctcgtgggggtcgctcgactccaaggcaccctctgcctcatacaacctcaagagtgctggtatattggagccgcatgtgctgaagaaagttagtcatgaggaagacaagagtaactttcctacagttactattgcggatattgatcgaaccatgaagaagtactctgataaccttttgcatgcactggaaggtgtaagctcaaggctttcacagatggagggtagaacacaccaactcgaaaactctgttgacgagttgaagttaacaatcggtaactataatggtagcactgatggaaaactgaggaaccttgagaacatgctcagggaggtccaagcaggtgtgcagattttgcgagacaagcaggaaattgtcgagacacagctccaccttgcgaagctccagacaaacaaaaccgatggccaatcatcagaaaatagtgggtctggacaggctggtttacagcagcagccggtggttcctccacaagcagccattcagccacaacaagtcctaaccccttcgcaaccacctgcacttcctgcccttcctgctccaaatgcaccacctccacctccaacgcttcaaaaccaatcatcattacagtttccaagtcatttacaacattcacaggtaccatctgtgccttctgttgcactggcacccacagttccagctttaccaagggatgcttactatgccccatctgctcagccgaccgagaccatgcaccagcagtatcaagctccgccagttccacagccacaggcacctcctgcaccacctcagcagtaccaatcccaaacccagttccctcaatatgcacagccacctcagcctgcaaatgttaacccttcaactccccatgtgccccatgcaccccagcaaccagaggaaactatgccttatgcaccagctcagagctatccacctaatgcaatcgctgcaccttatatgcaaccacctagtggacctgctcctccttactatgggcagcaaaaccctagcatgtatgaacctcctgcaggccgggctaaccctgggccaccatcatcctacggttctggtgggtacgggccacagggtggaggtagtttctctgaatcttatggttacactggatctccttcccaccgtggcaatgctggaatgaagcagtcttcaccttttgctcaatcctctggaggaagcggcagctatggcagtggcaagctccctactgcccagatgcttccacaagcagtgccgatcagctcctccagcaccagcggttcttctggcaatagagtgccacttgacgatgtagtggagaaggttgctacgatgggattctcaagagagcaggtgagagcaaccgtgcggaggctgactgaaaacgggcagaacgtggacctgaatgtggtgctcgacaagctgatgaacggatgataagttgagcaatactgtcatttcacagtcccgcacagtactatggaaacttggaaagtgtcagctcatcagctgaaacgatttttctgtctgcaacgttgcatacctgattgtgcctggagaacaataatggccgaacagccgctcatcctgattgccggtcacggttgcttcatctggaatggaaacagctcagtgtgccttcagtgaattacagtatcacaatctgaatacgttgtccattttatgtatatgtggcgatgagacattctaaaacatatactgtggtttcttgtgatatgttaataagcagctttactctgtttttaggcagtgtttcagcttgctggaaagtgctttcgctacataaaagcggaacatcaaccaaactcaacaaagtgtcctttccc

SEQ ID NO: 148892 - DNA, 715 bp, Zea Mays
atttttctaacaattggttattcgatattgaaaggaatttttatgcaaataaaatttatcttaaagcaaatataaaagatgtgctagaaacaaactctggatagggttgcagttgcactgtattgtgcatctcgggatgggaacaggaacaaactctggacgtcaggacgaaagttatgtggaaaaaggggattaaaaagggaggaaccaatttccttcagaagaaatagatgtggaaagggtggttataattcattgcttattagtcgactcatgatacatcagctagcagcatgggaaagttatttaattagaaatatctgcgttgatatattatgcaagttctgtgataacttgacaaatttggattctttctgtaagctgtccactttctcgtccgatatgttatgcaatcacaacatgttttaggagttcattcagttttattttagatatgttcacaaagtcatcatctatttgagggatgacatgttgttttatgatttgagggctttggttccaggccttcgatgaagctatttcagagctggatagtcttagggaagagtcgtacaaggatagcactgtcatcatgcagcttcttcgtgacaacctcaccttgtggacttctgacatgcaggaggatggtggcgatgaaatgtgggaccagtacatgatcatttacatgtataggaacattcaatctgtacgataa

SEQ ID NO: 148893 - DNA, 4165 bp, Zea Mays
aacatgcactgttctacagctatgcgtacgtatggtacaatgggaattattgctttgcttagatccattcattcactcatccatgtcatggtggcgcgcccttcgtcctcctccctaccccacatcctctggtcctgtggtccacatgaccatgcactgtgacgagcggcggcccgtctgcacgccgacggttcataggctctcgacagcgtccagccaatgttacctaccatgtctgagccaagcttaggggtggcgccaccgtcgccgtcggtctcggtcctcctcctcttctgagttagtcctccggcgggcgacgctagctgttacattgagtacgccagcgagctggacgcggacggcgacggccgcgggagggccgtgggtttggcgggcgaggaggcagcggcccacctggccgagtccagcggcggcggcctcgacccgctgaccttccgcgcctcggcggagccgtcgtcgctccggaggccgcgcagcagcgccgccgcgtccttcatcgtcggccggtcctcgggccgcgcgctggcgcagagcagcgcgatcccgagcgcctgcagcatctcctgcacctgcgcgtccgcccggccctgcagccgctggtcgaccacgtccgcggggtcgcgcttctggtggaggtgctcgcgcacccactgcaccacgctccggccctccccgaacgccgcctccaccggccgccgccccgtgatggcctccagcagcaccaccccgaagctgtacacgtcgctcttcgtcgtgatcttggtcatgcacccgtactctgcgcgcgcgagagcccaggaccaccgaataatcaatcacaaccgttcgttcatcagcttcttgtgagtttgtaacgaacgaccggccggccggccgggattgcacgtaatgtgcagtgtttacgatatatacgggaagaataaagaacttttaccgggagcgatgtacccgtacgagccggcgaacggcgggggcgacgagttggcgccgtcctcggcgaccctggcgaggccgaagtcggcaaggcacgcctcgtaccgctcgccgaggaggatgttgtcggccttgacgtcgcggtggaggatcgccggcacgcagtcgtggtgcaggtacgcgaggccctcggccacgccgacggcgatcgagagccgcacctcccactccaccaccgcggcgccggccgacccgccgccggcgctgtgcagcaggccgccgagggtgccgttcgggaggtagtcgtagaagaggaggcgcgtccgccggttggccgcccacccgaggagccggacgatgttgcggtggcgcacccggggcagcacgcccacctcgcacgcgaacgcctcggcggacgcctcgtcgcacgaccggaacctcttcacggcgatggccgcgcccgtggacggcacgctcgcgcggtacaccgacccggaccagccctgcccgatgacgttcgccggcgtcaggctgcgcgccacgtcgcccacggtgatgtccagtttctggtacagcgtcacgtcccacggcggcagcatgtcggcgtccttgccgtccgcgtcggagcgcgcgccgccgaacaccgacgagcgtccgcggcggccgacgaggaggaacgccgcggcggcgaggagggcgacgagcgcggacaccagcaccgcggtggccacgcgggcggcgcgccgcgccgcgcgctcgcgctcgcttgcgtcgccggggcaccgcgagaggcacaggcctgggttgccctccacgtcgctcgccggcagcttcgcgaagaacgccgtcgcgggcgcgcggccggtgaagccgttgaaggagatgttgagggccacaaggttctggagcgcggtcaggggctggaggtcaccggagagctggttgtgcgacacgtcgagcacgccgagccgaacgaggccgccgaactccttcggtatagcgcccgacaaaccgttgcagctcaggttgagagcgatctccagccccggaatcttgccgatgctcgccggtatcccgccggacagcgtgttgccgccgaggtccaggagctggagccgtgagcacgagccgatctctggaggtatctggcccgtgagcctgttcccgccaaggacgagcttcgtgagcgaactgagcttgccgatgtccggcgggatcgcgccgccgatggaattgtacgacaggtccaggtactgcagcgagagcatgtcgtggaacagcctcggaggcaggacgccggcgatggcattgccgtggaggtcgacgaacgtgaggttccggcacccggcgatctccgcggggatggcgcctgacaacctgttcgagctcaggtcaaagaagctgaggttgccaagtctaccgacctcgggaggaatcgcgccggcgaggtggttgccgctcgcgcggaaccggacgagggacgtgcagttgccgatctccggcggtatctcgcccgagagggcgttgtcgatgagcagcagcttggagagccgcggcagccggaacagggagcgcgggatgggcccggtgagcgcgttctgcgacaggtcgagcgactcgaggctcgcgcagccgccgatctccggcgggatgctccccgtgagctggttggcccagaggtagagcatgcgcagcgccgtgagcttgccgatgccggcggggatggcgccggatatctggttgttgtcgagctcgaggtcggtgaggttggcgcagcgcgcgagctcggccgggaccgggccggacaccttgttcccgctgagctgcagctcctgcagcgacgtcaggttcccgagcgacgccgggatgtggccggtgagcccgttcatggacaggtccaggacggcgagccccgcgcacgccccgagctccggcggtatgacgccgacgaggctgttctgccacagcagcagggtcttgaggttgctgagcctgccgagctgcggcgggatcgacccggacagcgcgttctcgtacaggtagacgttgaccaggcttgtgcattggccgagctcgggaggtatcgggccggagagcatcgcggtgtagatggcgatggtgtcgaggctcttgagctggcccagggtcgccgggagcgggccggagatgctggtctcggcgaggccgagcatggtgaggttggagcagctgccgatctccggtgggagcgcgccctggaggttcttgttgccgccggcgcggagcacctcgaggctggccatctggccgatggacgccgggatggggccctcgagctggttgtcgtagacgacgagctcccgcagcgccgtgaggttgccgatggcgtccgggatggcgccctcgaggcggttggagttgacgtagaggctctcgagcctgctccccgggcggcagagggcggccgggatcggccccgtgagcgcattgctgctgaggtcgaggtgcgccagcgccggcaggtccccgagctgcggcgggatggggcccgtgaggttggcgcccgtgagcacgaggcgcgccagcgtggcgccgacggcggaggagtgcaggtcggcggggacgccgccgtgcaggccgacgaactgcaggctgagctccgtgacccggcccgccgcgttgcaggacacgcccgtccaccggcacggcgacgcgtcggagtccctccagtcccccagcgcctcctccgcgccgccccgcagcgtgcgcttccaggccagcagcgccgcgccctgcgcgtccacggccagcgcgctgcccatgcacgccaggacaagcgcgcaccacagcagcagcggcgccgccgccgccgcgcacgcgctcctccacctcccgttcatcacgtcaggaggcatcctcctctgcagctcagcttacgaaaccacagcctgccaggtcggcaggcagccgacagcgtttgacactgtacttgagagatactacacttcactcccagagcatatccacccaggcaggcgaccaaactacgacgatgaagccgatgaggaggatgaggtgaggcggtgctgtaggatcagctgcagctggtgtcacttgcaaatctgtgtcgttgcttgtgccggaagcagcagcgcagcgcaaagaaagtggctctgcggctttgctttgctttgcttgcaaagccagggagtaggtggattggtggcgaggt

SEQ ID NO: 148894 - DNA, 2202 bp, Zea Mays
ctcctgctacgcggctgtatttatagcgagcgtcctggcctctcttctccctgctcgctcctagctggggtggggagggaagaagaggacaagcagcacgccaacgcgggagcataccgacagctccagggaacgattgaaggagtaggagaaagagaaagaacaagcgtgggatacagacaacgagaagaccgacgagccgcgacaccgccactgccaccccgctccgaagtcctagctcgtgctacaaaggaataaaccaaggccggcccatgtcttcatctagcggctgtaaccgcgggcgagcagtcctcccagtcactgcctccctcgttcccttcctgctcctcctcgtcgtcgtctcgtgccaggccgccctggtggtctccgcgacgcacacgcacgggcacggcggcgggaagcatgccggcgccgcgcgggcggccttccgtgccggggacgagcaggaggcgtacgcgaggatcatggcgcgcatggccaggatggacaaggactccaacatgacgatacaggttccttcccttcccatctcgtactcgtacatccattccctgcctgctgttccttggcccagctgtgcgcgcgcgctgccggttccggcttccggccaagcaagcctgcaaatccaccacctcgctgtcgtttacgtactctagctcgttcgtcgtgtctcgtgcgtgtgcgtgcgcgtgtgcagagccccgacggcgacgtcatccactgcgtgccggcgcacctgcagccggcgttcgaccaccccaggctgagagggcaggagcccgaggacgagcccgtggagaggcccatgtccaagggcggcgccgccgaggaggaggccggcgtgttcccgcaggcgtggagcgacggcggcagcaagcggtgcccggcggggacggtgccgatacggcggacggcggcgcgcgacgtgctgcgggccagctccgcgcgccggttcgggatgaaggcccgcggcggcggcagcagcagcagcaacgcccgccgcgactccaccagcagcggccatgagcacgcggtggggtacgtgacgggggaccagttctacggcgccaaggccagcctgaacgtgtggccggccaaggtggcgtcggcggcggagttcagcctgtcccagatctgggtcatctccggctccttcggcaacgacctcaacaccatcgaggccggatggcaggtgagccctgagctgtatggcgacagcagcccgaggttcttcacgtattggacgaccgatgcgtaccaggagactgggtgctacaacctgcactgctccggcttcgtccagacgaacagccggatcgccattggagccgccatctcgcctacctcggtctacaacggccggcagttcgacatcagcctgctcatatggaaggacccgcaccgggggaactggtggctgcagctggggtcgggcccgctggtggggtactggccgtcgctcctgttcacgcacctgggcgcccacgccgacatggtgcagttcggcggcgaggtggtgaactcgcgcccggcgggggcgcacacgcccacgcagatggggagcggccacttcccccgcgagggatccaaccgcgcagcctacttccgcaacctgcaggtcgtcgacgccgacaacagcctcgtcgccgccgccgcgctccgcctcgtcgccgaccgcccgggctgctacgacatccagggcggctacaacaccgcctgggggaactacttctactacggagggcccggcaggaacgtgcactgcccgtgatctgtctctgtctctgttggtagccgacgcccgacgacgtacgaccatgaatatacgtgcacagatagacatacagagagtgaagaagaacgtacggatcaccgaccctgccggagttgcatcgtcgtcgctcatcaaccggccggacatggatcgtataatagcaacactgctagtcatatataagctacatctagtccctcgtttagttactgcatgcatgctaatgagtttttaagcagcccgactgcgtatacgcggccgggacggtagcagagaggcaaaaggtttcgaactttcgatatttgatgtatgtgggcttctttcgtttgcattggtctgattgttttttttgtcttgggttatgtatatacatgaagaaatccacatatagtattttcttcatcacc

SEQ ID NO: 148895 - DNA, 2225 bp, Zea Mays
gtgcggccggggcaggctcgtgccggccggaagcggctcaaaacagcagcactgcactgcagcaggccggcgtccgaatccatcgtcatcaattcggcatttcttcccccgtacagcctaccaaccaactactacagcacagcacggagagagtcttgacctcggagcgagcgagagcgagagagagagctccacctcctgctcgtagctcctgctacgcggctgtatttatagcgagcgtcctggcctctcttctccctgctcgctcctagctggggtggggagggaagaagaggacaagcagcacgccaacgcgggagcataccgacagctccagggaacgattgaaggagtaggagaaagagaaagaacaagcgtgggatacagacaacgagaagaccgacgagccgcgacaccgccactgccaccccgctccgaagtcctagctcgtgctacaaaggaataaaccaaggccggcccatgtcttcatctagcggctgtaaccgcgggcgagcagtcctcccagtcactgcctccctcgttcccttcctgctcctcctcgtcgtcgtctcgtgccaggccgccctggtggtctccgcgacgcacacgcacgggcacggcggcgggaagcatgccggcgccgcgcgggcggccttccgtgccggggacgagcaggaggcgtacgcgaggatcatggcgcgcatggccaggatggacaaggactccaacatgacgatacagagccccgacggcgacgtcatccactgcgtgccggcgcacctgcagccggcgttcgaccaccccaggctgagagggcaggagcccgaggacgagcccgtggagaggcccatgtccaagggcggcgccgccgaggaggaggccggcgtgttcccgcaggcgtggagcgacggcggcagcaagcggtgcccggcggggacggtgccgatacggcggacggcggcgcgcgacgtgctgcgggccagctccgcgcgccggttcgggatgaaggcccgcggcggcggcagcagcagcagcaacgcccgccgcgactccaccagcagcggccatgagcacgcggtggggtacgtgacgggggaccagttctacggcgccaaggccagcctgaacgtgtggccggccaaggtggcgtcggcggcggagttcagcctgtcccagatctgggtcatctccggctccttcggcaacgacctcaacaccatcgaggccggatggcaggtgagccctgagctgtatggcgacagcagcccgaggttcttcacgtattggacgaccgatgcgtaccaggagactgggtgctacaacctgcactgctccggcttcgtccagacgaacagccggatcgccattggagccgccatctcgcctacctcggtctacaacggccggcagttcgacatcagcctgctcatatggaaggacccgcaccgggggaactggtggctgcagctggggtcgggcccgctggtggggtactggccgtcgctcctgttcacgcacctgggcgcccacgccgacatggtgcagttcggcggcgaggtggtgaactcgcgcccggcgggggcgcacacgcccacgcagatggggagcggccacttcccccgcgagggatccaaccgcgcagcctacttccgcaacctgcaggtcgtcgacgccgacaacagcctcgtcgccgccgccgcgctccgcctcgtcgccgaccgcccgggctgctacgacatccagggcggctacaacaccgcctgggggaactacttctactacggagggcccggcaggaacgtgcactgcccgtgatctgtctctgtctctgttggtagccgacgcccgacgacgtacgaccatgaatatacgtgcacagatagacatacagagagtgaagaagaacgtacggatcaccgaccctgccggagttgcatcgtcgtcgctcatcaaccggccggacatggatcgtataatagcaacactgctagtcatatataagctacatctagtccctcgtttagttactgcatgcatgctaatgagtttttaagcagcccgactgcgtatacgcggccgggacggtagcagagaggcaaaaggtttcgaactttcgatatttgatgtatgtgggcttctttcgtttgcattggtctgattgttttttttgtcttgggttatgtatatacatgaagaaatccacatatagtattttcttcatcacc

SEQ ID NO: 148896 - DNA, 1318 bp, Zea Mays
acgccattcttcttcggggagagagagagagaggcagagccgcacagaagcccaagtagtccactcctgcatgctttttgcccggttgcctcgcgcccctcaattcccctctctcacttcactcgcagtcgcagcagagtcgtagccaggcctgcctgtgctaagtgctaccgttatctataccgcctcgcctcgcgtcgcgtcgcgtcagctgtcacccggccggccggcccgcgccgtcgtccacgctcgtggccaggcaccaagaccgatctcctcctccccgtcctccgtctagtctagatatgagcgccggcaggtggctgaggctcgcgctgctgctgtcgctcgtcccgctggcgctgagggcggcctcgctgctgctcggcgtgccggcactggcgtcgccgtcgtcgtcgtctcgccagtcctggacgaccgacccgcacgagagagccgcggccgccgccgtctcggtctggccggcgcgcgaccgcgaccggccgtatcgccacgcgaggcaccggcggcgggccgggagcgggagcgccgccagctcatccgacgacggcgcgaggaggcggctccggcaggccgccgccggcgactggttcgaggacgacaagcggctggcgcccacggggtccaacccgctgcacaacctgcgatgacggacggagggcgggcggggacggacgcgcgagcatcgttccgttctccccggcccggccggctcggctcgtcgtcgatcgatctctctcaggtcggcacgcaatgcacaaatggcgacgacgacgtctcgtctgtcgtctccctggtaatgcctgcagccagccagccatctctcggtccgtgacttctccttgatgccatcgtacgtggtggtggtggtggtacacgtgccacatacttccatcccttcgagttcattcctccatgtacatacgatttgaatacttgaattgaaattgcattggtgtgatgactgcgaggagatgcttgccaaatcctcatctgattaattaattaatggcacctatgcttcagctgatttcagacgtactgtacaagccacaactcaaaggctgcgctgcgcgcggctccacacacacagtagacgtgagcattcagggtttactccggcacagtgaccggacgccgacggattccctttgctcgatcgtcggggcgttcctttttttttctgtttcttatcgttttctgtcgctccctctatatataaatagctcacgcgaagaaataaaaaaaatcgaacctctttctcgcgtatacacggcaacaccgtagcttacacgag

SEQ ID NO: 148897 - DNA, 1772 bp, Zea Mays
ctgaagagcaccggcagtggctgctttgggccgatcttctcacttgcgtcccttcgtttgcagagggctgcctagccagaccttgtccgggaagctatcacccggcatcggcaacctcaccaggctgcaatctgtaacaatgggatttccggccctattcccggtacgataggaaggctggggatgctgaagactcttgacatgtcagataaccagctcacggggactatcccaagttcgcttggaaagctcaagaacctcaattatttgaagttgaacaataatagcttgtctggagttctgcctgattcacttgccagcattgatggttttgctctcgtagatctttcgtttaacaatctcagcggtccattacccaagatttctgcaagaacctttatatcaatatgatccagaagtttgtttgggccatctgaagcagtatgctttcaaggagctccgtgcagctactaataattttaactcaaagaacatcttaggtgaaggtggatatggcatagtatacaagggttatttacgtgatggctccgttgttgctgtcaaaaggctcaaggattataatgccgtcggtggggaaattcaattccaaactgaagttgaagtcataagcttggctgttcatcggaatctcctacgtcttattggattctgcactacagagagtgagaggttacttgtttatccatacatgccaaatggaagtgttgcttctcaattgcgggaacatatcaatgccaagccggctctagactggtcaaggaggaagagggtagcgctaggcacagcgaggggtctgctctaccttcacgagcaatgcgacccgaagataatccaccgagacgtgaaggcctccaacgtactcctcgacgagtacttcgaagcgatcgtgggagacttcggactggcgaagctcctggaccacagggagtcccatgtcacgaccgcggtgcgcgggaccgtcgggcatatagcgccggagtacctgtcgaccgggcagtcgtcggagaagaccgacgtgtttgggttcggggttctgctagtcgagctggtcaccggacagaaggcgctggatttcggaagagtcgcgaaccagaagggcggagtgctggactgggtcaagaagctccatcaagagaagcagctaggcgtgatggtggacaaggacctgggcagcagctacgacggggtcgagctggaggaaatggtccagctggctctgctatgcacgcagtaccacccgtcccaccggcccagaatgtccgaggtgatcaggatgctggaaggcgagcccgggctcgcggagagatgggaagcgtcgcagagcaacgtggacacgccgaagtccgtctcgtcggagctcctgcctcccaagtacgtggatttcgccgccgcggacgagtcctcgcttggcctggaagccatggagctgtccgggccaaggtgaccgaccatctggttgccaaggtcggtcatcgcacaggacaggacgcataggaaaacctatggttgtattgcattggagtcggttaggtgtagagagcccccccgacacaagggaaggcgtcaaattttctggtgggttgtaagggtgtgatctttctgtatatagctgtggtggcattcatcgtagtattgtacatacagcagcgctgtgtgaggtgagtcccatccttgttgcggcgcatctacttggtggcaaagagatgagatgaatgagtatatagaaattaaagttctcagtgcagtgcggt

SEQ ID NO: 148898 - DNA, 2391 bp, Zea Mays
ggcggggccttcgtctttcttggctgctggtttctcgaccactgccgccgcgtcttcctccctcgctgctgctgctgctgctgctgctgctgcggcggtattgcgcgttggagctggccactggtgttcgctcctcttccccccggcttgtttgctgaattcaatctgcggggttgcggccgcgggtgtcgatggggtggtggtggtggtgcctgccggtcgctgctctgctcgccgcgatcctgccgtcgtccgacgccacgctctcccctgccggcatcaactacgaagtggtggccctgatggccatcaagacggagctggaggacccctacaacgtgctcgacaactgggacattaactccgtcgacccctgcagctggaggatggtcacctgctcctccgacggctacgtctccgccttagggctgcctagccagaccttgtccgggaagctatcacccggcatcggcaacctcaccaggctgcaatctgtgctgttgcagaacaatgggatttccggccctattcccggtacgataggaaggctggggatgctgaagactcttgacatgtcagataaccagctcacggggactatcccaagttcgcttggaaagctcaagaacctcaattatttgaagttgaacaataatagcttgtctggagttctgcctgattcacttgccagcattgatggttttgctctcgtagatctttcgtttaacaatctcagcggtccattacccaagatttctgcaagaacctttatcatagctggaaatccaatgatttgtggtaataattctggagataagtgctcttctgtgtcacttgacccactctcttacccaccagatgatctgaaaactcagccacaacaaggcattggaaagagccatcatattgctacaatatgtggagtaactgttggttcagtagcttttatcgcctttgtagtcggtatacttctttggtggcgtcataggcgaaatcagcagatcttttttgatgttaatgatcaatatgatccagaagtttgtttgggccatctgaagcagtatgctttcaaggagctccgtgcagctactaataattttaactcaaagaacatcttaggtgaaggtggatatggcatagtatacaagggttatttacgtgatggctccgttgttgctgtcaaaaggctcaaggattataatgccgtcggtggggaaattcaattccaaactgaagttgaagtcataagcttggctgttcatcggaatctcctacgtcttattggattctgcactacagagagtgagaggttacttgtttatccatacatgccaaatggaagtgttgcttctcaattgcgggaacatatcaatgccaagccggctctagactggtcaaggaggaagagggtagcgctaggcacagcgaggggtctgctctaccttcacgagcaatgcgacccgaagataatccaccgagacgtgaaggcctccaacgtactcctcgacgagtacttcgaagcgatcgtgggagacttcggactggcgaagctcctggaccacagggagtcccatgtcacgaccgcggtgcgcgggaccgtcgggcatatagcgccggagtacctgtcgaccgggcagtcgtcggagaagaccgacgtgtttgggttcggggttctgctagtcgagctggtcaccggacagaaggcgctggatttcggaagagtcgcgaaccagaagggcggagtgctggactgggtcaagaagctccatcaagagaagcagctaggcgtgatggtggacaaggacctgggcagcagctacgacggggtcgagctggaggaaatggtccagctggctctgctatgcacgcagtaccacccgtcccaccggcccagaatgtccgaggtgatcaggatgctggaaggcgagcccgggctcgcggagagatgggaagcgtcgcagagcaacgtggacacgccgaagtccgtctcgtcggagctcctgcctcccaagtacgtggatttcgccgccgcggacgagtcctcgcttggcctggaagccatggagctgtccgggccaaggtgaccgaccatctggttgccaaggtcggtcatcgcacaggacaggacgcataggaaaacctatggttgtattgcattggagtcggttaggtgtagagagcccccccgacacaagggaaggcgtcaaattttctggtgggttgtaagggtgtgatctttctgtatatagctgtggtggcattcatcgtagtattgtacatacagcagcgctgtgtgaggtgagtcccatccttgttgcggcgcatctacttggtggcaaagagatgagatgaatgagtatatagaaattaaagttctcagtgcagtgcggt

SEQ ID NO: 148899 - DNA, 849 bp, Zea Mays
agtacgcttcagaccttgtgaagattttggagggtgcaaaccaatctgtgccgccacagttgaaagaaatggctcttcgtggaggatatggtggaagatcacgtcggtgggcatcttctgatgactcttatggtggtcagggatatggtgctaaaagatcaactgatagcttcaataataacaacttcggcaaccaggctggaggtggttcaagctttcactcgagctccagtggcggtcagtttggtgatactacgagcttccatggcagtgtccgcaacaatcagacgggggacaatgcgagctttccacccagctccagcaacaatcaggctggcgatggtctcagttttcatgaaaggttctatggatcacgtggaagggaccagagcagaacaagcaatgatggattccgtgccaggagcagaagtcctcctggcaagcccgtggaagtttccaactggtgattgcatccactaggtgcaatccaatttttgcgatggtgacgaaaccaagtagaagatggcaccctaacaagttatattatttccttttcttatcctgcttagatccaaggatgtgatggtctgaaccctaacggtctcctgctatcttgatttgacgtctgggagacgcttgattccgtgcctgtgggttgtaaagcgttaaaacttgactttgctagtgtactcccaatgatataacccaatcctgggtaaacaaacgcatggggatgaattttggacgaaaccatggacaactgatgtgtgtttaatgtcatgtacaatctatgtcgaaggctgttgtaaatgccgtccgcatagtttatattgagatgagtgtctgtta

SEQ ID NO: 148900 - DNA, 861 bp, Zea Mays
agtacgcttcagaccttgtgaagattttggagggtgcaaaccaatctgtgccgccacagttgaaagaaatggctcttcgtggaggatatggtggaagatcacgtcggtgggcatcttctgatgactcttatggtggtcagggatatggtgctaaaagatcaactgatagcttcaataataacaacttcggcaaccaggctggaggtggttcaagctttcactcgagcttgtataacagctccagtggcggtcagtttggtgatactacgagcttccatggcagtgtccgcaacaatcagacgggggacaatgcgagctttccacccagctccagcaacaatcaggctggcgatggtctcagttttcatgaaaggttctatggatcacgtggaagggaccagagcagaacaagcaatgatggattccgtgccaggagcagaagtcctcctggcaagcccgtggaagtttccaactggtgattgcatccactaggtgcaatccaatttttgcgatggtgacgaaaccaagtagaagatggcaccctaacaagttatattatttccttttcttatcctgcttagatccaaggatgtgatggtctgaaccctaacggtctcctgctatcttgatttgacgtctgggagacgcttgattccgtgcctgtgggttgtaaagcgttaaaacttgactttgctagtgtactcccaatgatataacccaatcctgggtaaacaaacgcatggggatgaattttggacgaaaccatggacaactgatgtgtgtttaatgtcatgtacaatctatgtcgaaggctgttgtaaatgccgtccgcatagtttatattgagatgagtgtctgtta

SEQ ID NO: 148901 - DNA, 873 bp, Zea Mays
agtacgcttcagaccttgtgaagattttggagggtgcaaaccaatctgtgccgccacagttgaaagaaatggctcttcgtggaggatatggtggaagatcacgtcggtgggcatcttctgatgactcttatggtggtcagggatatggtgctaaaagatcaactgatagcttcaataataacaacttcggcaaccaggctggaggtggttcaagctttcactcgagcttgtataacagctccagtggcggtcagtttggtgatactacgagcttccatggcagcttcgataacagtgtccgcaacaatcagacgggggacaatgcgagctttccacccagctccagcaacaatcaggctggcgatggtctcagttttcatgaaaggttctatggatcacgtggaagggaccagagcagaacaagcaatgatggattccgtgccaggagcagaagtcctcctggcaagcccgtggaagtttccaactggtgattgcatccactaggtgcaatccaatttttgcgatggtgacgaaaccaagtagaagatggcaccctaacaagttatattatttccttttcttatcctgcttagatccaaggatgtgatggtctgaaccctaacggtctcctgctatcttgatttgacgtctgggagacgcttgattccgtgcctgtgggttgtaaagcgttaaaacttgactttgctagtgtactcccaatgatataacccaatcctgggtaaacaaacgcatggggatgaattttggacgaaaccatggacaactgatgtgtgtttaatgtcatgtacaatctatgtcgaaggctgttgtaaatgccgtccgcatagtttatattgagatgagtgtctgtta

SEQ ID NO: 148902 - DNA, 786 bp, Zea Mays
ccgcctcctcccctactccggccgcagccgccgacgtcgccattcgcattctgcggcgccaatcgataggggtcagcgagtggctgggatggcgtcgtcggcgtccgcgccagcgtccacgggcccgcgctacgccccgccggatccgacgctgcccaagccgtggagggggctaatcgacggcaacacggggtacctctacttctggaacccggagacaaaggttacgcagtacgagcgtcccgtcgctgccgtgcccgccccccaatcgcagccgcttgtctactccaggcccgatgatgtgccgagaagcagcgcacctgccgagcagcgctcggaagctgcggtgagccgcccgcaatttgtgcctccctccgataacaggacaaggattgatcactcagagtcaagctctgcatctggagtgaacctttcacaaagtgctctgtccaccaatcaagtttctcagtatgccaatgggagccaaatgtcaacagaagcatatcgtgccaagcatgagattactatcgtcggcaatgaggcacctgcaccattcatgacatttcaatccacaggcttcccatcagagattctaagggaggttctgcaagcaggattctctgcaccaactcctatccaagctcaatcatggccaattgctctaaggggtcgtgatatagtagctgtggcgaagacaggttcaggaaaaacactaggctatcttctcccagggtttattcttttgaagcgcctgcagcataattcaagggaaggtccaacagtatt

SEQ ID NO: 148903 - DNA, 1110 bp, Zea Mays
ccccaggcccccactgcaggcccaccaaaagaaaagatcacgacgcgacccgctcgctctcgctctcgggccccagtccgatcgggtcggtgcctacccacccccgctggccgccgcacccaggcgaggcgaggcaaggcgcgtcccgaacaacggaaccaactgcaccgaccgagtcaatcaatccggcgagtgaccgagtggggtaggttgtgtgcggcatgacgaccacgcgcgaccgtggcgccggcggcggatcggcgtcgagggtcggtgacggggacgtcgacctgggcgagggctgggactggggcgccatcccgcggctcctctcctccgcctgcctcttcctctgctccggagcagaggctgttttggttgctgcgataagactgtaaagcaactgggtgaactgtccagaaacttgatcacccaggaccaaattaccattggagagccattttggagcacaaccaccatcgaggttgaaccagcagatctcagtggtgttacttcagtcaatacatctaacttggcctctggaactggtagcagtcataaccttcctggacttggtaataatggacttgttctgtgggaacatacaaggcaggagtggactgaaactagaagtctgcggctgaaggtgaagcaggttcgtgaaccagtattgagttggaatgcagcatatgagagtctgcttggatcaaataagccatttcctcaacccattcctcttcatgagatggtcgatttccttgtggacatctgggagcaggaggggctgtatgactagcgcaaatgatttcatgggataacatctgggataacacatagttgttcctcaagagaggggaaaaagaatgacatagagggtgtaggcttgggatgtggtgatgagttggcctgtcatacttgttttttgtcaatggaggcctgctgtacttgcagaatacagagctgtggttgtaagcttgtaagaagtcctgatactaatagtggctttgtttaatttgtcaaagaaaggtgtgtgaggttgagttgtgacaaaagtggattaggcctgctgatgggtttggattgaaatgagtttaaagggctgtgttttca

SEQ ID NO: 148904 - DNA, 1020 bp, Zea Mays
ccccaggcccccactgcaggcccaccaaaagaaaagatcacgacgcgacccgctcgctctcgctctcgggccccagtccgatcgggtcggtgcctacccacccccgctggccgccgcacccaggcgaggcgaggcaaggcgcgtcccgaacaacggaaccaactgcaccgaccgagtcaatcaatccggcgagtgaccgagtggggtaggttgtgtgcggcatgacgaccacgcgcgaccgtggcgccggcggcggatcggcgtcgagggtcggtgacggggacgtcgacctgggcgagggctgggactggggcgccatcccgcggctcctctcctccgcctgcctcttcctctgctccggaggctgttttggttgctgcgataagactgtaaagcaactgggtgaactgtccagaaacttgatcacccaggaccaaattaccattggagagccattttggagcacaaccaccatcgaggttgaaccagcagatctcagtggtgttacttcagtcaatacatctaacttggcctctggaactggtagcagtcataaccttcctggacttggtaataatggacttgttctgtgggaacatacaaggcaggagtggactgaaactagaagtctgcggctgaaggtgaagcaggttcgtgaaccagtattgagttggaatgcagcatatgagagtctgcttggatcaaataagccatttcctcaacccattcctcttcatgagatggtcgatttccttgtggacatctgggagcaggaggggctgtatgactagcgcaaatgatttcatgggataacatctgggataacacatagttgttcctcaagagaggggaaaaagaatgacatagagggtgtaggcttgggatgtggtgatgagttggcctgtcatacttgttttttgtcaatggaggcctgctgtacttgcagaatacagagctgtggttgtaagcttgtaagaagtcctgatactaatagtggctttgtttaatttgtcaaagaaa

SEQ ID NO: 148905 - DNA, 941 bp, Zea Mays
ccccaggcccccactgcaggcccaccaaaagaaaagatcacgacgcgacccgctcgctctcgctctcgggccccagtccgatcgggtcggtgcctacccacccccgctggccgccgcacccaggcgaggcgaggcaaggcgcgtcccgaacaacggaaccaactgcaccgaccgagtcaatcaatccggcgagtgaccgagtggggtaggttgtgtgcggcatgacgaccacgcgcgaccgtggcgccggcggcggatcggcgtcgagggtcggtgacggggacgtcgacctgggcgagggctgggactggggcgccatcccgcggctcctctcctccgcctgcctcttcctctgctccggagcagaggctgttttggttgctgcgataagactgtaaagcaactgggtgaactgtccagaaacttgatcacccaggaccaaattaccattggagagccattttggagcacaaccaccatcgaggttgaaccagcagatctcagtggtgttacttcagtcaatacatctaacttggcctctggaactggtagcagtcataaccttcctggacttggtaataatggacttgttctgtgggaacatacaaggcaggagtggactgaaactagaagtctgcggctgaaggtgaagcaggttcgtgaaccagtattgaggtatgagtgaatgaaatgacaaccagaacccaaaaagtttacctttacccatatcacgtttctgtcagacaagtatgtattctataaagtacatttattttaccaaatgcactttggcccttcttcatattaaaagcaaagggttatgctgggatcaccagcttttcagatcaaacctcagaataacatgttcgtctatcatcattttagctttcagtaacaattttgtctgcattcttatggaaacataaatattttcatctata

SEQ ID NO: 148906 - DNA, 3026 bp, Zea Mays
acgttggctgttgttgttgctctgctctcctcggccgggaaaggacgctgctgctgctgctgctaggctgacagcgacgacgagggggccatggctcagatcttgctccacggcacgctccacgccaccatcttcgaggccgagtcgctctccaacccgcaccgcgccaccggcggcgcccccaagttcatccgcaagccggactactgttctagcatgctcaagagaacgctcctgcactgcactagttccctttgatcactctaccctaggctcgtctccaacttgtggaagggattgaggataccgtgggtatcggcaagggcaccaccaagatatacgccaccgttgatctggagaaggcccgcgtggggcgcacccggatggtctccaacgagcccgtgaaccctcgctggtacgagtccttccacatctactgcgcgcacatggccgccgacgtagtattcaccgtcaagatcgacaaccccatcggggcctcgctcatcgggagggcttacctgcctgtcgaggacatcctgggcggagacgagatcgacaagtggcttgagatatgcgatgagaagcgcgagcctattggggacagcaagatccacgtgaagcttcagtacttcgacgtcggcaaggaccgcaactgggccaggggtgtccggagcaccaagtaccctggtgttccttacaccttcttctcgcagaggcaggggtgcaaggttactctgtaccaggacgctcatgtcccggacaacttcgttcccaggatcccgctcgccgatggcaagaactacgagccacacaggtgctgggaggatatctttgatgccataagcaaggcccagcatctgatttacatcactggctggtccgtgtacaccgagatcaccttggttcgggacaccagcaggccgaaacctggaggcgatgttactcttggggagttgctcaagaggaaggccagcgaaggtgtccgtgtccttatgctagtgtgggatgataggacttcggtcggcttgcttaagaaggatggcttgatggctacccatgatgaggagactgcaaattacttccatggcacggacgtcaactgtgtcctgtgccctcgcaaccctgatgattctggcagctttgtccaggacctgcagatatcaactatgttcacgcaccatcagaagatagtagtggtagaccatgagttgccaaacgagggctcccagcagaggaggatcgtcagcttcgttggcggaattgacctttgtgatggaaggtatgatacccagtatcactccttgtttaggacacttgacactgtccatcatgatgacttccaccagccaaactttgagggtgggtcaatcaagaaaggtggtccgagagagccatggcatgatatccactcacggctggaagggccaattgcttgggatgttctttacaactttgagcagaggtggaggaagcagggtggtaaggacctccttgtacgtctcagggatctttctgacattattattcccccttctcctgtgatgttcccggaggacagagatacctggaatgttcagctctttagatccattgacggcggtgctgcttttggcttccccgagactcctgatgaagctgcaagagctgggcttgtgagtggaaaggatcaaatcatcgaccggagtatccaggatgcatacataaatgccatacggagggcgaagaacttcatctacattgagaatcagtacttccttggaagctcatatgactggaagccggaaggcatcaagccagaagatatcgattgtcttcacttgattccgaaggagctctcattgaagattgtcagcaagattgaggctggggagcggttcactgtttatgttgtggtgccaatgtggcctgagggtgttccagaaagtgcttccgttcaggcaatccttgactggcaaaggagaacaatggatatgatgtacactgacatcacacaagctctcgaagccaatggaatccaagcaaaccccaaggactatctcactttcttctgcttaggtaaccgtgaggtgaagcaggagggagaatatcaacctgaggaacacccagaacctggcactgattacatccgggctcaagaggctaggaggtttatgatctatgttcatgccaaaatgatgatagtggacgatgaatacatcatcattgggtccgccaacatcaaccagaggtccatggacggtgccagggactccgagatagccatgggcgcgtaccagccgtaccacctggcgactaggcagcctgcccgtggccagatccatggcttccggatgtctctttggtacgaacacctggggatgctggacgacgtcttccagcgccccgagagcgtagagtgcgtgcagaaggtgaacaagatcgccgagaagtactgggacctgtactcgagtgatgacctggagcaggacctcccgggccacctcctcagctacccgatcggtgtcactgccgacggcaccgttactgagctgcccgggatggagaacttccctgacacccgtgcccgcgtcctcggcaacaagtcggattacctcccgcccatcctcaccacataggctgcaggctgcaggcagcgccatggcttctctgtttgtgtttgagatactgaaagttcagatagcagtgtttttatagttattgagtgataataagtgcattgtgcatggtgggacgataggagttagagttgttcataaatcataactactatgtactgcaccagatgacgagattgtgttgccccttgtctggtgtagcttgtgtagctttctgcgttgcagtgctgtttgtaaaggcgacttcagagttcagaattaaaacatggttgttttttcaagtgtgctgctaaaggcctgtatggattcgttgatgtggtgctagtacaacaatatggataatctctcatctgcctgtaaagacatctaagggctagttggtaattccattttcttaagagatttttattt

SEQ ID NO: 148907 - DNA, 3144 bp, Zea Mays
atacccgactccgatcttccaccccgctgccgcctgccggcgtgcgtgacccgggtcccattccatatccggtgccattttttaatactactagtctcgttcgatcggaatcggcttcccgtcttggctgcatttttctatccccgcgtggccgcgtgtagtcctagtctctcgccagcaccatcatcatcaatcacggcggcgaccccgccccgcctcgatcgcccacgctgcccgactggaaccggacgctgctgctgctgctgctaggctgacagcgacgacgagggggccatggctcagatcttgctccacggcacgctccacgccaccatcttcgaggccgagtcgctctccaacccgcaccgcgccaccggcggcgcccccaagttcatccgcaagcttgtggaagggattgaggataccgtgggtatcggcaagggcaccaccaagatatacgccaccgttgatctggagaaggcccgcgtggggcgcacccggatggtctccaacgagcccgtgaaccctcgctggtacgagtccttccacatctactgcgcgcacatggccgccgacgtagtattcaccgtcaagatcgacaaccccatcggggcctcgctcatcgggagggcttacctgcctgtcgaggacatcctgggcggagacgagatcgacaagtggcttgagatatgcgatgagaagcgcgagcctattggggacagcaagatccacgtgaagcttcagtacttcgacgtcggcaaggaccgcaactgggccaggggtgtccggagcaccaagtaccctggtgttccttacaccttcttctcgcagaggcaggggtgcaaggttactctgtaccaggacgctcatgtcccggacaacttcgttcccaggatcccgctcgccgatggcaagaactacgagccacacaggtgctgggaggatatctttgatgccataagcaaggcccagcatctgatttacatcactggctggtccgtgtacaccgagatcaccttggttcgggacaccagcaggccgaaacctggaggcgatgttactcttggggagttgctcaagaggaaggccagcgaaggtgtccgtgtccttatgctagtgtgggatgataggacttcggtcggcttgcttaagaaggatggcttgatggctacccatgatgaggagactgcaaattacttccatggcacggacgtcaactgtgtcctgtgccctcgcaaccctgatgattctggcagctttgtccaggacctgcagatatcaactatgttcacgcaccatcagaagatagtagtggtagaccatgagttgccaaacgagggctcccagcagaggaggatcgtcagcttcgttggcggaattgacctttgtgatggaaggtatgatacccagtatcactccttgtttaggacacttgacactgtccatcatgatgacttccaccagccaaactttgagggtgggtcaatcaagaaaggtggtccgagagagccatggcatgatatccactcacggctggaagggccaattgcttgggatgttctttacaactttgagcagaggtggaggaagcagggtggtaaggacctccttgtacgtctcagggatctttctgacattattattcccccttctcctgtgatgttcccggaggacagagatacctggaatgttcagctctttagatccattgacggcggtgctgcttttggcttccccgagactcctgatgaagctgcaagagctgggcttgtgagtggaaaggatcaaatcatcgaccggagtatccaggatgcatacataaatgccatacggagggcgaagaacttcatctacattgagaatcagtacttccttggaagctcatatgactggaagccggaaggcatcaagccagaagatatcgattgtcttcacttgattccgaaggagctctcattgaagattgtcagcaagattgaggctggggagcggttcactgtttatgttgtggtgccaatgtggcctgagggtgttccagaaagtgcttccgttcaggcaatccttgactggcaaaggagaacaatggatatgatgtacactgacatcacacaagctctcgaagccaatggaatccaagcaaaccccaaggactatctcactttcttctgcttaggtaaccgtgaggtgaagcaggagggagaatatcaacctgaggaacacccagaacctggcactgattacatccgggctcaagaggctaggaggtttatgatctatgttcatgccaaaatgatgatagtggacgatgaatacatcatcattgggtccgccaacatcaaccagaggtccatggacggtgccagggactccgagatagccatgggcgcgtaccagccgtaccacctggcgactaggcagcctgcccgtggccagatccatggcttccggatgtctctttggtacgaacacctggggatgctggacgacgtcttccagcgccccgagagcgtagagtgcgtgcagaaggtgaacaagatcgccgagaagtactgggacctgtactcgagtgatgacctggagcaggacctcccgggccacctcctcagctacccgatcggtgtcactgccgacggcaccgttactgagctgcccgggatggagaacttccctgacacccgtgcccgcgtcctcggcaacaagtcggattacctcccgcccatcctcaccacataggctgcaggctgcaggcagcgccatggcttctctgtttgtgtttgagatactgaaagttcagatagcagtgtttttatagttattgagtgataataagtgcattgtgcatggtgggacgataggagttagagttgttcataaatcataactactatgtactgcaccagatgacgagattgtgttgccccttgtctggtgtagcttgtgtagctttctgcgttgcagtgctgtttgtaaaggcgacttcagagttcagaattaaaacatggttgttttttcaagtgtgctgctaaaggcctgtatggattcgttgatgtggtgctagtacaacaatatggataatctctcatctgcctgtaaagacatctaagggctagttggtaattccattttcttaagagatttttattt

SEQ ID NO: 148908 - DNA, 698 bp, Zea Mays
cgcccagagaccggcggcgtccgcgtccgtccgtcacagcgtccgcgccgcggcaccatgctcggcagaggcgccggccccggccttgacgcagcggtcgaagccgtaccagacgccgtcggggagcgggtcgccgtagtagaaggtggagggcgcgccggacgccggctcgtacaccctgacccactcgggcgtccacccggccgcgcggcccgaccggcgcaggtagaggtagcagacgccgtagccgcagggcccggcgacgcggaacgtgtccgtggcgcagcgctcgaacccgcgccgcggcgtcaccgtcgccgcgtacacctcgttgcggtacgcgtccccgaacgcgaggctcaccgcgtccgcggagctccgcggggacgcgcagctcgtcttgatctgcaccgtgtacgtgcacgcgcgccgcgccacggcggcaccatcggcggcggtgccgtgaggctcggacgcctcgcctcccgccgccgcacccgcagcagcagcagcagcttcctgcgggagcggatgggacgaggcgaggagggacagcgccagcagggcgacccgctgcggtggtacggcgccggaggccatgggctgggctggcttcgccggatcgaggcgctggcggttgactccgagactccgagtggcgagcgaggccggactgggagacggagaggggaggaggt

SEQ ID NO: 148909 - DNA, 704 bp, Zea Mays
gtattatttgaggcaaaactaaccaagctttaatgctttattctgttcccagccatagcgacagttgtgaccgtggcagaaattctgaagaataatggatttgctgttgaaaagaagatcaggacatctactgttgacataaacgacgaatcacgagggcgtccattccaaaaggccaagattgagataatcttgggaaagagtgacagattcaatgagttgatggctgctgctgccgaagagaggggagaagttgaagaaggcgaagagcaggcttgaaagaaaaaaaaaacagtaccgacgacaagcggctgttgttgtggtctgttagttttgcttaatttaatgccatgcgcatgagagctggcatgcgttctcgctcatctacattgccatggcaatgtctgcaaactcatggattgatggatggatgctggtttcttccaattttgacagcttcatttgtttctttggctacgcatgttttgccagtctgacgttctccttacgaaatatggcgtgctttgttgactagacagaccatggttccttccggaactaatgattctgcagacactgttggtcttcgggatcatttgacagctagtagttcatttgtttcttttggctacactgttggatccccgaagaactccacacggaactgctcaaattcttcccatgttcgacatgggtcttttttg

SEQ ID NO: 148910 - DNA, 1040 bp, Zea Mays
cctctccgcgttcctcgtttcgctagcataagcaacccgtctggaccctcacccgccgcaacgccgaggagacgagaggaggggaggcgcgccagcggaagcggaaacctcgggtgtcgtcgaccaacctcgtcgatccggttgcgacgcggtgtgctagaataactaccgaccatggtggaggaggagatcaccgagggcttgaagaacctcaccgtcaccggagacgcggcggcttcgggcggagaagggcagaggaggggcggcggcatcagcagcaaccgcatccaggtgtccaacaccaagaagcccctcttcttctacgtaaacctcgccaagaggtatatgcagcagcacggcgatgtggagttgtccgctcttggaatggccatagcgacagttgtgaccgtggcagaaattctgaagaataatggatttgctgttgaaaagaagatcaggacatctactgttgacataaacgacgaatcacgagggcgtccattccaaaaggccaagattgagataatcttgggaaagagtgacagattcaatgagttgatggctgctgctgccgaagagaggggagaagttgaagaaggcgaagagcaggcttgaaagaaaaaaaaaacagtaccgacgacaagcggctgttgttgtggtctgttagttttgcttaatttaatgccatgcgcatgagagctggcatgcgttctcgctcatctacattgccatggcaatgtctgcaaactcatggattgatggatggatgctggtttcttccaattttgacagcttcatttgtttctttggctacgcatgttttgccagtctgacgttctccttacgaaatatggcgtgctttgttgactagacagaccatggttccttccggaactaatgattctgcagacactgttggtcttcgggatcatttgacagctagtagttcatttgtttcttttggctacactgttggatccccgaagaactccacacggaactgctcaaattcttcccatgttcgacatgggtcttttttg

SEQ ID NO: 148911 - DNA, 610 bp, Zea Mays
ctgatctgttcttggagtggggaggcgaggagaggagaggaggaagatggcggcgcaggagcaggagcacgagaagcagcaggcgaagacgagcaccacgagctcgctcccctccagcagcgagcgctcctccagctccgcccccaacaaccttagggaaggaggcgtggagagcgacgaggagatacggcgggtgccggagctgggcggcgcgtcggcgtcggcgtcggcctcgtcgggcgcgggcaaggaggacggcgcgcgggcggtggccgcgggggcgcaggggcaccctccggcggccgggaagaagcgcggccgcgccccgggggacaaggagcagaaccggctgaagcggctgctgcggaaccgcgtgtcggcgcagcaggcgcgggagcggaagaaggcgtacctgacggagctggaggcgcgggccaaggacctggagctccgcaatgcggagctcgagcagcgggtgtccacgctccagaacgagaacaacacgctccgccagattctgaagaacacgacggcgcacgcgagcaagaggagcggcggcggcggcaagggtggagacggcggcaagaagcaccacttcgccaagagctaa

SEQ ID NO: 148912 - DNA, 628 bp, Zea Mays
ctgatctgttcttggagtggggaggcgaggagaggagaggaggaagatggcggcgcaggagcaggagcacgagaagcagcaggcgaagacgagcaccacgagctcgctcccctccagcagcgagcgctcctccagctccgcccccaacaaccttagggaaggagctgaagctgccggcgcaggcgtggagagcgacgaggagatacggcgggtgccggagctgggcggcgcgtcggcgtcggcgtcggcctcgtcgggcgcgggcaaggaggacggcgcgcgggcggtggccgcgggggcgcaggggcaccctccggcggccgggaagaagcgcggccgcgccccgggggacaaggagcagaaccggctgaagcggctgctgcggaaccgcgtgtcggcgcagcaggcgcgggagcggaagaaggcgtacctgacggagctggaggcgcgggccaaggacctggagctccgcaatgcggagctcgagcagcgggtgtccacgctccagaacgagaacaacacgctccgccagattctgaagaacacgacggcgcacgcgagcaagaggagcggcggcggcggcaagggtggagacggcggcaagaagcaccacttcgccaagagctaa

SEQ ID NO: 148913 - DNA, 1413 bp, Zea Mays
acgggaagcgtcggcccccaaatcatcactgcctgcatcgtctcggcacggcatcccgggccgccgcctcctcgtgtctcggcataaatctgcggcctccatccgtccggcggctgctccgatcacagtaccagcgctaggcctagggtttggtggtctcaagcggaccgagaacatggaaagggagcgcaacgccgccaccgctggtgctggccgctgggaggcgccggacggggtgatcgtgctgcccgtggggtcggcggcgccgcagcagggccgccaaaaggagcaccagtaccagcagagaaagcgtgagatggagcgggagcgggagcagcaggacccgggggcgagggagggggttttggggctggacccgcagccgccagagaaggtgtactacaagacgaggctgtgcgagaagttcgaggcgggcaagtgcgcgtacgagggtgggtgcaccttcgcgcacggctccgaggagttgcggccgccgctgccgctgcccctgctgacctcgctcgtccgacggaagtcgccgctgccgtcgtcgtcgccaggtgccgctgccagcagcccccacggtgggtactgcgttagggtgtgcttcgagttcagggacacgggggcctgccaccgtggggataggtgcgccttcgtccacgcttccacgacagagatgccctttcctggggggccaaggtctatggagtatgctctgaggaattcgtcgtcgtatgcaaaggcgtactcgccggggtccacggccgccgcgtaccgtaacagcagcagcaccagcaccagcaactatgcaccggctaccacaagggcgttccaatccgtttctgccgacgcggccggagagggcggttgcaaggccacccgtctggagctccttggtcgcaagaagatgaacgacatctacggcgactggccggaacaggactgagagcgcgtaccatgcatcacctgctcgatcgaagctaccatgtctaccttcctgcctttgatcaccgtgatcgacaacatccagaataatgaactgaacaatctgatgtttcgatttgaacttatttgaacatattgtgcttgttctttgtttcctgctgaatccctgcctgtaatccgtctgatcagacctctgcattcctgccaccatttctactttcaataatttgaagtgctgtgctgttgctttcactccgagctatctgtcgtcctctgttgcctttgggccaaatggttccatggtttcgacacgacccattgggctcccacatcatttcttgttgcgtgtgtgtgtgatgttgtgccagtcagaggggggaggaccgggagaggaacagagagttgtgggtctgtgcatttgcagggcggtagaattggattccaaggacaaggggcagagggtag

SEQ ID NO: 148914 - DNA, 1726 bp, Zea Mays
ccacgatcagaaggatccggagttccggacgggcggacggccactgcaacgagctcgcctgtcgcctcgccccggcgccccgcgacaacgagacctcctcctccgctcagccgcagaagccacctcgccgccggcaggttcaccaacaccaacctccctagtcccccctacctctcctcactcaactggccgaccgcttttccgaacccgtgccgcccgccagtaactgttccatctttggcgcgcgcgcgtgcctggccgcctgccaccgccaccacccaacaccaccacacgcgcagctcatgtggcgtggcgcagtcgcgcagaggtcgaccgctctgcagtgcagagaggtggaggtggcgcatgcctatgccttactgagctgcggcctgcggtctcctgcagattcccccgcgcccaccgcgccatgcgaccctcaccccaccacccaaaaaggcgcacccctttcccgccgcccaaatccccacttttccccgatccccaagcacccgtcgccgctccctcgcacgcacgcgcgcgccgcgtcgcctttatctgcccccccgctgcccggaactcggacgctgagccgtcgttgtcgctgggattgcagcagcgttggcggaaaaggggtggaggcgcggcgattgttcgcgggatgagctacggcggcagcagctccctcgcgcccggtgccaagaggccgttcgagtacgggagaacgcatgtggtgaggcccaagggcacgcacaaggccaccattgtctggctccacggccttggtgacaatggaaccagctggtctcaactgctggaaacgcttccccttcctaatataaaatggatatgcccaactgcaccttcaagacctgtgtcattgtttggcgggttcccctgcacagcatggtttgatgttgctgacctttctgaggatgctcccgatgacactgaggggatggatgcctcagcagcacatgttgcaaatttgttgtcaactgagcccgctgatatcaagcttggtgttggtggctttagtatgggtgctgctactgctctgtactctgcaacttgctttgctcatggaaaatatgggaacggcaatccataccctgtgaacctaagtcttgccgttggtcttagtggctggcttccatgtgccaggaccttgaagaacagaattgaagcctcaccagaggctgcacaaagggcttcaacaatacctcttttgctctgtcatggaaaagctgatgatgtagttctctacaagcacgggcagagatctactgatgccttgaaggcaaatggcttttccaatgtgctcttcaagtcatacaatagtcttggtcactacactgttccagaggagatggatgaagtttgcaaatggctcacagcaaatttggggctcggcacttcgtcatcttgatcgcgagaaagactcgcggtgtcggtgtcttctccagggtagtaaatgggctaatagcaaatttgggcttgggtatacggccatgttctagcttttcttcacgcagacgtgtctgcgagtgctgtacgcttataatttctatattctggtctacgtcgatttggttgacacggatattgtttgtttcaaatattctgttttccggtttggaattgtgatttgcttcctccgtatggcatcgagatgtctgcaaaggttttaccgtgactgccgaatcgttttgtttgtctattgtat

SEQ ID NO: 148915 - DNA, 1510 bp, Zea Mays
ccacgatcagaaggatccggagttccggacgggcggacggccactgcaacgagctcgcctgtcgcctcgccccggcgccccgcgacaacgagacctcctcctccgctcagccgcagaagccacctcgccgccggcaggttcaccaacaccaacctccctagtcccccctacctctcctcactcaactggccgaccgcttttccgaacccgtgccgcccgccagtaactgttccatctttggcgcgcgcgcgtgcctggccgcctgccaccgccaccacccaacaccaccacacgcgcagctcatgtggcgtggcgcagtcgcgcagaggtcgaccgctctgcagtgcagagaggtggaggtggcgcatgcctatgccttactgagctgcggcctgcggtctcctgcagattcccccgcgcccaccgcgccatgcgaccctcaccccaccacccaaaaaggcgcacccctttcccgccgcccaaatccccacttttccccgatccccaagcacccgtcgccgctccctcgcacgcacgcgcgcgccgcgtcgcctttatctgcccccccgctgcccggaactcggacgctgagccgtcgttgtcgctgggattgcagcagcgttggcggaaaaggggtggaggcgcggcgattgttcgcgggatgagctacggcggcagcagctccctcgcgcccggtgccaagaggccgttcgagtacgggagaacgcatgtggtgaggcccaagggcacgcacaaggccaccattgtctggctccacggccttggtgacaatggaaccagctggtctcaactgctggaaacgcttccccttcctaatataaaatggatatgcccaactgcaccttcaagacctgtgtcattgtttggcgggttcccctgcacagcatggtttgatgttgctgacctttctgaggatgctcccgatgacactgaggggatggatgcctcagcagcacatgttgcaaatttgttgtcaactgagcccgctgatatcaagcttggtgttggtggctttagtatgggtgctgctactgctctgtactctgcaacttgctttgctcatggaaaatatgggaacggcaatccataccctgtgaacctaagtcttggtcactacactgttccagaggagatggatgaagtttgcaaatggctcacagcaaatttggggctcggcacttcgtcatcttgatcgcgagaaagactcgcggtgtcggtgtcttctccagggtagtaaatgggctaatagcaaatttgggcttgggtatacggccatgttctagcttttcttcacgcagacgtgtctgcgagtgctgtacgcttataatttctatattctggtctacgtcgatttggttgacacggatattgtttgtttcaaatattctgttttccggtttggaattgtgatttgcttcctccgtatggcatcgagatgtctgcaaaggttttaccgtgactgccgaatcgttttgtttgtctattgtat

SEQ ID NO: 148916 - DNA, 1271 bp, Zea Mays
ccacgatcagaaggatccggagttccggacgggcggacggccactgcaacgagctcgcctgtcgcctcgccccggcgccccgcgacaacgagacctcctcctccgctcagccgcagaagccacctcgccgccggcagccgtcgttgtcgctgggattgcagcagcgttggcggaaaaggggtggaggcgcggcgattgttcgcgggatgagctacggcggcagcagctccctcgcgcccggtgccaagaggccgttcgagtacgggagaacgcatgtggtgaggcccaagggcacgcacaaggccaccattgtctggctccacggccttggtgacaatggaaccagctggtctcaactgctggaaacgcttccccttcctaatataaaatggatatgcccaactgcaccttcaagacctgtgtcattgtttggcgggttcccctgcacagcatggtttgatgttgctgacctttctgaggatgctcccgatgacactgaggggatggatgcctcagcagcacatgttgcaaatttgttgtcaactgagcccgctgatatcaagcttggtgttggtggctttagtatgggtgctgctactgctctgtactctgcaacttgctttgctcatggaaaatatgggaacggcaatccataccctgtgaacctaagtcttgccgttggtcttagtggctggcttccatgtgccaggaccttgaagaacagaattgaagcctcaccagaggctgcacaaagggcttcaacaatacctcttttgctctgtcatggaaaagctgatgatgtagttctctacaagcacgggcagagatctactgatgccttgaaggcaaatggcttttccaatgtgctcttcaagtcatacaatagtcttggtcactacactgttccagaggagatggatgaagtttgcaaatggctcacagcaaatttggggctcggcacttcgtcatcttgatcgcgagaaagactcgcggtgtcggtgtcttctccagggtagtaaatgggctaatagcaaatttgggcttgggtatacggccatgttctagcttttcttcacgcagacgtgtctgcgagtgctgtacgcttataatttctatattctggtctacgtcgatttggttgacacggatattgtttgtttcaaatattctgttttccggtttggaattgtgatttgcttcctccgtatggcatcgagatgtctgcaaaggttttaccgtgactgccgaatcgttttgtttgtctattgtat

SEQ ID NO: 148917 - DNA, 1395 bp, Zea Mays
ccacgatcagaaggatccggagttccggacgggcggacggccactgcaacgagctcgcctgtcgcctcgccccggcgccccgcgacaacgagacctcctcctccgctcagccgcagaagccacctcgccgccggcagccgtcgttgtcgctgggattgcagcagcgttggcggaaaaggggtggaggcgcggcgattgttcgcgggatgagctacggcggcagcagctccctcgcgcccggtgccaagaggccgttcgagtacgggagaacgcatgtggtgaggcccaagggcacgcacaaggccaccattgtctggctccacggccttggtgacaatggaaccagctggtctcaactgctggaaacgcttccccttcctaatgtaagttaggatatagattccaaatatgcaatgttttagtttcttgtggtggtttttaaccttgcgcctttttttggctgaaagctagtatgatatttctttctgtaactttgctctgtttcagataaaatggatatgcccaactgcaccttcaagacctgtgtcattgtttggcgggttcccctgcacagcatggtttgatgttgctgacctttctgaggatgctcccgatgacactgaggggatggatgcctcagcagcacatgttgcaaatttgttgtcaactgagcccgctgatatcaagcttggtgttggtggctttagtatgggtgctgctactgctctgtactctgcaacttgctttgctcatggaaaatatgggaacggcaatccataccctgtgaacctaagtcttgccgttggtcttagtggctggcttccatgtgccaggaccttgaagaacagaattgaagcctcaccagaggctgcacaaagggcttcaacaatacctcttttgctctgtcatggaaaagctgatgatgtagttctctacaagcacgggcagagatctactgatgccttgaaggcaaatggcttttccaatgtgctcttcaagtcatacaatagtcttggtcactacactgttccagaggagatggatgaagtttgcaaatggctcacagcaaatttggggctcggcacttcgtcatcttgatcgcgagaaagactcgcggtgtcggtgtcttctccagggtagtaaatgggctaatagcaaatttgggcttgggtatacggccatgttctagcttttcttcacgcagacgtgtctgcgagtgctgtacgcttataatttctatattctggtctacgtcgatttggttgacacggatattgtttgtttcaaatattctgttttccggtttggaattgtgatttgcttcctccgtatggcatcgagatgtctgcaaaggttttaccgtgactgccgaatcgttttgtttgtctattgtat

SEQ ID NO: 148918 - DNA, 550 bp, Zea Mays
cagggagctgaagaactttaaggatgctgttctgcaagaaggcgacgcagaaggggaaattggctagagaagttgaccctcgcaaacacatagaagcccacttgcctgttcgcgtgaacgaacagagattgagcgatcttcggcatcacatggacacccgtagccgggatcctgttcccagcgccgttcttccttgtggttctcatctcccaagattcttcgacccggtcgccatgaaagagctccatcgacgcagctgagtacgaagagctcgacggggtccccccttgtgcacagacaggaagacgacggctgcgttccgcgccacggccagtcgctcacatggatccatggagtggaggccaacggtggcagaagttaaagcgatggccgggccattccttctgagcgtcgccgcgtgcgatatgagagtgtgtagttcgggggcagtgccggctcatcacgggacacgggatccagccaacttgtccttctgccggctaccaccctcgctttggtgtctcagttgtcacaagcattggataccgag

SEQ ID NO: 148919 - DNA, 2255 bp, Zea Mays
agtcatgtccccgacgcggagccaggggcgtgtcacttgtcctcgtgctcgtttgacccacccgttctcccgcttcctccgtgttccttgtcccgtcgcccggcgcctccccaccggccaacgctcacccccgaggcccccccgccggcctcccgcctcgcggtgaacccatcagtcaccccttggtcgctcactcgtgtatgccgctggggccgccccacgcccgccgcttgctcgagggaattccgcgccggtgtctggtcgcggcgcgcgaggatgcggtcgccgggtacgcgcgtatgctggcgcgcggggccatgcccgacgcctacacgttcccgcccctgctcaaggcggtggcgcgcggctcctccgcggcgccggtgcgcgccgtccacgcgcacgtggtcaagttcgggatgggccgcaacgcccacgtggcgacctctctggtcaccgcgtacgcggccgggggtgacggcgcggcggcgcgggcgctgttgagcgagcgcgagcgcgacacgcccgtcgtgtggaacgcgctgatctccggccacaacaggtgcaggcggttcggggaggcgtgctgctcgttcgtggacatggccagggccggcgccgcgcccacgccggtcacctacgtctcggtgctgtctgcttgtgggaaggggacaggagacgtgctgctcgggatgcaggtgcacggtcgtgtcgtggggagtggggttctgccggacctcagggtggagaacgcgctggttgatatgtacgctgagtgtgctgacatggaatcggcttggaaattgttcgacggcatgcaggtgaggagtgtggtgtcctggacgtctttgctttctggcctcacgaggttgggccgggttgatgaagcgagagacctgtttggccgtatgcccgagagagatacggtctcatggactgcgatgattgatggttatgtgcaggctgcccggttcagggaggcattggagatgttccgtgagatgcagtgtagcaatgtgagtgcagatgagttcaccatggtgagcgtgatcacagcctgtgcgcagctaggtgctttggagatgggagaatgggtgagggtttacatgagcaggcaagggattaagatggatgctttcgtgggtaatgcactcatagacatgtattccaagtgtggaagtattgagcgcgcattggatgttttcaaagacatgcaccacagagataagtttacttggactgctatcatacttggtctcgcagtgaatggttatggggaagaggctattgaaatgttccacagaatgatcggggtttcagaaactccagatgaggtgacattcattggtgttctcacagcctgcactcacgctggcttggttgacaaaggacgggagttctttctcagcatgagagagacctataatattgccccaaatgtggtgcattatggatgcataattgatctttttggcagagctgggaaaattaccgaagctttggacgcaatagatcaaatgccaatgacacccaactccactatttgggggaccctgctggcagcttgtagggttcatggcaattcagagataggtgaattggtaaccgagcgcctccttcagatggatccagagaacagcacggtgtacacccttctgtcaaatatttatgcaaagtgtaacagatgggaagatgttcggcgacttaggcacacaataatggagaaaggaataaagaaagaacctggttgcagtctgatcgaaatgaatggtattattcatgaatttgtagctggtgaccagtctcatcctatgagcaaagaaatctactgtaagttggagagtataatcaatgatttaaataatgttgggtattttcctgacgtaaccgaggtctttgttgaagtcgcagaagaagaaaagcagaaagttcttttctggcacagcgagaagctggcgattgcttttgcattacttagttcagaacctaatactgtgataagaattgtgaaaaacttgaggatgtgtttagactgccataacgcaataaaattgatttcaaggttgtatggaagggaggttgttgtgagggacagaacacgcttccatcattttagacatggattctgctcttgtaaagactattggtaactccttatgcatcagatacatttacggatccgaaaaaaaaacaggaatgaaaaaattcctaggaaaaagtggcggcaacggaaacagttgaggcattttcctggc

SEQ ID NO: 148920 - DNA, 2324 bp, Zea Mays
cgaagacaagcaggacgtcttttcggcggacagcggacttcaccgcatacaccgctacccgcgcgcagccgcgcaggtgcatctgcgccgccgccggcccgccgcacccgcacgtctccttatacccatccggccatctacacactgcagtccacgctcgtggcaccgcactcactccgaattctgaagcaacaaacaccagaagcgcaccaactccccaaccaccggagaccgcaccccagcaaaggatggcatctgactccacggccgccgtgacggtggacggcagcgcgcttgcggggcgcgcgctggccgcggcgggcacgcggcacatgttcggggtggtgggcatccccgtcacctccctcgcgtcccgtgccgccgcggccggggtccgcttcctcgccttccgcaacgagcagtccgcggggtacgccgccgccgcctacggcttcctcacgggctccccgggcgccctactcaccgtctccggcccaggatgcgtccacgggctcgcgggcctctcccacgccaccgccaacgcctggccgctcctcatgatctccggatcctgcgaccaggctgacgccggcaggggcgacttccaggagctcgaccagatcgccgccactaagcccttcgtcaagctcgccgtcaaggcaacaaccatcgccgacatcccgcgcctcgtcttccaggccctcgccgccgccgtgtccggccgtcccggagggtgctacctcgatatcccgtccgatgtcctccaccaaaccctccctgaatccgaggccgcggctctcatagcagcagcagccgccaattcggccgcatccgatccttccccgtcaaagcacaagactcttgacgagggaatcgcgaaagctgcggacctgctccggtgtgcggagcggcctcttgttgtgattgggaagggtgcggcgtatgcgcgcgcggaggaggcgattcggaagctggtggacaccacgggcatccccttcctcccgacgccgatggggaaaggggtcgtgcctgactcgcatccactctccgccacggcggcacgctcactcgccatcgggcagtgtgatgtggctctggtcatcggtgctaggcttaattggttgcttcactttggcgagccacccaagtggtccaaggatgttaagttcattcttgttgacgtctccgaggaggagattgagctccggaagccacatgtggggattgttggggacgcgaagagagtaactgagctgatcaaccgggagatcaaggacaatccattctgcctggcaaggtcgcacccatgggtcgaagcgatcactaagaaggccaatgacaatgttcttaagatggaggcgcagctagtgaaggatgttgtgccattcaatttcatgacaccattgcggatcatccgggatgcgatccttgccgaggggagtcctgctccaatagtggtctcagaaggggcaaataccatggatgttggcagggctgtgcttgtgcagaatgaaccaaggacaagactggatgcagggacatgggggacgatgggggttggattggggtactgtattgcggctgcagcagctgaacctgaacgactcgtggttgctgtggagggcgattctggatttggcttcagtgcaatggaggttgagacgttggtgaggtaccagctgcctgttgttgtaatcgttttcaacaacaacggtgtctacggcggggaccggagaagccctgacgagataaccggaccctacaaaggtgacccagccccaacctcatttgttccggcagcagggtaccataagatgatggaggcttttggagggaaagggtatcttgtggagacaccagacgagctcaaatctgccctttcagaatcgttccgcgccaggaaaccggcggtgattaatgttatcattgatccttacgccggcgcagagagcggtcgaatgcagcacaagaactgaaggcgcttgcttggcttttgtaccataccatagcaggatgcagatgcgacttgatacaaataagcagcaaccgtcaatcaatccttttgtttcttttttacgacctcgcttcgttgttcgtgatacagacgtggggcgcttttaattggaagtcccatttgaaggcatgtgaatgtgttatgattatctaaatgccacgatgcaaactttaaaggcatgttgatgaggatgtgtagaaaacctgtgcccatatatgagccggtataattatttctcaaagtaataaagtcagcgttttaaggcctgtttggaagcaccacaatttctaatatactggtttttaatata

SEQ ID NO: 148921 - DNA, 423 bp, Zea Mays
atgccagggcaggaaagtcgaagctcatctccacagcttgacatacttgtcatggccactcgaagcaaccaggccggagctcgacgatgccagggccgagacgaggctgtcgtgcgctgcaacagtcatgctccggttctcggacatgtcccacagctccagagactggtaacagccaatgataagcaaggatgggtacgtaggatggaaagtgcacgaactgaactttctcccgccgcagctaagctcgttcacgaagctctcgtcgttcaaagaccacaccttcaccgtgtcttcactgacagacaccacgtactcgccggtgggatcccagcacacggaatcgacgcccttagtgtggctctcaaatctcctcacgcaagcttgcctctccacatccaggatagagactacattgtctga

SEQ ID NO: 148922 - DNA, 2134 bp, Zea Mays
tgacccttctcccttcccctgaaatgaaacgcacgcagacgcagcagcagagcctgattttttttcttatccatccacggcgccaccccgcattcacggaacgtaataataagccaaaagatgagagaaagagacagaagagtgacaaggaaaagcgaagaaaaagggaagagtagaaaccccctttgagcctttcggtttttctctgtcttcatgtgtgtttgttatagagaccctgccttgtcggggcagcacacttgggacgcgaggaggaggagttggtgagcgaactcgggatcagtgggtgaccgcagaggttgttgtctcggggggaattctttagcccctcttcctcttcttcttctttccttccgcatgtctttggactcgctgctgttcttttgcttggtacccttggatctctgactccagcccgttccccgaaatttccagttcttgcttcttcctcttggaggaggagggctgcagcctgcaggggccggagagagcaggaggaggcggagacatgggtagcttcgctaagctggcgaggagggcggtggagacggacgctccggtcatggtgaagatacaagaactgctccgaggggccaaggatgtgatgtcgcttgcgcagggagttgtttactggcaacctcccgagtcagctatggataagatcgaaaagatcatcagggaaccaatagtcagtaaatatggttctgatgatgggcttcctgagcttcgagaagcacttctcgaaaagctaagcagagagaataagcttaccaaatcatcagtcatggtcactgctggtgcaaatcaggcttttgtgaacttggtcctcactctctgtgatgctggtgattccgttgtcatgtttgcaccgtattatttcaatgcctacatgtcattccagatgacaggtgttactgacatattagttggtggctgcgatcccaagacacttcatcctgatgttgattggttggagaaggttctgaaagaaaatgagcctatccctaaacttgtcactgttgtgaatccggggaacccctctggagcttttattccaaggcctatgcttgagaggatttcagatctgtgcaaaaatgctggtgcatggcttgtggttgacaatacctatgagtactttatgtatgatggaatggagcactactgcttagaagatgctcatattgtcaacctcttctcgttctcaaaggcttatggaatgatggggtggcgtgtaggatacattgcatttccaaatgaagctgatggcttccacgatcagctcctcaaggtgcaagacaacataccgatctgcgcctccatcatcgggcagcgcctggcgctctactcgctggaggccggccccgagtggatcaaagaacgggtgaaagacctggtgaaaaaccgggcgctgctggtggaggcgctgtccccgctcggcgaggacaacgtcaagggcggggagggcgccatctacctctgggcaaagctaccggacagctgctcggacgacttcgaggctgtcaggtggctcgcgaacaagcacggcgtcgccgtgatccccgggagcgccagcggaggacccgggtacatccgcgtctccttcggagggctcaaggaagaagacaccaggctggctgctgagaggctcaggcgcggcctgcaggagctggtgaccgatggaatggtacagtgacggctccatgggtgtaagtaaaagctccaattttccaacggtgtaattccgccgtgattaattcgggagaagaaaaggaacttgttttcaagaatgcactgcgttgctcggacgagagacgggacggaataaaatgcgtctggtctgcagagtcacctatgttatgaatcatatgtagtgcatatgtcatgagtgacagagtgagtaattgtttctgttcgacttccagttctacatattactgatcgatggcagcaactgtacacagtcaaaggtataaccgtataagcaagaaccgtgagctgttcttgacgtgcagagcttgcctgttagcaaatatttctgtccagataacgacagcatctgccttcagaaccagcgtcacattctgtaatggcatggatgagtgtctccaagaaagat

SEQ ID NO: 148923 - DNA, 1997 bp, Zea Mays
tgacccttctcccttcccctgaaatgaaacgcacgcagacgcagcagcagagcctgattttttttcttatccatccacggcgccaccccgcattcacggaacgtaataataagccaaaagatgagagaaagagacagaagagtgacaaggaaaagcgaagaaaaagggaagagtagaaaccccctttgagcctttcggtttttctctgtcttcatgtgtgtttgttatagagaccctgccttgtcggggcagcacacttgggacgcgaggaggaggagttggtgagcgaactcgggatcagtgggtgaccgcagagttcttgcttcttcctcttggaggaggagggctgcagcctgcaggggccggagagagcaggaggaggcggagacatgggtagcttcgctaagctggcgaggagggcggtggagacggacgctccggtcatggtgaagatacaagaactgctccgaggggccaaggatgtgatgtcgcttgcgcagggagttgtttactggcaacctcccgagtcagctatggataagatcgaaaagatcatcagggaaccaatagtcagtaaatatggttctgatgatgggcttcctgagcttcgagaagcacttctcgaaaagctaagcagagagaataagcttaccaaatcatcagtcatggtcactgctggtgcaaatcaggcttttgtgaacttggtcctcactctctgtgatgctggtgattccgttgtcatgtttgcaccgtattatttcaatgcctacatgtcattccagatgacaggtgttactgacatattagttggtggctgcgatcccaagacacttcatcctgatgttgattggttggagaaggttctgaaagaaaatgagcctatccctaaacttgtcactgttgtgaatccggggaacccctctggagcttttattccaaggcctatgcttgagaggatttcagatctgtgcaaaaatgctggtgcatggcttgtggttgacaatacctatgagtactttatgtatgatggaatggagcactactgcttagaagatgctcatattgtcaacctcttctcgttctcaaaggcttatggaatgatggggtggcgtgtaggatacattgcatttccaaatgaagctgatggcttccacgatcagctcctcaaggtgcaagacaacataccgatctgcgcctccatcatcgggcagcgcctggcgctctactcgctggaggccggccccgagtggatcaaagaacgggtgaaagacctggtgaaaaaccgggcgctgctggtggaggcgctgtccccgctcggcgaggacaacgtcaagggcggggagggcgccatctacctctgggcaaagctaccggacagctgctcggacgacttcgaggctgtcaggtggctcgcgaacaagcacggcgtcgccgtgatccccgggagcgccagcggaggacccgggtacatccgcgtctccttcggagggctcaaggaagaagacaccaggctggctgctgagaggctcaggcgcggcctgcaggagctggtgaccgatggaatggtacagtgacggctccatgggtgtaagtaaaagctccaattttccaacggtgtaattccgccgtgattaattcgggagaagaaaaggaacttgttttcaagaatgcactgcgttgctcggacgagagacgggacggaataaaatgcgtctggtctgcagagtcacctatgttatgaatcatatgtagtgcatatgtcatgagtgacagagtgagtaattgtttctgttcgacttccagttctacatattactgatcgatggcagcaactgtacacagtcaaaggtataaccgtataagcaagaaccgtgagctgttcttgacgtgcagagcttgcctgttagcaaatatttctgtccagataacgacagcatctgccttcagaaccagcgtcacattctgtaatggcatggatgagtgtctccaagaaagat

SEQ ID NO: 148924 - DNA, 582 bp, Zea Mays
tgacccttctcccttcccctgaaatgaaacgcacgcagacgcagcagcagagcctgattttttttcttatccatccacggcgccaccccgcattcacggaacgtaataataagccaaaagatgagagaaagagacagaagagtgacaaggaaaagcgaagaaaaagggaagagtagaaaccccctttgagcctttcggtttttctctgtcttcatgtgtgtttgttatagagaccctgccttgtcggggcagcacacttgggacgcgaggaggaggagttggtgagcgaactcgggatcagtgggtgaccgcagagttcttgcttcttcctcttggaggaggagggctgcagcctgcaggggccggagagagcaggaggaggcggagacatgggtagcttcgctaagctggcgaggagggcggtggagacggacgctccggtcatggtgaagatacaagaactgctccgaggggccaaggatgtgatgtcgcttgcgcaggtatactctctcaccataatttgctcgatttggttgtgcaatgagatcgtattctgtgacggtggtttaaggttaatggaac

SEQ ID NO: 148925 - DNA, 1267 bp, Zea Mays
ataaactcaaccacctccggagtccggacctcccccgttggccttctccttccccttcgccctgcctccctctctcagtctctctccggcctccctcgcccacagagacagagcggaagccgccgagctcggagcccagcactttgcacgccgccgccggccatgtcggtggatacggagcggagctccaccgagtcgtccgcggcctccgggctcggctacgaggacaccgcgctcgccctcaccctccgcctcccgggctccgaccccggccgttcctccccgctcgccgcgccctccgacgccgcgccgtctcccaagacgcgggtggtggggtggccgccggtgaggtcgtaccgcaagaacgcgctcgccgactccagcaaggccaaccggtcagccagtttcgtgaaggtggccgtcgacggcgcggcctacctgcggaaggtggacctccaggcgtacggcggctacgaccagctcctccgcgcgctccaggacaagttcttctcccacttcaccatcagtcagtgcttcgtgcaccgtcctgccctgggtttagttttccgcagcgccttgctctgtttgatcgagcggtacgttccggctggatgcgcgcgcagggaagttcgccgacgacgagaggaagctggtggacgcggtgaacgggacggagtacgtgcccacgtacgaggacaaggatggcgactggatgctcgtcggcgacgtcccctggaagatgttcgtggagacctgccggcgccttcgcctgatgaaaggttcagaggccgttaacttggcaccaagagccgcccgatgaggcgcaagcgcaactccagcgtcaccagtacgcactggcttttagtggcttggcttgttggaggaacgagggaacgtacttcgtcgctgttttgaggatcttcacttgacatatatatagcaatgtgtacagctgtcacctgctgcttttgcctgaggaaagtttgtagttccattactttacttatctgtagtgtctatctatctatctatagatccgaagctttgatatacacatggcggctacaatgtatttttgatgaataagaccagaccagagtaccagacacaccgaaccgaacccgttcttccgcagctccacgcgcggttggcattttgagggttatgtggtggtgttttgcaatttgcagtaggcgtgaaggctgatgtcgtagctgccaattatttatacatcttgatctgtgttgagctatggttttttgtttaa

SEQ ID NO: 148926 - DNA, 1170 bp, Zea Mays
ataaactcaaccacctccggagtccggacctcccccgttggccttctccttccccttcgccctgcctccctctctcagtctctctccggcctccctcgcccacagagacagagcggaagccgccgagctcggagcccagcactttgcacgccgccgccggccatgtcggtggatacggagcggagctccaccgagtcgtccgcggcctccgggctcggctacgaggacaccgcgctcgccctcaccctccgcctcccgggctccgaccccggccgttcctccccgctcgccgcgccctccgacgccgcgccgtctcccaagacgcgggtggtggggtggccgccggtgaggtcgtaccgcaagaacgcgctcgccgactccagcaaggccaaccggtcagccagtttcgtgaaggtggccgtcgacggcgcggcctacctgcggaaggtggacctccaggcgtacggcggctacgaccagctcctccgcgcgctccaggacaagttcttctcccacttcaccatcaggaagttcgccgacgacgagaggaagctggtggacgcggtgaacgggacggagtacgtgcccacgtacgaggacaaggatggcgactggatgctcgtcggcgacgtcccctggaagatgttcgtggagacctgccggcgccttcgcctgatgaaaggttcagaggccgttaacttggcaccaagagccgcccgatgaggcgcaagcgcaactccagcgtcaccagtacgcactggcttttagtggcttggcttgttggaggaacgagggaacgtacttcgtcgctgttttgaggatcttcacttgacatatatatagcaatgtgtacagctgtcacctgctgcttttgcctgaggaaagtttgtagttccattactttacttatctgtagtgtctatctatctatctatagatccgaagctttgatatacacatggcggctacaatgtatttttgatgaataagaccagaccagagtaccagacacaccgaaccgaacccgttcttccgcagctccacgcgcggttggcattttgagggttatgtggtggtgttttgcaatttgcagtaggcgtgaaggctgatgtcgtagctgccaattatttatacatcttgatctgtgttgagctatggttttttgtttaa

SEQ ID NO: 148927 - DNA, 727 bp, Zea Mays
ataaactcaaccacctccggagtccggacctcccccgttggccttctccttccccttcgccctgcctccctctctcagtctctctccggcctccctcgcccacagagacagagcggaagccgccgagctcggagcccagcactttgcacgccgccgccggccatgtcggtggatacggagcggagctccaccgagtcgtccgcggcctccgggctcggctacgaggacaccgcgctcgccctcaccctccgcctcccgggctccgaccccggccgttcctccccgctcgccgcgccctccgacgccgcgccgtctcccaagacgcgggtggtggggtggccgccggtgaggtcgtaccgcaagaacgcgctcgccgactccagcaaggccaaccggtcagccagtttcgtgaaggtggccgtcgacggcgcggcctacctgcggaaggtggacctccaggcgtacggcggctacgaccagctcctccgcgcgctccaggacaagttcttctcccacttcaccatcaggaagttcgccgacgacgagaggaagctggtggacgcggtgaacgggacggagtacgtgcccacgtacgaggacaaggatggcgactggatgctcgtcggcgacgtcccctggaagtgagctccttcgctctgtctcttttactttccctgatctaattagctggttatctacgcagtttggctgtgctgagtagatttgc

SEQ ID NO: 148928 - DNA, 822 bp, Zea Mays
ataaactcaaccacctccggagtccggacctcccccgttggccttctccttccccttcgccctgcctccctctctcagtctctctccggcctccctcgcccacagagacagagcggaagccgccgagctcggagcccagcactttgcacgccgccgccggccatgtcggtggatacggagcggagctccaccgagtcgtccgcggcctccgggctcggctacgaggacaccgcgctcgccctcaccctccgcctcccgggctccgaccccggccgttcctccccgctcgccgcgccctccgacgccgcgccgtctcccaagacgcgggtggtggggtggccgccggtgaggtcgtaccgcaagaacgcgctcgccgactccagcaaggccaaccggtcagccagtttcgtgaaggtggccgtcgacggcgcggcctacctgcggaaggtggacctccaggcgtacggcggctacgaccagctcctccgcgcgctccaggacaagttcttctcccacttcaccatcagtcagtgcttcgtgcaccgtcctgccctgggtttagttttccgcagcgccttgctctgtttgatcgagcggtacgttccggctggatgcgcgcgcagggaagttcgccgacgacgagaggaagctggtggacgcggtgaacgggacggagtacgtgcccacgtacgaggacaaggatggcgactggatgctcgtcggcgacgtcccctggaagtgagctccttcgctctgtctcttttactttccctgatctaattagctggttatctacgcagtttggctgtgctgagtagattt

SEQ ID NO: 148929 - DNA, 2935 bp, Zea Mays
aggcccacatggcagcctctgcactgcaggatctcatcccctccggctgcccgtgcccagccgtcgtggcgcgacggcggcggtcggtctggtagggctcccctcctttccaccagatcagaacagatagtcatagatcagtgtcacaccacgacccgccagccggaccgccacttgccaaccaacgcctttccctcctcctccgcctccgggcgctagcgggaatggacgccgccgagctgcccctcgtctaccacatcggtctggtgctggccgcgctctgggccgccgccgccgtcggcttccgcggctccctcctctacctcctcgccttcctctacctctacatggtaaatgctcgctgtgcagtgagactgcggaagaggatacaacatgaagagatgaaatctgcctaccaacgaaggctcctctctgatgcagaatcagcacgctggttaaaccatgcaatcgacaagatgtggcctgtctgtatggagaagatcgtttcaaaacttctacggcccatcataccatggttcttggataagttcaaaccttggacagtcagcaaagcaagtattcaggaactttacatgggcaggaatccaccaatctttacctccatgagagttctaccagagacatcagatgatgaccatttggttcttgagctgggattgaattttctttctgctgaagatatgagtgctgtacttgctatgcagctgcacaagagtgtgggacttggaatgactgcaaagatgcatttaacaagcatgcatgtcgagggaaagatattagttggtgtgaaatttgttcggagttggccatttcttggccgtgtaagactatgttttgtggagccaccttattttcagatggctgtgaaaccactcattaatcacgggctcgatgtcactgagtttccaggaatttcaggatggctggataagttgatggatactgcatttgggcagacattagttgagcccaatgtgatagtaataaatgtggaaaaatttgcatctactccttcagaaaataactggttcagcattgaggagagacctcctattgcatatgtgaagcttgagattctagaaggaactgacatgaagccatctgatataaatggactagcggacccatatgtgaaaggtcaccttggtcctttcaaattccaaacacagatacagaggaaaacattgtcccctaagtggtttgaagaatttaaaataccaatcacatcatgggaggcaacgaatgaacttgtcatggaagttcgtgataaggaccccatgtttgatgactcacttgggcaatgtaccattagtttacatgatctgagaggtggacaaagacatgacaaatggatatcactgaataatgtgaagaaaggaaggattcacttggcagtaacaattgatgatatatccgaggaccaaaatacatcaagtttggaccaatcattgaagcaagcggatactgaactaccagtatcaacatctgtttgtagcgaagtggatgctagtgaacctcctgaagaaaagaaagtcttaatggatgaagtggagcacataaacattgatggacaagaacagcctggaggtttatatgtacatcgccctggcactggggttccaaggacatgggaatcccggaaaggacgagcacgaaacccagacacacagattcaccaagaggttgacaagcaaaaggaagtcccaacaccaaaagggagtgggcaagggggtctatttaacgtaggctcctttttccggtggaactcgaggaaggggagctccagaaatctcgatgccagccctcctgcaactccgggttctcagagcgtgacagagcttgatccaaagctccctcaaactccacgtcccaacctgaaggagctaggcgagaagcggacgtcgataaagatcgtagtggacgaagaagcaagcccggcagacaaggtgggaggtgcggagaactcaggagaagatgtggcgaaggtgatagagaaaaatgcaggtgaaccgggcaggtcactgacaagcacattgagcaggaagatttgcagaaggagagcagatgataggctatcagatatccccgagaagattgaagctcgtggatctaagccggtgagtgaagggcctattcttgttagaggtgagccaatgataacagtggaccatccgacgacggaacatagcgatggaggtggcactgagcaagatgcggtgggagcaaaggttgctactcagacctcataaggattgcgacttaaggtcagcagttcttgttcttgtaatctttgctggtcgatttggttcgggcatgggaccttgctttctgtttatagatcagtgtccatagttgcgaagggtatccatttagaaatggctgaaaaatatagtaacaaagagcagcgtgttgtgcagtgatatacgctcatgttgataagatggctctgttagatcttgtttacttatgtaaagaaacatgaattgcatatatttcttgacataaataatgtaaaacgtatttttttggttgcattctttcctctacgcatatgatattttgcccggttttatcatgtaataatttcccaagattttcagctcaggcaacagaagaaatgcaaagcccggcccagtaaaccatcatcgtctttcacggcccatcaaagaggcatccgcgttcgcacattgcagtagcttcccacacccccctccagagccggcacgttctctagactatatttcctatcttattcattttcttctatgggataatactcttgttaatatgagttatacataagcttgtcgctgcacaataatgtaatttatagggtcttattgctgaagtatccatcatcagtacatttatggatgtagtttttagctctgatctatatatcggttgataagat

SEQ ID NO: 148930 - DNA, 1049 bp, Zea Mays
atggacgccgccgagctgcccctcgtctaccacatcggtctggtgctggccgcgctctgggccgccgccgccgtcggcttccgcggctccctcctctacctcctcgccttcctctacctctacatggtaaatgctcgctgtgcagtgagactgcggaagaggatacaacatgaagagatgaaatctgcctaccaacgaaggagcaaagcaagtattcaggaactttacatgggcaggaatccaccaatctttacctccatgagagttctaccagagacatcagatgatgaccatttgatattagttggtgtgaaatttgttcggagttggccatttcttggccgtgtaagactatgttttgtggagccaccttattttcagatggctgtgaaaccactcattaatcacgggctcgatgtcactgagtttccaggaatttcaggatggctggataagttgatggatactgcatttgggcagacattagttgagcccaatgtgatagtaataaatgtggaaaaatttgcatctactccttcagaaaataactggttcagcattgaggagagacctcctattgcatatgtgaagcttgagattctagaaggaactgacatgaagccatctgatataaatggactagcggacccatatgtgaaaggtcaccttggtcctttcaaattccaaacacagatacagaggaaaacattgtcccctaagtggtttgaagaatttaaaataccaatcacatcatgggaggcaacgaatgaacttgtcatggaagttcgtgataaggaccccatgtttgatgactcacttgggcaatgtaccattagtttacatgatctgagaggtggacaaagacatgacaaatggatatcactgaataatgtgaagaaaggaaggattcacttggcagtaacaattgatgatatatccgagttcaaaaataaactagcgagtgacaaatatttgaaaacggaggtaatattatatatagataaaaaatgtagtagttaaatttggatgaatagaatgtagtagttgat

SEQ ID NO: 148931 - DNA, 1328 bp, Zea Mays
catcagcaacaccaacacccaacagcgcagcagcgcacccaccaccacaccacctcccaaaagcaaagcacgttgctaatctaaccattcccctccacttgcttccttccttcctcccaccaccaggccctttccacccactccccaattcccttttgttccctcttgatcgggcgacgggaaggccaggtctagcaagtcgcgcggcgatgatctcctcaccctctccgtcgccgtcgccgtcgccgtccgggacgccctcgcccaagggcgtctccgctacgccgcggcagggcagcagcaggtggcgcagcggcgcggtgcgcggggcgtacgggcggcgcctgctggacgcgctccgcgccacgggcggcggccagccgcgcccgcgcgccgtcaaggcggcggcggactcggcgctggcgctgaccgcgcgcggccagacgcggtggagccgcgccatcctgctggccggcgcggcctgcggccgccgtcgccgcgtcctcgtcaaggcgggcggcaaggtccggcgccggcgccgccgcccgccggtgcaggccagagacaaggcggcggtggcggcgctcaagggccagggcaaggacaaggtgcaggagcggctccgcgcgctgggctgcctcgtcccgggctgccggaggctccccgcgcccgcgctgctggaggaggccgccgactacgtggccgcgctgcagatgcaggtcagcgccatgcgcgcgctcgccgacgcgctggcggccgcgcagctgtcgtcgccggcggagaggtgagacgtggctgcgcgggtgtggctggattgacggattgattggttggttggcctagccgcttggccccatgacatgattgatcaccggctcctgctcgctccccccatctgcatctgccggatgttaatcattttgcggtgcgtgcgttgctattgtcgggagcgattggtggtgggactagcagagtgatgagctcgtgatttgctgtaaattccttgatccttactcctaccgcagctgcaaatgctgctcctctcttctttctgctctgctgtgctttggtacttactctcgtgttagtacataaaagaacttgtggataattgtgtgttgcgtgccatgattttggtaccggggaatgaaggatcagaaacagtttggtggatgattgtgttgcgtgctatgatgatttcggtgccagggaatttggacgatcagaattaattagtgtttgtgttgtgactgcatcggaaatgctttgcccctgcgcctttcatcgggtatacttttgtgtttgggacagaaattaaagaaaaaaaa

SEQ ID NO: 148932 - DNA, 2108 bp, Zea Mays
gggaatatgcgtacacgatcattatgggggagtggatgggacgggaatgggatggatagagcagtgctgcaggggccagggagcaggggagtcgaaggccccaccctagtccgccaacccacccagctcggctccaccgtggcagcttctttgaccctgacgctactgagcgtgtgggccctcgtggacgccttccatccgactctcgtcctcgtcaccagcccccgacccatcacccaccacttttcaacacctcccccctccgaccgcacacctataaaacacaccagcaaccacccttcccgtccaagtcaatccatccagcaaccaaaatcaaaccaagcaaagcgcaccgcaggcggcgccagccagcggcagtagcttgcttacctggtccccgcccccacacctcttcccttcccttctccctcccatcacacaactccatctccaccccgtgaccgacccacccatccatggcggcggcgcccaagtccatcgagcggctgccggcgcgccgggtggtcccggccgagcccacgccagccggcccgctccgcctctcctggctggaccggtaccccacgcagatggcgctgatcgagtcgctccacgtcttcaaggcggcccccgaccggccggccgccgccagaggcagcccggccgggaccatcgagcgcgccctcgcccgcgcattggtccactactaccctctggcgggccgcctggtcctgtcggagtccggcgcgcagcaggccgtggactgcagcaacgccggcgtgtggttcacggaggcccaggccgcgtgcacgctcgaggacgtggactacctggaggccccgctgatggtgcccaaggacgacctcctcccgcccaccccggccgccgaggacgagcgcgcgctggtcctgctcgtccaggtcaccgccttcgcgtgcggcggcttcgtcgtgggcttccgcttcagccacgccgtcgccgacggcccgggcgccgcgcagttcatgaccgcggtcggggagctggcccgcgccagcgccggaggcgccggcgccggcgcggtgtcggtggagccgcagtggggccgcgacgcgatcccggacccggcggcggcgctggtggggcggctcccgacccccgacgccggcaccaggcggctggcgtacctcgccatggacatctccgccgactacatcgggcactacaaggcggagtacagcgcggcgcacgcggcgggcgccgggtggtgctccgcgttcgaggtgctcatcgccaaggcgtggcggagccgcacccgcgcggcggggttcgagccggacaccctcgtccacgtctgcttcgccgtgaacgcgcggcccgcgctgcacggctcgctcccgcgcggaggcgccgggttctacggcaactgctactacatcatgcgcgtgtcggcgcccgcggggaaggtggcgggctcctcggtggcggaggtggtgaggatcgtcaaggacggcaagcggcggatgcccgcggagttcgcgcggtgggcgacgggcgaggccggcgccgccggcgtcgacccgtaccagatcacggccgactaccgcacgctgctggtgtccgactggacgcgcctcggcttcgcggaggtggactacggctggggcccgcccgcgcacgtcgtgccgctcaccaacctggactacatcgccacgtgcatcctggtgaagccgtgggcgcacaagcccggggcgaggctcatcacgcagtgcgtcaccccggaccgcgtcgccgccttccacgacggcatgctcgacaccagctgctgagctgagcagctctgcctgcctgtgctggattcgaggaaggcaggattggtattggattggatggggggtgggggagcgtggatgcattggttggtggtgattgtttgtcagtgtgtgtgtgttacctgctgaataactcccagaccccctcgattcagggagtttgggggagctgagctgtgttacctactcgcaccaatattgaattattcatctccgaaaaaaaggagatcaattaaccgtatgtttggttgttggatgagcagagcctggttctcagctcagatgcaggctgcgcct

SEQ ID NO: 148933 - DNA, 1717 bp, Zea Mays
gtcttaaaccgcatcgcatcgtcttctagggtttcctcctcccgccgccacttgccgccccacgagcccattcccctcagcccttcaccatctccggcggccgcagtggcatcagcagctccggctcacgcgcagtgaaggaacgacaatatggcgaccatcgtaaacacgacggaggaggagccgatgctggccgtggtccgcttcaccgctgagctcgcctgggccgacgcgggcccggaggtcgccgaccccgaggtcacccgcctatgtctcgaggcgcaggagcatatcctcgcggggcggtggctcgacatggcctcccttatgctcgcctccgccgacctcctcctcacctccccgtcgcgcgtctcggacaaagacctggagtgcgttctctccgtcatctgcagcctcgtcaccaaggccggatccgaggaccaggcgctgcagatcaccgaactcatctgcgctaagctcacccagcaacacggtgacaagccagcgctgcgcctcaaagttcttttcagcttgtacaatctgctcccgagcccgtacggcaaggcatttgtttacaagaaggctcttgagctcgccacggctggaaaggctgctgagtacatcatcccatctttcaagaacattgacagttttgtcagtgagtggggaattgacaatttggagaagagggagctataccttgctatcaccaccatcctcaaagaccacaagggcatggctaaggagtactttaactttctcaataagtaccttgccacattcaaagggtcagatgatgaatcagctacaattggtgatgcgaaggaagaggctgttgcggcaatcatcgagtttgttaaatcgcctaatctctttcagtgtgatttgctcaacatgccagctgtttcacagcttgagaaggacgaaaagtatcagttggtgtatgaactactaaagatattccttactaagaagcttgattcctacttggagtttcaaagtgcaaactctgacttgctgaaagattatggtctcgtccatgacgaatgtgtaaccaaaatgcgcctcatgtctttgcttgatctgagcagccgatgctctggtgaaatcccttattctgcaatcactgttgaactcaggatcaatgatgacgaggtggagcaatggattgtgaaggcaattgcatccaagatattggattgcaaggttgaccagcttaaccagactgtcattgtcagtcggcacacagagaggatctttgggatggaacattggcatgctctgcgcacaaagctcggagcttggaggggaaacattgccagagctatcaacacaatacaagctaacaaagtcaccgaagagggggcacaagggatgcaaggcttggcgatccactgattcagggcagatcagcgggttcgtgaattgagattatagcgtgggagattagaagggcaacctttttttgtataagacaagctgtaatggtttatttacttagatcccgtaaccatgcctggttattccttgtatttggtcagacacgccgcgcattacacatcccaagtttttaccctcgacgtggtctgtcctgataaatttccttccctgatatttttttgccctttccaagctttgatcagtcatgtgtgttccattggagcatctgatgttatccttctattatgttcactcaagatggttgggcttgtacatc

SEQ ID NO: 148934 - DNA, 1739 bp, Zea Mays
gtcttaaaccgcatcgcatcgtcttctagggtttcctcctcccgccgccacttgccgccccacgagcccattcccctcagcccttcaccatctccggcggccgcagtggcatcagcagctccggctcacgcgcagtgaaggaacgacaatatggcgaccatcgtaaacacgacggaggaggagccgatgctggccgtggtccgcttcaccgctgagctcgcctgggccgacgcgggcccggaggtcgccgaccccgaggtcacccgcctatgtctcgaggcgcaggagcatatcctcgcggggcggtggctcgacatggcctcccttatgctcgcctccgccgacctcctcctcacctccccgtcgcgcgtctcggacaaaggtacctttcttctctctcgtaattcagagatcttatgtgcttgagcctttaactccgtttttgcagacctggagtgcgttctctccgtcatctgcagcctcgtcaccaaggccggatccgaggaccaggcgctgcagatcaccgaactcatctgcgctaagctcacccagcaacacggtgacaagccagcgctgcgcctcaaagttcttttcagcttgtacaatctgctcccgagcccgtacggcaaggcatttgtttacaagaaggctcttgagctcgccacggctggaaaggctgctgagtacatcatcccatctttcaagaacattgacagttttgtcagtgagtggggaattgacaatttggagaagagggagctataccttgctatcaccaccatcctcaaagaccacaagggcatggctaaggagtactttaactttctcaataagtaccttgccacattcaaagggtcagatgatgaatcagctacaattggtgatgcgaaggaagaggctgttgcggcaatcatcgagtttgttaaatcgcctaatctctttcagtgtgatttgctcaacatgccagctgtttcacagcttgagaaggacgaaaagtatcagttggtgtatgaactactaaagatattccttactaagaagcttgattcctacttggagtttcaaagtgcaaactctgacttgctgaaagattatggtctcgtccatgacgaatgtgtaaccaaaatgcgcctcatgtctttgcttgatctgagcagccgatgctctggtgaaatcccttattctgcaatcactgttgaactcaggatcaatgatgacgaggtggagcaatggattgtgaaggcaattgcatccaagatattggattgcaaggttgaccagcttaaccagactgtcattgtcagtcggcacacagagaggatctttgggatggaacattggcatgctctgcgcacaaagctcggagcttggaggggaaacattgccagagctatcaacacaatacaagctaacaaagtcaccgaagagggggcacaagggatgcaaggcttggcgatccactgattcagggcagatcagcgggttcgtgaattgagattatagcgtgggagattagaagggcaacctttttttgtataagacaagctgtaatggtttatttacttagatcccgtaaccatgcctggttattccttgtatttggtcagacacgccgcgcattacacatcccaagtttttaccctcgacgtggtctgtcctgataaatttccttccctgatatttttttgccctttccaagctttgatcagtcatgtgtgttccattggagcatctgatgt

SEQ ID NO: 148935 - DNA, 207 bp, Zea Mays
aggaagaagactaatggagatcatggagcatcatcatcatctcagcctttcgtgcagcagcagcaattggcagtacaacaggacagttacatgcagagcagagctgaagctctacaaaatgtggaatcaacaatccatgagctgagcaacatctttacacagttggcaaccatggtttctcaacagggagagctagcaatcaggtga

SEQ ID NO: 148936 - DNA, 366 bp, Zea Mays
acgcagcctgcagtgcctgagctaccaagaatttcagagcaaggtcaccagaatgccttacaaaagacgacttcgacattggagggtctcattgcggacgattcacaccaccagccctcctctgcccacagcgaagatggagctgctaataatgggtctagggatatcagtggggattcttcatctgttgatttgaaaagcccagtcccactagggacacatgcagatgtcatggaagacgaaggatggatcacaattccatgcaaggcatttcctgaaagttggaacgacatatcagaaatggttcagttgcaagctctggaccgttccttcctttttccaggtaaatgtgttttccttgtcact

SEQ ID NO: 148937 - DNA, 747 bp, Zea Mays
ttcagaaggcactaacatcctgtactatactgtgtgcctttcattcatctctcccaaaggcccaaacgaagccagtctatggggtgactcaaccatgagacaacatagccgctattcagacaaaacgctagattgtaccaacagatagctgaacctacaccctggcccattcttcaccgggcaaaaagattaaccgggaggtctaaaaagggcaaaaaggaaggggaaaaaaatactatgtacaggacactggagattcaaaggagaaaacaaaaggggaaatgatgctatctactgactcgaccaaatggcactcctaccatcaggaaacgatgagtcgagatcaagctgtatgcatgcatgcgccaagggctcacggcaaaaggcccaaaaaaataggggagtcagcgctcctcgttcctcgaatcccttcggccgtcccgggtcgtgtccctgccagatgatttgatcgcgtcggcaatcatgagggctaccgtggccctgtggagggcgaggtcagccttctgcatcaggcagtgggccttctccctcttgagcctcgccatggcggcggcgtgctgcgctgcgcccgcggcgtcccgcagcttcagctcctcgacgtcgacgcgggaggagcccgggaagaggtgcttcgagttctgccagtcgtggatagcagcgttccagtggtcgtgcgcgctccgtttcgctctctgggggcggcaggaaggtgatggctggtggtcg

SEQ ID NO: 148938 - DNA, 2023 bp, Zea Mays
ccacaaccagcagcggcggcagcggcgcgctctcctcaccgcttgcgtcaccggcgtcctctccccagtataaataggcggcaggccgctcgcccgctcccacatctcttcacggccacatcatcactcgctcggcgccatagccatcggcctcactagctgtctagctagcttccagccgcagcagcttgtcgtgcagataggccactcgctggggtacggttgtaaggttgttgttccgtgactctcgcacaatgccggccatggtggtggaggaggatctcatcagaggggcggcgcccgagccggagccggagccgcacctcctggtggtgaccttcccggcgcagggccacatcaacccggcgcgccacctcgcgcggcgcctgctgcgcgccacgggggcgcgggtcaccgtctccacggccgtgtccgcgctccgcaagatgttcccgggcgagcaggcgggcgcggagggccaccgcgacgccgcgggggtgtggtacgtgccctactccgacggctacgacgacggcttcgaccgcgacgcgcacgacgccacgcactacatggagcagatcaagctcgtgggcgccgccacgttgggggccgtcctcgaccgcctccacggcgtgggccgccccgtcacgctcgtcgtgtacacgctgctgctgtcgtgggtggccgacgtggcgcgcgcccgctccgtgcccgccgcgctctactggatccagccggccaccgttctcgccgtgtacctccacttcttccgcgccacggacggcgtcgaccgggccatcgccgcggcgggcggcgacccgtgggcgagcgtccggttcccgggcctcccgccgctccgcgtccgcgacctgccgtcgttcatcgtctccacccccgagaacgacccctacgcgttcgtcgccgacgcgttccgcgagctcgtcgagacgctgggccgcgaggacaagcccagcgtgctcgccaacacgttcgacgcggtggagcccgaggcggcggcgtcgctgcgggaggctggcgtggacgtggtccccgtcggccccgtcgtctccttcctcgacgacgcggcggcaggggccggcggcgccaagaacggaggcaacaacaacgacctgttcaagcaggacggcgagggctacctcgactggctggacgcgcaggcgccgggctccgtggtgtacatctcgttcgggagcctgtcggtgatgagcaagcggcagatcgaggaggtggcgcgggggatggccgagagcggccgcccgttcctgtgggtgctgcgggaggacaaccgcagcagcgagggcgccggcgccggcgccgcgccgctggccgactgggagggggagcgcggcatggtggtggggtggtgcgaccaggtgcgggtgctgtcgcacccggccgtgggctgcttcgtcacgcactgcgggtggaactccacgctggagagcatggcgtgcggcgtccctgtcgtgtgcgtgccgcagtggacggaccaaggcaccaacgcgtggctggtggagcggatcggcaccggcgtcagggccgccgtcagcgacaaggacggcgtgctggaggccgacgagctgcggcggtgcctcgacttcgccacctccgagatggtgcgcgccaaggccgccgtgtggagggagaaggcgcgcgccgccgcgtcggaaggcggctcgtcggagatgaacctcagggcgttcgtcgcgaagcagatcgccggcggcaagaactaggcctggccgtctcgctagacctcgcgcgcgtcgtcgcatcgcatgcatcattggcttttcccccacaaggccacaacagctagctggcattagatagtgctatgctatacaaggcgtaggatatggtcatatggaaatctacgactgtacgtacattgttgctgctgctggatttggttcgattggaattaattactaaacgtctgttatttttaccaaatatatatatcgatgtacatgcatattcatgaagtgtttttttcttt

SEQ ID NO: 148939 - DNA, 2216 bp, Zea Mays
cttattcgctcccacatccaccaccatctctaccgcgccgcacccagctccagctctagcagcaccatctctaccgacgcacccacctcctcctccttggtgaaggccggccgcgccactgcacgagcacacacgaacgcacagagacgggtggccgccgtaccgacgcccgcgcctccaggtagactagactactactagtacctggcagggggctgctccattgccggcacatcatcaggaaaaagaagggagctgtgctaaaatttcttggaggggagggggtagagatgacgtttggtagcgccgacatggaggccggcggcggcggcgagcgccgccacggacaacaggaggaacagtcatccgacgagcggcgcgcgcggttcgcggaggactggggctgctgcgcctgcgcctgcgcggggctattcctggggcccaacccgatggtggcgcgctacatgtacgcgctcatcttcctcgtcaccaacctcctcgcctggacgctccgcgactacggcgactccgcgctcgccgagctgcagcggctgaaggtctgccagggcgcgctctactgcctgggcgcggagggcgtgctgcgggtcagcctcggctgcttcgtcttcttcttcgtcatgttcctgtccaccgtgaaggccaggaaggtgcacgactgccgcaactcgtggcactccgagtggtggccggccaagctcgccctctggctcggcctcaccgccgtcaccttcctcgcgccgtcgccgctcgtccagctctacgggaaggtggcgcatttcggagcaggggctttcctggtgatccagctgatcagcgtcaccaggttcatcatgtggctcaacgactggtgccgcgcagagatgacccagaagagataccacttgcagattcaggcggtgtccatcgtcacgtacgtggggtcgctcctggggatcgtgctcatgtacgtgtggtacgcgcccagcccggcctgcaggctcaacatcctcttcatcaccgtcacgctggcgctcgtgcagctcatgaccttcgtctccatgagctccaaggtgaaggcagggtacgtggcgccggggctgatggggatctacgtcgtgttcctgtgctggtcggcgatcagaagcgagccgcacacggaggtttgcaacaggaaggcagaagtcgccacgagcgcagactgggtgaacatcgcgagctttgtgatcgccgtcgtcgtcatcgtggcggcgaccttctcgacggggatcgactccaagtgcctccagttcaagcaggcggagggggagtcggaggaggaggaggaggacgacatcccctacggcctcggcttcttccacctggtgttctccatgggcgccatgtacttcgccatgatcttcgtcggctggaacgcgaacgcgagccacaccatggagaggtggacgatcgacgtcgggtgggcgagcacgtgggtgcgcgtcggcaacgagtggctggcggcaatcgtgtacatatggatgatgatcgcgcccgtcatctggaagacgaggcaggtgggatcggcggcggagacgtgagcagtttttccgctgattctgagtttctgacagccggaatctatatatacatacaaacacaagagcaaatcaaagggacgggaaacgggaagaggtggtgcgtgctaactcctatgcatcgcattcctggatgttcattggtcaatgatgatgctgcactgctgcagctcgggtagtttttgctaagctggaggtgcagcagacaagacaacaagaaagaggaggcaactaaggagtagtactatactgatgccactagtccatcgtggagctcggttcaggaagctcatcgatctcgttgtacttgtaccgaactatctcaaaaaacatagtgcctgtttgtctggattgctgctcggccacaagcacagctgtctggcccggggcaccatccaaacaatcccatatagagcgtgtttggacgcagtcatgcgcttgggttttgcttttgcctgtctgtgcccggcagattcatgggcctgtaagcaaacacgtcccaattatctgaactcggaattatttacgcctcggcaagattcatcaactcaatttttttgtgaacaatcttattgtgttactaggtgaatgcccgtgcgttgctacggagtaaacatattatgataagatatattgaaattc

SEQ ID NO: 148940 - DNA, 501 bp, Zea Mays
atggaaggtgttcttagccatcaactgaagcaatctgtgattgatggtaacaaagttgtgctaagtgtctccaatgctgatacaaaggttgacgatgttgaatttgaagaaaatgaactctatgcaatcgatattgtcaccagcactagggaggggaaggttgatggtgctgaatttgaagaaaatgaagtctatgcaatcgatattgtcaccagcactggggaggggaagttattggatgagaagcagaccactatctacaaaagggctgtagacaagaactataacctgaagatgaaagcatcaacgtttattttcagtgaaatcagccagaagttcccaaccatgcccttcactgctagggcatcagaagagaagcgtgcacgcttaggcttggtggaatgcatgaaccatgagctattgcagctgtaccctggacttcatgagaagccaggtagagattatactgtgtcaacagtgagcaaaatcagatctatgtga

SEQ ID NO: 148941 - DNA, 2046 bp, Zea Mays
ttcactgcaactgtgttccctcgctctcctccctcctccctcttcacctcagcacgggctctcttccctccgcttcctcccgtctcctctcctctctcgcacaatgccattgcgcggtgcgtgagagggagtcagacacacagacgaggaggaagagggggtagccagccagccaaaggcgaaagcgagaagaagaagaaaaaaggacattgcgcccgtgcaaggcgtgcgggcaggccggcgatgctgcggaggactgtgcccgaccgggccgcggactcgtccggctccgccgggggcggggacgcccggccccgcgccgacggctccggagccgcgctcttcgccgtgccgcgcctcttcgtcggattcgccgccaagcgcgcgccggacgcggagtcgtcgaggagcccgacgtcgccgctagaccccaaggcgctgctgctccggtcgccgaggagggcctggggcgcgccgggactagtcgacgccctcgccgccgacaccgctgccgccaactgcctgctcagcccgcgcctgcggctcgtcaggcagcacagctccccgcccaaggaatgcggcggcggcggaggaggacactcgcagccggagctcggcaagacgatgtcctgccccgcgccggacaccgcggccgccgccgccgccaccgccatgtcggtgccgtgcagcaggttccagttccgccgcggggatctgaagtctggtcctgaggaggccactaggtcggacaccggcgcgtacctcgtcagcaacggcaacgccaagcgcaactcgttcgacttcggtaagctcccgggcccgggctcgctgccagtgccagcgtcccggcgcttcgtgggctcggtctccgcgagcgagatcgagcagtcggaggactacacccgcgtcatcgcgcgtggccccaaccccaagacgacgcacatcttcggcgactgcatcctggagccccacacggccggggccagcgacgacgaggccgccgccgtggaatcggaggatggagccgccgccgggcgctacttcgtggtcaagtgcgccgcggaggccgatggtttcctcagctcctgcttcgcctgcaacaagaagctcgacggcaacgacatttacatctaccgcggcgagaaggcattctgcagcgccgactgccgggaccaggagatgcagctggaggaagaggaagccgagaacagcacgagcggcgcgtccccgctgtcctcctgctcctcctcctcctccttccacgacgacgacatcttcatggccggcatggtggtcgcgacgtgatctccacccggccggccggccggcgcaccgcgggcgttcccccctctctccccacttctccttgcacggcaacgccaacggggcaggcgatcgtagccgatcgttcactcacccaacccaccggtgcacgtcgccgccgtcagtctgttccttcggtgcagcaaactgtacgtgacggaggagccgagaagaaacggcgctgtgctctgctgctctgctcatggtgggtggggcattgtcgctactcgctagtcctggtaatccgcagagatctgcggggttttttttatcagaaagagagggagagagagaggatgcctcgtcggcctcgcctgtgtgcctgagcctgccactgtagttttgatccaaaggctgccggctggccggccagtggtgcgccccccatcattcctttcctagctcgcttttcttctcgctttcttcctactcgtagcagcagtgactgtctctatccgtgtgtgcgcatcgcattgccatgccacacccccctagcggctagcgtctccgagataatgacatcgagctgctttgagtcatttccgttgctcttttgatctttttttccctctgtgcagccagccgacctggagtgaactgaaagggacatacagagagagcacatgcaatgatcccatgcatggtggttttgagggcacttgatttccactcgagaccaactgaatgactccgcacagtaaataaaaacataaagagttgcag

SEQ ID NO: 148942 - DNA, 285 bp, Zea Mays
ttcagagtacacatgaagtggcgctggctaacaggttgaagtattctcttgatgagaatgacaaagaggatggtgttaatattgaagtcataggggacaacaagattgcttcgccatcgatgcctccaacttcaattaatatttggtggtcgcaaaagtgtggagacttgaatttatataaagttaggcttaacattagtgcaaacagttgtattttagtttagatttagagtacacttatgtatgcgttgtttgacaatgcttatttatgatatattgaatggt

SEQ ID NO: 148943 - DNA, 337 bp, Zea Mays
atttaaatataggtattagtgtcagattaaggaagccaatggaatgctttgacaacttatcccgagagaagaatacattccacaactgagggcaaacgtcaaaagtggcttaggtgtcgcaatgcaagattttttctgctcctcaggtaccttaatcttctggagggcaagaagcagagccttgaaccaaagacagaaatacctttgaatagtttgtgtcgattaaccgaaggaaattgaaataagaagaattgtcagctaaatgtttagcaaggttttaagtaagtggtataccatttgtggcctatgacttggtgatttcatcttcataattacg

SEQ ID NO: 148944 - DNA, 2379 bp, Zea Mays
gggtggctgatataaggggtgcactttcagttagggcgcttgcacaggttttggatctctgtgacttgctggagggcttagttcttcaacctgggattcctgataagcattcttggaagttcagcgcgtcgggggattactcctctagttctgcctaccaggttcttctccttggagctgttgagtttaggccggctgaacggagtgctctgtccctctgcaggggatggctgctttgactcttggtgggagaagagtgccgaggtggtgggcaagcctttgtcggatggtttcaactcgctgaaattgcaggaatgccctttgggaacatacaaaaatgttactggatcttctaaatctttatgctttccatgccctccgggtgaactccctcatcgtgctatatacacaaatgttcgaggaggtgctgctgaaactccatgtccatacagatgcgtgtctgacagatatcgcatgcctcactgttatacagctctggaggagttaatatatacttttgggggaccttggctatttggtctatttctttcaggcctccttatcttgttagctcttgttttaagtgttgctcgtatgaagtttgttggcactgatgagttacctgggccggcaccaactcatcaagggtcccaaattgatcattcctttcccttcctagaatcactaaatgaggtcattgaaactaatagggctgaagagtcacaaggtcatgtacacaggatgtatttcatgggtcccaacaccttcagtgaaccttggcatctcccacacagtccgccagaacaaataacagagatcgtatatgaagatgcatttaatagatttgtcgatgagataaacacccttgcagcttatcaatggtgggaaggatctatttacagtatcctctgtatacttgcctaccccctggcttggtcatggcagcagtggcgtaggagaaagaaattacagagacttcgtgaatttgttcgctctgaatatgatcattcatgcttaaagtcttgccgttcacgtgcactctacgaaggcctcaaggtgactgcaaccccagatctaatgctagggtatttagatttcttccttgggggagatgaaaaaaggcctgatcttccacctcgtcttcgtcaaaggtttccaatgtccctgatctttggaggtgatggaagttacatggctccgttttcacttaatagtgacagtgtgcttactagtcttatgagccaggaactcgtgccatatctgttacaggctgttccctcatggatatggcaccgtcttgtagctggattgaatgcacagctgcgtttggtccgtggtggaaatctgaaagtaacgtttcttccggtcatcaactggcttgaatctcatgcaaatccctctttagctgagaatggtatccgtgttgatcttgcctggttccaagctacagcattagggtactgccaacttggtcttcttgtttatgctgttgaaggagaagctgcacttaccgaacctgatggaagccctagagtaaaaatagagcaacacacacccacacagaacatgctcgctgatactcaactaagtcagtccaggattaaggatgctctaatgcgcaaaaggatcactggtggagttctcaatagtaatagcttaaggacactaaaagacaggagagatttgttttacccattttctcatatcttgcacaattcgaaaccagttgggcatcaggatcttgttggtttggtaatctcaatactgcttcttgcagatttcagcttagttttgcttacttttctccagctgtattcatattctatggtcgatgttctcttggttttgtttattctaccgcttgggattttgtcgccttttcctgccggtataaatgctctatttagtcatggaccgaggcggtcagcaggccttgctcgtgtgtatgcattgtggaacataacttcactggtcaatgttgttgtggctttcatatgtggttttgtacattataagttatcaaccaaaacacacccgagcgtgcagccctggaacctgggaacggatgaaagcggttggtggctcttcccaaccggactcatgctgttgaaatgcattcaagcaaggcttgttgattggcacgttgctaatttagagattcaagaccgtgcgatgggtaaaacaattatattattaacatgttccatggtcttcgctgacagcaaggctggtaaagctgtgagaaatcggtgtggtctgggtgatgtgccgtttgcagctttgcaattcatcgagggatgcaaaaaccttctgacatatctgacgctgtgtcacttgcagacctgtagtggtggatggatggctaagtgggtcacctaa

SEQ ID NO: 148945 - DNA, 109 bp, Zea Mays
ggccacgtaactctagtgccacttaactctagggtttcatcatctttgttggtggttggggatttcaacatgatcctaaacagtgatgataaaaacaactccaatcttg

SEQ ID NO: 148946 - DNA, 969 bp, Zea Mays
cttctgtaactagtaaaagaaagaatagtgataaatattcattttgtaggttggacctggttctgttttacggggcccacttgtaaacagaagtagcgatgatgtggccccaaagctgaattgtgaagcagatagctgtcctgtggaaataatacatccaccagaagattgcaatctaaattcttcattgtcgtttacccttcaggtatgccgtgttgaagatattgatgtatggggtgtcgtacaaggaactgtaattcatttcaatagggcaagaagtgtcactgtgcatacatctgggaccatcagcgcaacaggctttggctgtcgatctggagtaggacaagggaaaatgttaagaagcggtgtatgtggtggtggtggacatggtggcaaaggtgggaatggtttttataagggagaccttgctgagggtggagctatctatggcaatgctgatctaccctgtgaacttggcagcggcagtgggaatgactccacagagttgtccacagctggcgggggtataatagtgatgggctcatgggattattctttgccaagtcttgccctctatggttcagtagaatcaaatggtggcagctatgctagtggctctgttggaggacctggtggtggttctgggggcacaattcttctatttgtgcacactttgtccttagctgaaagctctgtcctttcaagtgttggtggcttcggaagtactggtagtggtggaggtggagggggaaggattcattttcattggtctaacattcctactggagatgaatatgtgcctgttgcagctgttaagggatcaatacttacaagtggaggagtcagcaaagggttaggatattccggtggcaatggaacggtcacaggaaaagcttgcccaaagggtctttatggtacattttgcaaggtataacttatttatatgttccaaacacgttctacctatat

SEQ ID NO: 148947 - DNA, 750 bp, Zea Mays
gggtagtgatttatgtcccctgtcaggatcgggagacaattgatcacattttcttccaatgtattttcttgttttgtttggtgctgtctgaaacattttttggttgggttaacatccctagaacggtcgatgagctctttggtaatggggagaagctgaccctaaggggtctcaccacttaagtgtattcttgctcgttggcctggtgtgggtcatatggcgtgatagaaacaagatggtgtctgagaaagagtttccgcacgacgtttttaggattttgcgtgatgctatttcttttctatggagatggagtgtgagcctgtctcctaaggacctggtttccctagagaaggtgctggtgatagtggggtatgggatctgcaacttcaagagaagcgaaggcgacgagagtgatatagctgttatttgagtaggctagctgaaagtcctgttgtttctcttatgtctagactctgatccttctttcttgttcatgttggcatgttgctatgtgtcagtttaggctactctatcagccggtatcccaagcgacgctccctatgagacttgtatgttgaacctttatatgctttcttataagtagtgaagtttctgagttaattttttttcttattcttttaatataattactagccagttgcccgcgctttgctacggttgtatatatcataaaaataggtattgagatatttattcaaatacaattattgtttatttctaaacactaag

SEQ ID NO: 148948 - DNA, 207 bp, Zea Mays
tcacctcatctccttcgtgtgcggtcttgagcatgtcccaaatttccttagcgctcttcaaccctttcaccttattatactcatctcgacttagagaggggaggagtatagtggtggcctggggagttgaagtacccggatttgggcaacctcgtccaagtcatagtcttcatcccctaacggatggtacctgtactccaaactcaa

SEQ ID NO: 148949 - DNA, 678 bp, Zea Mays
atggatttctctaacatcatccggccggcccttaaccggatcacatcctcctgcaacagctacggcggcggcttcatcacccgcgtgcttagcttcacaggctccttcaacgaccggaccagcctgctgcacgaacccacgcagacggaggaggtcgctgccgcccccgcccctccttcgccggcagcagcagaagctgcggcgcctgcagctgctgcatcggccacgacgacgaccgcggccggccacccgttcgacatcgaggcggggacgacgacaacgccgctggctcccaccgaagcaccggcggcggagccgttcaatgatcatcaggacgcggcggagtcaaggcgcgtgggcaagagcgtgcagaccgtctgcctcttcgccgcgtccgcctcgctcgtgctgttcgtcaacctccccagcagcaacaagcagccgccgccggcggcggggcagcagcagcacgcccttctgtacagcgccgacatggcgttcatcagcctcggcttcttctcgagcctgaccctgtccatgttctccatcgtggcgaggcccggcggcgacggcgaggcggcggccgtggccagggtgcagaaatgggggatggtggtggccgtggcgtccgtggtcgtggccttttcgctgcgcgtgtgcatgacgctcgccgcgtag

SEQ ID NO: 148950 - DNA, 2004 bp, Zea Mays
gccaggacaagggcattgcttgccgaaagctcgggaaggggtagggggttgccgccgttgccatatggaggtcgccgtcgtcgaagggccgccgccgcaggtgatgaaggaggagaaccggcccgacgccaagccagagatcgccgcgtcgatggtaggaaccgctcttccgatagtcttcgaaagctttccatcatcgacgcaaagagatgcggccggcaagaagcgggaggaacaagaacaacgcaggctggaggcggccagagcggagatgggcgaggtgcgggaggagaacgagcgcctcaagtcgacgctgtcccgcatcgtcagccagtaccagtccctgcagatgcacttcctcgacgtcgtcaaggtgcacgagcaagcatctgcagccaaagcggagaagctccccgtggcgccggctcccgcgcctccgcctcccgccaccaccggcaccgacgaccccgacgacctcgtctctctgagcctcggcacgagggcgaatagcggtggcggcgcaccacgccgcaagggccacgagaggtcggcgtcctcgtctggcaccgctgatgagatgaccaccgccggcgccgacgacgaaggccaccggctctccctcgggctcggcttcgggcgcggtagcgggctgccggcgtcgacggtggccacggacgacgacaaggccagccacgcgtccgtccggaacttgagctccgacagcagcggcagcgccgactacaacgacaacgccaagcctgctgacctggccgccgcgggcaccgctcgtaagagcccgagcgccggtgccggcgacggatcagctgacgacgaggtgcagcagcaggccaagaaggctagggtttccgtcagagtcaaatgcgatacacccacgatgcccgatggctgtcaatggcggaagtacgggcagaagatctccaaggggaacccgtgcccgcgcgcctactaccgctgcacggtggcgccgcagtgcccggtgaggaagcaggtgcagcggtgcgcggaggacacgtcgatcctgatcaccacgtacgagggcgcgcacaaccacccgctcccgccggcagcgacggccatggcgtccacgacctccgcggcggcggccatgctcacctcgggctccaccagctccgccgcctcggcctcgctcgtccacggccaccaccacccgctggcggccgccgccgccgggctgttcggccccaccaccatggtctccaccgccgcgtcctgccccaccatcactctcgacctcacctcccccgcgaccgcgccgcacaccctcatgcactcctcgccctacgggttcgagtccaaggcggtcccggcggcgtggagcagcgggtacctggcgtacggcggcgccagcgccggcgcccacccgtcctcctactacgccaagagctcgccggcgctcgggcaccaccagctgttcggcggaaacctgagcgcgccatcgaggccggagcagatgtacgcccaatcgtacctgcagagagccagcagcctgggccttggaggcggcggcggccatggcgccgtggcgcccgccgtcacggacacgctcgcgaaggccatcacgtccgatccgagcttccagtccgcgctggccgcggcgatcacgtccgtcatgggccgcggcggagccgctgctgcccacaagtgatccggggaagaagaccgattggcaagggccggcagatcgcgtttttgagcccatgctgcatgcatggtttagtggttcatgtgtaattaataagtggtatcgtgatcacttttacctttttcgttcattggggtacgtagtttctggaagtgttagcaattggctgctgggggggaatagctggtgatcataatatatcaatgtaacagggatcatcagttcgatcgatccatgtacatagcacagggcgagtcacgtcaaaaactgtacgtacgtttgcaacaccatgggtagaatggaagaaagttttggtcagg

SEQ ID NO: 148951 - DNA, 306 bp, Zea Mays
atgacgtgggaaggggagggcccggtcaccggactgctgcagggaggcactgccatggcggctaaagaacagcatcgacaggggaaagccatcatgggcgagtccggccatcttaggcgagcgcaggggaggaacaactcctgcagcaggcgtccacgggaagggagggagacgaggtcgctgacgtactgtaggaaggaagagcgacgtccatggcggggagggccgacggccatgggagagggcgccgtgagggagaggggatcggctgggaggataggaaatggggcgatggagataggataa

SEQ ID NO: 148952 - DNA, 321 bp, Zea Mays
atgcaaaagcctccaagcagcacgtcgatgacctcgaagctgcccttgtgcttctcccagttcttgatcactcctacacgcccggtgttcctcccgccggtcaccatgaccacgttgctgacgtcaaacttgaagaagtatatgataacaaggattggttatcatggggactcaactagtggaagccatggaatgcctttttgtaatgatttgatagtttgcagtggaaatagctacgctggaacacaaaattcttttaagagaccaccactgcacatccctgtcattgcccaaaattggtggttacttgacttgccataa

SEQ ID NO: 148953 - DNA, 961 bp, Zea Mays
cccacactaaacgttacgtgagatgcgcgtcttgatgggcttcagcttcactcccatgctctccggcgacagaagctcgggcgagatgcagaacgggctcagtgtgctccgggggctgctttcctgctgcgatggcctgtaaagcccgtatcccataaggaagtactccatcgggatcaccatcgcatggggttgctcttctgtgacaagtgaaccacatgcctgaacctgcacgattttaacaccacacacacaaaaaaaaaaccctcagccatcctccttatactcctctgtgtgccgtagagatcaaactgtaacgtcaattttttgaactgtatgttacctcgactagggcgcagtatctccggtctagctttgtggtcatgtggacagcgtcagcatggaactgtgagttttccccaacaaaaatcagcgtctggcactgaagcttctccaacgattctgttagatcatgtcgcctgatgaacagagtagtcagtttttttatcattcagatcaccattcctttgtctgttcaggccatgcaaaacaaagatacattcttgttacctattaattgcctgaaggaaccgccagacattagtcccctgcctatcgtcaagtaactgcacagaagattaccatgttttcaatttcatttccaaatagcagcactagagaaaatgaaggaggttgatactaacacttctgcaggcttggacaatctctgattctggatcctgtccgttaccaaggacgtcctgcacaatgcatcagtcctgagtgaatctgggtaacaagcaccctactccctccgaatatgggcgagaactcgagaaagcgaagacgaaagttgaagagggggatcagaattcagaagtaccatgctgaaataccgctgaagcaaactttccttgactatcccacgcgtcccatagtaataaagcaagtttaacaatac

SEQ ID NO: 148954 - DNA, 539 bp, Zea Mays
agtcccgacctctcgtatctctcgctcgcctccctcgtccgcggtccgccgccgctccagatccagccgtgggagcggggacggggcagggcttgagcacgctctctgcagcttcaggctctgctcgtcggggtggaaggagaactcgagtgctcccaggctctcaacctccacgctctgaaccgctggtacccgagatgacatgtccttgggcttgggcttgagctgggcgcagaacgagcccgtcgtcggaagggacgatgtggacaacctcgtccctggctccatgttgaggccatagagcttgaaccccgaggcggagcccttctgccagagcgcggccccgcggttgaactgctcgacgaatgcgccgaattgctccctcccggaattggagcggacgacggagtgagagaacttcttgttcctgttgtatggtttatgatgtgcgtgagtgataaaatctatgtatttgattcttctgagtgtctctgtgttaataacaagttgtcttgttcctgttgttttactgagctcaa

SEQ ID NO: 148955 - DNA, 679 bp, Zea Mays
acttcctctcccgagtcccgacctctcgtatctctcgctcgcctccctcgtccgcggtccgccgccgctccagatccagccgtgggagcggggacggggcagggcttgagcacgctctctgcagcttcaggctctgctcgtcggggtggaaggagaactcgagtgctcccaggctctcaacctccacgctctgaaccgctggtacccgaggtacggccacgctgattttgccgattcctttctttccgtttgcagccttggcatcgtcctcctgcctcgccgatgcctcttgcgacgacgggcgatcgctgactgcctttcgtgctgccccggcttggcgtctgaagatgacatgtccttgggcttgggcttgagctgggcgcagaacgagcccgtcgtcggaagggacgatgtggacaacctcgtccctggctccatgttgaggccatagagcttgaaccccgaggcggagcccttctgccagagcgcggccccgcggttgaactgctcgacgaatgcgccgaattgctccctcccggaattggagcggacgacggagtgagagaacttcttgttcctgttgtatggtttatgatgtgcgtgagtgataaaatctatgtatttgattcttctgagtgtctctgtgttaataacaagttgtcttgttcctgttgtttta

SEQ ID NO: 148956 - DNA, 1263 bp, Zea Mays
ctctcccagttctttctcgctttttctcctctctgcttttctttgttaccgtcggtgtcgggaattccgcttccgcacaaatatttcttttgctgtcagcttgctcaacggttctgtttgtttggcgcatacctactacaacaggttgcaaaacaatgacctccaactaatacaacccacaacagctgaagaagaaattcagctttctcaaccaccaaatttggaagacaagaccgttgaaaagctgctcaacatagatccggatatgtttcccgcagaaggctatagatgtattgttactatatcacgcatcgtgcaaaatagcagatggtggtacccatcttgctccaggtgccacaaatcttcatctcaaatctcaactggatatcactgcacatcatgtggctgcacaaatattaagtttagatacaagctcagcttcattgctactgatggaacatgcgaagcagagttcttttttttgatagcatagccagaaaaatagtaggagaaccttagggcaaccttgttacagcagttacaacttctgagagtcccagcagccctagccgctattgtgtgtctgaaatttactcttgcagttgccatcaatatgtcagcctactatgtcatgaacagagtattctctattctatctattttaacaaatcatggaagacagaccttcataccatctaacatgcctagccatcctcaacaagagttgtatacacaagatgaagtacctagccttccggtcggccacacaagactctccagcaacatcaatggcaaaactatctacctgtagcaacgaaagaaacgaggcacgatgacgtgttctaatatattcagatatgccacatgacacagagggtgatgacagcgcataagtgaactcaacaagcaagagatatcgtcaccaccaaaatggataaaacatagccacactagcaaaggcataccagatcttacaaaccccaaaaagaaaagctcctaaatcgtcatcaacttcgtgaaggtgtttgctttttgcgcacctatcaggagcaccatcacttttggatcatgaatgctttcctatagatatgaacctactgttatactatttgtggatatgtacatattgacttaacacctgcaagcacattgttgctaagtgttgatgtatggtagttgaatgctacttagtatgtattgtagtctaaatccactctacagctggtatcaactattatataaaaacaacgtcatatgcttata

SEQ ID NO: 148957 - DNA, 1069 bp, Zea Mays
ctctcccagttctttctcgctttttctcctctctgcttttctttgttaccgtcggtgtcgggaattccgcttccgcacaaatatttcttttgctgtcagcttgctcaacggttctgtttgtttggcgcatacctactacaacaggttgcaaaacaatgacctccaactaatacaacccacaacagctgaagaagaaattcagctttctcaaccaccaaatttggaagacaagaccgttgaaaagctgctcaacatagatccggatatgtttcccgcagaaggctatagatgtattgttactatatcacgcatcgtgcaaaatagcagatggtggtacccatcttgctccaggtgccacaaatcttcatctcaaatctcaactggatatcactgcacatcatgtggctgcacaaatattaagtttagatacaagctcagcttcattgctactgatggaacatgcgaagcagagttcttttttttgatagcatagccagaaaaatagtaggagaaccttagggcaaccttgttacagcagttacaacttctgagagtcccagcagccctagccgctattgtgtgtctgaaatttactcttgcagttgccatcaatatgtcagcctactatgtcatgaacagagtattctctattctatctattttaacaaatcatggaagacagaccttcataccatctaacatgcctagccatcctcaacaagagttgtatacacaagatgaagtacctagccttccggtcggccacacaagactctccagcaacatcaatggcaaaactatctacctgtagcaacgaaagaaacgaggtgtttgctttttgcgcacctatcaggagcaccatcacttttggatcatgaatgctttcctatagatatgaacctactgttatactatttgtggatatgtacatattgacttaacacctgcaagcacattgttgctaagtgttgatgtatggtagttgaatgctacttagtatgtattgtagtctaaatccactctacagctggtatcaactattatataaaaacaacgtcatatgcttata

SEQ ID NO: 148958 - DNA, 1968 bp, Zea Mays
acgacaaacacacgctgggcgacggacattaaaccatttacttgatccaaagattacacggcaaattcacctccaatagcgggtgaactgagatttcggcacctactaaagatatatagtaagtacaacaaaataagctgtaggggaatgctgggtcttaataaacagattacatcaacatcaacaacaaaatgggggtagtaatccacaagcaggttgcaatcgccaactagccggatgcatagtgcacaggcgacggaagaacttgaaacaacatcaaactgaacttgttgcggaatcacaggaacaccaaagctggaaatccggccagtcttcgtcgtcaccgtcggccctcgccatgcttcgcagcacacaagagggcacaaaccgccgccgccgccgccgcctacgacatctacacttccttacatattttcttttccttggaaattttccgctacctcaagaaccccaaaacaaatccaccccctagcatcagccctccacccaaccagccgagaatattcacagggcgatagatatctatgtacagggtaattagcggaattatctggaaccaaaggggaacatttttttatgccatccttctctgttacggcttaccagttaccaccaccttttctccactgctatgcagcaccgacccgccgccgaagccgcctcagttgatgaggtcggagacccacccgacgtcggggccaccggttccggcagctgggtagcaggaaacagcgccctccctgctgagccgctcgaacaccttggcgcggagggcccgcccggactccaccctctccacgggctcctcgtcgccgccgaagctgacgtcaagcggctccaggttgggcatgtagccggaggcggtggcgagggctgtcggggtggagggcaggctgtagagcccgcccgctgtgggcgacccgtaggcagccgcggacgccgggtagccgccccacccgccggacggggacgagctggccgtgccgaggcggagctggcggagcgaggccaggacgtcgttgacgggggacccggcgccgggccaggacccgcggcggaaggcggcggcggccccgtccggcgacagcggcggcgactcggacgggggcgtcttgggcggcgacaggagcgtgctggtcggcgacgaggacacgatgctcttggtgaggtaggtctcgaacgcctggcgacgcagcggggagccgtcgtaggactcgggcagcgcgccggcgcccctggggctggcgctagactgctgcggcgtgggcgggagcacccgcagctggtccggggtgtgcgcgaagaagcagacgcggcggcggcaggccgtgccgtccttgcagggctgggtgcggtagcgcgccgggtggagccagcactcgaagacgccgtgcgcgaagtcgcaggcgtcgccgcgcctgcacccgcccttgcggaagtccgggcaggcggcgcccgagtagtggtacctgcgcgggtcgcgccgccgcgccttctcccccgggtgcgcgaaggggcactcggtccagtcgtggctgcgcgcgcgggcgcaccgccggaccttgaactcgtacatgcggaactcgtcgcagccgtagccgtccacgcccgcggccatggccgccgcctcctcgtcgtccgcctcggcggcgccggcgtcgttgcacggcaggtactgccgcagcgccgccagcaggtacggcgtcatctcgtcgccgccgacgccggcgtcgacgccgctcacggggacgtggtgggaccacggcggcacgctcacgccttcgcccatcatcatcatggcgatcttccctggcctgtcgctaggatcgggctctgtttcgttccttccctcgccactggtctacgggagatctcgtggactgagcttatatccctgtgtggctgtgttgtgtgagaaagaccggtgggcagtgtgtgggttgggga

SEQ ID NO: 148959 - DNA, 1711 bp, Zea Mays
acgacaaacacacgctgggcgacggacattaaaccatttacttgatccaaagattacacggcaaattcacctccaatagcgggtgaactgagatttcggcacctactaaagatatatagtaagtacaacaaaataagctgtaggggaatgctgggtcttaataaacagattacatcaacatcaacaacaaaatgggggtagtaatccacaagcaggttgcaatcgccaactagccggatgcatagtgcacaggcgacggaagaacttgaaacaacatcaaactgaacttgttgcggaatcacaggaacaccaaagctggaaatccggccagtcttcgtcgtcaccgtcggccctcgccatgcttcgcagcacacaagagggcacaaaccgccgccgccgccgccgcctacgacatctacacttccttacatattttcttttccttggaaattttccgctacctcaagaaccccaaaacaaatccaccccctagcatcagccctccacccaaccagccgagaatattcacagggcgatagatatctatgtacagggtaattagcggaattatctggaaccaaaggggaacatttttttatgccatccttctctgttacggcttaccagttaccaccaccttttctccactgctatgcagcaccgacccgccgccgaagccgcctcagttgatgaggtcggagacccacccgacgtcggggccaccggttccggcagctgggtagcaggaaacagcgccctccctgctgagccgctcgaacaccttggcgcggagggcccgcccggactccaccctctccacgggctcctcgtcgccgccgaagctgacgtcaagcggctccaggttgggcatgtagccggaggcggtggcgagggctgtcggggtggagggcaggctgtagagcccgcccgctgtgggcgacccgtaggcagccgcggacgccgggtagcccggggagccgtcgtaggactcgggcagcgcgccggcgcccctggggctggcgctagactgctgcggcgtgggcgggagcacccgcagctggtccggggtgtgcgcgaagaagcagacgcggcggcggcaggccgtgccgtccttgcagggctgggtgcggtagcgcgccgggtggagccagcactcgaagacgccgtgcgcgaagtcgcaggcgtcgccgcgcctgcacccgcccttgcggaagtccgggcaggcggcgcccgagtagtggtacctgcgcgggtcgcgccgccgcgccttctcccccgggtgcgcgaaggggcactcggtccagtcgtggctgcgcgcgcgggcgcaccgccggaccttgaactcgtacatgcggaactcgtcgcagccgtagccgtccacgcccgcggccatggccgccgcctcctcgtcgtccgcctcggcggcgccggcgtcgttgcacggcaggtactgccgcagcgccgccagcaggtacggcgtcatctcgtcgccgccgacgccggcgtcgacgccgctcacggggacgtggtgggaccacggcggcacgctcacgccttcgcccatcatcatcatggcgatcttccctggcctgtcgctaggatcgggctctgtttcgttccttccctcgccactggtctacgggagatctcgtggactgagcttatatccctgtgtggctgtgttgtgtgagaaagaccggtgggcagtgtg

SEQ ID NO: 148960 - DNA, 1556 bp, Zea Mays
atctaagcccaaacctaatggcgctggcagcctctagccctctacacgccgtccctcctgctcctgctctccacacgccgccggagaaacgcgacggaacgcccagcacgggctgcacggcaggtcggcactcggcagcacatccctcccggtggtccggccctccgccgtcccagcacgacagcacttccggcgaccaggtcccaggctcccagcgtccggcggtcccagcagtctagcacggcagtcgacagcacttcgggaccacggctccacgcgttctgctgtgcaggttctagcattctgctgtccatggctccgcgcgtccaggaggtgaccaccagaccaagcctccgccgtccagaccagggggcaggggctggatttacatggctcaagacttaggttctagcttgttgaggtatacaaacaagtccgaattggggatccgttggagaaaggcaccttactgggaccagtgcacactcctgcttcaaaagagaactttttgaaaggcattcagactatcaaatctcaggtgaaggttaaaagtagtgttacattatcggttcctacaattatttgaacctccattacaatctcactggatataaatagctatgagaatcatgttattccaagtttactgccttattggtattcaaagttaaatgtacccctctggtcacaaaaaagtgttttggacagggtttggtcaaaccgtaaaaactacgaacatcagtaactaaattatttaggtgaagcatgtaagttatctgtctttgttcgaaataattgcaagcataaatttgaaggatattaagaaattaatggtaaaaagatatgcattgaagtaaaatgtgacaagtatttttacctggaggaaattacacgttctgcaccagttgtgaaagaagaaccctttggtcctgtcctttatgttatgaaatttcagaccttgaaggaagcaattgaaatcaataactctgttcctcaaggattgagcagttctatgtttacaaagaggccagatattatttttaagtggctcgggccccatggtagtgattgtggtatagtgaatgtgaacatacctactaatggtgctgaaattggtggagcatttggtggagaaaaagcagctggtggtggacgagaagcagggagtgattcctggaagcagtacatgaggagggcgacttggagggaggtcctagaggcagtaagtcacttgtttactccatgatgacaatagcaagcagatcgcggtggtgcctatggatgctacaataagaaagatcaaaagttcttttggatggatgcagctagatattttgttttgtattttctccaaaagagaaatttgcaacgttgtgaatgatattataattgtgatgcttttgtgaatatataattgtggtgcttttgtgtttatgtgatggatctatgactgtggtatactgattaactgtgtatgtctttatgatttgtgtataaaaatctgtgatttgtagtgcttaattaaatatatattattattaataacaactgtaaaa

SEQ ID NO: 148961 - DNA, 1728 bp, Zea Mays
ttttttttatgtttcactgatcactgatgtcgtcgatctgcagacatacccgaatcctctccaagacaacccggcgtattcagtcgtcaagcagtatttcgtcaacccagacgacaccgtcacgcagaagattgttgttcataagaccagtgccaggggcacccacttccggcgtgccgggccacggcagcgggtgtacttccagtccgatgaggtgaacgccgccattgtcacctgtggaggcctctgcccgggattgaacacggtcatccgcgagcttgtttgcggcttgtatgatatgtatggcgtctccagcgtcgtcggcatagagggtggatacaagggtttctattctaaaaacactgttgcgttgacaccaaagtcggtgaacgacatccataagagaggcgggactgtcctcggaacctcaagaggagggcatgacactgccaaaatcgttgattgtcttcaggaccgtggcattaaccaggtctatattatcggaggcgatggcactcagaaaggcgcttctgtaatttatgaggaagtccggagacggggtctcaagtgctctgttgtcggtgtcccaaagactattgataacgacatcgcggtgattgacaagtcgtttggatttgacactgctgtggaggaggcccagagggccatcaatgctgctcatgtcgaggctgaaagtgcggagaacggcatcggtgtcgtgaagcttatgggccgcaacagtggttttatcgcgatgtacgcgactctagctagccgtgatgtggactgttgtttaatcccggagtcacccttctacctcgaagggaagggaggactcctcgagttcgtcgagaggcggctcaaggacaacggccacatggtcatcgtggtggccgagggtgctgggcaggacctcatcgcgagaagtatgaatttcgtggacacccaagacgcttctggaaacaagctgcttctggatgtcggcctttggctatcccagaagataaaggatcatttcaagaagaagcccagcttcccgataaccctcaagtacatcgacccgacctacatgatccgcgccgtccggtcgaatgcttctgacaacgtctactgcactctgctggcccacagcgccctccatggcgccatggcggggtacaccggcttcacggtcgctccggtcaacggcaggcacgcctacatcccgttctataggatcaccgagaagcagaacaaggtggtgatcacggaccggatgtgggcgagggtgctgtgctcgacgaaccagccctgcttcctgagccacgaggacgtggagaacatgaagcacgacgacgacgagcaccaccacatgcacaacacgcagctcctggaaggcgggagctcgccggtgtccaaatgcaatggctcggcagcggcagtgtgaggggcacgagaatacgcaaggatatagatatatatagtattaagcatgtagctatggatgttttttttccttttgcttttttgggtgctggcgttgtagagagtatttggtaataataatataatgcttcgctgagattaaatctcacttttcgctgttcgtaattggggggtgagactcttttaaggctcatatgggctgtcatattgaatattacaaaaatcttcagagagccagagaggcttagaacatgtacattcatattcatatatagagagagacaagtaagaagattgttcaac

SEQ ID NO: 148962 - DNA, 2235 bp, Zea Mays
cttctctcctcccgctgccccccttcggtcctcctccgtccgtcgccgtcgtcaaacacgacgtttaacgggcggcgcagagcgctaatccagcccaaacacgatatataacggtccgcgccttccgaagacgccaagaacagcctcaggttactcgcagaaaagatttattagctcgccgcgggggttgaaccgaggctcctagctgatcgcgcgggcacaaggcgagcggacaagaaagcttgctttgtgctcaccggcgggcggcggcacggaccccctgcgatggaagccgtcggcgtcactcctgcccccgtggcggcgccggagaagaagaagctgcttgacctcaaggaccccttccccgccgccgccaacagcggcgccaaggcgtcctcggcgagtaagtgggcgacgaagaagaagctggtgggcggcgacgccggctacgtgctcgaggacgtgccgcacctcacggattacatgccccagctcccggtgcgttcgagagtcccccatcctcttggtgtgtcacgttgggttcctgacgacatacccgaatcctctccaagacaacccggcgtattcagtcgtcaagcagtatttcgtcaacccagacgacaccgtcacgcagaagattgttgttcataagaccagtgccaggggcacccacttccggcgtgccgggccacggcagcgggtgtacttccagtccgatgaggtgaacgccgccattgtcacctgtggaggcctctgcccgggattgaacacggtcatccgcgagcttgtttgcggcttgtatgatatgtatggcgtctccagcgtcgtcggcatagagggtggatacaagggtttctattctaaaaacactgttgcgttgacaccaaagtcggtgaacgacatccataagagaggcgggactgtcctcggaacctcaagaggagggcatgacactgccaaaatcgttgattgtcttcaggaccgtggcattaaccaggtctatattatcggaggcgatggcactcagaaaggcgcttctgtaatttatgaggaagtccggagacggggtctcaagtgctctgttgtcggtgtcccaaagactattgataacgacatcgcggtgattgacaagtcgtttggatttgacactgctgtggaggaggcccagagggccatcaatgctgctcatgtcgaggctgaaagtgcggagaacggcatcggtgtcgtgaagcttatgggccgcaacagtggttttatcgcgatgtacgcgactctagctagccgtgatgtggactgttgtttaatcccggagtcacccttctacctcgaagggaagggaggactcctcgagttcgtcgagaggcggctcaaggacaacggccacatggtcatcgtggtggccgagggtgctgggcaggacctcatcgcgagaagtatgaatttcgtggacacccaagacgcttctggaaacaagctgcttctggatgtcggcctttggctatcccagaagataaaggatcatttcaagaagaagcccagcttcccgataaccctcaagtacatcgacccgacctacatgatccgcgccgtccggtcgaatgcttctgacaacgtctactgcactctgctggcccacagcgccctccatggcgccatggcggggtacaccggcttcacggtcgctccggtcaacggcaggcacgcctacatcccgttctataggatcaccgagaagcagaacaaggtggtgatcacggaccggatgtgggcgagggtgctgtgctcgacgaaccagccctgcttcctgagccacgaggacgtggagaacatgaagcacgacgacgacgagcaccaccacatgcacaacacgcagctcctggaaggcgggagctcgccggtgtccaaatgcaatggctcggcagcggcagtgtgaggggcacgagaatacgcaaggatatagatatatatagtattaagcatgtagctatggatgttttttttccttttgcttttttgggtgctggcgttgtagagagtatttggtaataataatataatgcttcgctgagattaaatctcacttttcgctgttcgtaattggggggtgagactcttttaaggctcatatgggctgtcatattgaatattacaaaaatcttcagagagccagagaggcttagaacatgtacattcatattcatatatagagagagacaagtaagaagattgttcaac

SEQ ID NO: 148963 - DNA, 2184 bp, Zea Mays
gcttctctcctcccgctgccccccttcggtcctcctccgtccgtcgccgtcgtcaaacacgacgtttaacgggcggcgcagagcgctaatccagcccaaacacgatatataacggtccgcgccttccgaagacgccaagaacagcctcaggttactcgcagaaaagatttattagctcgccgcgggggttgaaccgaggctcctagctgatcgcgcgggcacaaggcgagcggacaagaaagcttgctttgtgctcaccggcgggcggcggcacggaccccctgcgatggaagccgtcggcgtcactcctgcccccgtggcggcgccggagaagaagaagctgcttgacctcaaggaccccttccccgccgccgccaacagcggcgccaaggcgtcctcggcgagtaagtgggcgacgaagaagaagctggtgggcggcgacgccggctacgtgctcgaggacgtgccgcacctcacggattacatgccccagctcccgacatacccgaatcctctccaagacaacccggcgtattcagtcgtcaagcagtatttcgtcaacccagacgacaccgtcacgcagaagattgttgttcataagaccagtgccaggggcacccacttccggcgtgccgggccacggcagcgggtgtacttccagtccgatgaggtgaacgccgccattgtcacctgtggaggcctctgcccgggattgaacacggtcatccgcgagcttgtttgcggcttgtatgatatgtatggcgtctccagcgtcgtcggcatagagggtggatacaagggtttctattctaaaaacactgttgcgttgacaccaaagtcggtgaacgacatccataagagaggcgggactgtcctcggaacctcaagaggagggcatgacactgccaaaatcgttgattgtcttcaggaccgtggcattaaccaggtctatattatcggaggcgatggcactcagaaaggcgcttctgtaatttatgaggaagtccggagacggggtctcaagtgctctgttgtcggtgtcccaaagactattgataacgacatcgcggtgattgacaagtcgtttggatttgacactgctgtggaggaggcccagagggccatcaatgctgctcatgtcgaggctgaaagtgcggagaacggcatcggtgtcgtgaagcttatgggccgcaacagtggttttatcgcgatgtacgcgactctagctagccgtgatgtggactgttgtttaatcccggagtcacccttctacctcgaagggaagggaggactcctcgagttcgtcgagaggcggctcaaggacaacggccacatggtcatcgtggtggccgagggtgctgggcaggacctcatcgcgagaagtatgaatttcgtggacacccaagacgcttctggaaacaagctgcttctggatgtcggcctttggctatcccagaagataaaggatcatttcaagaagaagcccagcttcccgataaccctcaagtacatcgacccgacctacatgatccgcgccgtccggtcgaatgcttctgacaacgtctactgcactctgctggcccacagcgccctccatggcgccatggcggggtacaccggcttcacggtcgctccggtcaacggcaggcacgcctacatcccgttctataggatcaccgagaagcagaacaaggtggtgatcacggaccggatgtgggcgagggtgctgtgctcgacgaaccagccctgcttcctgagccacgaggacgtggagaacatgaagcacgacgacgacgagcaccaccacatgcacaacacgcagctcctggaaggcgggagctcgccggtgtccaaatgcaatggctcggcagcggcagtgtgaggggcacgagaatacgcaaggatatagatatatatagtattaagcatgtagctatggatgttttttttccttttgcttttttgggtgctggcgttgtagagagtatttggtaataataatataatgcttcgctgagattaaatctcacttttcgctgttcgtaattggggggtgagactcttttaaggctcatatgggctgtcatattgaatattacaaaaatcttcagagagccagagaggcttagaacatgtacattcatattcatatatagagagagacaagtaagaagattgttcaac

SEQ ID NO: 148964 - DNA, 2163 bp, Zea Mays
cttctctcctcccgctgccccccttcggtcctcctccgtccgtcgccgtcgtcaaacacgacgtttaacgggcggcgcagagcgctaatccagcccaaacacgatatataacggtccgcgccttccgaagacgccaagaacagcctcaggttactcgcagaaaagatttattagctcgccgcgggggttgaaccgaggctcctagctgatcgcgcgggcacaaggcgagcggacaagaaagcttgctttgtgctcaccggcgggcggcggcacggaccccctgcgatggaagccgtcggcgtcactcctgcccccgtggcggcgccggagaagaagaagctgcttgacctcaaggaccccttccccgccgccgccaacagcggcgccaaggcgtcctcggcgagtaagtgggcgacgaagaagaagctggtgggcggcgacgccggctacgtgctcgaggacgtgccgcacctcacggattacatgccccagctcccggtgcgttcgagagtcccccatcctcttggtgtgtcacgttgggttcctgacgacatacccgaatcctctccaagacaacccggcgtattcagtcgtcaagcagtatttcgtcaacccagacgacaccgtcacgcagaagattgttgttcataagaccagtgccaggggcacccacttccggcgtgccgggccacggcagcgggtgtacttccagtccgatgaggtgaacgccgccattgtcacctgtggaggcctctgcccgggattgaacacggtcatccgcgagcttgtttgcggcttgtatgatatgtatggcgtctccagcgtcgtcggcatagagggtggatacaagggtttctattctaaaaacactgttgcgttgacaccaaagtcggtgaacgacatccataagagaggcgggactgtcctcggaacctcaagaggagggcatgacactgccaaaatcgttgattgtcttcaggaccgtggcattaaccaggtctatattatcggaggcgatggcactcagaaaggcgcttctgtaatttatgaggaagtccggagacggggtctcaagtgctctgttgtcggtgtcccaaagactattgataacgacatcgcggtgattgacaagtcgtttggatttgacactgctgtggaggaggcccagagggccatcaatgctgctcatgtcgaggctgaaagtgcggagaacggcatcggtgtcgtgaagcttatgggccgcaacagtggttttatcgcgatgtacgcgactctagctagccgtgatgtggactgttgtttaatcccggagtcacccttctacctcgaagggaagggaggactcctcgagttcgtcgagaggcggctcaaggacaacggccacatggtcatcgtggtggccgagggtgctgggcaggacctcatcgcgagaagtatgaatttcgtggacacccaagacgcttctggaaacaagctgcttctggatgtcggcctttggctatcccagaagataaaggatcatttcaagaagaagcccagcttcccgataaccctcaagtacatcgacccgacctacatgatccgcgccgtccggtcgaatgcttctgacaacgtctactgcactctgctggcccacagcgccctccatggcgccatggcggggtacaccggcttcacggtcgctccggtcaacggcaggcacgcctacatcccgttctatgtaagtcgaaggccgaatgcagttgagcacacagcttcttgaacatggcttgttctgaaaccttgatgggcaatcgatctcttgtttgcagaggatcaccgagaagcagaacaaggtggtgatcacggaccggatgtgggcgagggtgctgtgctcgacgaaccagccctgcttcctgagccacgaggacgtggagaacatgaagcacgacgacgacgagcaccaccacatgcacaacacgcagctcctggaaggcgggagctcgccggtgtccaaatgcaatggctcggcagcggcagtgtgaggggcacgagaatacgcaaggatatagatatatatagtattaagcatgtagctatggatgttttttttccttttgcttttttgggtgctggcgttgtagagagtatttggtaataataatataatgcttcgctgagatt

SEQ ID NO: 148965 - DNA, 2112 bp, Zea Mays
gcttctctcctcccgctgccccccttcggtcctcctccgtccgtcgccgtcgtcaaacacgacgtttaacgggcggcgcagagcgctaatccagcccaaacacgatatataacggtccgcgccttccgaagacgccaagaacagcctcaggttactcgcagaaaagatttattagctcgccgcgggggttgaaccgaggctcctagctgatcgcgcgggcacaaggcgagcggacaagaaagcttgctttgtgctcaccggcgggcggcggcacggaccccctgcgatggaagccgtcggcgtcactcctgcccccgtggcggcgccggagaagaagaagctgcttgacctcaaggaccccttccccgccgccgccaacagcggcgccaaggcgtcctcggcgagtaagtgggcgacgaagaagaagctggtgggcggcgacgccggctacgtgctcgaggacgtgccgcacctcacggattacatgccccagctcccgacatacccgaatcctctccaagacaacccggcgtattcagtcgtcaagcagtatttcgtcaacccagacgacaccgtcacgcagaagattgttgttcataagaccagtgccaggggcacccacttccggcgtgccgggccacggcagcgggtgtacttccagtccgatgaggtgaacgccgccattgtcacctgtggaggcctctgcccgggattgaacacggtcatccgcgagcttgtttgcggcttgtatgatatgtatggcgtctccagcgtcgtcggcatagagggtggatacaagggtttctattctaaaaacactgttgcgttgacaccaaagtcggtgaacgacatccataagagaggcgggactgtcctcggaacctcaagaggagggcatgacactgccaaaatcgttgattgtcttcaggaccgtggcattaaccaggtctatattatcggaggcgatggcactcagaaaggcgcttctgtaatttatgaggaagtccggagacggggtctcaagtgctctgttgtcggtgtcccaaagactattgataacgacatcgcggtgattgacaagtcgtttggatttgacactgctgtggaggaggcccagagggccatcaatgctgctcatgtcgaggctgaaagtgcggagaacggcatcggtgtcgtgaagcttatgggccgcaacagtggttttatcgcgatgtacgcgactctagctagccgtgatgtggactgttgtttaatcccggagtcacccttctacctcgaagggaagggaggactcctcgagttcgtcgagaggcggctcaaggacaacggccacatggtcatcgtggtggccgagggtgctgggcaggacctcatcgcgagaagtatgaatttcgtggacacccaagacgcttctggaaacaagctgcttctggatgtcggcctttggctatcccagaagataaaggatcatttcaagaagaagcccagcttcccgataaccctcaagtacatcgacccgacctacatgatccgcgccgtccggtcgaatgcttctgacaacgtctactgcactctgctggcccacagcgccctccatggcgccatggcggggtacaccggcttcacggtcgctccggtcaacggcaggcacgcctacatcccgttctatgtaagtcgaaggccgaatgcagttgagcacacagcttcttgaacatggcttgttctgaaaccttgatgggcaatcgatctcttgtttgcagaggatcaccgagaagcagaacaaggtggtgatcacggaccggatgtgggcgagggtgctgtgctcgacgaaccagccctgcttcctgagccacgaggacgtggagaacatgaagcacgacgacgacgagcaccaccacatgcacaacacgcagctcctggaaggcgggagctcgccggtgtccaaatgcaatggctcggcagcggcagtgtgaggggcacgagaatacgcaaggatatagatatatatagtattaagcatgtagctatggatgttttttttccttttgcttttttgggtgctggcgttgtagagagtatttggtaataataatataatgcttcgctgagatt

SEQ ID NO: 148966 - DNA, 1577 bp, Zea Mays
gcttctctcctcccgctgccccccttcggtcctcctccgtccgtcgccgtcgtcaaacacgacgtttaacgggcggcgcagagcgctaatccagcccaaacacgatatataacggtccgcgccttccgaagacgccaagaacagcctcaggttactcgcagaaaagatttattagctcgccgcgggggttgaaccgaggctcctagctgatcgcgcgggcacaaggcgagcggacaagaaagcttgctttgtgctcaccggcgggcggcggcacggaccccctgcgatggaagccgtcggcgtcactcctgcccccgtggcggcgccggagaagaagaagctgcttgacctcaaggaccccttccccgccgccgccaacagcggcgccaaggcgtcctcggcgagtaagtgggcgacgaagaagaagctggtgggcggcgacgccggctacgtgctcgaggacgtgccgcacctcacggattacatgccccagctcccgacatacccgaatcctctccaagacaacccggcgtattcagtcgtcaagcagtatttcgtcaacccagacgacaccgtcacgcagaagattgttgttcataagaccagtgccaggggcacccacttccggcgtgccgggccacggcagcgggtgtacttccagtccgatgaggtgaacgccgccattgtcacctgtggaggcctctgcccgggattgaacacggtcatccgcgagcttgtttgcggcttgtatgatatgtatggcgtctccagcgtcgtcggcatagagggtggatacaagggtttctattctaaaaacactgttgcgttgacaccaaagtcggtgaacgacatccataagagaggcgggactgtcctcggaacctcaagaggagggcatgacactgccaaaatcgttgattgtcttcaggaccgtggcattaaccaggtctatattatcggaggcgatggcactcagaaaggcgcttctgtaatttatgaggaagtccggagacggggtctcaagtgctctgttgtcggtgtcccaaagactattgataacgacatcgcggtgattgacaagtcgtttggatttgacactgctgtggaggaggcccagagggccatcaatgctgctcatgtcgaggctgaaagtgcggagaacggcatcggtgtcgtgaagcttatgggccgcaacagtggttttatcgcgatgtacgcgactctagctagccgtgatgtggactgttgtttaatcccggagtcacccttctacctcgaagggaagggaggactcctcgagttcgtcgagaggcggctcaaggacaacggccacatggtcatcgtggtggccgagggtgctgggcaggacctcatcgcgagaagtatgaatttcgtggacacccaagacgcttctggaaacaagctgcttctggatgtcggcctttggctatcccagaagataaaggtcaggcttgtggtccaaaccttctgtctcattgtcaatgtggggacagagacttcatctaccattcagttagctatgttataataaatggatgatccctgttgaacgaacc

SEQ ID NO: 148967 - DNA, 99 bp, Zea Mays
ccgacagatagtgtgatggtaatattttgtgacacactgtctgtcgcaaaacatctatttttaccgtcagatgtttgacgctaaaattgtgtcatggtg

SEQ ID NO: 148968 - DNA, 221 bp, Zea Mays
cgtggcggctcttcacaagacaggtacaacactactgtatttcttgtacagcttgatgcatttcacttggtgatctgttctgccgtctgttgtgcaagggaggctagcagcaaacgctggacagcgacaagctgggtggaggcgctggcactgttcctgcgatgttgtgggactcggacagcgaagattaagtgcacgtggctgaccatcctactgagcat

SEQ ID NO: 148969 - DNA, 1643 bp, Zea Mays
attcaaactcgctgtcacaggctcctaggtagctcccctttctaacgccaccggccggccggccgctgccaaccctcgtcaccactcaccaccacactccagctgcttctactactgcagctcggtcacgcaaggcgaattccggcgatgggcaaggcggcgaggtggttccgcagcctgcttggcggcgggaggaaagaccaggagaggcaggcctccccggcgccggcccccgcggacaggaagcgctggagcttcgcgaggccgtcgcgggactcggccgaggcctccgccgcggcgaccgagggtttcgtgcggggcgccgccggcagcgcggcgatcgctgaggccgcgtggctcaggtcgctcgacgacgacacggggcggcggcagagcaagcacgccatcgctgtcgccgcggccaccgcggcggcggcggacgcggccgtggccgccgcgcaggccgccgtcgaggtcgtgcgccttaccagccagggaccggccttcggcggcggaggggtcgtgttggacttggatccccgcggccgcgccggcgccgccgtcaagatccagacggccttcagaggcttcttggccaagaaggcgctgcgagcgctcaaggcgctggtgaggctgcaggcgttggtacgcggctacctagtgcggaggcaggcgacggtgacgctgcagagcatgcaggcgcttgtccgcgcgcaggcaaccgtccgcgccgcccgctgcggccgcgccctgccctcgctccagccgcgcctccaccaccctcccgcccgcccgcgcttctcgctgcaagagcggcacgcggacgacgcgcgcagcgagcacggcgtggcggcgtgcggccggcgcctgtccgcaagcgtcgccgtcgagtcggcgtcgtacgaccggagccccaagaccgtggagatggacacggcgcggcccaggtcccgcgcgccgtcgctgcgcaccgaggacgagtggtgcgcgcaaccggtgtcgtcgccgccgccgccgtgccagcagcagcaccaccaccacctgcccccgtgcatcgaggtgccgacgccgcgccacttcccggaccacggctggtgcacgccggagaagccccggccggcgacggcgcagtgcacgccccggtgcgcgccgccgacgccgaccccggcggcaaagaccctctgcgggggccctgccagctgcctcgccgcgtcgcccagctgccccgggtacatgtcgagcacgcagtcgtcggaggccaagtcgtcgtcccggtcgcagagcgcgccgaagcagcggccggcacggaagcgggtgccgctgagcgaggtggtggtcctgcaggcccgcgcgagcctgggcggcgccggcggcggcgcgggcacgcacatcaagccgtgcaacgcccgcgcgcaggcgcaggcgccggacgcgtgcgacttgcgggccgccgtcgtcagccggttcgagcagcgcgcgtcggaggaggacgccgctgcggcggccgagcggggccgcgacgtgttcttcttgcaaaggaggtggtaagagagctagaccaacgccaatcagtcaatcggtgctgctaatagggactattgattaggttatcattgattgatttttagttttttttcgtagca

SEQ ID NO: 148970 - DNA, 1701 bp, Zea Mays
ttaacctttttcccttttgcaacctttttcgaccaaccttcgtctccagactcgtccaccctataaattgtctcgccagaccattccaatccggcaactcctgctctgcctgagcctgagcgtaggcggctaccagagagaagggtaggcggcgccggcggcgggagcaatagaagagcggtaaatccaagagagatcagagcctcggagggaaacagaagcgcacagagcatggagagcccgatctcgaggactaacctgaattgcatcagcctggcggacccgaacgtccagaaatcagtggcgctcctcaagcaggcatgcctggattcaggcttcttctatgttgtggatcatgggataagccaagagttcatggatgaagtttttgcccagagcaagaagttctttgaccttcctcatagtgagaaaatgaagcttctccgagacgagaagaatagagggtacacacccatgctagatgaaattcttgatcctgaaaatcaagttaatggtgactacaaggaaggatattatattggagttgaggtacctgcagatgatccagaagcaaacaggccattttatggtccaaatcagtggccttctaaagaagtactaccaaaatggagagaagtgatggagcaatatcacagggaggcattgatagtagcaaaatcagtcgcaaggatcatcgctcttgctctagatctagacgtggacttcttcgatagacctgaaatgcttggcgagtccatagccacgctaaggctcctgcactacgaaggtaaggtgtcagatcctgcaaagggtgtttacggagcgggcgcccattcagactacggcctgataactctcctggcaaccgatgatgtagttgggctccaaatatgcaaggacaagaacgctcagcctcaactgtgggaatacgtagctccgttgaaaggcggatttatcgtcaaccttggcgacatgctcgaaaggtggagtaacggcgttttcaggtcaaccttacatcgagtggtcctagatgggcgagaacgctactcgatagcctacttcgtggaaccaagccacgactgcgtggtggagtgcctgccgacctgcaagtccgaatcaaatcctccaaagttccctccgatcacctgctccgcgtacctgtcccagcgctacaaggacactcacgcggatctgaaatcctacgacgacagcaaggcctgatcagaggactgccctctcctctctctgtctcagcgatcagtacgtacgacgtgtatcctgcaataacactgggtggagggcggcagtaccagtgtaccacagtatcagtataggtatagagagttctgttggtgccaccgtgccaccgtccatgtgttcatgtaagatgacgagaagaatcaagaacgggggccggcgttgaggtccccggccttaatctaggccttgttgttgctgtcgtgttgtgaggttcaatccccgagcttatcctttggtgctgttgagaggtccacagtccccttcgttccgttttgtttttggttttggtacaccaggagcaattttgttgtggattgctaaaacttttgcgaggcgcggcgtcatctcgtttcagctttatccgacggtcttggtgtgggaagcagctgtgcttcgttctcctagaagagacgggtgtgctcagcagcgttgctttcttgc

SEQ ID NO: 148971 - DNA, 1960 bp, Zea Mays
cggacttctcgtcttggctttaacctttttcccttttgcaacctttttcgaccaaccttcgtctccagactcgtccaccctataaattgtctcgccagaccattccaatccggcaactcctgctctgcctgagcctgagcgtaggcggctaccagagagaagggtaggcggcgccggcggcgggagcaatagaagagcggtaaatccaagagagatcagagcctcggagggaaacagaagcgcacagagcatggagagcccgatctcgaggactaacctgaattgcatcagcctggcggacccgaacgtccagaaatcagtggcgctcctcaagcaggcatgcctggattcaggcttcttctatgttgtggatcatgggataagccaagagttcatggatgaagtttttgcccagagcaagaagttctttgaccttcctcatagtgagaaaatgaagcttctccgagacgagaagaatagagggtacacacccatgctagatgaaattcttgatcctgaaaatcaagttaatggtgactacaaggaaggatattatattggagttgaggtacctgcagatgatccagaagcaaacaggccattttatggtccaaatcagtggccttctaaagaagtactaccaaaatggagagaagtgatggagcaatatcacagggaggcattgatagtagcaaaatcagtcgcaaggatcatcgctcttgctctagatctagacgtggacttcttcgatagacctgaaatgcttggcgagtccatagccacgctaaggctcctgcactacgaaggtggacaagaaacaggtaaggtgtcagatcctgcaaagggtgtttacggagcgggcgcccattcagactacggcctgataactctcctggcaaccgatgatgtagttgggctccaaatatgcaaggacaagaacgctcagcctcaactgtgggaatacgtagctccgttgaaaggcggatttatcgtcaaccttggcgacatgctcgaaaggtggagtaacggcgttttcaggtcaaccttacatcgagtggtcctagatgggcgagaacgctactcggtaagtttcgtaacgtccgttcatcttgagttggtaaactgccttagctatgcatattactgttgtaacctgaaagtctcttggcaagaagacgaaaagcaccagtccttgagtcgtttccctgttccagctgccgctggacggaagcatatatctggctggtgataatgctctgaactaactgatctcagtggcggcggggtgttctcgccttgtcttgaacagatagcctacttcgtggaaccaagccacgactgcgtggtggagtgcctgccgacctgcaagtccgaatcaaatcctccaaagttccctccgatcacctgctccgcgtacctgtcccagcgctacaaggacactcacgcggatctgaaatcctacgacgacagcaaggcctgatcagaggactgccctctcctctctctgtctcagcgatcagtacgtacgacgtgtatcctgcaataacactgggtggagggcggcagtaccagtgtaccacagtatcagtataggtatagagagttctgttggtgccaccgtgccaccgtccatgtgttcatgtaagatgacgagaagaatcaagaacgggggccggcgttgaggtccccggccttaatctaggccttgttgttgctgtcgtgttgtgaggttcaatccccgagcttatcctttggtgctgttgagaggtccacagtccccttcgttccgttttgtttttggttttggtacaccaggagcaattttgttgtggattgctaaaacttttgcgaggcgcggcgtcatctcgtttcagctttatccgacggtcttggtgtgggaagcagctgtgcttcgttctcctagaagagacgggtgtgctcagcagcgttgctttcttgc

SEQ ID NO: 148972 - DNA, 1847 bp, Zea Mays
cggacttctcgtcttggctttaacctttttcccttttgcaacctttttcgaccaaccttcgtctccagactcgtccaccctataaattgtctcgccagaccattccaatccggcaactcctgctctgcctgagcctgagcgtaggcggctaccagagagaagggtaggcggcgccggcggcgggagcaatagaagagcggtaaatccaagagagatcagagcctcggagggaaacagaagcgcacagagcatggagagcccgatctcgaggactaacctgaattgcatcagcctggcggacccgaacgtccagaaatcagtggcgctcctcaagcaggtccgcggttctttcttgatttccgcaagtttggtcgacacaagtgtctgattgtctgaatagcagagggcttggaacttcctttctcgggaatcttgtttcttttcataaggcatgcctggattcaggcttcttctatgttgtggatcatgggataagccaagagttcatggatgaagtttttgcccagagcaagaagttctttgaccttcctcatagtgagaaaatgaagcttctccgagacgagaagaatagagggtacacacccatgctagatgaaattcttgatcctgaaaatcaagttaatggtgactacaaggaaggatattatattggagttgaggtacctgcagatgatccagaagcaaacaggccattttatggtccaaatcagtggccttctaaagaagtactaccaaaatggagagaagtgatggagcaatatcacagggaggcattgatagtagcaaaatcagtcgcaaggatcatcgctcttgctctagatctagacgtggacttcttcgatagacctgaaatgcttggcgagtccatagccacgctaaggctcctgcactacgaaggtggacaagaaacaggtaaggtgtcagatcctgcaaagggtgtttacggagcgggcgcccattcagactacggcctgataactctcctggcaaccgatgatgtagttgggctccaaatatgcaaggacaagaacgctcagcctcaactgtgggaatacgtagctccgttgaaaggcggatttatcgtcaaccttggcgacatgctcgaaaggtggagtaacggcgttttcaggtcaaccttacatcgagtggtcctagatgggcgagaacgctactcgatagcctacttcgtggaaccaagccacgactgcgtggtggagtgcctgccgacctgcaagtccgaatcaaatcctccaaagttccctccgatcacctgctccgcgtacctgtcccagcgctacaaggacactcacgcggatctgaaatcctacgacgacagcaaggcctgatcagaggactgccctctcctctctctgtctcagcgatcagtacgtacgacgtgtatcctgcaataacactgggtggagggcggcagtaccagtgtaccacagtatcagtataggtatagagagttctgttggtgccaccgtgccaccgtccatgtgttcatgtaagatgacgagaagaatcaagaacgggggccggcgttgaggtccccggccttaatctaggccttgttgttgctgtcgtgttgtgaggttcaatccccgagcttatcctttggtgctgttgagaggtccacagtccccttcgttccgttttgtttttggttttggtacaccaggagcaattttgttgtggattgctaaaacttttgcgaggcgcggcgtcatctcgtttcagctttatccgacggtcttggtgtgggaagcagctgtgcttcgttctcctagaagagacgggtgtgctcagcagcgttgctttcttgc

SEQ ID NO: 148973 - DNA, 1735 bp, Zea Mays
cggacttctcgtcttggctttaacctttttcccttttgcaacctttttcgaccaaccttcgtctccagactcgtccaccctataaattgtctcgccagaccattccaatccggcaactcctgctctgcctgagcctgagcgtaggcggctaccagagagaagggtaggcggcgccggcggcgggagcaatagaagagcggtaaatccaagagagatcagagcctcggagggaaacagaagcgcacagagcatggagagcccgatctcgaggactaacctgaattgcatcagcctggcggacccgaacgtccagaaatcagtggcgctcctcaagcaggcatgcctggattcaggcttcttctatgttgtggatcatgggataagccaagagttcatggatgaagtttttgcccagagcaagaagttctttgaccttcctcatagtgagaaaatgaagcttctccgagacgagaagaatagagggtacacacccatgctagatgaaattcttgatcctgaaaatcaagttaatggtgactacaaggaaggatattatattggagttgaggtacctgcagatgatccagaagcaaacaggccattttatggtccaaatcagtggccttctaaagaagtactaccaaaatggagagaagtgatggagcaatatcacagggaggcattgatagtagcaaaatcagtcgcaaggatcatcgctcttgctctagatctagacgtggacttcttcgatagacctgaaatgcttggcgagtccatagccacgctaaggctcctgcactacgaaggtggacaagaaacaggtaaggtgtcagatcctgcaaagggtgtttacggagcgggcgcccattcagactacggcctgataactctcctggcaaccgatgatgtagttgggctccaaatatgcaaggacaagaacgctcagcctcaactgtgggaatacgtagctccgttgaaaggcggatttatcgtcaaccttggcgacatgctcgaaaggtggagtaacggcgttttcaggtcaaccttacatcgagtggtcctagatgggcgagaacgctactcgatagcctacttcgtggaaccaagccacgactgcgtggtggagtgcctgccgacctgcaagtccgaatcaaatcctccaaagttccctccgatcacctgctccgcgtacctgtcccagcgctacaaggacactcacgcggatctgaaatcctacgacgacagcaaggcctgatcagaggactgccctctcctctctctgtctcagcgatcagtacgtacgacgtgtatcctgcaataacactgggtggagggcggcagtaccagtgtaccacagtatcagtataggtatagagagttctgttggtgccaccgtgccaccgtccatgtgttcatgtaagatgacgagaagaatcaagaacgggggccggcgttgaggtccccggccttaatctaggccttgttgttgctgtcgtgttgtgaggttcaatccccgagcttatcctttggtgctgttgagaggtccacagtccccttcgttccgttttgtttttggttttggtacaccaggagcaattttgttgtggattgctaaaacttttgcgaggcgcggcgtcatctcgtttcagctttatccgacggtcttggtgtgggaagcagctgtgcttcgttctcctagaagagacgggtgtgctcagcagcgttgctttcttgc

SEQ ID NO: 148974 - DNA, 237 bp, Zea Mays
cctggtttttgttgtcgtggtgggaaggttgagctagctccactggagacccctccccaactcaagaggttgtgggatagtgcagactctgatgctaggcactttcgtgataacattaggttttttaatggtcatttctctttcacttccctatactgttgcctcgatagtatgacaactaatgtaagggattctggtatatacacgttccgagcacagggcatgatgtatcacaat

SEQ ID NO: 148975 - DNA, 652 bp, Zea Mays
ccgcagccgtctctggtctccccccgcaggccgcagccgctcatcgtcgccatggacggcggcggctacagctccatctcgcgccgggggttcgtccgcgcgggcttcgacctggacggcgacgacggctactattacgacgacgtcgtcgtcttccacccatcgtcattctcctcctcctcctcctccaaggccgacggccccggcgcgccctaccacaccgccggggccccgcggccgtcggcgcgcgccaggctgagggcgctgtggcgccgcgtcatgcgggagaagaagcgcatcctgctctgctccaccggctgcgtgccggcgccgccgccgccccgggagccctacgacgcgtacagctacgcgcagaacttcgacgacggcgaggcgtgggtggagcccgacgaccactcgcggtccttctccgcgcgcttcgccgtcccctccagggcgttccagagggtcgccgcgtagaaagtagaaaccgccgcgcggccggtggccggcacccggcggcgagatctttctttctttttatcttttcacccccaaattttggtgccgtgagatgtgaaaacagaagcatcaatccccatctgtacatgcattcatagttttcgtgtcactgatggatgtctccaacaaa

SEQ ID NO: 148976 - DNA, 4546 bp, Zea Mays
tttttctcgcctctcctcgctcctcgccatttctctctcttcccctccgcttcgcccaccgcccgctccgaaatctgcgcgccgacgccgccggctgcccgtggagagcctcgaattagagcgcgttccgtcgagaggttttcaagcaactatgtttgagtttggttgatatgatactcattcacgttggggatgcagaccccccctctgtgggggttgattgaagaagttaactgtacacttaggagaacttgtgtcctactgaaagtttcttggtttcgaggcaagtatgtcagattcaaatgtgaatgtcttactaagagtagggctttggtggcatagatggatgaactgattgtcaacttcaacaagttgttgattacaggctcttgagctaccaagcatgtcagattcaaatgtgaagtggattgatgggctccagttcacatcattgtactggcctccacccctcgatgcggagcagaagcaggcacaaattttggcatatgtcgagtactttggccagtttacagctgacaccgatcaattccctgaagacatagctcagctcattcaaagttcctatccatcaaaagaaaatcgcttggtagatgaagtattggcaacttttgttcttcatcatccggagcatggtcatgcagttgcacatccaattctttcacgcatcatagatgggacgctgtgctatgatagacatggtcccccattcagttccttcatctctttattcagccataattctgagcaagagtactcagagcagtgggccttggcctgtggagaaattcttagggtcttaactcactacaataggccaatattcaaagttgagcgccaacatactgaagctgaatgtagcagcacatctgatcaggcaacatctagtgattccacagataagagatctaataattctccaggaaatgaatctgactggaagccattgaggccactaaccccgtggatcactgacatattgctagccgcacctttgggcattcgaagtgactattttcgatggtgtggcggtgtaatgggaaaatatgctgctggtggagagttgaagcctccaactactgcttgcagccgaggatctgggaagcacccacagcttatgccttccacccccagatgggctgttgccaatggagctggagttatattaagtgtctgtgatgaggaggtagctcgttatgagacagcaaatttaacagcagcagctgttcctgcgcttctgctacctccaccaacaacacccttggacgagcatttggtggctggcctgccccctcttgaaccatatgctcggttgttccatagatactatgcaattgctacaccaagtgctacacagaggttgctttttggtcttctggaagcaccaccatcatgggctccagatgcacttgatgcagcagtacaactagttgagctacttagagcagccgaagattatgcttctggcatgcggcttccaaaaaattggatgcatctgcatttcttgcgtgcgattggaactgcaatgtcaatgagagctggcattgctgctgatacagctgctgctttgcttttccgaatactttcccaaccaacgctgctttttccaccactgagacatgccgaaggagttgaagtacatcatgaaccactaggtggctatgtatcatcatataagaagcagttggaagttcctgcatctgaggccactatcgatgccactgcacaaggcattgcttctttgttgtgtgctcatggccctgatgttgagtggagaatatgtaccatctgggaagctgcctatggtttgctaccgctaagttcatcagcagttgatttgcctgaaattgttgtagctgccccgcttcagccacctacactgtcatggagcctgtacttaccattattaaaagtatttgagtatctacctcgtggcagtccatctgaagcatgccttatgaggatatttgtggcaacggttgaagctatacttaggagaacttttccttctgaaacatcagagcaatccagaaagccaagaagtcaatctaagaaccttgctgttgctgaacttcacacaatgatacattcactctttgttgaatcctgtgcctcaatggaccttgcctcccggttgctatttgtggtgttaactgtttgtgtcagtcatcaagctttgccagggggtagcaaaagaccaactggtagtgataaccattcccacgaggaagccactgagcattcaagattaacaaatggaagaagcagatgtaagaagagacaaggccctgttgctacgtttgattcatatgttctagctgcagtttgtgccttatcttgtgagctccagctgttccctttcattactaagaatggatcacattcaaatttaaaggattccatgaagattatcatatctggaaaaaacaatgggatgaataatgagctacacaacagcatcagctcagcaattcttcatactcgcagaattcttggcatcttggaagccgttttctccctgaagccatcatcagttggtacctcatggagctatagctcaaatgaaatagttgcagcagctatggttgctgctcatgtttctgagttatttcgtcggtccaggccatgccttaatgcactctctgcactaatgagatgcaagtgggatgctgagatttcgaccagggcatcatctctctaccatttgattgacttgcatggtaaaacagtttcctccattgtgaacaaagctgagcctcttgaagctcacctgacccttacaccagtaaagagggataatcaacatcaccgtgaggaaagcaataccagctcattggatagtgtcaagttggaaaacaagaatggttcaacatcacacaagaaaaacggtttctcaagaccactcttgaaatgtgcagaagaggtcctactgaatggcgatgttgcaagtacatctgggaaatccattgcaagcttacaggtggaagcatctgatttggcaaacttccttaccatggatcggaatgggggttaccgaggttcacaaactcttctaagatctgtattatcagagaaacaagagctgtgcttctctgttgtctcattgctctggcagaagctcatagcttctcctgaaatgcagatgtctgcagaaagtacatcagctcaccaaggatggaggaaggttgttgatgcactttgtgatgtcgtttcagcctcaccaaccaaggcatcagctgctatcgttctccaggtcaagatattgctatattgcacgtttggtcaaaactaaatttggtttaaagtttgttcgatttatttcaaaacaaattcaattttctttttctgattaatctatttcaaaacgaacattctctgtttttttttggtttctgacatctatttcaaaacacattttaactacaatgcctaggtggaatatggacctgtttcctagtcatatttcttgacgcttattttttttttcgcaggccgagaaggacttgcagccttggattgctagagatgacgaacaaggtcagaagatgtggagagtcaaccagcgtatagtgaagcttatagctgagcttatgaggaaccatgacagccctgaagcgttggtgatactcgctagtgcctccgaccttctacttcgtgctaccgatggaatgctcgtcgatggtgaagcttgtactttgccacagcttgagcttctggaagtgaccgctcgggctgtccatcttatcatcgaatggggagattcaggtttatcagttgcagatggtctttcaaatctgctgaagtgccgtctatcaaccaccatccgctgcctttctcacccaagtgcacacgtgcgcgcactcagcatgtctgtcctccgcgacatcctgagcaacggatccgtgaaccccaacaagacaatccaaggggaacagcagcggaacggcatccagagcccgtcctaccggtgcctggccgcaggcatcatcaactggcaagcggacgtcgagaggtgcatagagtgggaagcccacagccgccgcgccactgggctgacgctcgccttcctcagtgccgcagcgaaggagctcggctgccctctcccgtcatgacaaggccattcctggatctgacatcggcttccaattgacggtcagtgctggcacagctgctgcagggtccgcgagtaggacggctctaatctctccatcacgtgttattatctggtgtttccataatgcgatttgatttcaatttggcgttagatgttgtacacgtgtatttaactgcttgagttgtacgtaatttgtatacttgtaactttgtttaataatatggctattactcaagaagcggaacatatcttatcctttttatatgctgctgctagatccgttcaacgtgagtgccatgcaaatgtccacgaaatgtttagtatttgttagggggaaaaggtctcggtggaaggtaaaataatttctaactgttattcaggataaatgatttaacgtggtttgaattattacaa

SEQ ID NO: 148977 - DNA, 4308 bp, Zea Mays
tttttctcgcctctcctcgctcctcgccatttctctctcttcccctccgcttcgcccaccgcccgctccgaaatctgcgcgccgacgccgccggctgcccgtggagagcctcgaattagagcgcgttccgtcgagaggttttcaagcaactatgtttgagtttggttgatatgatactcattcacgttggggatgcagaccccccctctgtgggggttgattgaagaagttaactgtacacttaggagaacttgtgtcctactgaaagtttcttggtttcgaggcaagtatgtcagattcaaatgtgaatgtcttactaagagtagggctttggtggcatagatggatgaactgattgtcaacttcaacaagttgttgattacaggctcttgagctaccaagcatgtcagattcaaatgtgaagtggattgatgggctccagttcacatcattgtactggcctccacccctcgatgcggagcagaagcaggcacaaattttggcatatgtcgagtactttggccagtttacagctgacaccgatcaattccctgaagacatagctcagctcattcaaagttcctatccatcaaaagaaaatcgcttggtagatgaagtattggcaacttttgttcttcatcatccggagcatggtcatgcagttgcacatccaattctttcacgcatcatagatgggacgctgtgctatgatagacatggtcccccattcagttccttcatctctttattcagccataattctgagcaagagtactcagagcagtgggccttggcctgtggagaaattcttagggtcttaactcactacaataggccaatattcaaagttgagcgccaacatactgaagctgaatgtagcagcacatctgatcaggcaacatctagtgattccacagataagagatctaataattctccaggaaatgaatctgactggaagccattgaggccactaaccccgtggatcactgacatattgctagccgcacctttgggcattcgaagtgactattttcgatggtgtggcggtgtaatgggaaaatatgctgctggtggagagttgaagcctccaactactgcttgcagccgaggatctgggaagcacccacagcttatgccttccacccccagatgggctgttgccaatggagctggagttatattaagtgtctgtgatgaggaggtagctcgttatgagacagcaaatttaacagcagcagctgttcctgcgcttctgctacctccaccaacaacacccttggacgagcatttggtggctggcctgccccctcttgaaccatatgctcggttgttccatagatactatgcaattgctacaccaagtgctacacagaggttgctttttggtcttctggaagcaccaccatcatgggctccagatgcacttgatgcagcagtacaactagttgagctacttagagcagccgaagattatgcttctggcatgcggcttccaaaaaattggatgcatctgcatttcttgcgtgcgattggaactgcaatgtcaatgagagctggcattgctgctgatacagctgctgctttgcttttccgaatactttcccaaccaacgctgctttttccaccactgagacatgccgaaggagttgaagtacatcatgaaccactaggtggctatgtatcatcatataagaagcagttggaagttcctgcatctgaggccactatcgatgccactgcacaaggcattgcttctttgttgtgtgctcatggccctgatgttgagtggagaatatgtaccatctgggaagctgcctatggtttgctaccgctaagttcatcagcagttgatttgcctgaaattgttgtagctgccccgcttcagccacctacactgtcatggagcctgtacttaccattattaaaagtatttgagtatctacctcgtggcagtccatctgaagcatgccttatgaggatatttgtggcaacggttgaagctatacttaggagaacttttccttctgaaacatcagagcaatccagaaagccaagaagtcaatctaagaaccttgctgttgctgaacttcacacaatgatacattcactctttgttgaatcctgtgcctcaatggaccttgcctcccggttgctatttgtggtgttaactgtttgtgtcagtcatcaagctttgccagggggtagcaaaagaccaactggtagtgataaccattcccacgaggaagccactgagcattcaagattaacaaatggaagaagcagatgtaagaagagacaaggccctgttgctacgtttgattcatatgttctagctgcagtttgtgccttatcttgtgagctccagctgttccctttcattactaagaatggatcacattcaaatttaaaggattccatgaagattatcatatctggaaaaaacaatgggatgaataatgagctacacaacagcatcagctcagcaattcttcatactcgcagaattcttggcatcttggaagccgttttctccctgaagccatcatcagttggtacctcatggagctatagctcaaatgaaatagttgcagcagctatggttgctgctcatgtttctgagttatttcgtcggtccaggccatgccttaatgcactctctgcactaatgagatgcaagtgggatgctgagatttcgaccagggcatcatctctctaccatttgattgacttgcatggtaaaacagtttcctccattgtgaacaaagctgagcctcttgaagctcacctgacccttacaccagtaaagagggataatcaacatcaccgtgaggaaagcaataccagctcattggatagtgtcaagttggaaaacaagaatggttcaacatcacacaagaaaaacggtttctcaagaccactcttgaaatgtgcagaagaggtcctactgaatggcgatgttgcaagtacatctgggaaatccattgcaagcttacaggtggaagcatctgatttggcaaacttccttaccatggatcggaatgggggttaccgaggttcacaaactcttctaagatctgtattatcagagaaacaagagctgtgcttctctgttgtctcattgctctggcagaagctcatagcttctcctgaaatgcagatgtctgcagaaagtacatcagctcaccaaggatggaggaaggttgttgatgcactttgtgatgtcgtttcagcctcaccaaccaaggcatcagctgctatcgttctccaggccgagaaggacttgcagccttggattgctagagatgacgaacaaggtcagaagatgtggagagtcaaccagcgtatagtgaagcttatagctgagcttatgaggaaccatgacagccctgaagcgttggtgatactcgctagtgcctccgaccttctacttcgtgctaccgatggaatgctcgtcgatggtgaagcttgtactttgccacagcttgagcttctggaagtgaccgctcgggctgtccatcttatcatcgaatggggagattcaggtttatcagttgcagatggtctttcaaatctgctgaagtgccgtctatcaaccaccatccgctgcctttctcacccaagtgcacacgtgcgcgcactcagcatgtctgtcctccgcgacatcctgagcaacggatccgtgaaccccaacaagacaatccaaggggaacagcagcggaacggcatccagagcccgtcctaccggtgcctggccgcaggcatcatcaactggcaagcggacgtcgagaggtgcatagagtgggaagcccacagccgccgcgccactgggctgacgctcgccttcctcagtgccgcagcgaaggagctcggctgccctctcccgtcatgacaaggccattcctggatctgacatcggcttccaattgacggtcagtgctggcacagctgctgcagggtccgcgagtaggacggctctaatctctccatcacgtgttattatctggtgtttccataatgcgatttgatttcaatttggcgttagatgttgtacacgtgtatttaactgcttgagttgtacgtaatttgtatacttgtaactttgtttaataatatggctattactcaagaagcggaacatatcttatcctttttatatgctgctgctagatccgttcaacgtgagtgccatgcaaatgtccacgaaatgtttagtatttgttagggggaaaaggtctcggtggaaggtaaaataatttctaactgttattcaggataaatgatttaacgtggtttgaattattacaa

SEQ ID NO: 148978 - DNA, 4230 bp, Zea Mays
tttttctcgcctctcctcgctcctcgccatttctctctcttcccctccgcttcgcccaccgcccgctccgaaatctgcgcgccgacgccgccggctgcccgtggagagcctcgaattagagcgcgttccgtcgagaggttttcaagcaactatgtttgagtttggttgatatgatactcattcacgttggggatgcagaccccccctctgtgggggttgattgaagaagttaactgtacacttaggagaacttgtgtcctactgaaagtttcttggtttcgaggcaagtatgtcagattcaaatgtgaatgtcttactaagagtagggctttggtggcatagatggatgaactgattgtcaacttcaacaagttgttgattacaggctcttgagctaccaagcatgtcagattcaaatgtgaagtggattgatgggctccagttcacatcattgtactggcctccacccctcgatgcggagcagaagcaggcacaaattttggcatatgtcgagtactttggccagtttacagctgacaccgatcaattccctgaagacatagctcagctcattcaaagttcctatccatcaaaagaaaatcgcttggtagatgaagtattggcaacttttgttcttcatcatccggagcatggtcatgcagttgcacatccaattctttcacgcatcatagatgggacgctgtgctatgatagacatggtcccccattcagttccttcatctctttattcagccataattctgagcaagagtactcagagcagtgggccttggcctgtggagaaattcttagggtcttaactcactacaataggccaatattcaaagttgagcgccaacatactgaagctgaatgtagcagcacatctgatcaggcaacatctagtgattccacagataagagatctaataattctccaggaaatgaatctgactggaagccattgaggccactaaccccgtggatcactgacatattgctagccgcacctttgggcattcgaagtgactattttcgatggtgtggcggtgtaatgggaaaatatgctgctggtggagagttgaagcctccaactactgcttgcagccgaggatctgggaagcacccacagcttatgccttccacccccagatgggctgttgccaatggagctggagttatattaagtgtctgtgatgaggaggtagctcgttatgagacagcaaatttaacagcagcagctgttcctgcgcttctgctacctccaccaacaacacccttggacgagcatttggtggctggcctgccccctcttgaaccatatgctcggttgttccatagatactatgcaattgctacaccaagtgctacacagaggttgctttttggtcttctggaagcaccaccatcatgggctccagatgcacttgatgcagcagtacaactagttgagctacttagagcagccgaagattatgcttctggcatgcggcttccaaaaaattggatgcatctgcatttcttgcgtgcgattggaactgcaatgtcaatgagagctggcattgctgctgatacagctgctgctttgcttttccgaatactttcccaaccaacgctgctttttccaccactgagacatgccgaaggagttgaagtacatcatgaaccactaggtggctatgtatcatcatataagaagcagttggaagttcctgcatctgaggccactatcgatgccactgcacaaggcattgcttctttgttgtgtgctcatggccctgatgttgagtggagaatatgtaccatctgggaagctgcctatggtttgctaccgctaagttcatcagcagttgatttgcctgaaattgttgtagctgccccgcttcagccacctacactgtcatggagcctgtacttaccattattaaaagtatttgagtatctacctcgtggcagtccatctgaagcatgccttatgaggatatttgtggcaacggttgaagctatacttaggagaacttttccttctgaaacatcagagcaatccagaaagccaagaagtcaatctaagaaccttgctgttgctgaacttcacacaatgatacattcactctttgttgaatcctgtgcctcaatggaccttgcctcccggttgctatttgtggtgttaactgtttgtgtcagtcatcaagctttgccagggggtagcaaaagaccaactggtagtgataaccattcccacgaggaagccactgagcattcaagattaacaaatggaagaagcagatgtaagaagagacaaggccctgttgctacgtttgattcatatgttctagctgcagtttgtgccttatcttgtgagctccagctgttccctttcattactaagaatggatcacattcaaatttaaaggattccatgaagattatcatatctggaaaaaacaatgggatgaataatgagctacacaacagcatcagctcagcaattcttcatactcgcagaattcttggcatcttggaagccgttttctccctgaagccatcatcagttggtacctcatggagctatagctcaaatgaaatagttgcagcagctatggttgctgctcatgtttctgagttatttcgtcggtccaggccatgccttaatgcactctctgcactaatgagatgcaagtgggatgctgagatttcgaccagggcatcatctctctaccatttgattgacttgcatggtaaaacagtttcctccattgtgaacaaagctgagcctcttgaagctcacctgacccttacaccagtaaagagggataatcaacatcaccgtgaggaaagcaataccagctcattggatagtgtcaagttggaaaacaagaatggttcaacatcacacaagaaaaacggtttctcaagaccactcttgaaatgtgcagaagaggtcctactgaatggcgatgttgcaagtacatctgggaaatccattgcaagcttacaggtggaagcatctgatttggcaaacttccttaccatggatcggaatgggggttaccgaggttcacaaactcttctaagatctgtattatcagagaaacaagagctgtgcttctctgttgtctcattgctctggcagaagctcatagcttctcctgaaatgcagatgtctgcagaaagtacatcagctcaccaaggatggaggaaggttgttgatgcactttgtgatgtcgtttcagcctcaccaaccaaggcatcagctgctatcgttctccaggccgagaaggacttgcagccttggattgctagagatgacgaacaaggtcagaagatgtggagagtcaaccagcgtatagtgaagcttatagctgagcttatgaggaaccatgacagccctgaagcgttggtgatactcgctagtgcctccgaccttctacttcgtgctaccgatggaatgctcgtcgatggtgaagcttgtactttgccacagcttgagcttctggaagtgaccgctcgggctgtccatcttatcatcgaatggggagattcaggtttatcagttgcagatggtctttcaaatctgctgaaggcatgccccgtcttcatctgccttcgttctcactcattcaaacgccacccatgcatccttcgtaactcagcaggttaactgaatattgtgatctgcagtgccgtctatcaaccaccatccgctgcctttctcacccaagtgcacacgtgcgcgcactcagcatgtctgtcctccgcgacatcctgagcaacggatccgtgaaccccaacaagacaatccaaggggaacagcagcggaacggcatccagagcccgtcctaccggtgcctggccgcaggcatcatcaactggcaagcggacgtcgagaggtgcatagagtgggaagcccacagccgccgcgccactgggctgacgctcgccttcctcagtgccgcagcgaaggagctcggctgccctctcccgtcatgacaaggccattcctggatctgacatcggcttccaattgacggtcagtgctggcacagctgctgcagggtccgcgagtaggacggctctaatctctccatcacgtgttattatctggtgtttccataatgcgatttgatttcaatttggcgttagatgttgtacacgtgtatttaactgcttgagttgtacgtaatttgtatacttgtaactttgtttaataatatggctattactcaagaa

SEQ ID NO: 148979 - DNA, 3573 bp, Zea Mays
atggatgaactgattgtcaacttcaacaagttgttgattacagagcctttctagtttcttgggcaggctcttgagctaccaagcatgtcagattcaaatgtgaagtggattgatgggctccagttcacatcattgtactggcctccacccctcgatgcggagcagaagcaggcacaaattttggcatatgtcgagtactttggccagtttacagctgacaccgatcaattccctgaagacatagctcagctcattcaaagttcctatccatcaaaagaaaatcgcttggtagatgaagtattggcaacttttgttcttcatcatccggagcatggtcatgcagttgcacatccaattctttcacgcatcatagatgggacgctgtgctatgatagacatggtcccccattcagttccttcatctctttattcagccataattctgagcaagagtactcagagcagtgggccttggcctgtggagaaattcttagggtcttaactcactacaataggccaatattcaaagttgagcgccaacatactgaagctgaatgtagcagcacatctgatcaggcaacatctagtgattccacagataagagatctaataattctccaggaaatgaatctgactggaagccattgaggccactaaccccgtggatcactgacatattgctagccgcacctttgggcattcgaagtgactattttcgatggtgtggcggtgtaatgggaaaatatgctgctggtggagagttgaagcctccaactactgcttgcagccgaggatctgggaagcacccacagcttatgccttccacccccagatgggctgttgccaatggagctggagttatattaagtgtctgtgatgaggaggtagctcgttatgagacagcaaatttaacagcagcagctgttcctgcgcttctgctacctccaccaacaacacccttggacgagcatttggtggctggcctgccccctcttgaaccatatgctcggttgttccatagatactatgcaattgctacaccaagtgctacacagaggttgctttttggtcttctggaagcaccaccatcatgggctccagatgcacttgatgcagcagtacaactagttgagctacttagagcagccgaagattatgcttctggcatgcggcttccaaaaaattggatgcatctgcatttcttgcgtgcgattggaactgcaatgtcaatgagagctggcattgctgctgatacagctgctgctttgcttttccgaatactttcccaaccaacgctgctttttccaccactgagacatgccgaaggagttgaagtacatcatgaaccactaggtggctatgtatcatcatataagaagcagttggaagttcctgcatctgaggccactatcgatgccactgcacaaggcattgcttctttgttgtgtgctcatggccctgatgttgagtggagaatatgtaccatctgggaagctgcctatggtttgctaccgctaagttcatcagcagttgatttgcctgaaattgttgtagctgccccgcttcagccacctacactgtcatggagcctgtacttaccattattaaaagtatttgagtatctacctcgtggcagtccatctgaagcatgccttatgaggatatttgtggcaacggttgaagctatacttaggagaacttttccttctgaaacatcagagcaatccagaaagccaagaagtcaatctaagaaccttgctgttgctgaacttcacacaatgatacattcactctttgttgaatcctgtgcctcaatggaccttgcctcccggttgctatttgtggtgttaactgtttgtgtcagtcatcaagctttgccagggggtagcaaaagaccaactggtagtgataaccattcccacgaggaagccactgagcattcaagattaacaaatggaagaagcagatgtaagaagagacaaggccctgttgctacgtttgattcatatgttctagctgcagtttgtgccttatcttgtgagctccagctgttccctttcattactaagaatggatcacattcaaatttaaaggattccatgaagattatcatatctggaaaaaacaatgggatgaataatgagctacacaacagcatcagctcagcaattcttcatactcgcagaattcttggcatcttggaagccgttttctccctgaagccatcatcagttggtacctcatggagctatagctcaaatgaaatagttgcagcagctatggttgctgctcatgtttctgagttatttcgtcggtccaggccatgccttaatgcactctctgcactaatgagatgcaagtgggatgctgagatttcgaccagggcatcatctctctaccatttgattgacttgcatggtaaaacagtttcctccattgtgaacaaagctgagcctcttgaagctcacctgacccttacaccagtaaagagggataatcaacatcaccgtgaggaaagcaataccagctcattggatagtgtcaagttggaaaacaagaatggttcaacatcacacaagaaaaacggtttctcaagaccactcttgaaatgtgcagaagaggtcctactgaatggcgatgttgcaagtacatctgggaaatccattgcaagcttacaggtggaagcatctgatttggcaaacttccttaccatggatcggaatgggggttaccgaggttcacaaactcttctaagatctgtattatcagagaaacaagagctgtgcttctctgttgtctcattgctctggcagaagctcatagcttctcctgaaatgcagatgtctgcagaaagtacatcagctcaccaaggatggaggaaggttgttgatgcactttgtgatgtcgtttcagcctcaccaaccaaggcatcagctgctatcgttctccaggccgagaaggacttgcagccttggattgctagagatgacgaacaaggtcagaagatgtggagagtcaaccagcgtatagtgaagcttatagctgagcttatgaggaaccatgacagccctgaagcgttggtgatactcgctagtgcctccgaccttctacttcgtgctaccgatggaatgctcgtcgatggtgaagcttgtactttgccacagcttgagcttctggaagtgaccgctcgggctgtccatcttatcatcgaatggggagattcaggtttatcagttgcagatggtctttcaaatctgctgaagtgccgtctatcaaccaccatccgctgcctttctcacccaagtgcacacgtgcgcgcactcagcatgtctgtcctccgcgacatcctgagcaacggatccgtgaaccccaacaagacaatccaaggggaacagcagcggaacggcatccagagcccgtcctaccggtgcctggccgcaggcatcatcaactggcaagcggacgtcgagaggtgcatagagtgggaagcccacagccgccgcgccactgggctgacgctcgccttcctcagtgccgcagcgaaggagctcggctgccctctcccgtcatga

SEQ ID NO: 148980 - DNA, 4011 bp, Zea Mays
tttttctcgcctctcctcgctcctcgccatttctctctcttcccctccgcttcgcccaccgcccgctccgaaatctgcgcgccgacgccgccggctgcccgtggagagcctcgaattagagcgcgttccgtcgagaggttttcaagcaactatgtttgagtttggttgatatgatactcattcacgttggggatgcagaccccccctctgtgggggttgattgaagaagttaactgtacacttaggagaacttgtgtcctactgaaagtttcttggtttcgaggcaagtatgtcagattcaaatgtgaatgtcttactaagagtagggctttggtggcatagatggatgaactgattgtcaacttcaacaagttgttgattacaggctcttgagctaccaagcatgtcagattcaaatgtgaagtggattgatgggctccagttcacatcattgtactggcctccacccctcgatgcggagcagaagcaggcacaaattttggcatatgtcgagtactttggccagtttacagctgacaccgatcaattccctgaagacatagctcagctcattcaaagttcctatccatcaaaagaaaatcgcttggtagatgaagtattggcaacttttgttcttcatcatccggagcatggtcatgcagttgcacatccaattctttcacgcatcatagatgggacgctgtgctatgatagacatggtcccccattcagttccttcatctctttattcagccataattctgagcaagagtactcagagcagtgggccttggcctgtggagaaattcttagggtcttaactcactacaataggccaatattcaaagttgagcgccaacatactgaagctgaatgtagcagcacatctgatcaggcaacatctagtgattccacagataagagatctaataattctccaggaaatgaatctgactggaagccattgaggccactaaccccgtggatcactgacatattgctagccgcacctttgggcattcgaagtgactattttcgatggtgtggcggtgtaatgggaaaatatgctgctggtggagagttgaagcctccaactactgcttgcagccgaggatctgggaagcacccacagcttatgccttccacccccagatgggctgttgccaatggagctggagttatattaagtgtctgtgatgaggaggtagctcgttatgagacagcaaatttaacagcagcagctgttcctgcgcttctgctacctccaccaacaacacccttggacgagcatttggtggctggcctgccccctcttgaaccatatgctcggttgttccatagatactatgcaattgctacaccaagtgctacacagaggttgctttttggtcttctggaagcaccaccatcatgggctccagatgcacttgatgcagcagtacaactagttgagctacttagagcagccgaagattatgcttctggcatgcggcttccaaaaaattggatgcatctgcatttcttgcgtgcgattggaactgcaatgtcaatgagagctggcattgctgctgatacagctgctgctttgcttttccgaatactttcccaaccaacgctgctttttccaccactgagacatgccgaaggagttgaagtacatcatgaaccactaggtggctatgtatcatcatataagaagcagttggaagttcctgcatctgaggccactatcgatgccactgcacaaggcattgcttctttgttgtgtgctcatggccctgatgttgagtggagaatatgtaccatctgggaagctgcctatggtttgctaccgctaagttcatcagcagttgatttgcctgaaattgttgtagctgccccgcttcagccacctacactgtcatggagcctgtacttaccattattaaaagtatttgagtatctacctcgtggcagtccatctgaagcatgccttatgaggatatttgtggcaacggttgaagctatacttaggagaacttttccttctgaaacatcagagcaatccagaaagccaagaagtcaatctaagaaccttgctgttgctgaacttcacacaatgatacattcactctttgttgaatcctgtgcctcaatggaccttgcctcccggttgctatttgtggtgttaactgtttgtgtcagtcatcaagctttgccagggggtagcaaaagaccaactggtagtgataaccattcccacgaggaagccactgagcattcaagattaacaaatggaagaagcagatgtaagaagagacaaggccctgttgctacgtttgattcatatgttctagctgcagtttgtgccttatcttgtgagctccagctgttccctttcattactaagaatggatcacattcaaatttaaaggattccatgaagattatcatatctggaaaaaacaatgggatgaataatgagctacacaacagcatcagctcagcaattcttcatactcgcagaattcttggcatcttggaagccgttttctccctgaagccatcatcagttggtacctcatggagctatagctcaaatgaaatagttgcagcagctatggttgctgctcatgtttctgagttatttcgtcggtccaggccatgccttaatgcactctctgcactaatgagatgcaagtgggatgctgagatttcgaccagggcatcatctctctaccatttgattgacttgcatggtaaaacagtttcctccattgtgaacaaagctgagcctcttgaagctcacctgacccttacaccagtaaagagggataatcaacatcaccgtgaggaaagcaataccagctcattggatagtgtcaagttggaaaacaagaatggttcaacatcacacaagaaaaacggtttctcaagaccactcttgaaatgtgcagaagaggtcctactgaatggcgatgttgcaagtacatctgggaaatccattgcaagcttacaggtggaagcatctgatttggcaaacttccttaccatggatcggaatgggggttaccgaggttcacaaactcttctaagatctgtattatcagagaaacaagagctgtgcttctctgttgtctcattgctctggcagaagctcatagcttctcctgaaatgcagatgtctgcagaaagtacatcagctcaccaaggatggaggaaggttgttgatgcactttgtgatgtcgtttcagcctcaccaaccaaggcatcagctgctatcgttctccaggccgagaaggacttgcagccttggattgctagagatgacgaacaaggtcagaagatgtggagagtcaaccagcgtatagtgaagcttatagctgagcttatgaggaaccatgacagccctgaagcgttggtgatactcgctagtgcctccgaccttctacttcgtgctaccgatggaatgctcgtcgatggtgaagcttgtactttgccacagcttgaggtgacatttcttccattcgtcagatttcgtaacaggagaattcttccaacaaaattctctgttctgttccattgtgctctgctgtcattaaacacgatcaagttaccatttccatgcactctttatctgctgactgtcgtttgtctggtggatacatgcagcttctggaagtgaccgctcgggctgtccatcttatcatcgaatggggagattcaggtttatcagttgcagatggtctttcaaatctgctgaaggcatgccccgtcttcatctgccttcgttctcactcattcaaacgccacccatgcatccttcgtaactcagcaggttaactgaatattgtgatctgcagtgccgtctatcaaccaccatccgctgcctttctcacccaagtgcacacgtgcgcgcactcagcatgtctgtcctccgcgacatcctgagcaacggatccgtgaaccccaacaagacaatccaaggggaacagcagcggaacggcatccagagcccgtcctaccggtgcc

SEQ ID NO: 148981 - DNA, 283 bp, Zea Mays
ttagcaatagtagcctgcctttttgtgttctgccattctgcgatctcagtcgtccattctatcgttctacaatctcagccgtccaatcccgcacaccagttttccgcgcgcagaaaaaaaatcaaaccgtggctgcctagggatcgaaccttggatctattgagcagaatgtctagccttctaccctctagccaacatgactcatgttgaattgtgtacaacttcaactaaaacgtcttttgtgtttaacccaccgtccactctgtatgctaactgagtctag

SEQ ID NO: 148982 - DNA, 715 bp, Zea Mays
aatgtgttcgatgaaatcgcttacccaagttatcttatctaaggaagtactgcggcggtcagaattacagctaaatgttgtagacgggcaactgtgcttccaaacttgaaatctgacggcaggacaggcaagtgtcatgaagattgagggaaacttgcatgtttgatatacccagctgctttctgtaacgaaaaactcgtgatcattttgttgaattggtcactgtcagggagggatctacttgtcagtttttggtattaaggctgctggccttcccttgcagggtatctgtagaataaatgggagaagcacactcggatgaattttgccattgccaggggtgtgctggcaagtatgcactactcagagacgaagaaaacccacgattggcaatctttgagaggcggctgccttgctgtggttgtgggataggatggtctacgctctcatcttcacagttctggcaattatcgctctctctgtggcactgataatctgtgtatacaagtagtacccaaagcgaggaaaacgcggtcgctggacctggaattcagaagaaacttgtaatttgagtgatagtagcatgcctttgcagtcatcctacatgcatcagtatcactatagcaagttgttgaattaaatgctgctaccgtcccggttgaccagtcggctgccgttgtttatcaacgaggatgttcattgctctatctcaaac

SEQ ID NO: 148983 - DNA, 893 bp, Zea Mays
gttccttctctcccctgagaccaccaacgccggggccggaaaaaagggaagccagagcacagagccagacctggcggcgctggacatccaaaaacgccgccaaggatccttctctctctctctctctctctcttcgcgtccatcgacctgaccgcggaggcgcgtgcttcttcttcccgctctccactgcagtgtcatgaagattgagggaaacttgcatgtttgatatacccagctgctttctgtaacgaaaaactcgtgatcattttgttgaattggtcactgtcagggagggatctacttgtcagtttttggtattaaggctgctggccttcccttgcagggtatctgtagaataaatgggagaagcacactcggatgaattttgccattgccaggggtgtgctggcaagtatgcactactcagagacgaagaaaacccacgattggcaatctttgagaggcggctgccttgctgtggttgtgggataggatggtctacttttcttttaggtttcttgtgtcctttgatttggtactttgcagccatactttactgctgcaagtactacaacaaggatcctcgagagcgccctggtctagctgcatcagctgttgcggctctcatcttcacagttctggcaattatcgctctctctgtggcactgataatctgtgtatacaagtagtacccaaagcgaggaaaacgcggtcgctggacctggaattcagaagaaacttgtaatttgagtgatagtagcatgcctttgcagtcatcctacatgcatcagtatcactatagcaagttgttgaattaaatgctgctaccgtcccggttgaccagtcggctgccgttgtttatcaacgaggatgttcattgctctatctcaaac

SEQ ID NO: 148984 - DNA, 888 bp, Zea Mays
gttccttctctcccctgagaccaccaacgccggggccggaaaaaagggaagccagagcacagagccagacctggcggcgctggacatccaaaaacgccgccaaggatccttctctctctctctctctctctcttcgcgtccatcgacctgaccgcggaggcgcgtgcttcttcttcccgctctccactgtcatgaagattgagggaaacttgcatgtttgatatacccagctgctttctgtaacgaaaaactcgtgatcattttgttgaattggtcactgtcagggagggatctacttgtcagtttttggtattaaggctgctggccttcccttgcagggtatctgtagaataaatgggagaagcacactcggatgaattttgccattgccaggggtgtgctggcaagtatgcactactcagagacgaagaaaacccacgattggcaatctttgagaggcggctgccttgctgtggttgtgggataggatggtctacttttcttttaggtttcttgtgtcctttgatttggtactttgcagccatactttactgctgcaagtactacaacaaggatcctcgagagcgccctggtctagctgcatcagctgttgcggctctcatcttcacagttctggcaattatcgctctctctgtggcactgataatctgtgtatacaagtagtacccaaagcgaggaaaacgcggtcgctggacctggaattcagaagaaacttgtaatttgagtgatagtagcatgcctttgcagtcatcctacatgcatcagtatcactatagcaagttgttgaattaaatgctgctaccgtcccggttgaccagtcggctgccgttgtttatcaacgaggatgttcattgctctatctcaaac

SEQ ID NO: 148985 - DNA, 832 bp, Zea Mays
aatgtgttcgatgaaatcgcttacccaagttatcttatctaaggaagtactgcggcggtcagaattacagctaaatgttgtagacgggcaactgtgcttccaaacttgaaatctgacggcaggacaggcaagtgtcatgaagattgagggaaacttgcatgtttgatatacccagctgctttctgtaacgaaaaactcgtgatcattttgttgaattggtcactgtcagggagggatctacttgtcagtttttggtattaaggctgctggccttcccttgcagggtatctgtagaataaatgggagaagcacactcggatgaattttgccattgccaggggtgtgctggcaagtatgcactactcagagacgaagaaaacccacgattggcaatctttgagaggcggctgccttgctgtggttgtgggataggatggtctacttttcttttaggtttcttgtgtcctttgatttggtactttgcagccatactttactgctgcaagtactacaacaaggatcctcgagagcgccctggtctagctgcatcagctgttgcggctctcatcttcacagttctggcaattatcgctctctctgtggcactgataatctgtgtatacaagtagtacccaaagcgaggaaaacgcggtcgctggacctggaattcagaagaaacttgtaatttgagtgatagtagcatgcctttgcagtcatcctacatgcatcagtatcactatagcaagttgttgaattaaatgctgctaccgtcccggttgaccagtcggctgccgttgtttatcaacgaggatgttcattgctctatctcaaa

SEQ ID NO: 148986 - DNA, 1355 bp, Zea Mays
gtacggtgcttgcaattaatgatatgatccatgtgcatggtcgtgtcggcgtgcaggagggacagcttcatcacgcacagggccttctgcgacgcgctcgcggaggagagcgcgagggcggtgaccgcggcggcggcagtcgtcgtgggacagcagcaggccgctggagggggagatggcagcgcggggttgcacctgccgccggacgtgctggacccgtcgcagacgctgggcggcgggcacggcatgtccttgcaagagctgtgcctcaagagggagcagcagcagcagttcgccccgtcgtcgtggctgacggcgcaccatcagcaggagctgcccggatcggcgaggctgctagagcagcatgagtacatagggagctccacgccggagagcacggcgggcctcagcggcttcgtcgggctctcgccgtccgccgctggtgaagcggcggcctcggcgcacatgtcggcgacggcgctgctgcagaaggccgcgcagatgggtgcaacgctgagccggccgtcgaaccaggaacagatggcgagcactcacagtcacagcagcaccaccaatgctggcactggcagtgccagtgcggcagctgctgctgcaatcaacgtgcctggcactggcgctggtgccttcggctttggagcacctcatcacttcggagcggaggagaggaccaccaccagtgctgaccgggacgcctgcggcaatgccgccgccgtctcggtggtaggcgccaacgatggtttcaccagggacttcttggggctgagagccttctcccacggcgacatactcaccatggccggcttcgatccctgcatgtcgtcggcggcgtacgagcaagggcaccaccagagcagcaagcagtggcatgtctagacacgatccgtcgtcagcgcaatacacaatttcatatatagctcgctcgccatggatgaatgatgaaatgtcgatcctgaatgagccgcaagcccgcaacacgtacgcatgcatggacttggctggatcatattgggtaagtcggagcatcgatcgaatccacctcacttttctgcttgacacttattactttcatgttcatttgtgtgggtggggttggggggggggggggtacgtatgggcatttcaattcttacataaaaatttcattcaaggtgaaatatataccgaggacttgcagatgtttttgctcttatatataaaaatagtcaacaattcatgttgttagccagaatatatatgtacttgtagtcagtatgtaggtacttaatccataacctttgtagtttgtacgagaagctctactactacgactacgcatgcaaattcactctttactg

SEQ ID NO: 148987 - DNA, 481 bp, Zea Mays
gattcaggaaaagtacttaacttgtgaagtaaaattttggcataaggatccactactagtatgcttttctgcaaaaacgagtctttgaaatttgatgagccttaccttgattcccaataaaccagcatacccttgagagtcttttctttagtcgggtaagtcttgctgagtaattgtgtactcaggattttattccctgttgtttttcaggttataattttgttctgttgtggatgctgctaagtgccggtgggctcggccttcttatataagtatatcccatctttagcttctttattgaggattgtcacttaagctagcatgtattttaaaacttataaatgttttatacattcaaattgtaatctttttgaatcaatttcttttgtaaccaactccgatgatatatattgtaatcttgctataacttgtaaatgttgtaacttgtaaccattttataataaataatttatttccgctg

SEQ ID NO: 148988 - DNA, 916 bp, Zea Mays
ccgccaccgccacccgctccgtggagtggcgtacgtggcgccgcgttgaattaatggcgtccctccccatccggttccggcccgggcacgtgacggtgacgcaacctccggccccacgcatcccccgtcaggccgtcaccggcccgcctgacgtcaccttccccgtcaccccacccggcccgccggtatgccgggggggccattaggccatgtggtgtgtctgcctctgcccgtctgccgccccggccgggtatatatatgcggttgcggtcctctcgtctaggcgagctcgtccggtcccgtcgatcttccaggccgccgctctcagctaatcggcacgcaggccggccggcaggtgggtgggtgggtgggtggtccaggtcgagagcatgcaggcggtgggcatccggcggcgcgggctgaccatcgacccggcgggggaggaggaggcccccgcggcgcgcgtggggcggctggtccgggagagccccgtggtgatcttcgcgcggcgcggctgctgcatggcgcacgtgatgcggcggctgctggcggccgtgggcgcgcacgccaccgtcatcgagctaggcagcgccgaggaggaggaggaagagctggcggcggccgagggcggcggcgtcccggcgctcttcgtaggcggcgaccccgtcggcggcctcgagggcctcatgcggctccacctcagcggccgcctcgtgccccggctccgggagctcggcgccctctgcgcctgagctgctctctctctccgccgtctgtactgtacatagcacgcgcgcgcgcggcctcttcgatcgatcagggtgctcggcgcaaaacacagccgaccggtggtgtactgtactagtactagtgctgtgcacatgattgccgtgtacatacatcctatccccttcct

SEQ ID NO: 148989 - DNA, 1603 bp, Zea Mays
ccatacctgtcttcacagaactatggagagatattcagcaatcaaatcatatggttcgtggatgatacaaatgtgtatcgagtcactattcacaaaacattttagggtaacttgaccaccaaaccaattaatggtgctattttcatttttcaatccaagaacgggtcaactttttcttaaggttatccacacaagtgtatgggcggggcaaaagcgtcttgggcagctggccaagtggaaaaccgctgaggaggttgctgcattggttcgatctcttcctgtagaagagcagccaaagcaaattgttgtgacaaggaagggcatgttggatcccttggaggtccatctacctgacttccctaacattgttattaagggcagtgagctgcagcttcctttccaggcttgcttgaagattgagaagtttggtgatcttatactgaaggcaactgaaccacagatggttctttataatatatatgatgattggttgaaaagtatatcatcatacacaacattctcccacattgtgcttattctacgtgcacttcatgtgaataatgagaaggcaaagatgttgctcaaacctgacaaaacaattattactgaaacacatcatatatggccatctctgaatgatgaacagtggttgaaggttgagtgtgcactaagggacctcatcctttctgattatgcaaagaaaaacaatgttaatacttctgcactgacacaatctaaaatgcgagatatcattcttggcgctgaaattgctccaccatcacagcagaggcaacagattgctgaaattgagaaacagtcaagagagactactcagttaactgctgtaaccacaaggacgacaaatgtgcacggagatgaactcattatcacaaccacaagtccatatgagcaacaagcattcgcatcgaagactgattggcgtgtcagagaaatctctgccacaaacttgtatctacgtgtaaatcacatttatgtcaattctgatgatataaagggcttggtggctgagtccgcagtggatgccagcagcgatgtggagattcatggcgagctcgagctcggtgccctcacctcttcgctcgagcaccctggcggcgcgctcggcgaactcaagcacgcgaggcggcgccaccctcgcccaataccatggcttgaggaggaagggccccagatccgggttctggacccgaaggtcagagaacaagcaagcctgcacgtgcagagtgcagaccgtcttttgaaggccggccacagtgaccatgagcgaccacccggcagcgacgaactgctcatcgccgacgagcgtgcgggcatcgcctacggcacccgcatcagacgatacttccatggcccttcccggtgcgcggacgccgaaacggccacgtgcgctccccggagcgggcgcgcggctcggccccggagcgggcggcagcggtctggcagccggcggtgcctacgatgtggtggcggtggtgtgcggttagtccctaaccttgccaaccggttgggccatatgcgagcgaccaggtgcatgggcttgggagatgggcctgccgcacaacaaccaagtgctatttcttaa

SEQ ID NO: 148990 - DNA, 2592 bp, Zea Mays
ccctcgctgcgccgcgcgctcccctctaccgcctccgcaccgcagagccgcagccaagcaagctgcgcccctggacttggcctcaccggtgaagcggagcttgaggataggcggtgctcgggagataccaagcggtcggccgcaggcgccacgtcggcggagatgacggacggtcaccacttcaacaacatcctcctcggagggcgcggcggcacaaaccctggtcagtttaaagtgcattctggtggacttgcatggaagagacaaggtggaggaaagaccattgagatcgacaaagctgatgtaactgcagttacttggatgaaagtccccagagcatatcagcttggagtcaggattaaggctggcctgttctacagatttattggcttccgtgaacaggatgtaagcaacttgaccaacttcatacaaaagaatatgggtgtcacaccagatgaaaaacagctttctgttagtggccagaattggggagggattgatatagatggaaacatgctaacctttatggttggttcaaagcaagcatttgaggtgtccctaccagatgttgcacaaacccagatgcaaggaaaaacagatgttctcttagagcttcatgttgatgatactactggagccaatgagaaagactccctcatggatttgagttttcatgtgcctacttcgaatactcagtttgttggggatgagagtcgccctccggctcatattttatgggagaccatattgaaatttgctgatgttggttcttctgaagaaccagttgtcacatttgaaggaattgcgatccttacaccaagaggacgttatagtgttgaacttcatctgtcatttctgcgactccaaggacaagctaacgattttaaaatccaatacagcagtattgttcgcctctttcttttgccgaagtcaaacaatcctcatacatttgttgttatcactcttgatccaccaatccgtaaaggacaaacattgtatcctcacattgttattcagtttgagacagaggcagtagtggaaagagatctggcattgagtaaagaactgttggttgaaaaatacaaggacaggcttgaggaatcttacaagggtctaatacatgaggtatttaccaaagtccttcgtggtctatctggtgctaaagtcacaaggccaggttctttcagaagttgccaagatggatatgcagttaaatcatctctcaaagctgaagatggactgttgtatccactggaaaagggtttcttcttcctgccaaagccacctacactcattcttcatgaggagattgagtttgttgagtttgaacgtcatggtgctgggggtgccagtatatcatctcactattttgacctccttgtcaaactgaaaaatgaccaagagcatctcttcagaaacattcaaaggaatgaataccacaacctcttcaatttcatcaatggaaagaacattaaaataatgaaccttggaggagatggtcaaggtgcaagtggtgtagttacagatgttctacgagacactgatgatgatgctgttgatccacatctagagcgtattaagaatcaggccggggatgaggaaagcgatgaagaggatgaagatttcgttgcagacaaggatgatagtggatctcctactgatgactcaggtgatgaggaatcagatgctagtgatagtggtggtgaaaaggagaaatcatccaagaaggaagcaagcagttcaaagccagttcagaaaagaaagcataagggcagggatgacgaaggacaagagaagaaaaagccaaagaagaaaaaagatccgaatgctccgaaacgagccatgaccccgttcatgtatttctcaatggctgagcgaggaaacatgaagagcagcaacccagatttgcctacgactgagatcgcaaagaagcttggggagatgtggcaaaagatgtcaggcgaagagaaacagccttacatccagcaggcccaggtcgacaagaaacgttatgaaaaagaatccgctgtctatcgcggtgaagctacagtcgatgtggattctgggaacgagtctgactagagatccaagctcttgggctggcatggtggcacgggatgaaagtctagtgccatgtgtgctattgttatgtcagcaaccgttgcctccaacattgctgacagtaaagagagtttctctcgcagcttacctctgcagggcaaaagaatgtacgagtgtagtctagtgattttgtgtaaaacaaccaacatacgtggttttctgagagatggtaagacgtcagtttaactgttgtcgattggctgttttgcctcctctcgttggtcagatactcatccaaagttaagagatgcccacctcaaggcaggcgttccggtcctcgccgcgcctaggtttggtttcgacctcggtgtgcagtagcatggtggtgcagtccaatactggtcggtagtaccgactagtatgctaaagaagaactggtcggtattggtcggtttgaccgttggttgccattaattagttcgcgaagttttcatcatttaaagtaaaaaaagacagaaaatctaatgaaaa

SEQ ID NO: 148991 - DNA, 2369 bp, Zea Mays
ccctcgctgcgccgcgcgctcccctctaccgcctccgcaccgcagagccgcagccaagcaagctgcgcccctggacttggcctcaccggtgaagcggagcttgaggataggcggtgctcgggagataccaagcggtcggccgcaggcgccacgtcggcggagatgacggacggtcaccacttcaacaacatcctcctcggagggcgcggcggcacaaaccctggtcagtttaaagtgcattctggtggacttgcatggaagagacaaggtggaggaaagaccattgagatcgacaaagctgatgtaactgcagttacttggatgaaagtccccagagcatatcagcttggagtcaggattaaggctggcctgttctacagatttattggcttccgtgaacaggatgtaagcaacttgaccaacttcatacaaaagaatatgggtgtcacaccagatgaaaaacagctttctgttagtggccagaattggggagggattgatatagatggtttgacttcaatgtttgttactcttgcctctgtaggaaacatgctaacctttatggttggttcaaagcaagcatttgaggtgtccctaccagatgttgcacaaacccagatgcaaggaaaaacagatgttctcttagagcttcatgttgatgatactactggagccaatgagaaagactccctcatggatttgagttttcatgtgcctacttcgaatactcagtttgttggggatgagagtcgccctccggctcatattttatgggagaccatattgaaatttgctgatgttggttcttctgaagaaccagttgtcacatttgaaggaattgcgatccttacaccaagaggacgttatagtgttgaacttcatctgtcatttctgcgactccaaggacaagctaacgattttaaaatccaatacagcagtattgttcgcctctttcttttgccgaagtcaaacaatcctcatacatttgttgttatcactcttgatccaccaatccgtaaaggacaaacattgtatcctcacattgttattcagtttgagacagaggcagtagtggaaagagatctggcattgagtaaagaactgttggttgaaaaatacaaggacaggcttgaggaatcttacaagggtctaatacatgaggtatttaccaaagtccttcgtggtctatctggtgctaaagtcacaaggccaggttctttcagaagttgccaagatggatatgcagttaaatcatctctcaaagctgaagatggactgttgtatccactggaaaagggtttcttcttcctgccaaagccacctacactcattcttcatgaggagattgagtttgttgagtttgaacgtcatggtgctgggggtgccagtatatcatctcactattttgacctccttgtcaaactgaaaaatgaccaagagcatctcttcagaaacattcaaaggaatgaataccacaacctcttcaatttcatcaatggaaagaacattaaaataatgaaccttggaggagatggtcaaggtgcaagtggtgtagttacagatgttctacgagacactgatgatgatgctgttgatccacatctagagcgtattaagaatcaggccggggatgaggaaagcgatgaagaggatgaagatttcgttgcagacaaggatgatagtggatctcctactgatgactcaggtgatgaggaatcagatgctagtgatagtggtggtgaaaaggagaaatcatccaagaaggaagcaagcagttcaaagccagttcagaaaagaaagcataagggcagggatgacgaaggacaagagaagaaaaagccaaagaagaaaaaagatccgaatgctccgaaacgagccatgaccccgttcatgtatttctcaatggctgagcgaggaaacatgaagagcagcaacccagatttgcctacgactgagatcgcaaagaagcttggggagatgtggcaaaagatgtcaggcgaagagaaacagccttacatccagcaggcccaggtcgacaagaaacgttatgaaaaagaatccgctgtctatcgcggtgaagctacagtcgatgtggattctgggaacgagtctgactagagatccaagctcttgggctggcatggtggcacgggatgaaagtctagtgccatgtgtgctattgttatgtcagcaaccgttgcctccaacattgctgacagtaaagagagtttctctcgcagcttacctctgcagggcaaaagaatgtacgagtgtagtctagtgattttgtgtaaaacaaccaacatacgtggttttctgagagatggtaagacgtcagtttaactgttgtcgattggctgttttgcctc

SEQ ID NO: 148992 - DNA, 341 bp, Zea Mays
acctttctttgttcctttgttatatatatgctatgcaaacacagccatgcagttcaaagcatggtgcgtgatgaagctaggacatcaaatggtggtctgaagagtgacccaatgtgcaatacctgtgagatggctgtggtttggatgcaaaaccaactttcccagaacaagacatagaaactcatcctaaactacatcaatcaggtgagcttgactgacaaagggcacagagcttttctgtgccatttagcactctactttgcttaattgtttcactatgacagttttgtgagcgttgtccgagtcccatgggagaatcagtcgtcgactctgccagtctg

SEQ ID NO: 148993 - DNA, 846 bp, Zea Mays
atgtgctctaacacaacgtatatcgataaggtagaaaacaggaaaattacaacatcttacaccgtcaacaggttccatgccaatttcgttctatccgaggcgcccgcgaagcgccggcgcggggggcggtcgtgcccgttcagctgctgctgctgcttctgctggacgctcctcgtcgtcgtcctcctcgccgtcctggccgccgtggccgggggcgccttctacctgctgtaccggccgcaccggccggccttcacgctgaccgcggcgcgcgtgacgaggctgagcctgtcgtcgtccgccaccgcgcccgcgctgagcgacgccatcgacgtgacgctgaccgccaggaaccccaacaagaagctggtgtacgtctacgacgacttcgccgtgacggccgccacggccgccaacgccgtgccgctgggcgcggccaccgcgcccgggttcgcgcacgaggccggcaacgtcaccgtcatccgggccaccgtctccgcgtccgcgctcgcggtcgaccccgccgcggccggctccgacgtcaagaggtccggcgagttccccatcgtcctggacctggagaccagggccggcgtccgggttggcgcgctcaggaccaagaagatcggcatcctggtgcactgcgacggcgtcaaggtggccgcgcccgcgcccgcgccggccaagaagacgaagaagctggcgaaggccgcggccgacaccccagcccccgccgccgcggccgtcgacgacgcgccggcgccgcccgccgcgtcggccacggccaccgtcgctcgcgcgtgccaggtcagggtccgcgtcaagatctggaagtggaccttctag

SEQ ID NO: 148994 - DNA, 357 bp, Zea Mays
cttttttttttttttttgtgatacaacagacacagtcatagtaaattggtaactgtatagatttgatttcatacatggaagcaggtgacgatggtaaacagaatgccacttgtgaagtaagcctaaaaaccggaacaacagttcatgacttcagacaagagatgagctggtatggccctatatatgccttaacagccatgcccttaccttacctctgtattatatttgtaaatccattggtctcgtgccttataaaccatatggcatcaagcagcaggaaccttccttccatcttcaatgaagaaaatggccgactcaggtacctgataaaggacaaaagcaatgacaattcaataa

SEQ ID NO: 148995 - DNA, 1294 bp, Zea Mays
attttcccgtcggaaacaaccctggccttaggaggccaggcgattctccgccgcctcgtctcgtcttcgctatgcaccacgagcgcctccgccgctccaacgctccaacgcttgagcgcctccaacgccactccaacgccacgagcgcctccgccgctccaccgaacaactccaacgccactccagctcttgcagcagtagaactctactgcagccagctacgacaccctgcgcctgccgcactaggtacatttgattctggtttctgccgcacaagatccgctacctcttggacccggacatctacaccgacggcaggatctccgtgcagggcatcgacgccgtgctcttcgcgccggacgacgccaaggccacgcagaccgtcgacccgaacaggaagcctcctaccatcgtcacccacaagaagaagatcaagctccggcgaggtcagtacctacctaccttcagatctggacctgctcctttgtgtcctccgtcgacctgaacaggaagtatcccaccaccgcattgtccttttttcaataatagcaccgaaatttacagttcgtaatatctagattggggaggtcattacatcaaaaaaaagattggggaggtgtgtagattaatttcacaactgatcgctagcatcaatcaatgccagttcatctattgctcaacctcagtattggccaacgtgaaaacatggaggtgaagtgaagcaagtggtagttgagcatatgctggtggttggttgtcttcatgaacatctctttgatggctgataccattcctgggactgcaagccaacactgtcctttaacccatgacccatgagcaacaatttcttcttaacaacagagcatgatgttagagaaatttggcttcaagcgcaaaattaggttgcttcgtgggagtgatgcatggcctgaacaaatgatatgagcaaatttgacaactgcagttctgttatggtgaatggtgattgtagttcagtttcagctctaacctatgaaaaattgaatggcagttgcactaatctgttggtggaatgattttcccagtaatttcctggacaagcagatcactgagaaccatctaccttatgagaaatgatgccttgtatggttcagtatagttcttgtattgctggtttaaattaattcttgtatggcagttgcactaaactgaatggcagttgcactttgagatattcttctattgttggtttaaaaccatggtgactttcttgtatgcattctgtatgcattcttgtttaaaacctggttgctta

SEQ ID NO: 148996 - DNA, 1437 bp, Zea Mays
atggctatgccaccaccaacgccagcggcaacaacggcttcatgtgcggctacgctgccggcagcagagatccaggacgcattcttatcgatcgacatgcacacgtccatgcagatcagcatgcgcatgaacatggacgacgaagcagcagtcgtctaccacatgtcttccaacggcggtgccaccgccatcgacatgcacgaccctatcgtggacggcctcctcgacgacccgcaccacggcgccggcggccgcgcctgcagcagcttcccttcgtcgtcgtcgtgctcctcgctctcgctgcctgctgcctctgcatccctctcctgcagccccgacgaccccgacagctcctcggcgcatcatatcctcgccgcgccggccgcgggcggcggcaaccagcagtacccggaggtctcctcacacgtgccgttattaccaccaccaccaccaccacccgtcgtgccatcttacgaccaccaccaccagtacaccgaccttcacgcgccggcgccggccaaacccaccggtgcgttcaagcactacgcgcggcaccttgggccgaagaggccgcctaagcccggcgcgtgcgggcagcggatgttcaagacggccatgtcggtgctgtccaagatgcacgtggcggcgaggtacagccaacagcagtactactaccaggcggccgctgccgctgaggcggcgcagccgccgccgtcggtgaaccagctgcagcacatgttctcggagcgcaagcggcgagagaagctcaacgacagcttccacgccctcaaggcagcccttccgcccggcgccaaaaaggacaagacgtcgatactgatcagggcaagggactacgtgaggtcactggaggccaaggtggccgagctggaggagaagaacaagtcgctcgagtcgcggctgacccgccgcacggacggcagcagtgacgacgacgacaacggctccggcgagacgacgaaggtggaggtcgagataaccaggacggcgaacgaagaactctgcacggtgaagatagaggtgagatcgccgccggcggcggcggcgtcgccgtgcaataggactgacgtggtggtcaggacgctccagtgcctgaaagagcagatcggagatggcgtcagcctggtggcaatgagcaccagcggcggcgctgagccggcggctaccggagtgaagaacgcctttccacgagctgtcctgacgatgcagatcaagtcgccaggaaccgactgggaggagcagccggtcaaggacgccgtggccaaggtcgtcgccgacgcgctgacgacgacgacgacgccgccactgccacccgcggcggccaccaccgtaccgccagctgcttcgccggggcttctcatcaacgactcgtcatcagctaataattcattaacaatccggccggccataatgaaatag

SEQ ID NO: 148997 - DNA, 1219 bp, Zea Mays
ttgttggtttacaaatacttaccaaacagaagcttggattctgttatctttgatgctgcaaggcaacatctcctctgttggccaacacatatcaagataatcaaaggagtgtctagagggcttctctattttcaccatgattcaaggttgactgtaattcatagagatcttaagacgagcaacatactattggacgcggatatgaaccccaacatatcagattttgccatggcaagcatcttttgtgcaaaccgaaatgaagcaattacaaatcgagtcgttgggacatagttctcgtggtgaaggtggtatccttagaaatagtgaaggtgaacagttcatggaacgatatgctcctactgcaaaagatcttgcttctcgtgatgttgtttcaagatcaatgacaatggaaattagagaaggacgtggtgtagggccattgaaggaccacatttattttcatctgaaccatctgccacctgaggttctcaaagaaaggctccctggtatttctgaaattgctgctatttttgctggtgttgacgtcaccaaggagcccattccagttttgcctactgtgcactacaatatgggtggtatcccaatgaactaccatggggaggtagtggatattaagggtgataatccagatgttgttatccctggtctaatggctgctggtgaagcagcctatgcatctgtccatggtgcaaataggctaggcgcaaattcacttcttgacatagttgtttttggcagagcttgtgcaaacagggtagcagatatttctaaaccaagtgagaagcagaaacctctggaaaaagatgctggagagaagaccatagcctggttggacaagctgaggaatgcgaatgggtcattgccaacttccgagatccgtctcaacatgcaacgtgttatgcaaaataatgctgttgtgttccgtacacaagaaacacttgaagaagaaaccgaaacaacgcacgagcacttaactgtcatcaaagaattgagatgggcagtagcagatgaaagatgtcggtcatcaagctttgctgagctttccaaggactacggaatactatgcccaactactcacgattggaaggtattcaaggacagggagcttggtgttcacaccaagtcagagtatgtttggatcccaggagactatactgtacgcataatagagcttgaatataagtatgagaatggataa

SEQ ID NO: 148998 - DNA, 1198 bp, Zea Mays
gcaccttctcctgtccttctaaccctagccgcccaagcccaccagccgccgctagctgctgccgttctccactctccacggaccatggctccacggccagccgccaaccaccaggccacggccgagcagggcgccaagcacctaggccggccgagcggtgcgccgagcgcccgagcacccaggccaccgcccgccgcaccagagcggccaacggggcgccgagccgagcagagtttcaacagtgttcctgaccgtgtgttcttgatccaggtggctgccagcaagacgaagatctacatggtgcttgagctcgtcaacggcggcgagctgctggacaggattgcggccagtgagggaaagctcccggagcaggaggcaaggaggctcttccagcacctggtcctttcctctactctactctactcactcactcatcactcccaggcggccaaacagctccccagattgtactttacttggagctttatgcaagctgtgtggagtacatcacgccgctaagagacagcatgtcatcagtgtttccctcagcacatttagcttttgccagcatcgacctgaatgcacacactgtctttgcgatcacaacggccttggcaattctccaaacagtctgtctcaggaacctcagtctcctctcgtatctttctgctgacggtgtgatggcgacaattgcagtcatcctctgcctgttctgggttgcctgttctgggctctgatactcccatgtgcgtgctacctctccatcaagaagggcgcagtgccattgtgggagatcatcctgtgcatagtcatcataatgatcggcgtcgtatgtgcatgcgtgggatcatacacctcagtcagccagatgattagcagcaccaaatagcgcacgctagctgatatttatctagtgtctacggatccttccaaatgctttgacagagttggaactggcagcttttcgtagctaagtttatttgttccttctttatggcagaaatttggtaagagagagtttagttgtgggaggacaggcggcgaaggagtaatctgagtttagtgtggtgcttttgtgactgatcatctctggagcttttgtgaatgatctagctagctatctgtaaatgatctagttgtgaatgatattataattgtgatgcttttgtgaatatataattgtggtgcttttgtattt

SEQ ID NO: 148999 - DNA, 1251 bp, Zea Mays
gcaccttctcctgtccttctaaccctagccgcccaagcccaccagccgccgctagctgctgccgttctccactctccacggaccatggctccacggccagccgccaaccaccaggccacggccgagcagggcgccaagcacctaggccggccgagcggtgcgccgagcgcccgagcacccaggccaccgcccgccgcaccagagcggccaacggggcgccgagccgagcagagtttcaacagtgttcctgaccgtgtgttcttgatccaggtggctgccagcaagacgaagatctacatggtgcttgagctcgtcaacggcggcgagctgctggacaggattcaggcggccagtgagggaaagctcccggagcaggaggcaaggaggctcttccagcacctggtcctttcctctactctactctactcactcactcatcactcccaggcggccaaacagctccccaggtgctaattccttatgccgaatgcctgcaggttctgcagaacagaggattgtactttacttggagctttatgcaagctgtgtggagtacatcacgccgctaagagacagcatgtcatcagtgtttccctcagcacatttagcttttgccagcatcgacctgaatgcacacactgtctttgcgatcacaacggccttggcaattctccaaacagtctgtctcaggaacctcagtctcctctcgtatctttctgctgacggtgtgatggcgacaattgcagtcatcctctgcctgttctgggttgcctgttctgggttgctctgatactcccatgtgcgtgctacctctccatcaagaagggcgcagtgccattgtgggagatcatcctgtgcatagtcatcataatgatcggcgtcgtatgtgcatgcgtgggatcatacacctcagtcagccagatgattagcagcaccaaatagcgcacgctagctgatatttatctagtgtctacggatccttccaaatgctttgacagagttggaactggcagcttttcgtagctaagtttatttgttccttctttatggcagaaatttggtaagagagagtttagttgtgggaggacaggcggcgaaggagtaatctgagtttagtgtggtgcttttgtgactgatcatctctggagcttttgtgaatgatctagctagctatctgtaaatgatctagttgtgaatgatattataattgtgatgcttttgtgaatatataattgtggtgcttttgtattt

SEQ ID NO: 149000 - DNA, 1289 bp, Zea Mays
gcaccttctcctgtccttctaaccctagccgcccaagcccaccagccgccgctagctgctgccgttctccactctccacggaccatggctccacggccagccgccaaccaccaggccacggccgagcagggcgccaagcacctaggccggccgagcggtgcgccgagcgcccgagcacccaggccaccgcccgccgcaccagagcggccaacggggcgccgagccgagcagagtttcaacagtgttcctgaccgtgtgttcttgatccaggtggctgccagcaagacgaagatctacatggtgcttgagctcgtcaacggcggcgagctgctggacaggattgtaagccgccccggccgttcgttcttcctcccttgtgatcacaggcggccagtgagggaaagctcccggagcaggaggcaaggaggctcttccagcacctggtcctttcctctactctactctactcactcactcatcactcccaggcggccaaacagctccccaggtgctaattccttatgccgaatgcctgcaggttctgcagaacagaggattgtactttacttggagctttatgcaagctgtgtggagtacatcacgccgctaagagacagcatgtcatcagtgtttccctcagcacatttagcttttgccagcatcgacctgaatgcacacactgtctttgcgatcacaacggccttggcaattctccaaacagtctgtctcaggaacctcagtctcctctcgtatctttctgctgacggtgtgatggcgacaattgcagtcatcctctgcctgttctgggttgcctgttctgggctctgatactcccatgtgcgtgctacctctccatcaagaagggcgcagtgccattgtgggagatcatcctgtgcatagtcatcataatgatcggcgtcgtatgtgcatgcgtgggatcatacacctcagtcagccagatgattagcagcaccaaatagcgcacgctagctgatatttatctagtgtctacggatccttccaaatgctttgacagagttggaactggcagcttttcgtagctaagtttatttgttccttctttatggcagaaatttggtaagagagagtttagttgtgggaggacaggcggcgaaggagtaatctgagtttagtgtggtgcttttgtgactgatcatctctggagcttttgtgaatgatctagctagctatctgtaaatgatctagttgtgaatgatattataattgtgatgcttttgtgaatatataattgtggtgcttttgtattt

SEQ ID NO: 149001 - DNA, 1310 bp, Zea Mays
gcaccttctcctgtccttctaaccctagccgcccaagcccaccagccgccgctagctgctgccgttctccactctccacggaccatggctccacggccagccgccaaccaccaggccacggccgagcagggcgccaagcacctaggccggccgagcggtgcgccgagcgcccgagcacccaggccaccgcccgccgcaccagagcggccaacggggcgccgagccgagcagagtttcaacagtgttcctgaccgtgtgttcttgatccaggtggctgccagcaagacgaagatctacatggtgcttgagctcgtcaacggcggcgagctgctggacaggattctatactacgtgtctgattcccctcctgtcgcttcccttttgctgcaacggcaactgaccagcaggcggccagtgagggaaagctcccggagcaggaggcaaggaggctcttccagcacctggtcctttcctctactctactctactcactcactcatcactcccaggcggccaaacagctccccaggtgctaattccttatgccgaatgcctgcaggttctgcagaacagaggattgtactttacttggagctttatgcaagctgtgtggagtacatcacgccgctaagagacagcatgtcatcagtgtttccctcagcacatttagcttttgccagcatcgacctgaatgcacacactgtctttgcgatcacaacggccttggcaattctccaaacagtctgtctcaggaacctcagtctcctctcgtatctttctgctgacggtgtgatggcgacaattgcagtcatcctctgcctgttctgggttgcctgttctgggctctgatactcccatgtgcgtgctacctctccatcaagaagggcgcagtgccattgtgggagatcatcctgtgcatagtcatcataatgatcggcgtcgtatgtgcatgcgtgggatcatacacctcagtcagccagatgattagcagcaccaaatagcgcacgctagctgatatttatctagtgtctacggatccttccaaatgctttgacagagttggaactggcagcttttcgtagctaagtttatttgttccttctttatggcagaaatttggtaagagagagtttagttgtgggaggacaggcggcgaaggagtaatctgagtttagtgtggtgcttttgtgactgatcatctctggagcttttgtgaatgatctagctagctatctgtaaatgatctagttgtgaatgatattataattgtgatgcttttgtgaatatataattgtggtgcttttgtattt

SEQ ID NO: 149002 - DNA, 1439 bp, Zea Mays
ccaattcccagcggaaaacccccagccccctagcctcctagcaccttctcctgtccttctaaccctagccgcccaagcccaccagccgccgctagctgctgccgttctccactctccacggaccatggctccacggccagccgccaaccaccaggccacggccgagcagggcgccaagcacctaggccggccgagcggtgcgccgagcgcccgagcacccaggccaccgcccgccgcaccagagcggccaacggggcgccgagccgagcagagtttcaacagtgttcctgaccgtgtgttcttgatccaggtggctgccagcaagacgaagatctacatggtgcttgagctcgtcaacggcggcgagctgctggacaggattgtaagccgccccggccgttcgttcttcctcccttgtgatcagtcaggctacactccttgtccgatgccgttaccactcccatacagctatactacgtgtctgattcccctcctgtcgcttcccttttgctgcaacggcaactgaccagcaggcggccagtgagggaaagctcccggagcaggaggcaaggaggctcttccagcacctggtcctttcctctactctactctactcactcactcatcactcccaggcggccaaacagctccccaggtgctaattccttatgccgaatgcctgcaggttctgcagaacagaggattgtactttacttggagctttatgcaagctgtgtggagtacatcacgccgctaagagacagcatgtcatcagtgtttccctcagcacatttagcttttgccagcatcgacctgaatgcacacactgtctttgcgatcacaacggccttggcaattctccaaacagtctgtctcaggaacctcagtctcctctcgtatctttctgctgacggtgtgatggcgacaattgcagtcatcctctgcctgttctgggttgcctgttctgggttgctctgatactcccatgtgcgtgctacctctccatcaagaagggcgcagtgccattgtgggagatcatcctgtgcatagtcatcataatgatcggcgtcgtatgtgcatgcgtgggatcatacacctcagtcagccagatgattagcagcaccaaatagcgcacgctagctgatatttatctagtgtctacggatccttccaaatgctttgacagagttggaactggcagcttttcgtagctaagtttatttgttccttctttatggcagaaatttggtaagagagagtttagttgtgggaggacaggcggcgaaggagtaatctgagtttagtgtggtgcttttgtgactgatcatctctggagcttttgtgaatgatctagctagctatctgtaaatgatctagttgtgaatgatattataattgtgatgcttttgtgaatatataattgtggtgcttttgtattt

SEQ ID NO: 149003 - DNA, 1306 bp, Zea Mays
ccaattcccagcggaaaacccccagccccctagcctcctagcaccttctcctgtccttctaaccctagccgcccaagcccaccagccgccgctagctgctgccgttctccactctccacggaccatggctccacggccagccgccaaccaccaggccacggccgagcagggcgccaagcacctaggccggccgagcggtgcgccgagcgcccgagcacccaggccaccgcccgccgcaccagagcggccaacggggcgccgagccgagcagagtttcaacagtgttcctgaccgtgtgttcttgatccaggtggctgccagcaagacgaagatctacatggtgcttgagctcgtcaacggcggcgagctgctggacaggattgtaagccgccccggccgttcgttcttcctcccttgtgatcagtcaggctacactccttgtccgatgccgttaccactcccatacagctatactacgtgtctgattcccctcctgtcgcttcccttttgctgcaacggcaactgaccagcaggcggccagtgagggaaagctcccggagcaggaggcaaggaggctcttccagcacctggtcctttcctctactctactctactcactcactcatcactcccaggcggccaaacagctccccaggtgctaattccttatgccgaatgcctgcaggttctgcagaacagagggtacgacggctgaaatacacacaatttagttgaatttaagttatgcctagtgtgctatggccactagtttgaatttaagttagatttaaaggttacacacaatttactagttttattatctgaatggttgaattggtctcgtactactgtacataatgacagctgaaatacatcatgtctctaccactttagcctttcgttttttatacactaatactgatctacatggactgcaatagtattcacaccacagtgaatgttgagcgtttattcagtaacactaatataggcaagaggtatatgtatttcataggcaaaagtaacactgaagacataggcaagaagtataggcaacaataacactgatatacttagagggaaaagggtatatgtatttctagcccttttataacagtcatttctagcagttttagcaaatgactggttcagtgtgtatttatatagcagtttcagttttatagcagttttagttctagcacttttagcaaatgtatatatatatatatatatatttcatagcagtttcatagcccagccgccgcggcctccggctgggcacgaggcccagttgcccgacaggccg

SEQ ID NO: 149004 - DNA, 910 bp, Zea Mays
gctatgcagatgatgatatcatcctcctctcttttgtcaatattagtaattgaaagagttgatgagagggttgggctatcttgtttggtctcactcctatctcttatattagtgagcagtgcatgtgaaagggttcttgatgatatgcgcctatgggtgattctgaactttgttccttgcatcgccattcctgcaatgctattcttgtttcctcccaagtatacgcattcaaggttctggttccttgctacaggcttgtaccttctggcaagatttgaaggcttggctgacaggaaagtctacagcgtgaaccggtacttcatcagcggccattccctggagcacctttgctttgccctggtgacggttatgctaactgtgatgctgaccttcagaaacattaagattgccagggactcctgacctgtcactgattgtaacttgggtgcagaaaattctgtgaaaaaattgcaagtttggaaggcagactccgagacgacacagagattcggctagatgatgcctagtagataatattctaccttaacattgtcccgtttgccggggctgattcacccttttccccgtgttgtttcagactgacggtggcataggtcatatagaggacgcaatttattggtctgcccgattcataccgtggaaggttgtctgtgtccgccgcggcgttacaccaaacggttcgatgcaggcatacagcagctgctctcaagggtttcatgcctagacactaccgatgttgaggtctgctatcgtcagtgagcccaagtagcaggggcattgtgtcctacttggacgagactgatctcatcttcccgttgcgctgccagaaggcggtgtcctccttctcccgagccaggagctcctcgaacgatatttcttgagcctccag

SEQ ID NO: 149005 - DNA, 756 bp, Zea Mays
gctatgcagatgatgatatcatcctcctctcttttgtcaatattagtaattgaaagagttgatgagagggttgggctatcttgtttggtctcactcctatctcttatattagtgagcagtgcatgtgaaagggttcttgatgatatgcgcctatgggtgattctgaactttgttccttgcatcgccattcctgcaatgctattcttgtttcctcccaagtatacgcattcaaggttctggttccttgctacaggcttgtaccttctggcaagatttgaaggcttggctgacaggaaagtctacagcgtgaaccggtacttcatcagcggccattccctggagcacctttgctttgccctggtgacggttatgctaactgtgatgctgaccttcagaaacattaagattgccagggactcctgacctgtcactgattgtaacttgggtgcagaaaattctgtgaaaaaattgcaagtttggaaggcagactccgagacgacacagagattcggctagatgatgcctagtagataatattctaccttaacattgtcccgtttgccggggctgattcacccttttccccgtgttgtttcagactgacggtggcataggtcatatagaggacgcaatttattggtctgcccgattcataccgtggaaggttgtctgtgtccgtagttttgtagacagaaaaactggacggtcagattgcattgtatacaaacatccaactgtgaaatgacttgttctgtt

SEQ ID NO: 149006 - DNA, 2162 bp, Zea Mays
ctccactgctgcgtgcgtgcgtgcgtacatcgtcaaaaacctccatcaagcaactgatcatgacgatggctagagctacgacctccacggtcgcagcactctgcttcctcctcagctgcgtctccgcgaccccttccacgctcgccgcgtcctccgccatcatccacgacatcatccgcggcctcgcggacaccacggcggcgcgcgtccgcacggacgccgaggccacggcgcgcgcgtccaccgacttcggcaccaacgcgaccgcggacgacgcggcccggccggcggccgtgttctacccgtcgtgcgccgccgacatcgccgcgctgctgcgggcgtccagcgcgagcgcctcgccgttcccggtctccgcgaggggccgcgggcactcgacccggggccaggccacggcccccggcggcgtcgtcgtcgacatggcgtcgctagcagtagctgcagggcgcgacgagaccgccaccaccaacgcctcctccacctccgcctccgcaaggctcgccgtgtcggtggacgggcgctacatcgacgccggcggcgagcagctgtgggtggacgtgctgcacgccgccctggcgcacggcctcacgcctcgctcctggacggactacctccgcctcaccgtcggcggcacgctctccaacgcaggcatcagcggccaggccttccgccacggcccgcagatatccaacgtcctagagctcgacgtcgtcacgggaacaggtgacatggtgacgtgctccaaggagaaggacgccgacctcttcgacgccgtgctgggagggctggggcagttcggcatcataacgcgcgcgcggatcccgctggcgccggcgccggcgagggcgcgctggctgcggctcctctacaccggcgccgccgacctcacggccgaccaggagcggctcatcgccgacgacgagcgccgcggcggcgcgctggccgggctcatggactacgtcgagggctccgtcgtcaccgacctccagcagggcctcatcggcagctggcgctcgcagccgccgccgtcctcctcgtccttctactcggctaccgacgccgcgcgcatcgcggcgctagccgaggaggccggcggcgtcctctacttcctcgagggcgcggtgtactacggcggcgccagcgacacgaccgccgcagacgttgacaagcgcgtggacgtgatgctgcgtgagctgcggtacgcgcgggggttcgcgtacgtgcaggacgtgtcgtacgagcagttcctggaccgcgtgagcgccggcgagcgcaggctccgcggcgagggcctctgggacgtgccgcacccgtggctcaacctcttcctcccgcgctcccgcatcctcgacttcgccgcgggcgtcttccacggcgtgctgctccccacgcgcacggctggcggcggcggcggcgggcccgtgctggtctaccccatgaaccggggcaagtgggacggcgcgacgtcggcggtgctcccctacgacgatggcgacggcgacggcgacgaggtgttctacacggtggggatcctgcggtcggccgtggcggacggcgacctgcgccgcatggaggagcagaacgccgaggtggcgcgcttctgcgaggccgccggcatcccctgcacgcagtacctgccctcctacgccacgcaggcggactgggcggcgcgccacttcggccccgccggcagcggcaggtgggacaccttcctccgccgcaagaggaaatacgaccccatggcgatcttgtcgcgcggccagaggattttctcgtccccgctacttgcctcatgatccgccggttccggtctctcgatcgtcgtgtgttgctgttgctggcatgggctagctgcatgaaataatagtgcaagcaagcaaaggcaaagcaagcttcaaggcatgactgttttgctttagcgttttactgatcagtagtcaagtgacacagttactacgtactacgatctgtctctgactctcttccagagggtcccaaatatatgatgctttttattaactttatttgaccgttattaaaaatatagtgatattgtttactttaaacgagttattttattgttacagaattttatcatttacataaaaatataaatttaaataaatgatcaaatacaataatat

SEQ ID NO: 149007 - DNA, 1597 bp, Zea Mays
actattgcagcaactaagtggaaggatgttggtacggggcatcatgttgaatatgatcagagacctgatatttttaggggaactgttcgctatgctagtgtgcatgctcacttgggaagaactgggagtaggagagatgatcttgaatcccttgcatacacgcttatttttcttctacgtggccgcctcccttggcaaggataccagggagagaacaagggttttcttgtctgcaagaaaaagatggcgacatctccggagtctttgtgtggaatctgtccacaacctttccgggattttgttgagtatgtggtgaacttgaaatttggtgaagaaccaaattatgcgaagtgcatctctctttttgatggcattgttggcccaaatccagacataagaccgataaacacagatggtgcccaaaagctaatatatcaggttggccagaagagaggccggttaatagtggatgaaaatgatgatgagcaacctaagaaaaagatcagaatggggatgccggcaactcagtggattagtgtctacaatgcccgtcgacccatgaaacagaggtaccactacaatgtagccgataatagattgctgcagcatattcaaaagggaaacgaagatggcttgtttattagttcagttgcctctagctcaaatctgtgggctttaattatggatgctggcactggctttacatctcaagtatacgaactttctaattactttcttcacaaggaatggataatggaacagtgggagagaaatttctatatcactgcactggctggggcgaataatggaagctctttggtgattatgtcaagaggaacacaatatgcccagcagtcctacaaagtaagcgatacatttcccttcaaatggataaacaaaaagtggaaggagggcttctatgtcactgctatggcaacagctggaagccgatgggcagttgtcatgtcccgcaatgctggtttcacttctcaggtagtggagcttgatttcttatatccgagtgagggcatccacatgcgttgggacaatggctatcgcatcacggcaacggctgccacatgggaccaggcagcctttatcttgagcattccaaggagaaagcctagtgatgaaacacaggagacccttagaacatctgcgtttcctagccagcatgtgaaggacaaatggtccaagaacctgtacctagcttccatctgctatggaagatcggtgtcctgaaacccattttctcgatttggtttggttgccgagaggtatattgatatcaaagacaggtggttttatgatatcagatggagtgttttgaagctcaaaactctgctaacctactgcaactaacaaaagatttcattggaatgtcatcgggactggaggagacatgctgacacaaatgaacgacgacagggtcggcagaatcgatatcagctggtgtttcgaaattacaaagatggaatttttagttttttcttcatcagttctaagttacagatcattagctatgtcgtaattcattttgatacatcattcagaaggatacaaaattgcttctatgtatatcgttgtgcagttgtgc

SEQ ID NO: 149008 - DNA, 1590 bp, Zea Mays
actattgcagcaactaagtggaaggatgttggtacggggcatcatgttgaatatgatcagagacctgatatttttaggggaactgttcgctatgctagtgtgcatgctcacttgggaagaactgggagtaggagagatgatcttgaatcccttgcatacacgcttatttttcttctacgtggccgcctcccttggcaaggataccagggagagaacaagggttttcttgtctgcaagaaaaagatggcgacatctccggagtctttgtgtggaatctgtccacaacctttccgggattttgttgagtatgtggtgaacttgaaatttggtgaagaaccaaattatgcgaagtgcatctctctttttgatggcattgttggcccaaatccagacataagaccgataaacacagatggtgcccaaaagctaatatatcaggttggccagaagagaggccggttaatagtggatgaaaatgatgatgagcaacctaagaaaaagatcagaatggggatgccggcaactcagtggattagtgtctacaatgcccgtcgacccatgaaacagaggtaccactacaatgtagccgataatagattgctgcagcatattcaaaagggaaacgaagatggcttgtttattagttcagttgcctctagctcaaatctgtgggctttaattatggatgctggcactggctttacatctcaagtatacgaactttctaattactttcttcacaaggaatggataatggaacagtgggagagaaatttctatatcactgcactggctggggcgaataatggaagctctttggtgattatgtcaagaggaacacaatatgcccagcagtcctacaaagtaagcgatacatttcccttcaaatggataaacaaaaagtggaaggagggcttctatgtcactgctatggcaacagctggaagccgatgggcagttgtcatgtcccgcaatgctggtttcacttctcaggtagtggagcttgatttcttatatccgagtgagggcatccacatgcgttgggacaatggctatcgcatcacggcaacggctgccacatgggaccaggcagcctttatcttgagcattccaaggagaaagcctagtgatgaaacacaggagacccttagaacatctgcgtttcctagccagcatgtgaaggacaaatggtccaagaacctgtacctagcttccatctgctatggaagatcggtgtcctgaaacccattttctcgatttggtttggttgccgagaggtatattgatatcaaagacaggtggttttatgatatcagatggagtgttttgaagctcaaaactctgctaacctactgcaactaacaaaaggtaacctatatatgagaaaaaaagaaagaaaagtctactgtgtttcgctaatcgcttccattgggcaaagaacattgtggtctgtttttgtgttgtcgggctgtgtataaattatccaaagtattaggttatgttgtaaatgtagaagtgtacctgctgaaccgttgccatgtatataaagctgtttttttacaaggttgtttcattgtttgcccccgtctc

SEQ ID NO: 149009 - DNA, 157 bp, Zea Mays
actattgcagcaactaagtggaaggatgttggtacggggcatcatgttgaatatgatcagagacctgatatttttaggttcgtttgggaatattagtttgatgtgctttactactcacattatttcattggaatacttttgacatttgtatttgctt

SEQ ID NO: 149010 - DNA, 741 bp, Zea Mays
atgggaaaaagtggtgcctgggatgagaatggtatgttcatctacactataatgaaccatatgaagtgttgccttcccaatggagacaatgggatcataaaaacccttgatgttcctatttacataacaaggtttattgggaacaacattttctacctataccatgatggaaagaacaagctgattacaattgatgcatcagagtacattttcaaggtctctcttctcataaaacgctatgatcatgttatgagtggattggatgctattgcaagggcagagcttaaggaagatgaagcttctcgtggtgactggggtgatgaagacttggacattgttgatgcaaagactctagaatttgtcggcaatgctcgctctattgtatctgtcactccaacaacagacatccctgtcagccaaacctggactcaaaaatcttctctggctagggagcatgcgaccatagggaactttgacacaacagtgaggttgcttatccggcagttgggcatcaagaactttgttccgctgaagcccttatttgttggtctgtatatggacattcattcatttctgagtgcacttgctactgctccggtcatatcagttgttgtcgagaaagactcatggagagaagttgatgaagtgaatgaattaattgagatagtgagggagtacattcttggtctgaagatggaactcaagggaaaggaattgagggatgatgtgacctgccaatag

SEQ ID NO: 149011 - DNA, 2577 bp, Zea Mays
atggtgacggccaaggaggccgcggcggcggcggcggccatggacgccagcaagtacgtgcggtacacgccggagcaggtggaggcgctggagcggctctactacgagtgccccaagccgagctcgctgcgccgccagcagctggtccgcgactgccccgtcctcgccagcgtcgaccccaagcagatcaaggtctggttccagaaccgcaggtgccgggagaagcagcggaaggagtcgtcccggctgcaggcggtaaaccggaagctgacggccatgaacaagctgctcatggaggagaacgaccgcctgcagaagcaggtctcgcagctcgtctacgagaacggctactaccgccagcagacgcagagcgcggggctggcgaccacggacacgagctgcgagtcggtcgtcaccagcggcccccagaacgtggccgcggtgctgccacaagcccagccgcgcgacgcgggccctgccgggctcatgtccatagcggaggagacactgacggagtttctgtccaaggccaccggcaccgccgtcgagtgggtccagatgcccgggatgaagcctggtccggattctattggaatcattgccatctcgcatggctgccccggtgtcgccgcgcgagcttgcggcctcgtgggcatggagcctgcgaaagtcgctgaggtcctcaaggaccgcccgctgtggctgcgagactgccgatccatggaagtggtgaacgttctccctgccggtaccagtggcacagtcgagcttctctacatgcagctctacgcccccacgacgctcgcgccagctcgcgacttctggctgctgcggtacacctccattctcgacgacggaagcttagtggtatgcgagagatcactcggcgccaaccagggcggcccaagcatgcctctcgtccagccttttgtcaggggcgagatgcttcccagtgggttcttggtccggcctagcgacggcggaggcagcgtcatacacatcgttgatcacatggacctggagccttggagcgtgcccgaagtcgttcgcccactgtacgagtcgtctgcgatggttgctcagaagatgtcaatggcggccttgcgctatctcaggcaggttgctcacgaagataccgcccattctgtggtaaccggcgggtggggacggcagcctgcttctctacgggctctgagccagaagctcaccagagggttcaatgaagctctcaatgggctcgctgacgacgggtggtctgtggtcggaagtgacggggtggacgatgtctgcgtctctgtcagttcatccccgagtagagtggtcagctgcaatgcaactttcagtaacggacctgtagtcggcactggcagcagcagtgtgctctgcgcaaaggcatcgatgctgctgcaggacgtttctccgccagagctcctgcgcttcatgcgggagcagcggtcgcagtgggccgacagcaatctagacgcgttcttcgcttctgcgatgaaaccggatttctgcagcttgcctattcctcctcgccttggagggtttggtggccaggtcatacttcctctagcccacacgtttgaccctgaagaattcctcgaggttataaaagtaggaaatgccggtaactaccaagacgcgctcctgcaccgtgatctgtttctgttgcagatgtacaacggggtagacgagaacatggcaggcacttgttcagagctcatctttgcccctatagacgcatcgttcagcgacgactcgccactgctcccatccggctttcgtatcatcccgatcgacgctcctcttgacacgtccagccccaagtgcacgctggaccttgcctccaccctcgaagccggaactcccagaagcaggacaagcgggagcggcggccctggaactgccgccgccgcttgtgccggctccaaggccgtgatgacgatcgtgttccagtttgccttcgagagccatctgcaggacagcgtcgcagccatggcgaggcagtacgtgcggagcatcgtcgcgtcggtccagaggatcgcgctggcgctctcctccgcgcgcctggtcgtccctcatggcagcggtgtcagccacggtgctcctgctgctggtccggaggcagccacgcttgcaagatggatctgccagagttacaggttccatttcggggctgagcttatcaaatccgcagacggtagcggctgtggtgaagcagtgctgaaaactctctggcaccatgccggcgctatactctgctgctctctcaaggccttgccagtgttcacgttcgcgaaccagtccgggctcgacatgctggagacgacgctggtggcgctgcaggacatcgcgctggagagagtgttcgacgaccaagggaggaagaacctgtgcgcggagctccccggcgtcatggagcaggggttcgcgtgcgtccccggcgggatgtgcgtgtcgggcctaggccggccggtgtcgtacgagaaggcgctggcgtggaaggtgctcgacgacggcagcggcggcgtgcactgcgtctgcttcatgttcgtcaactggtcgtttgtgtga

SEQ ID NO: 149012 - DNA, 1747 bp, Zea Mays
cccacatgtcggagtgctggcgttttgattctcggctctactcgaaggcgatgaagaaattaagaatacgccaggctccttgtcgctcgtaaaatggaggtcgcgacggcgacggaggcgtctgcgccggcggcaagcggcggcgcggcggggcagggccacccgttcccgtggctagacgctgccatctctgagccctactacttcctgcatctcctcgccttcttctcttactttgcggcccgcagcgcggcgctctccgccgacgacggaggggagctccacgaccgcctcctccgtagggagatccaggcagtgctcgtgttcctggtgctcttcgtagtgaagattgtgaaagaggaaacctgggaagcagtaattgctgactcgttgctttatgcgaagggtttattgctggcagttactttggttattgattggtggctggcctttgcctactttctgggatttcttgttatatatgctgtagctcaacagccaccttatgatggcctaggccattcaaatcacttgaccccattgcaacttgaaagtttgctaactgaagagccaacatcacgattttggctggtatttctgtacatgtttttaatggaattctaatattgttatctcccaaatttccagtacattcctgcccgctttactattttgtcaagacttgtagcctgtaggtgcctacaattgttacaaatgtgtcactctcatcttatagaaggattagaggagcctgagaagaatttcatatggtttgatgggctgatggaaaccagttaaattccttgcccaactgcgcaacttgatttagagacacagttgctatataactttagtgcctatcattaaaaatatagtttgtctacttcgatagcaacggtatcaaaatctgactaccttatgaagtttggagtcttctcatttcttttggttagtgagggaacttgtagggggttcttttttaagaattgccccaaaagtttcttgcccataaagttaggtgtatgtttcaatttccctggttctttgatgactggatatttttatttcaatgcaaacaggtagaattccgaacttcattttcagcaaaatgtgtacaagcaagcagcattctgcctgaactttctatcgtgtactccaacaagaacatctcttttggaacaattgaccttgggcatttcccaaatgctgcagcaaagtttgggatatccatgtgggatcatctccccacttacatattgtttgacaaggtgactgaagtttctcggtttccagaaatcacaagtgaatcaaaagtatttgtgccaaaagttactaagaaacttctttgccagcattttgatctcgacagacgattgattggatacctatccacctgatctgacaccgatcccatatgcctcaaaggatggggacatctcccttttttgtcgctgaaccggacatctgtgtgtcagcagcaatcacttcaggggggtatcgtgagccttgtattattcggcgaactgcttattcccttttaattaaggcccagtaaactttgtggcggaaaaacacacacacacacacacaaccaatttctgtctaatctgtctgatactgaattatagaatttcactaccatgcagaggtttctgtaatgatttgccgactatgttttgtcacattgtgactgcagcagcagtcaattcagacagcatccacttccactgagccaggggtgtcccgg

SEQ ID NO: 149013 - DNA, 1750 bp, Zea Mays
cccacatgtcggagtgctggcgttttgattctcggctctactcgaaggcgatgaagaaattaagaatacgccaggctccttgtcgctcgtaaaatggaggtcgcgacggcgacggaggcgtctgcgccggcggcaagcggcggcgcggcggggcagggccacccgttcccgtggctagacgctgccatctctgagccctactacttcctgcatctcctcgccttcttctcttactttgcggcccgcagcgcggcgctctccgccgacgacggaggggagctccacgaccgcctcctccgtagggagatccaggcagtgctcgtgttcctggtgctcttcgtagtgaagcagattgtgaaagaggaaacctgggaagcagtaattgctgactcgttgctttatgcgaagggtttattgctggcagttactttggttattgattggtggctggcctttgcctactttctgggatttcttgttatatatgctgtagctcaacagccaccttatgatggcctaggccattcaaatcacttgaccccattgcaacttgaaagtttgctaactgaagagccaacatcacgattttggctggtatttctgtacatgtttttaatggaattctaatattgttatctcccaaatttccagtacattcctgcccgctttactattttgtcaagacttgtagcctgtaggtgcctacaattgttacaaatgtgtcactctcatcttatagaaggattagaggagcctgagaagaatttcatatggtttgatgggctgatggaaaccagttaaattccttgcccaactgcgcaacttgatttagagacacagttgctatataactttagtgcctatcattaaaaatatagtttgtctacttcgatagcaacggtatcaaaatctgactaccttatgaagtttggagtcttctcatttcttttggttagtgagggaacttgtagggggttcttttttaagaattgccccaaaagtttcttgcccataaagttaggtgtatgtttcaatttccctggttctttgatgactggatatttttatttcaatgcaaacaggtagaattccgaacttcattttcagcaaaatgtgtacaagcaagcagcattctgcctgaactttctatcgtgtactccaacaagaacatctcttttggaacaattgaccttgggcatttcccaaatgctgcagcaaagtttgggatatccatgtgggatcatctccccacttacatattgtttgacaaggtgactgaagtttctcggtttccagaaatcacaagtgaatcaaaagtatttgtgccaaaagttactaagaaacttctttgccagcattttgatctcgacagacgattgattggatacctatccacctgatctgacaccgatcccatatgcctcaaaggatggggacatctcccttttttgtcgctgaaccggacatctgtgtgtcagcagcaatcacttcaggggggtatcgtgagccttgtattattcggcgaactgcttattcccttttaattaaggcccagtaaactttgtggcggaaaaacacacacacacacacacaaccaatttctgtctaatctgtctgatactgaattatagaatttcactaccatgcagaggtttctgtaatgatttgccgactatgttttgtcacattgtgactgcagcagcagtcaattcagacagcatccacttccactgagccaggggtgtcccgg

SEQ ID NO: 149014 - DNA, 1254 bp, Zea Mays
cccacatgtcggagtgctggcgttttgattctcggctctactcgaaggcgatgaagaaattaagaatacgccaggctccttgtcgctcgtaaaatggaggtcgcgacggcgacggaggcgtctgcgccggcggcaagcggcggcgcggcggggcagggccacccgttcccgtggctagacgctgccatctctgagccctactacttcctgcatctcctcgccttcttctcttactttgcggcccgcagcgcggcgctctccgccgacgacggaggggagctccacgaccgcctcctccgtagggagatccaggcagtgctcgtgttcctggtgctcttcgtagtgaagattgtgaaagaggaaacctgggaagcagtaattgctgactcgttgctttatgcgaagggtttattgctggcagttactttggttattgattggtggctggcctttgcctactttctgggatttcttgttatatatgctgtagctcaacagccaccttatgatggcctaggccattcaaatcacttgaccccattgcaacttgaaagtttgctaactgaagagccaacatcacgattttggctggtagaattccgaacttcattttcagcaaaatgtgtacaagcaagcagcattctgcctgaactttctatcgtgtactccaacaagaacatctcttttggaacaattgaccttgggcatttcccaaatgctgcagcaaagtttgggatatccatatcatctccccacttacatattgtttgacaaggtgactgaagtttctcggtttccagaaatcacaagtgaatcaaaagtatttgtgccaaaagttactaagaaacttctttgccagcattttgatctcgacagacgattgattggatacctatccacctgatctgacaccgatcccatatgcctcaaaggatggggacatctcccttttttgtcgctgaaccggacatctgtgtgtcagcagcaatcacttcaggggggtatcgtgagccttgtattattcggcgaactgcttattcccttttaattaaggcccagtaaactttgtggcggaaaaacacacacacacacacacaaccaatttctgtctaatctgtctgatactgaattatagaatttcactaccatgcagaggtttctgtaatgatttgccgactatgttttgtcacattgtgactgcagcagcagtcaattcagacagcatccacttccactgagccaggggtgtcccgg

SEQ ID NO: 149015 - DNA, 1259 bp, Zea Mays
cccacatgtcggagtgctggcgttttgattctcggctctactcgaaggcgatgaagaaattaagaatacgccaggctccttgtcgctcgtaaaatggaggtcgcgacggcgacggaggcgtctgcgccggcggcaagcggcggcgcggcggggcagggccacccgttcccgtggctagacgctgccatctctgagccctactacttcctgcatctcctcgccttcttctcttactttgcggcccgcagcgcggcgctctccgccgacgacggaggggagctccacgaccgcctcctccgtagggagatccaggcagtgctcgtgttcctggtgctcttcgtagtgaagattgtgaaagaggaaacctgggaagcagtaattgctgactcgttgctttatgcgaagggtttattgctggcagttactttggttattgattggtggctggcctttgcctactttctgggatttcttgttatatatgctgtagctcaacagccaccttatgatggcctaggccattcaaatcacttgaccccattgcaacttgaaagtttgctaactgaagagccaacatcacgattttggctggtagaattccgaacttcattttcagcaaaatgtgtacaagcaagcagcattctgcctgaactttctatcgtgtactccaacaagaacatctcttttggaacaattgaccttgggcatttcccaaatgctgcagcaaagtttgggatatccatgtgggatcatctccccacttacatattgtttgacaaggtgactgaagtttctcggtttccagaaatcacaagtgaatcaaaagtatttgtgccaaaagttactaagaaacttctttgccagcattttgatctcgacagacgattgattggatacctatccacctgatctgacaccgatcccatatgcctcaaaggatggggacatctcccttttttgtcgctgaaccggacatctgtgtgtcagcagcaatcacttcaggggggtatcgtgagccttgtattattcggcgaactgcttattcccttttaattaaggcccagtaaactttgtggcggaaaaacacacacacacacacacaaccaatttctgtctaatctgtctgatactgaattatagaatttcactaccatgcagaggtttctgtaatgatttgccgactatgttttgtcacattgtgactgcagcagcagtcaattcagacagcatccacttccactgagccaggggtgtcccgg

SEQ ID NO: 149016 - DNA, 728 bp, Zea Mays
aacataaaactgtatgaatctaatgcagcagattattatacaataatccacacatcctaccatacccattgcatcgacttagctgggggcgaggcaacatacccgaaaacggtgacccactcctcctcgtcgacccgtccagcagccggagccgaatctctgggcatctccggccgcgccacctccctggggggcggcagcgtgatcagcgctaccttctgctgctgtgactgctgacccgacggcgtcgtcggggactgctgctggtactgcacgacgccatccatcggtgatccctccctgggattctcctccctcgagggggtccaccatgccgagggccccggcgagccgttggaccgcagcggcgaggagaagagaacggctccacgcgggggctgaggcgagggggtcgtcgtcgcctgcggaggcgtggccggctgcctggagggggagaggtgggagaggtcgtcgagggagagcagcggcggaggcggcggcggggtggaggcctgcgcctctcgccgcatcgaggccggtgggaggcgaaacgacgaggagatcggggacgagaggtcccgcaggaacggcgggtggcggcgacggtgatccggcctggaggcactcatgacggtggcggagagctgaaaccctagcaagagaaagcggagttccactgccgagtgcgccttgggtttttggaagcctcacgtgtgtgaatgtgaaga

SEQ ID NO: 149017 - DNA, 876 bp, Zea Mays
atggcgagggcagcgctgctgtccgctgccgcgtcgctgttgccaccactgttacgtgcgggagcgcgagatggatcgcctccagctcggtgtcgtatagtagtgtatatggcaatgagcgagccgagctccgacacctcgtgcacgtcctcctgctcgtccggaccctccacgtccaccagcccgcgcgcggcgccctccgccgccgccgccgccgcatcgggcggcggcaagaaacgtccgcgctcagacgacggcgggtccagctccagctccgccccggcgtaccgcggcgtccgcatgcgcgcgtggggcaaatgggtgtcggagatcagggagccccgcaagaagtcgcgcatctggctgggcaccttcccgtgcccggagatggcggcgcgcgcgcacgacgcggccgcgctcagcgtcaagggcgcccgcgcagtgctcaacttcccgggcctcgcgcgccacctcccgcgcccggcctccctcgcgccgcgcgacgtccaggccgccgccgcgcgcgccgcgctcatgcaccactcgtccgcaggctgctgctgctgcggtggcggcggcggcggcggctctaccgccaccgccacctcgtcctcatcctcctcctcggcggcggcggacgtcggcggctgcggccagcggcgagatggcgccgctgcgcacgacgagcctgagcctgagcggcagcccctagaggtggccgccgagctggtgttcgacgagctggcgccgctgtgggtggaggacgtggtggagctggggccgtccgccgatcacccgtggccgtggacgccgtgcgatgggctcgacatcgccgccggcttccaccctctccctctcctgtgggacgactactag

SEQ ID NO: 149018 - DNA, 902 bp, Zea Mays
gactaagacttgttctatatgcaccccaacaaggttacaagaacagctgcttcaacaaagctcccaggtctgagatttggtgaaatcacagtgaagaagggtttcagtttcaggctcggcgagcaaacacttcaaccaaagcccacctgatgatacatgactcactctggtcaccgagacactccgccaataaacaaatcacctccccctcaccttcacaccctctgcttctcccaccctgtacatagcatggcatagcatagcatagcgtcccaccacccgaaaccagcacaggaccgaacaaaaggttccaactccaaccgatcttgttggagagcgcctcactgttgcacggcctgataactggagcggctggaagggaagaccgggatggcgccaaaatcggcgggcctcatgccgccctggtgatgtccatggtccctcctcgctctcgacttctccacccgggttcgccggaagacttcttggatttgccggtcgttctcttttagcatctcgtcgacgacgctgcccgaagggcaggtcaggggcccagaatggtggatcttgttgcccttggatccgtagccctgttttgtcaaagccatgaaatggtaggaagttttacttacaatagctccatcagccctaatagtgttcctgtcatccttcttcgggaacacttgatcgtacttcccactgttactgagatgctcattgatggattccgacagcctccgcccatgagaaaatgctccagcttgagcaaccattgtccaactactatcatctgctcggggacctgttctagatgacacaaccacagggtggttcgcaacaccagggacctgaagttcatcatttttgccacctccagcctttgatggctgactctgattaac

SEQ ID NO: 149019 - DNA, 2668 bp, Zea Mays
cttccgtcgtcgtcatcttcttcgtcggagcctcggaggatacgaggggcccctgcgcttcgctacattctcaacgaagcccctctcgcagcgggcagaggccgtacggcggtgcgtaccccaccggcacggggccgcgtttgcagggtgccgccgtactaccacacaaggcgcccttatttttcccttgtgcgcgcccgcaatgcgctcttgagatccccggctcctcctcctcggtctgcttctcctgctccggctgctggccctggccacctacccggagcgggaagagcggcgggagccctgcattttgttccggttctccgcgtgcctcatccgcccgcccgcgatccccgggaggactcttgggaagccctccctgtacgtgactactgggacctccaccaagctcttcaagttccaggatcagttcctctgtattgggcaatctctagacctctgtagattatcagcctgattcacaacttgttgcaggtgcaagaattcgactgcagattttaatcgtgattgacacgattcctggtttgagggcatctgttggtgtttcgagctaacaggctcctttctccctgctcgaagtttcacttacttcaacatgtggtttctatggatccagacttccaaagttggaatctgatcactcgcgtcagtgcttctcagctcccttgtttgccgttatggaggagcagaactcgtggctcaggaccaagttctccaatactgtctatgctagggtggatccccggagagtacctgttgctccgcttagcaaggatgttgagcggaaactgcacaaattcttcaagatgaagaagactgtatcgatgcctgttgatcgggatgatggagacacagggactgcattcaagcactgtgctagcttgccgctagttcgatcccagcctcagcttgacagggaaaaggtcaacaagcccgagagggcgagcctggagattccttcaagctcccagatgatctcagagagttgcaagactccaaaagcaaggagcctggtcaagaccccaagttcgatgatgctcctgagctacttgaacaagtcaccgtcaaatcaagggcatagttctcacaaggcttatggatccagaccgagatcgaagtccccccttcctagtattgtgccttccgaagtgtttagggaagcaaagtctagcagccagaggtttgcaagccctcctccacagcgaggaggatctgcaaagagtatatatggcaagtcatttggtaggcaggtctctgatatgggtcaaagtcctagatggcgctcaactccagttgtatctggtaagcacaagtctcaaaaggataatgcttggacaaggaaatacagtggtggaaggagggttagtgcagtgaaccctgctgatgatcgaagggcacagatggttagaatgaaccaggcagtgcagacgacagttgattggacactcgatccgtccaagctgctcgtggggcacaggtttgctagtggagcatatagccggctgtacagggggtactatgatgataatccagttgcgatcaaatttatccgccaacccgatgatgacgacaatgggaagatggctgcaatgcttgagaagcagtataacagtgagatcaattcattatctcacctgtaccacaagaatgtgatcaagcttgtagcagcctacaaatgcccaccagttttttacattattaccgagttccttcctggaggctcaataaggtcatacctaaacaatccagagaaccaccccatccctctagagagaaccatatccatcgctctggatgtcgctcgtggcttggagtacatacattctcaggggatcgttcaccgtgacatcaagcccgagaacattctcttcgacgagaacctctgcgtgaagatcgctgatttcggcattgcctgccaggaggccttatgcgatgtgctcgtggaggacgaaggcacttacaggtggatggcgcccgagatgatcaagcagaaggcgtacaaccgaaaggtcgacgtctacagcttcggactgctcttgtgggagatggtgtccggtagaatcccttacgagaacctgaccccttaccaggtggcttacgcagtagccaacaggaaattgacgccaacaatttccccagaatgtccaccggccctcagatccctgattgaggagtgctgcgccttgcggcctgacaagaggcccgacttctggcagatcgtgaaagtgctggaacagttccactccgttctcttgcagggtggctgcctcgacataccgaagagcggccccggcacctgccaggatcccaagaagcggctcatgcggtggattcagaaactgaagccgaagcatagcgcctgaataactaaactcttatagttgtagcatcgttgcagccgcagtttttgtcaggttgggtatgctcagtagtttagatctcgattcaaggaaccagcgttccaaggatgctcttagctgtgcatccgctgatctgcaatatagatcttacagtacatggttatgcttttgcgtttttgccttctcccttgttgaatttatcatggtaccgtagcatgtgcctctcactcgttgaggtggaagcatcaggaaaagcaaaagggcgtatgcttaatacaattcttgcg

SEQ ID NO: 149020 - DNA, 1071 bp, Zea Mays
cccgaaaagcccataaaaccccatgactctctctctctttctctcaccctgtcttcctcactcccaagagaagccagccaagccaaacctgccaaaggcgacatttttctcatggactccggcgcagccaccgccacccgagagcgccacccgccgccctcgccggtgctgatgcagatgtcgatgccccaggcatcggcagacccgtctaacacattcccgacaacgttcgtccaggccgacaccaactccttcaagcaggtggtccagatcctcaccggcacgccggagaccgccgaggccgcggcgtcgagcggggcccaggcgccgcctccagcccagcagaagccagcgctcacgcccccggggcccaagaagccggctttcaagctctacgagcggcggagcagcatgaggagcctcaagatgctctgccccctgctcccggccttcgccgccggcgactccgtggaaggcttctccccgcgcgggttctcgcctcgcgggatcgagctgctgtcgcccagcatgctggacttcccgtcgctagcactcgggagccccgtcacgccgctgccgccgctgccgggctcccaggaggctgcggccgccgaggaccgcgccatcgccgagaaggggttctacctccacccgtccccgcgtggcaatgccggcgccggcagcgacctacagccgcctcccagactgctcccgctcttccccgtgcagtcgccgaccgcccggccgtgacccgcttcttgttcttggcttcccactctcttcctctagggtctaggcggctcgctcttgctctgtatgctctgctactcgctgctgatcacggcactcctcaaggttgaggacgaccacctgatctatggatgatttgctcccctcgcctcccccctgtcatggcctttgggatgatgattcctatatgtccagtccccatgttgtaattttggtgtttgtaacagtaattcggcgcataagagggattaattgatcatctacttcgagtgctcttgctctctgtctctgatgaatcgtatgcagattttagcttggcat

SEQ ID NO: 149021 - DNA, 198 bp, Zea Mays
aaaactgcattgggtaatattttgattactggtcatgcatcgacaaatgtgtaagtagcaccaaagctctttaagaagctcaaatcatttatgcgatgtgaggcgacttttaacaaagtgaatcgaatttgcataccttacacctttgaaaagtgtctgaactcgtacatcttggaataaaacaacaattttttgttg

SEQ ID NO: 149022 - DNA, 570 bp, Zea Mays
atggcactgtcggccaagggcaaggaggtctgccacaggtcctgtgacgtcctcgacatcaacgccgatgagtggggcaacgagaataggagcatgaccaccgagctcagggagcagcagtaccggctcaggaaggcactggaagaccgggtgcaagtcagtagggagaccgccaagatgtggcgatgggacaagctccatcagatatggattggaggaccttacaaaacccaacaagctcaattcaaaattcaagaggaacagcagcacgccacgagcagcgacgccagagaagagggagttccaaatggcgattacaatgaagatcagacgacaaaagacatgagcgaggtgctggaaatccacatgcagcacacctatcagtttatgtttcagctagggcttattggctgctccgccgaggtcatgcaatggccctactgggagctcgacgagatggacgacacactcacctacagaggggagctagggattttgcagctcctactagagaatggcattagagtaaatgaactaacaaggatagaggttgctctcgtcgtcccataa

SEQ ID NO: 149023 - DNA, 963 bp, Zea Mays
tcacagcgaaccaagagagcagggtgtgggcgaagagaccccagccagtcgatcgttcaagaaaaataccagcttaccaacaacagcagcagcaagcccacccgttcgacgacatggcccgcctcggcgccggcgccgtgttggcgctcctagtggcggtcgcggcggtggccgcgttcctcgcggtgccggcctcggcgaagtccggggagctgagcgcgatggggttgctggcggcgaagggcggcagcggcgcgggcccgcagaagtgctcgggcgcggtgggcgagtgcgacgtggacgaggcggaggagctcgggctgagcggcggcggcctcggctccgacgacgcggtgcggcggacgctggcgcagcggaagccgaccaaccggtacatcagctacgcggcgctgcgcgcggaccaggtgccgtgcaacaagcgcggccggtcctactacagcaactgcgaggcgcagaaggccgccaacccctaccgccgcggctgctccgccatcacgcgctgcgcccgcaacatgaactgagcccagcgctagctgctgccggggcgcgccgtcgtcgccgagccggtcggtctggtctggtctggtctgcctgcctgccaggtcacgcagcctggctccaccgatcgcacaccatacattgacgtcgtcgtcgcggccgtacgtgccgttggacggtggaggaggcggtggcgctacgacagtatatatatacacaattacacatacacaccccaaaaagaaaagaaaaaaactactgccattgctgtcgttgtgcgtagcttctctctatatatatacccgtatttaaattctcgacaaaatttgtttgaccacggtgatctgtcatatatgtcgtccattgatttgtgttaatttgacaaaagacgttgaaaagaagctgcactactctactgtgcatcagattatcttgtttcccgcc

SEQ ID NO: 149024 - DNA, 745 bp, Zea Mays
ggaacaattggagtaccagaggcaacaatctgaataccagagacaacaagccgagtaccagaagaagagagactagtattatgcaagcctccatgcccaaaatcaagctcttctctcgcaactagcccaacaagcgggcgtcccgatgccgacatatgggatgccgcctccggactttgcactgccaatgccaatgttggcgcctccacctctgcctccgcctacgtcacaattccctatgggatttcagacaccacccgcttcagttgccgcacctggagatgggtctgggcaagacgacacaacacattcgtgggtcaacaacctattcaacacgcagagtccagccggaggaggtggctactcgaaccatccagacgatggatatgattgatgtgtcgtgatgtttatttatgaaacactttgcaacacttgtttgtgagacacaatttcagtttgcaacaaccgtcgaacctatatgttgatgttaaatttgtgaatgttattatttatgtgagaatatttgtgattgtgaatacttattagaatgtgtatatttgtgattgtgaatgtgaatgtgtatatgtgcatgaatctgtttttgttttgtaaatgtcagattttttaaaaaacagaattttgtgtaaattctgtaatttgttatgtccgacggcctagtggtagccgtcggacataacacatggttatgtccgacggcattaactaccgtcggacataagggatg

SEQ ID NO: 149025 - DNA, 1646 bp, Zea Mays
gcagctaagctcagaacctccctctatgctgatgacgcggctatcttcatcaatccaacccgtaatgacctgcaagcggtcagacagatcctcaatgcgttcggagctgcaacgggtctaacaacaaattttgagaaaagctccatccaccccatccgttgtgaaaatgtagatttgtccaacaccctccagccgttcccgggatgctgcaaaaccttcccttgccaatacctcggccttcaactccacacccgcccactacaaaaaattcatgtccaaccactagtggagaagatcggacagcgtcttgccggatggaaaggtccactgcttaaccgcgcaggacgcctcacccttgtatcttcagtgctctcctccatgccgatctaccacctaaccatattcccccttgcgaaatgggccacaaagcaaattgataagattcgacgctctttcctatggaaaggcgaggataacgcgcacggggggcattgccttgttaattggaaaacggtggctagaccaaaggacctaggaggtctaggggtgctagatcttgagaaattcagtcgtgccctccggctacgttggctttggcaagaatggacagacagctcaaaaccttgggaggggctccaggtcccttgcaacaagcttgatcgcctgctgtttcaggcatccaccacggtggtgattgggaatggcatcaaagcgaagttctggcaccatggctggctggatggggaggctccacgcaacctggcacctcacctctacaagttgatcagaaggaagaataaaactgtggcccaagaactgactaacagtgcttggattcagtctctgagaaggaaaatcacaaccaccacgcaacttgaggaatttgtctacctctggactaggatccgtcaggtgagcttgcagccggatgtagaggacactttagtctggaaatggacacagcacggtctctactcctccaactcagcctacagagcccaattcttgggatcctatatcaaccacaagatcagcctcatttggcgggctagaacagagaacaaatgtaaattcttcgcttgggtgctcatccaaaataaactcctcactgcagacaacctagtacgtcgtggatggccacaccacccatcttgcgccctatgcaatggacctatagaatcaggactccatctatgcctaacctgccccttcgctcatgaggtctggaacacagttcttgcttgggaaagcttttccctgccgcaacatgtggtttggagcaacatctccagcattagcgagtggtgggagaagacggagactctctttccgcaggatcgcaaaagagagttcaatggcctcgtcatctacactatgtggaacctttggaaggagcgcaaccgaagaatctttgagcattgctcgctgccaccgctccagatcgcagagagagtaagagagtgtgtcttgctctataaaagggcgtccaaccgccttggcttgtactagggttgtctgtcgtgttccttcttaggtgcccaatcctatggcctgagggttgccgcccctatgtactctaacttttttcctctctctcttaattgaaaggcagagctcctgccactttgttcaaaaaaaagagtatt

SEQ ID NO: 149026 - DNA, 1520 bp, Zea Mays
cagacagagagagtatgttggtatgtacaaacaaagcacatgtgcatgctggctggagaggtagatatgacggagatcagacaccaggcaagctgcaagcacgtacaagaggggtcaatcaatcaaaggagtggtaaatcaaaagtgcaagctagcccatcagagaattcaggaccaaaccaatgcagcagcaagggccagccaggccgcaggaatcatcaggtcaggccaccactgcagcagcagcagcagctgctgctgctaactgcatcacctcacatactttcccctctcccttcctcagctccctttaatacctcaccctcctctcctcccttctctgggctggccggatctcttccctgcagatcgagaggcactgccaacaccaccaccaccaccaccacaccatgctcaacatgatgactgatctgagctgcgggccgtcgtccaaggtcaaggagcaggtggcggcggcgccgacgggctccggcgacaggcaggggcaggggagaggcaagatcgagatcaagcgcatcgagaacacgacgaaccggcaggtgaccttctgcaagcgccgcaacggcctgctcaagaaggcgtacgagctctcggtgctctgcgacgccgaggtcgcgctcgtcgtcttctccagccgcggccgcctctacgagtacgccaacaacagtgtgaagtccaccattgagaggtacaagaaggccaacagtgactcctccaactctggcacagttgcagaagtcaatgcccagtactaccagcaggagtcctccaagctgcgacagatgatccacagcttgcaaaacgcaaacactaggaacatagtgggagattccatccacaccatgggcctcagggatcttaaacaaatggagggcaagctggagaaagccataatcaagattagagctagaaagaatgagctgctatacgctgaagttgactatatgcaaaaaagggagatggatctgcagactgacaacatgtacctgaggagcaagatcgctgagagtaatgaaacggggcagccggcgatgcacatgacgatgggagcgccgccgacgagcgagtacgaccacatggcccctttcgactcgagaaactttctgcaagtgagcatgcctcagcactactcccatcagctgcaacctacaaccctccagctcggatgatgaaatcagcgctatacctggcggcgcccggcccccaatcgagatagatcacgcatgcagttatatcatgtgccaaatcgagatctcaagtaactctacgtacgtttgcttaattattaataattgtgattagtgcaactgttagggtatatatatttgtgagtgccaccactgtgtgcgtgcatttgtacgtgtgaatttagctgttgcatctactactattgtaccctccggccaggccatatcatcagaaacgcgggtttatttacgcatacttatatatatatgatttgtgtgctttatatagattgaaaagagtatgttggcctc

SEQ ID NO: 149027 - DNA, 755 bp, Zea Mays
ggccctagctgcgactgcgatgcaagcatcgcacgcacccagccaacacacacagagacaccagcaggggatctgaggccggccggcgccggacggggcacgtacccgtacacgcatgcagcttgccatgtctccgtcgtcgtcgctacgccgcaccgcggcggccttcgtcttcgtcgcgctcctcggcctggcgtcgtcgtctctgctgcagctgcaagcggccaggacgacgccgagcgatggccagggacggcgtctagaaccgcggcagaagcaggaggaggaagaagtgcacgcagcgacgacgacgagtagcagtagcaggtccggatctacacctgcgtcagcgtcggtgcaagaaaggccgcccccgctcgagctcgaccttctgccgccgccgcccaccatcactgttgaggaggcatcgtcgccaccccgcagccgcatgctgggctcggtgcccagccccggcgtcggccactagctacctctccttctccgtcttcccacctccacgccccgtgcgccggcccatgttcttccaccatcgatcgccacacctcgacctcgtgccaagtactggtagcgcaaccatgcgagcgcgcgcgtactattaatattgattataccctctgtaatctcagttccagagttcctgcttcagtttcagaaagagagatctcctcacaagccatgacgcgcacacacatcacatgcatcagcaccggagtttcagattcatatacatgcta

SEQ ID NO: 149028 - DNA, 3420 bp, Zea Mays
tcagtcgtctgtgtgctggttgcaagttcagctaacccacccatgcaagatttccgaatcgcttcggcgatcccgacggagacgccaacccaatgcccacccatgcaagatttccgaatcgcttcggcgatcccgacggagacgccaacccaatgcccccctcacaccgcctctcgctgcttctggccgtcgccgtcgtcgtcgccgccacgagtgtccgcgttcacgtccacgcgcagggcagcgtcctcttccccacgccggcatccacgaacgtctccgtcacatggaccgtcagcctcaaggcagacggccacggcgcgcagtccttcgactacatggacggcacgtccgcgagcgtcttcctcctccagtccgtgcacccgacgccgcaggaagggctctgcttcgccgcgtgcttctactgcgtcgcgccgtgccgggccttcctcttcggcgtctgcgtcgtctacgtcgacggcggcggtttcctgagctggccgaacgcgggcagcccgcaggtggtctggtccgcgaaccggggccgcctcgtccgcgagaacgccacgctcagcctcacggccgccggcgacctgctgttacgggacggcggcggcgggggcgtcgtctggtccaccaacacctcaggccggtcggtcgcaggcatggccgtgaccaggtccggcaacctggtgctgctcgacggcaagaacgcggcggtgtggcagtcgttcgaccacccgacggattctctgctccccggccagccactggtggaagggatgcggctggcaccaaacgcttccagcacgaactggacggccagcggccagctctacatcaccgtcctctccgatggcctgtacgcgttcgccgagtcctcgcctcctcaactgtactaccaaatgacggtgaccaccaacaccacagctggacctggaggcaggaaaacctacatggccctgacgaacggctcgctggccatcttcgcgccctcctcctccgttaacgtatcgactccacagcctgcagacggcgcgaccaacaagacggcggcgggcgagatggagtacgtgaggctcgaatccgacggccacctgaagctgtaccggtacacaggaacggaagggtgggctatggcgcaggaccttctgcaggggcaggtaggcagctgcgcttacccgactgtctgcggcgcgtacggcgtctgcgtcagcgggcagtgcacgtgcccatccgcgacgtacttcaggcaggtcgacgaccgccggaccgacctcggctgcgtgcccgtggccccgatctcatgtgcctcgacgcaggaccaccggctcctcgctctgagcaacgtttcttacttcaactacgtggataccaaggccgcgctgcctcggatggtcgacgaagagagctgcaagaaggcatgcttgcagaactgctcctgcaaagccgcgttcttccagtacggcggcaacgacacctcccagggctcctgttacctgccgacgcaggtcttctcgatgcaggtgaaccagtggcaagaaactcactacagctcttctgcgtacctcaaggtgcaggtcacaaggtctcctcctcctcctcctgtccctggtccctcgaattcgaatgggacggccatacccgcagggaaaggaaggactggtgaagctgccatcgttggctccgcacttgcgggggccattgctttactagccgtgatcgtcgttacctcggttgttctccggaggagatatcggcgtagagatgacgaggacgacgaggatggtcttggagaagtgccaggtatgatgacgaccaggttcacgttcgagcagctgagagcagcgacagagcagttcagcaagatgatcgggaaaggagggttcgggtccgttttcgaggggcaggtgggcgaccagagagtcgccgtgaaacagctcgaccgaactggccaaggaaggcgggagttcctggcagaggtggagacgatcggcaacatccaccacatcaacctggtgacgctggtcggtttctgcgcggagagatcccacaggctgctggtgtacgagtacatgcccaatgggtcactggacaggtggatctactcctccgccgccgccgccgccgacacgacgccgctggactggcacacgcggcgcagagtcatcaccgacgtcgccaggggcctagcgtacctccacgaggagtgcaggcagcggatcgcgcacctggacatcaagccgcagaacatcctcctagacgacggattcggcgccaagatctccgactttgggctgtcgaagatgatcggcagggacgagagccgggtggtgacgaggatgcgaggcacccctgggtacctggctcccgagtggctgacgtcgcagatcaccgagaaggccgacgtgtacagcttcggggtggtggtcatggaggtcgtcagcgggaggaagaacctcgactattcccagcctgaagacagtgtccatctcatcagcgtgctgcaggagaaggcgagggacgggcggctggaagatctggtcgatgctcgtagcgacgagatgcggggtctccatagggaaggagtgattcagatggtgaagctcgccatgtggtgcttgcaggttgattacaaccggaggcctcagatgtcggtcgttgtcaaggtactggatggcgccgtcgacgtggaaactggtatagaactcaactttgtggctacggttccggacagcctcgccaataatggcgggaatctggcttcgtcaaccccgcttctagcctcgcatttgtcaggtcctaggtgaacatatatagagagatttttttacagggtgaatatttgtatgcccagagtaaccatgtgttctgatgcgcaaaataatatattccgacgtattagatttctcaaatgtatcaaaatacaatactctattcttttattagctgagtttttttaccacgattataagtctaatcaagtttaccataggagcatttctcaaaggttgaaccttaaatatacttgaacggtgcaaggggcgagccgccagctactgctggccttttccctcacacaagtcacacgcacacccgctagcccccgtcccccgtcccgcccgtacctcctccgccgcctccgtcctcgttccaaccgtgggcagcaggcaggcccaagtatctgcagtagattggtggagaggaagaagacggcaggcacccacgcagatcaaacgtgctccgccagagggagtagccccctaaacgctccgtctctgcgatccaactcgcaatcgagaagaagcaagctacggaatgcgggaagcaaatctctgcgaagaacccaccctccccggccaggggatggcctagctcaggttcttctgcttctcgtgtccttccctccggtctgcttgc

SEQ ID NO: 149029 - DNA, 2210 bp, Zea Mays
aagcgaggcaggcagcggctgtcccgagctgtcgaaagcgaggcgcggcggcagtcctcgcagcagggccgaccggtcaaaagcactgctgctccacaccacccccaccatccctttccccaacccccgaagccgagccagcgaaccaccccgcccgcagccgcaagcaagcagccaagcagtgtgaactgaccgtccgttccgtccagcccaccatggaggcgccgccggtaccggagctcatggatctggacgcgccccctcccgccgcagccgacgccgcagccgcggcgccggttccccccgccgtcagcgacaagaagaaggaaggggaagggggagacactgttacgggtcacatcatctccaccaccatcggtgggaagaacggcgagccgaagcggaccatcagttacatggcagaacgtgtcgtgggtacgggctcatttgggatcgtcttccaggctaagtgtttggagactggagagaccttcgccattaagaaggtgctgcaggatcggcgttacaagaaccgggagctgcaacttatgcgtgccatggagcaccccaacgtcatctgcctgaagcactgcttcttctcaacaacgagcagggacgagttgtttctaaaccttgtcatggaatttgtccccgagaccctgtaccgtgtcctgaagcactacagcaacgcgaaccagaggatgcctcttatctacgtcaagctctacatgtatcagcttttcagaggcctagcctatattcataatgtaccaggagtctgccatagggatgtaaagccacaaaacgttttggttgatcctctcacccaccaggtcaagctctgtgactttggtagcgcaaaagtcctgattcctggtgaaccgaacatatcttacatatgctctcgttattatcgtgctccagagctcatatttggagcgacggagtatacaacttcaatagacatatggtcagctggctgtgttctagctgagttgcttcttggtcagccactgtttccgggagagagtgctgttgatcagttggtagagattatcaaggttcttggtactccaacccgtgaggagatacgatgcatgaatcccaactatactgagttcaggtttcctcagataaaggctcatccgtggcacaagattttccacaagagaatgcctccggaagccattgaccttgcttcccgtctccttcagtattcgccaagtcttcgctgctctgctcttgatgcatgcgctcatcccttctttgatgagctccgggcgccgaatgcacgtctaccaaacggccgtccattccctccgctctttaacttcaaacatgagctagcaaatgcctccccggacctcatcaacaggcttgtaccggagcagattagacggcagaacggtgtcaactttgggcataccgggagctaggagggcaggcggctgccatggtcaagtttttggtcttggtaccccatgtgcagggccgattgcaggtgacggtgatattgctgcaccatctggagaggaggggctcagcagtacctgagagagctgaaactatgtaaattatctgaccgcgaaggagtacggccagtgttaagccagtaaactggcgcatgttggtccagagtagttaagaatgtagcaggtggagactggtaaatgcctagggtcgtttttagttgttgttactagtattttgtaatgtaatgttcgtcggtacttcccagcagtagtgtagctgctcatgttttgttcgcccgtcatgatgtaaatgatcatcacccaactggaacccctgttatctcgttacatgcttaggcctctgatcgttccgtagttgctgtgatagagctctgacaagtctgagcaggaaagtgggtaggaattgcttctggtgaaatctggacaagttttgtcgaatacagatgcatctgctgattgatcgtctggttgcaagtagtctgcacattcccaaggccacagatcattactttcagattgttgataacgaccaaatggcaagtaacagaaacgaccgaaattcgcaagcaggcaattacagacgcggccgcgccagcacatcgccgccgtagtccttgaccttgctccacaaaaccggccatgcgtccttcctgatggcggctaggttctctccatcccagtctctggctgcgagctcctcagccatggcgaccgccg

SEQ ID NO: 149030 - DNA, 450 bp, Zea Mays
atggcttcatgtggaatgtttggaaagaaagaaaccaccggacctttcaaagtgaaagcctctcatcaggatcagatgatgttgcagcacaggctaaagaaggcatcaatcaaaggaaacattactggggaagagaaacgggaggcgtcacgcggcgaagcacacgggaggagcgggaacgcatgcacgagatgtagggctgaaggtacctccggcgccgacgaagtagaggaagcggaggagcgtgctgggggcctcgccggcggaggccatggggttggggagatcgccggagtcgggatcggggggctcactgactgggctgcgttcaccggctctgtttcactgggctctccggctctgggctgccggctgcgtggtccagggggcgacggacgtgctctgatacatgtggcctttggactcctgattggccgtggcgagctgtga

SEQ ID NO: 149031 - DNA, 1905 bp, Zea Mays
agcacatcgatcagtcgcgtgtctaggtttcctctctcaccatagcgcccgctctgtcgcccttcgttcacctctccttcctctcgtccctgcctgccagggagaggggaagtcagaggcacggagtggcgcagagcagacgcccgtgaaccattgtagctgtccctgtcgtcgtcgtcgtcaacgaacccacacaaggaaaggatggagaagaagccgaccatcctcatgaacaggtacgagctcgggcgcacgctcgggcagggcaccttcgccaaggtgtaccacggccggaacctcgcgtccggcgagagcgtggccatcaaggtcatcgacaaggagaaggtgatgcgcgtcggcatgatcgaccagatcaagcgcgagatctccgtcatgcgcctcgtccgccaccccaacgtcgtgcagctgcacgaggtgatggccagcaagagcaagatatacttcgccatggagtacgtccggggcggcgagctcttcgcccgcgtcgcccgcggccggctcaaggaggacgccgcgagaaggtacttccaccagctcgtcggcgccgtcgacttctgccacagccgcggcgtctaccaccgcgacctcaagcccgagaacctcctcgtcgacgagcacggcaacctcaaggtctccgacttcggcctcagcgcgctcagggagtgccagaagcaggacggcctgctgcacaccacctgcggcacccccgcgtacgtcgcgccggagatcatcaacaagaagggctacgacggggccaaggccgacatctggtcctgcggcgtcatcctcttcgtgctcctcgccggctacctcccgttccacgacgccaacctggtggagatgtaccgcaagatcagcagagccgacgtcaagtacccgcagtggttctcccctgagctccggcggttgatgcccaagctcctcgaaccgaacccaaacaacaggatcacgatcgagaagctggtcgagcacccctggttcaagaaggggtacaggccggccgtcatgctggcacagccgcacggctccagcagcctcaaggatgtccaggtcgccttcagcaacgccgaccacaaggacagcagcagcaaggtggaacagccggcggacagctccttgaagccggcgagcctgaacgcgttcgacatcatctcccactccagagggttcgacctgtcaagcctgttcgaggtggaccaagagcagaaggccagcaactcgcggttcatgacccagaagccggcgtcggcgatagtgtcaaagctggagcagatcgctgagacagagcgcttcatggtgaaaaaacaggacgggctggtgaagctgcaggggtccaagcaagggaggaaggggcagctcgcgatcgacgccgagatcttcgaggtgacaccggcctttcacgtcgtcgaggtgaagaagtcggcaggcgacacgctggagtatgagatgttctgcagcaagggcctaagaccttcactcagcgacatctgctggagcagccgatctgaggagaacatggctccttcagtggttcagccatcataattgaagccatcctcttagaccgtctccagcactttatccatatggtctccccctcttagtcgattgttatttaagtgcagcctcttcggagatgcaattacaatccatcctctctttctttttccctttctcaaagagctaggaccttgctcgactgagcatcaggctgtagggctctttgtgatcatcttttgccagttttcttcttgtagcagaaattgttgggcatggaactcctgttcctttcaccaatagaagcacaatgatcagcactgtgaaacattttttcctgttgatttgctttgggacggaactactattgcctttggggaaaaaata

SEQ ID NO: 149032 - DNA, 1970 bp, Zea Mays
agagattcgaaacgaaagtgagagagcatcgcagaggaaaggaggcacccttcgctggctcgatcgccgctgtgttcacgcggaggaactagatcagcacgcgaaagccaacagcgcagtcgaggaggaagcgagcagtccaggtccaggatggcggcggccgtggcgtcgctgtacaggcgggtcctcccgtcgccgccggcggtggacttcgcttcgccggagggcaagcgcctattcgcggaggccctggcggcgggcaccatggagggtttcttccccctggtctccgtcttccagacgcagtcggagccggccttctgcggcctggcctcccttgccgtcgtgctcaacgcgctcgccatcgacccgggccgccgctggaaggggccctggcggtggttcgacgagtccatgctcgactgctgcgagcccctcgataaggtcaaggccgagggcatcaccttcggcaaggtcgcctgtctcgcgcactgctccggagccgacgtccaatccttccgcaccaaccgggttaccatccacgacctacggcggcatctcatccgatgcgtctcctcgcaggactgccatctgatcgcctcctaccacaggcggcctttcggacagactggaactggtcatttctccccaattggtggctaccatgccggacaggatatggtgctcatcttggatgtcgcccgtttcaaatatcctccgcattgggttccattgcaacttctttgggaagccatgaatacaactgatgactcaactggacttctcagagggttcatgcttatatcaagaaaggttgcagccccttcattgttgtacacagtgagttgcagagatgaaaactggaaacgcatgtcaaaatattgtgttgaagatttaccgagtcttctgaaggcagggaacctagacgatgttccagcgcttctgtcccgtttaattgagtctcttccagctgacgctgaatctttgatcaaatgggttgtcgaagtcaggagaaaagaggagggtggaccaagcttaaacaaagaggagaaagaaaggcttttcttgaaggaaaatgtactaaagcaagttcgtgataccaggctatttaccatagtccatgatttgcagtatgctaataaaccatgttataattgctcatcgtcgagcgaagatgattcccttactaggattgcagccgttgtgtgctgtcagggagctgcaatgctatcaggtaaccttgtgccaagagatgccttctgctgcagagaaacaagctttgaatgtgtccaagcgaatggtgacgggcttaagactgttatctcaggctccgtggtatgtgaaggcagtgaacaaggtgttgatatgcttttaccaatgtcttcacctggtgccagttcatgcaattcaaacttgaagagcaatgccgtcaaatatccatcaagcgtggatgttctaactgttcttctgctggctttacatcccaacacgtggttgggcatcaaagacgagaagctcaaagctgaatttcagactcttatttcaacagacagtctacctgatgatctgaaacgagagatattgcacctaaggcggcaactctactatctaaaggcctgtaaagaagaggaatgcgaagatgccgagcaaccatcgcctaagcagcagtgctgaagtggcagtgtgcccatgtcgttaattttacttgtaagaaattgatgtgaagggaaaagttaccagagggtatagactatgaaatggtcagaattatgatgatagtagtgtagtgatgattatcttgttgttcagttctggtgttgtttccttctacgagaggctattacaccctccttgctcaaggaggtgctgatgttctttttctagatgatgattaaaccatccatccttgctttgtgctaaaccttgtcatattctctttgcattgaataaatccctcgtatcgtatccta

SEQ ID NO: 149033 - DNA, 2099 bp, Zea Mays
atggcgccatccgccgctaccgcgagcatcctcctcgccctcatcgccatcctcctcccctccgtaacggcggccgcggcgctgcagatgcggcatcgcctcggcgcgtccttgcaggtcgcctccctcaacgcgtcggagccgccgaccaccttcttcgaggtcgatcgcccgatccgccctccgcgcggcagcgcggggccttgctccacgcttctcctctcggctaccttcggcgccacatacggccgcccccccgccaccgccgcctacgcgccgccggcttgcctcggcgacgcgggcggcgccggtgccctcgcgctcgccgtgctcgagtgggccgccgactgtcgcggccgccagttcgaccgcatcttcggcgtctggctctcgggcgccgagctcctccgcagctgcaccgccgagccgcgtcccaacggcatcctctggtccgtgtcccgcgacgtcaccaggtacgccgccctcctcgcggagcccggtgaggtcgcggtgtacctcggcaacctcatcgacaaaacatacaccggcgtctatcacgccaacctcacgctccacctctacttccgcaccgatccgcagccgcagccgccaccgcagcagcagcagcaggctgatctgattgtgcccatttcaaggagcttacccttgaacgacgggcagtggttcgccatccagaatgctactgatgtgcagtcaaagaagctcgccattccgtcgaacacctacagggcggtccttcaagtgttcgtttccttccattccgacgacgagttctggtataccaatccgcccaacgattacattcgggcgaacaacttgtccagtgtccccggcaatggcgcattcagggaagtcgtagctagggtggatggtgaagtcgtcggcgctgtttggccattcactgtgatttacaccggtggtgttaacccgcttctatggcggccaatcacaggaatcggctcattcaatctcccgacatatgacattgacatcacgccattcttgggcaagctcctggacggcgaggaacatgatttcgggtttggcgtgacaaatgctcttgatgtgtggtacgttgatgccaatttgcatctgtggctggatcacaagagcgagaagaccactggaggcttgctcagctatgaggcatccggattgaaccttaatgtgagctcagaattcactggattagacgggcagtttgtgacaagcgcaagtcggcacgtctctgccacgggatgggtgaaatcgtcgtacggggaggtcaccacaaccttcaatcagagattctgctatgagaacatcaatgtgtttagaaagaacggcactgtgcagatcgtgaaccaaacaatcgatgcgaagtctggcatttttgccaaggatgcttctgccgtgctgctctctgaggaattccatgaggttttcccgctgtacctttatactggaacctcagatcaagcggacgatgagtactcattggattcaattgttaaatttggtatcaatgggaagaagacctccggtgggaaaccgggcttcttgtacagctccctacggaattcacagtcggcacaaggcactatgagggtgaagaagaatttggtggtcagtggattggggaagacccatcaggtgtataagtatgtgggaactgatggatgctacttcagggatgtgagcagcaggaactacactatagtttccgaccgctccgatgattcttgttcaaaaagagcatatagctctgtcagcgagaagttgaatgatcagccagcaagaagaaagttgctggcaaacaaattgtaaagtacggaaagggaatagttcgtccacgtttcagttttttactttgcttcttgaataaaggctgcttggcagctcgtgcttcagaaagtaggtaagaaacttgaatgtccctttataaacacgccaattcggatctagtggcaaggtattgttatcagtgactatcaattgcatcaccatcatgtctatagctgcacaggatgatgcacgacagaacgagggatgaccattttatactggcagcaatactagtactaatcaagattctgaca

SEQ ID NO: 149034 - DNA, 1438 bp, Zea Mays
cgaaacccccttccccaaactacctctgctgctctccttgatccccaattctctcttctgcctacttgcctccatctcggcctccacctccactcctcgcccccgaacatccggcgctgtccgcaccccgactcctctcgtcctttcgcggtcgcgatggtggcgtccatggcgtcgccgtaggggcgatcgatctaggagaaagtgctggagaatgtggcgtcgtaccaccagcaacaacggaggcagaagctacgcaagagcctcacctacaccggcggcgagctctcgttcactgtctgggcccgtggggatgaccccacctccacgtccgtcgaggcacagaaggaggacatgcctcttgagcacgtcttcaaaatcatcagatctgatggcaaaagtgtgtgtttatggttcctgagtcagatgatctttcttcagttttagatgtgatagatattggtataaaagataaaaactagaatgctatgtctgtcaaaggagctttcttcagttcaggcagctccatctcagtcgttgtacccattcaacgccgagctggtggcagcgatgcaggagatgatccagccgaggtgtacaagtacatgttagtggacgtcacctgccaaagatacacagtttctactgtttttcagttggagaaaatatttaagacaacattttcatcgtttgttctccatatggggcttgtttcacgccacttgaaggaaggagggaatgatggtgttaagttcggacaatacatctacacatctatgaaatgtacaaccacgatgtagagcatagagtttctaaagttggagatttggatgatgttggagatgtgctttggtgtagttcatctctcccgaatcaagagtctggtttatggggctaaggtagaggctgccatcgccattggattcaatgacttcattacatatgctctgagaggcattgggttctaccagaaggataacatggagatcaagaaggccaatggcaatggcacactgatccctgagcagatctttgaaaagactaggagaagttctagatgaattgatgcttggctgaagagggatgtcagatttgtacaatgctcacccacaaagaataatacatttctccaatgtccactgttttgaaaaatacctccattccaatgtttaacattctaacgatgtctgaatttattgtaaagagacacatgattgttcattgttgtaacttatgtacaatatatgcgtgtgtgaaataaagatcatcttggagcaccggcatcaatgttatcaatcttctcaaatttcaaattatcctggtctcttcgtgaaaccataaaagtttattaagtcacttatctgagtggtctaaaagtctagcatatttttgttcctttgcctgtcgagacggatcagctggcatgaataatatccgg

SEQ ID NO: 149035 - DNA, 1545 bp, Zea Mays
gcgtctccctccccacgaaacccccttccccaaactacctctgctgctctccttgatccccaattctctcttctgcctacttgcctccatctcggcctccacctccactcctcgcccccgaacatccggcgctgtccgcaccccgactcctctcgtcctttcgcggtcgcgatggtggcgtccatggcgtcgccgtaggggcgatcgatctaggagaaagtgctggagaatgtggcgtcgtaccaccagcaacaacggaggcagaagctacgcaagagcctcacctacaccggcggcgagctctcgttcactgtctgggcccgtggggatgaccccacctccacgtccgtcgaggcacagaaggaggacatgcctcttgagcacgtcttcaaaatcatcagatctgatggcaaaagtgtgtgtttatggttcctgagtcagatgatctttcttcagttttagatgtgatagatattggtataaaagataaaaactagaatgctatgtctgtcaaaggagctttcttcagttcagtgcttggtggatcaccgtctaaacgatccaccaccagaaccgccctaccccaagatagctatgtgcaggttcaactactcatttagatattggcagctccatctcagtcgttgtacccattcaacgccgagctggtggcagcgatgcaggagatgatccagccgaggtgtacaagtacatgttagtggacgtcacctgccaaagatacacagtttctactgtttttcagttggagaaaatatttaagacaacattttcatcgtttgttctccatatggggcttgtttcacgccacttgaaggaaggagggaatgatggtgttaagttcggacaatacatctacacatctatgaaatgtacaaccacgatgtagagcatagagtttctaaagttggagatttggatgatgttggagatgtgctttggtgtagttcatctctcccgaatcaagagtctggtttatggggctaaggtagaggctgccatcgccattggattcaatgacttcattacatatgctctgagaggcattgggttctaccagaaggataacatggagatcaagaaggccaatggcaatggcacactgatccctgagcagatctttgaaaagactaggagaagttctagatgaattgatgcttggctgaagagggatgtcagatttgtacaatgctcacccacaaagaataatacatttctccaatgtccactgttttgaaaaatacctccattccaatgtttaacattctaacgatgtctgaatttattgtaaagagacacatgattgttcattgttgtaacttatgtacaatatatgcgtgtgtgaaataaagatcatcttggagcaccggcatcaatgttatcaatcttctcaaatttcaaattatcctggtctcttcgtgaaaccataaaagtttattaagtcacttatctgagtggtctaaaagtctagcatatttttgttcctttgcctgtcgagacggatcagctggcatgaataatatccgg

SEQ ID NO: 149036 - DNA, 1359 bp, Zea Mays
gcgtctccctccccacgaaacccccttccccaaactacctctgctgctctccttgatccccaattctctcttctgcctacttgcctccatctcggcctccacctccactcctcgcccccgaacatccggcgctgtccgcaccccgactcctctcgtcctttcgcggtcgcgatggtggcgtccatggcgtcgccgtaggggcgatcgatctaggagaaagtgctggagaatgtggcgtcgtaccaccagcaacaacggaggcagaagctacgcaagagcctcacctacaccggcggcgagctctcgttcactgtctgggcccgtggggatgaccccacctccacgtccgtcgaggcacagaaggaggacatgcctcttgagcacgtcttcaaaatcatcagatctgatggcaaaagtgtgtgtttatggttcctgagtcagatgatctttcttcagttttagatgtgatagatattggtataaaagataaaaactagaatgctatgtctgtcaaaggagctttcttcagttcagtgcttggtggatcaccgtctaaacgatccaccaccagaaccgccctaccccaagatagctatgtgcaggcagctccatctcagtcgttgtacccattcaacgccgagctggtggcagcgatgcaggagatgatccagccgaggtgtacaagtacatgttagtggacgtcacctgccaaagatacacagtttctactgtttttcagttggagaaaatatttaagacaacattttcatcgtttgttctccatatggggcttgtttcacgccacttgaaggaaggagggaatgatggtgttaagttcggacaatacatctacacatctatgaaatgtacaaccacgatgtagagcatagagtttctaaagttggttgttggttgcaatcttctaacttagagtatgatgcttgaagagatttggatgatgttggagatgtgctttggtgtagttcatctctcccgaatcaagagtctggtttatggggctaaggtagaggctgccatcgccattggattcaatgacttcattacatatgctctgagaggcattgggttctaccagaaggataacatggagatcaagaaggccaatggcaatggcacactgatccctgagcagatctttgaaaagactaggagaagttctagatgaattgatgcttggctgaagagggatgtcagatttgtacaatgctcacccacaaagaataatacatttctccaatgtccactgttttgaaaaatacctccattccaatgtttaacattctaacgatgtctgaatttattgtaaagagacacatgattgttcattgttgtaactta

SEQ ID NO: 149037 - DNA, 1894 bp, Zea Mays
gagcccaacaacccgccggcccttctcctcctctccggtttccgttttgattcctcccgattctctctcgcgtagtcgcgtaaatttcccagcccgaaaatggccatagccttgaggcactagtaggcacagtagcacccaaccgcggcccgctccagcagccccaccccatcgacgccgtcggcgagggcacccaggtccgcgtcgcaccacgtcagccacacacccaccaggccaccaccgccctcagctccggtgtgcagagacgctggatggcctcgcaccagtagaatccgtccggcactttctgccctaccccaccccaatccacccatccggccgcgggtggatttgaccgatatcggcaggcggccgccggcgtctgcctcgattgatccgcctcgtctcagtcctaggtatggcggcggtggcggagggatcggcgtctgctgcggcgaaggaggtggagtaccaggcgggcgtgcagaagcttgtggacctgctctccaatcttaacccggccgccaaggagttcgttccttcctcggctccggccgcggctgcgtcgccgcccaagaaagcgttgtcggcggatgcgccggtcttcgattaccgctccaccgcaggcggcaacggggccaccgacgatcccttttacgttgggtttgggaaccagcagcgcaagagagggaatggatacatcaaccaaggaaggaggaggacaaatgataggttgaggcgtgcagacagagaggacagcgttaggcgaactgtttatgtctctgaacttgatcatactgtgacagaggagagacttgctgatatctttgctacctgtgggcatgttgttgattgcagaatttgtggtgatccccactcagttcttaggtttgcatttattgagttctctgatgaagagggtgcaagaactgcacttaacctcggaggcacaatttttggtttctaccctgttagagttttgccttcaaagacagctatcttacccgttaatccaaagtttcttcccaggacggacgatgagaaggaaatggtcatgcgaactgtctattgtacaaacatagataagatggttactcaattagatgtaaagaaattctttgaagaactttgcggtgaggtctctcggttgagacttctaggagacaatgtacattccacaaggattgcttttgttgagtttgttcatgctgagggtgccatcatggctctgaattgcagcgggatgattttgggaactctgcctgtcagggtgagtccttctaagactccggtgaagccacgtgtaaatcgaatgggatctaactgactctgcctaagctcaaccggaaggcatggccataagctgaaggcttccgcggtcctgtgcatcatgatgcatctgcttacattcttacaaacactctgtttgtacccttttgcaaacctgttggaagggaactggttaggtcaggcccttttgccttgcatttcagacatgatggaaccattgagaatgactattcggcaatcaaccatcaagtaacttctgtcaatgctcctactgttaacgccttagatgtttggctgccggtttggattcagctgcagctgcaaatctgtactgttgctacagcatttgctttcttatgtaaccagccggcagcagcagctgcttctgcacaagcaagaatccaaacatgattgcaacgccgagttccctgtcctcgtctacgaaggaaaaatcccaaatgacaatttatgtggaaattctcaattggctaccaccacttgtctgacattgtagtcgttaaagtctgtaattttgctatgcatttatacgtctttaggggtctgattctattattctaaaatcagtatttcacgtttacgattc

SEQ ID NO: 149038 - DNA, 822 bp, Zea Mays
gttttggtcttcatttcttggaagaaggtggataagaaaggttggtttatgtttctttgtcaatttttgttcattcttgctcaattttagccacattttggatctagggtttcacatgtgagagagaagagtatagattggtaattttctctattttctcaaatgaggttgcataagatggttagtttttgtctattccctctctttttcatgtttagttgcttaatgaatggtgaatgtgttgtatggaagattagtttaattatgtttcaattgttagttattgtttattttttgctcaattttaactacattttgaaactaggctttcaccatatgttaaagataggtttgggtattaatttttttttgtttattagttgctaggaaagtttggcttatgtttcttttgccaaattttgtttatttttcctccattttagccacatttttggatatagggtttcaccatgtgttttatgttacttttttacaggtggtgatggagaggacatcctggatgtataacttatcaaggctagatccatcatacatatccgaggtccataggtttattgatgtcgctacgaaccatgcttggagaataaagacaaaacacatatattgtccatgcatggactgcaaaaatgctgctgtatttaatgacacagaacaaatcatatctcatctggtatgccgaggatttatgaaggattacacaatttggacaaagcatggagagggtagctcttcgccttatacgactggaaaccctgagaacatcgacgacagatttcagttcgttcacgagacaccccaacc

SEQ ID NO: 149039 - DNA, 1531 bp, Zea Mays
aaaggctgtcgcgctcggcactcttgctgtcgcgctctgtgcacagacgaccttcttcccatcccttccctctgctagtctgcttcgttcctcggccatggtggtcctcgccaagggtgagctcgagcagatcgccctcccggctgcagagccgcccccggccgacgtgcggtcggtggacctgtccgccccggcgggccccgcgcgcgaggccgcggcgcgcgcgctggtggcggcgtgcgaggagcacgggttcttccgggtgacgggccacggcgtgccggccagactcgtgcgcgccgcggaggccgcggcggccgggttcttcgcgcggccgcagggcgagaaggaggaggagggccccacgctcgggtacggaagcaagcgcatcggcggcaacggcgacctcggctgggtcgagtacctcctgctcggtggcacacccgccgccgcgccttcctcggcattattgccctgcgccgccgccccgtcgccgtccgcgccggccgggccgttacgggaccttctggacgagtacacggtggcggtgcggcggatggcgtgcgcggtgctggagctgatggcggaggggctgggcatcgccggcggcgccggggacgcggtgctggcgcggctggtggcgcgcgcggacagcgactgcatgctgcgggtgaaccactacccgccgcggccggcgctcaaccccagcctcacggggttcggcgagcacaccgacccgcagatcatctcggtgctccgcgccaacggcacctccggcctggagatcgcgctgcgggacggcgcctgggcctccgtcccgcccgacggggacgccttcttcgtcaacgtcggcgacaccctgcaggtgttgacgaacgggaggttcaggagcgtgaggcacagggtggtggtgaacagcgagaagtcccgggtgtccatggtcttcttcggcggccccgccgcccggcgagaggctgggcccgctgccgcagctcctgggcgacggcggccggagccggtaccgggacttcacctggagcgagttcaagaccagcgggtgcaggaccaggctcgcggaagaccgcctgtcccgcttcgagaagaagtagctagaggctacgtcatttgcatgaccggcggtaggatcgattaccatgtatgcttctctgtatatgtcagttgcattgccacagctctagctactggcgcccgtacgtgtatattagtggccatgctcgtattgtacgtgcacgtgtatgcacgcatatacatggtggcaccacacagggtatcatgcatccaatgttatctattatccatggagtaccaaccatgcatgcatggtcctgttattagcttttacaattacaattatcccccggtgcttccagacagtccaggcgtcgtacgtgtgcgggtgtcggtaaaccaatcagcggtgcaacaacgtaggcatgatgacgtattacgcacagccaccaatgatgctggcacaggcagagatccaagtaggactatctatcaggactag

SEQ ID NO: 149040 - DNA, 123 bp, Zea Mays
ctcgtctctcctctcctctctctctctctctctctctctctctctctctctctctctctctctctctctctctctctctctctctctctctctctctctctctctctctctctccttccatct

SEQ ID NO: 149041 - DNA, 381 bp, Zea Mays
atggggtcgcaggccatcgaggcgcagcgcgcgggcacggaggtgcgcctgccgctgggcctgctccctctcgccgacatggaggaggtcgggcgccaggtctcgtacgccgccgaggtcactgcctacatcgaggaccgtcggatgcagcgcattaccagggtcaagacgaaggagctcctcatctgggtcaccctctccgacatgttcatcgacggggatgacccgtccaggatcaccttcaagacgcccaccgggctcggcaggacctaccccgtctccgccttcgccaaggaaggcgccaccgacacagaggccaagcccaaggacgcccccgcaactaccgtcgccgctaacggtgaggcagctgccagcaagtga

SEQ ID NO: 149042 - DNA, 2398 bp, Zea Mays
gacccgcccatctttcgccctccccatcccgtcgtggttgcgcgtcgacgccatcgaccgacgctgcctgcccacttcccccgctcccgtcgcggcttgttagtctcacctggtccatcggcggcccctctcaccgggacgcgaactcctccgcgcttccttccgccgaagcgaagcgctctacccaccttcgtccttctgcactcttctgtacgggcgtggaacgtagatctgtctatgctggcactggtttctgcttcccttggtcagtatttctgcagctaaacagataattcacatttgttgctatcaagttatttgaaagtttttttatggttgagagaaacagatattcttcacctagtgggtctgctcattgatggaagacaaccagattttggttcagtcagagcataaccttataccaggttcgcggacccttgtcattggtcaagagtttgcagatgttgacacatgtcggagggctgtcaaggacatggccattgctttgcactatgaactccgtgtagtgaaatctgatcgtagccgtttcattgcaaaatgctcaaaagaaggttgcccttggcgtgtgcacatcgccaagtgccccggcgttccaactttcactgtccggactttgcacggagagcacaaatgtgagggtgttcttaacctgcatcatcagcaggctactgttggttgggttgctaggtctgtcgaggcaagactcagggataacccgcagattaagccaaaggagatactgcaggatattcgagagcagcatggggtcgctgtttcttatatgcaggcatggcgtggaaaggagagaagcatggctgcagttaatggtactcttgaggatggataccgacttcttcctgcatattgtgagcagattgttaagacgaatcctggtagtgttgcaacctatagaggtattggaccagggaatgccttccagcggctgtttgtctcgtttcgtgcatccatttatggtttcttaaatgggtgcaggccccttctagaaattgacaaggctgacttgaagggaaagtatcttgggacattgctgtgtgcttcagctattgatgctgatcacatgatgttccctctagcattcggtgttgttgattgcgagagcgatgataactggaattggtttatatcggaattgaggaagatgctcggagttaacacagataagatgccggtgttgactatagtttctgagagaaaacggcaagtggttgcagcggtcggatctaatttccccactgcttttcatgggttttgcttgagacacgtgagtgagaatttccgtgatgagttcaagaatactaaactgcttaacattttctggagtgctgtgtatgctctcacagcatcagaatttgatgcaaaggtaaatgaaatgatgcaggttcaggatgttatgccatggttacagcgttttccgccaaacctgtgggcattttcttacttccagggtatcagatatggccattttagtcttgggataaccgagatattgtataacttgtcccttgactgccatgaacttcccatcgtgcaaaccatcgagcacatcaggcaccaactggcttgctggtttgctgaacgccagaacctggcacagtcatacaactcggttcttgttccgtcagctgagaaagttatcctcgaagccatccatgactcacaatgctatcaagtccttcgagcaaacaaggtggagtttgagattgtgtcatcggagcgaaccaacattgtggacacccaagctaggttctgctcgtgccgccgatggcaaatttacggcatcccatgcgcacatgccgccgccgcactgctctcatgcggtgaagacccccgcctctatgctgatgactgcttcagtgtgatgaagtaccgagaaacctactcccagccaatatatcctatcccggacaggagccactggaacgattcgtctccctggtcacaaggtgcggtcagcaaggccgatgtggtgcttggcccgcccaatatccggaggcctcctggccgacccaagatgaagattctaaagatcgagagcatgaagcggccgaagcggatcgtccagtgtggccgatgccatcttcttgggcattctcaaaagaagtgctctttgcgaagctgacacgtccgttggtgtacatgaactctgttttattgacagcttagggatctcatgctttttttcgcgtcaggtgcaggtagtccttctgtacaagtacttcggtagttctgtgtagctctctgcttctggggaagcgtgtcgactttgggcaccgtctgtccatagcactcaaaagtgtcttctacgccgtttcagagcaatgataatctgccactgttttttatgatttttgcg

SEQ ID NO: 149043 - DNA, 1320 bp, Zea Mays
gagatggtgtatgagcaggaccgcggaaaccaccatcagctgccgaggttctgcaccgccggcgcggcccccggcgtggcgcgggcgtccaagaagagcaagcccaagaaggccccgcagcgcggcctcggcgtggcgcagctcgagaggatcctgatcgaggaacagaagaatatggaggagggacccaccaccgccatgccggtaacgacgaggaccgcgcacctcggccccctcctcccgatgcaccctcctcctcctccgccgccgccgctctcgctcagcgccctgccgagggacgccggcgtgcactgcggctacgacccgccggtgctctgggacccggcggcggcggaccctttgaagcacccgtacaaaaagaggagcctgtgcccacagcctccaccacttcccacggtgagcacggccttgtcgctgacggtgtccacgtcgacccacccaacggagcccccttcaatgtacagcagcaggagcagcgcgccgccgccggccgacgaggacgacagggaggcggccggcgtggatagattctgtcccttcgtgttcgagggcccgaacccggccacctaccggacgacggcggcgggcaaagcgagtttcgtcgccaggaccaggaggacgagagaggccgccggcttccctggtgtctgtcctgatcctgacctgagcagatacgagctcagagccgcaaactatttcagctcgagcgcgagttactccgagtggtcgtcagagcttgcccgccacatcaagagcagcaaggggaacgagcacgagcctgcctgctgctacctcaccttgaacgcgcagccgccgcctgcgccacgcgtgaagcagccggctgcgctccccccgaatcaccgcccggagctccgcgacttcggcggcgtcacgcagcctcagcacgggagcgcttcagcgtcgtcgtcgcggccgttctacaacttcatgccgctgccggttggtccagttcgctgtgagaggcccctgagcgagatcaaggccgacgtctccgacggcgtcgacctggaactgaagctaatctgcgttcgttgcaagattttttcgctcccaataaacgtctggccggagagagtcgccaagagaagcagtgttagatcagagtggttgtgcagtgttgaacaggctctcggaaggctcgtgcacgatcggcattacaggcttgcaggcacgatagagcacaacacagaatgtgatcagacacaacatagtaaaaccactgggccatgtatggcccaccccagggctgtgaccttggctcactcacgccaagagtag

SEQ ID NO: 149044 - DNA, 429 bp, Zea Mays
atggggggatttgggtgccgtggggaaggagggcgttgtggagaagccctcgaccatggcgggatttgggcgccgcggggaacgagaggccgtgcgctgtcggcgctgtcgaggccacgtagagatgggaaggcagatgaggcagggagggatttggaggacgcggtcatctggaacgtcattgtcgaggagcacgtggggaaggagcgcgttgtggacaaggcaaatgaggtagggctggatttgggggcgacgggggcagcagaggggggagcaatctccgggcggctctcacgggcgcgaaaatcttggggtggggacgcggccgttgcggggagacgaagggggctgtgtcaggcgggcgcgggtgtagagggggcgagcgggggcatggtaatgcatgggtggacgccctcgttacacttttaa

SEQ ID NO: 149045 - DNA, 917 bp, Zea Mays
cggctggctacaagccgacactgttgcagctgtttggactgctgcagctgcaatccatagagagaaaaatactgtagaagccgcagccgcagccggattgcagccgcagcaagccgcagcgaacaagctgcagcctattcaggcctatcaatcgcagccgttggatggatccgacggtaaaggtaagcatttcccggccaaccccacattgcctttctccagcctgctcagggcgaaacacaaaactctcgctccctctcgcagacgcgcctaggtctagctagggtctggtctcgctgccccgccgcgcgcgcattcacaagcttctagacgttccgaggaggaggggaggtacccgccgccgcagccatggcgtcgactaaggtccagcgtatcatgacccagcccatcaacctcatcttccggttcctacagagcaaagcgcgcatccagatctggctcttcgagcagaaggacctccggattgagggtcgcattatcggattcgatgagtacatgaacttggtcctcgaagacgctgaggaaatcaacgtcaagaaaaacactaggaaatcacttggccggatactcctcaaaggtgacaatataactttgatgatgaacagtggcaagtgaagattcttatggcaggaacgatgtttggtgctcgcttcgattatctgtgacacaatgtactccatccatccgtccagacttaaatgatgtatcatgtcattgtggtttagtgagagttgtataactacctgaggaaactcacgtgttactatatgctaagatgctgtgacggtgagctattcagtgctcacttgtgttccaaagattagcccgacttgtgtgtgccatgctgacatcttttctggtttcatactcagctttacgtaaagctttgctctgct

SEQ ID NO: 149046 - DNA, 535 bp, Zea Mays
atgggagttcagtctgctcaacccttactgtactgtgccggccgagatgtgctagggtcgctggtggttgagatttcagatcaggagctctggagtctagactctggactgcagcgagccaaagaattcaaatcagtcacccggtttgtttcccagatcgcggacagcggcaacctgcaaccgcttgctttcgtctttgaattgccagcgtcattgccatcatcgcaaagtagtgtagaaaggttttgtggcttcaggcggtctctagtagcagcatttctatcccacttcatatttcactgctagttttaaactctactatataaatagtatatttacaatgtaaaacaatattatgtacgtttatatgcacactcttactagagatggcctcatagagaaagaactccaaacttatacaacccctgatttgaaaaagtggggcttagcaggtttgtgctattgtatttgcatgaactttttgtatgatgtttttttgatgtaatatgttttaatgtaaagtattgtatggtac

SEQ ID NO: 149047 - DNA, 259 bp, Zea Mays
ctacatttgggctggtaggcggtacatgtggagggttggcccaatgcgtgagatacctgtagcttttcccttttatctgcagtgttgggttggacgccttttttgccttttgtggagttttccatgtgccatgctattctgtctattggtacgatatgtttctgttcccctatgctgggttttccttgtgctgtactgctatgtaattctgcccaaatttttgtacatgtttttcagtgtttcccactgtttttttgtt

SEQ ID NO: 149048 - DNA, 100 bp, Zea Mays
cccatgattgctcgtgcttgtggacttcctgagaatactgtttatatagaagatataaatgaagatgtatctccaacaaacccttatcctgttccaaaag

SEQ ID NO: 149049 - DNA, 343 bp, Zea Mays
ttttgtttctttttttgttctatagatctgtgggagatcactgacacaatcgactggaggtccatcaggacccaacactccaaattttgtacatgtttttcagtgtttcccactgttttttgttatttagtggtaacagcatggaggggccgacagccagcagttttgagaacatttagccagaggcttagcaggtttgtggtcgtgttcatgtgttctcatttaccatttgtgctgtttgaatttattgccaggacccatcacatggcacttctaacttctttaatgtaatttacaggggtttcaatgatgctgtcaatgggtttccagatgacggttggtc

SEQ ID NO: 149050 - DNA, 2684 bp, Zea Mays
atgctggtgtggaatgataggacttctgtcaacctgcttgagaaggatgggttgctggcaacctttgacgaggagacagcaaattatttccatggcacggatgtcatctgtattctgtgtcctcgcaatcctgatattctttgcaactctgagcagagagacacatggaatgttcagcttttcagatacattgatggtggtgatgtttttaatgttcccaatacttctgaggaagctgcaagagctggaattgtgagtggaataaaacaaccatggccaccacctatggagtttgagtgtttggatttgtgcatggcctctgacaaattgatgatcatggtcttctatgggttccttgctctggactatgggctccgccgaggcggatggaagcgcattgccggacgcggagcagcagtagcagcggcggccaagcaagcgggggatctggatccgaggttctaccatcgggctcctcacggcggcggcggcggagaaggaggcggagcgcagcaagacgcagatgagcagcggcggcaacaccaccggctgctgcagctccaccaacaagtgcagcaggaccaagacccaccaccggcccccctcttccagctccagcacctgcaggccgcggcggcggcggccgtgaggcagcggggcggcttgttgtccgccgggtatgcccttctcgcccccatgggcgacgctagccagtcccactcccactcccactcccaacaccacggcttccagccgcagctcctatccttcgggggagccggccagcaccacgcgcaccagttcacggcgcaggcggcgtcccacttgcggccacgaggacggggagcggtgggcgcgggcggcgaggccgtggccacgacgtccgcgtcgcgctcgcgcgtgaggggcggcggcggggaggccgtggcggtgcagggaggccacattgcgcgctccacggggcgcaaggacagccacagcaaggtgtgcacggcgcgcgggacgcgggaccggcgcgtgcggctggcggcgcacaccgccatccagttctacgacgtgcaggaccggctgggctacgaccgccccagcaaggccgtcgactggctcatcaagaacgccaaggacgccatcgacaggctcgagacgacgctgcccgcggccaatgccgcgccgccgtcctcctcctggacgcacccagactccgccgagaactccgacgaccaggcgcaggccatcaccgtcgcgcacacggccttcgacttccccggcgccgacggtttcctagttccggcgtcgctcgactcggacacgatcaagtcgttctttcccgtggctggcacgggaggcggcgaggccgaggcgtcttcgtccgcgacggcggcgcagtcgtcggccatggggtaccaaagctacacgcctgacctgctgtcccgcaccggcggacacagccaggagctgcggctgtcgctgcagtctctcccagaccccatgttccaccaccggtcgcacggccacggccacggcggcgatggctccgcgcagcaggcgctcttccccggcgccgccagctactcgttcggcggcggcgctgcgtgggccgagcacgcgcagagccagcgcgtggcgccgtggaacgcgcccgacccaggcggcgggagcactggcggctacctgctcaacgtgtcgcagtcgcagcaggcggcgcttggtggccagagccagttcttcttccagaggggaccccttcagtccagtaaccagccctccgactccgagcgaggatggccggagaccgtcgaagccgacaacccgatgcagcatggtgggccgaccatcgggttcgcgcccggtaccagcttctccgggatccgcatccccaccaggatacagggcggcgaggagcacaacggcggcagcggcaatggcgacaagccgccgccgcctccgtctgtttcctcggcttctcgccagtgacagcagcagtggagcacagattactccatccaaccagcatgaccattgatcagtgcagcgtgtatcactaaaatctcacacgccagctcctcaacgtgcacccttgttgtgatgtgagaatctctttcgtgattcttcttcgttgtagcactgtattttcccaccgcaggattgccgtttcttgtactactgagtttctggtgcagttctgttgtccccattccaggagagaagagaaacgacaaaggttgcatatgttcattgcatggccttatgctggacactgcaggtgcaggaggacgcagcgacagcagcagcagctttcctgtgccatctatgatctccatccgtccatgactgggcagcgggcactgcgagaacgacacaagaaaaaggttttgtgtctccttgctgtcatcagtacgtacaggatctggcgcctctgctgcgtgtcattagcgcactttaaggaacggaaaagctaatgtacgcgcctgcgtttctttggctgtttttctcgccttgtgcatcgtccgattgttcagattcactgtttgattttgggattctcgcgcctctttagtgtctcgtttccatcgctctgctgctccgcctcttcactttctcgcgctgtcgtcgtctcccagtgtggctgccacgctcgccccagcctcctgccgcgcgccgcgctgagcctcctgccgcgcgag

SEQ ID NO: 149051 - DNA, 2172 bp, Zea Mays
catgctcttcctgctactaattctagaagcctctagcgagtgctaacattcagtttaacccggcctccactcctctcctctggcccgtggcctgggtcagtgtccatccctccctgtccctgcccaccacttcgtctgctctccatccctcatccgtccccatgccgcgcccgccgccgcctacttcttctccacttttttgactgtttttcctgccatcctagctatgggctccgccgaggcggatggaagcgcattgccggacgcggagcagcagtagcagcggcggccaagcaagcgggggatctggatccgaggttctaccatcgggctcctcacggcggcggcggcggagaaggaggcggagcgcagcaagacgcagatgagcagcggcggcaacaccaccggctgctgcagctccaccaacaagtgcagcaggaccaagacccaccaccggcccccctcttccagctccagcacctgcaggccgcggcggcggcggccgtgaggcagcggggcggcttgttgtccgccgggtatgcccttctcgcccccatgggcgacgctagccagtcccactcccactcccactcccaacaccacggcttccagccgcagctcctatccttcgggggagccggccagcaccacgcgcaccagttcacggcgcaggcggcgtcccacttgcggccacgaggacggggagcggtgggcgcgggcggcgaggccgtggccacgacgtccgcgtcgcgctcgcgcgtgaggggcggcggcggggaggccgtggcggtgcagggaggccacattgcgcgctccacggggcgcaaggacagccacagcaaggtgtgcacggcgcgcgggacgcgggaccggcgcgtgcggctggcggcgcacaccgccatccagttctacgacgtgcaggaccggctgggctacgaccgccccagcaaggccgtcgactggctcatcaagaacgccaaggacgccatcgacaggctcgagacgacgctgcccgcggccaatgccgcgccgccgtcctcctcctggacgcacccagactccgccgagaactccgacgaccaggcgcaggccatcaccgtcgcgcacacggccttcgacttccccggcgccgacggtttcctagttccggcgtcgctcgactcggacacgatcaagtcgttctttcccgtggctggcacgggaggcggcgaggccgaggcgtcttcgtccgcgacggcggcgcagtcgtcggccatggggtaccaaagctacacgcctgacctgctgtcccgcaccggcggacacagccaggagctgcggctgtcgctgcagtctctcccagaccccatgttccaccaccggtcgcacggccacggccacggcggcgatggctccgcgcagcaggcgctcttccccggcgccgccagctactcgttcggcggcggcgctgcgtgggccgagcacgcgcagagccagcgcgtggcgccgtggaacgcgcccgacccaggcggcgggagcactggcggctacctgctcaacgtgtcgcagtcgcagcaggcggcgcttggtggccagagccagttcttcttccagaggggaccccttcagtccagtaaccagccctccgactccgagcgaggatggccggagaccgtcgaagccgacaacccgatgcagcatggtgggccgaccatcgggttcgcgcccggtaccagcttctccgggatccgcatccccaccaggatacagggcggcgaggagcacaacggcggcagcggcaatggcgacaagccgccgccgcctccgtctgtttcctcggcttctcgccagtgacagcagcagtggagcacagattactccatccaaccagcatgaccattgatcagtgcagcgtgtatcactaaaatctcacacgccagctcctcaacgtgcacccttgttgtgatgtgagaatctctttcgtgattcttcttcgttgtagcactgtattttcccaccgcaggattgccgtttcttgtactactgagtttctggtgcagttctgttgtccccattccaggttagttaatttgctgcttcttcatacgacaacggatctggttagttaatttctttttttatattattcaggagagaagagaaacgacaaaggttgcatatgttcattgcatg

SEQ ID NO: 149052 - DNA, 450 bp, Zea Mays
atggagaggcaggaggcgcgcggtttcgtggtcgctttccttgcggtgcccagcacgctttctcgtctgactttccaagggatagacggggccgggtgggcagtctggcagacagtgaggcagccgcggcagggcagtttccgtcggggatggcgtggcggacggcagcgatggagcgacaacggaaccgttggccagctcccccaaggccccaacgcactcgccggccacgtcacgggagtccgtgggcggagtttgactgatggcgcacgcgtttggccgtggcgcccgtgcccgtgggccgccgccgcccgccggctgcctcctcctgtcttgtcctcccacgttctcgttgagttcttctcgtccaggtccaggtgtccaaccaacctcaatgatttcgcaatcaacaagatgcctgactgcctgaggcctgactcagaattttaa

SEQ ID NO: 149053 - DNA, 1160 bp, Zea Mays
ccgcccgcctcggtctcaatgccctccattctccacggtctctcgctcgctcgctcgctcgctcgacccccagctcgtctcgtcttccactccaccttgctgcatgtacacccagacgatgttacaccacctactcgtacaggtacagccagcctcttcatgcttcccttgctagccacctttttccgtccggtttccaccaccgtacctgagctacctggtacaaagggccggccagatgcatgccgatagctagctttaggtactagctcgatcggccgccggccggccggtcgacgtcggcgcgcacactgtcgtccatctccataaatcctcctgcacgtacggcgctacggccggccatgagacgacctcacgccgccgccgctaccgctctcgctgccctcctcctcctcctgtgcctcgccgtgctcacagccgcgttgatccacgggaacggcggcggcctggcggggacgaggccggcgaggtggcccgccgccgtcccgaggaagatgctgctcgccatgacaagcttcgacgctgcctcgtcctcgtcagctgctggtcacaaccaccgctatcttcttcaccaccaccaccaccaccatcttcatcatcaacaccaccaccaccaccaccaccacgcggaccggcgatggaaccggcacgggactcttccaccgtcagcagctggcggcgagggtgacgaggcgatgatcgatccgcggtacggcgtgcagaagaggctggtgccttcgggccccaaccccttgcatcactgagagtacgtgagagagatcgaggccccgttgccaccgcatgcgcacgcgcgcgcgacgcgagcagcacacctgcatgcttgcatcctgcatcttcaattctcatggcggccgctatgcacagtctggttcagtttccatggtgtggtgagtactcgccgcggcacaccatcatgcatggatcttgccgtgtttgtagatccatcgtcgagttcgatcgacgagtaatcgatcgagtcaagtacatacatatatatacctatatattctttggatgtgttgtggagttgaaagagatgcgtacgtattttgctatggacggtgtcagtcaccgcgcaaccttaataatccattacataccatttgttcgtgtgttca

SEQ ID NO: 149054 - DNA, 552 bp, Zea Mays
atggggggggaacacggcgtggagaacggttggagcagaacaaagggcgcacagggagatggagtttgtgcgagctcaccatggggtcggcggtggttgaagacgaagctgagggagttcggccggcgagctggacgcgcgcgacctgggcgagcacgtcaagggaaggagatggggaaaaaggcaggggcgtcggcactgggaacaggaagcaggggcgcggcaaggctgagggcgagctcggcgagcaccaagggggaggtggaggcggcaccctccatggctgagggtgagctcactatgaaggtcgagcagagccagggcgctgggaggagcagaggtgagggtaccatgggagggatggggaagacgacatggcagccagcactagaggaagatggggaggggatggggaagatgaccttaggagcgcttgctcaggtgctggagtggaggtcggtaatggggagcaggcggcgccgtgagggaggcgagccgcagggaggagctcggctggtgctccacgaaatcaacagagaggaggggggttag

SEQ ID NO: 149055 - DNA, 100 bp, Zea Mays
gctttgtgctctgaggtttgtaacctcttcctttatcttttgttttaaactttgttacacttctctatctaatatataaagtactagttttgatgattcc

SEQ ID NO: 149056 - DNA, 2653 bp, Zea Mays
cccgctcgctcaacccttcatcattccttgcttcctccagtccctgccctcctccctccatcgccccgttccatcccctttcccttccctttcacgagatccccatccggccatccccacctctgaccgcacctcccatgccgcactagttcacccgcccactccccacccaacacacgccgcccagcgagatccagagccgaccggtcgccggccctcgccctccgccccctccgcaggtgctcggcggaatgtcccaccgccagccggcgccaatgccggacaccctctcggacgccttcgccgccgcggtgctcctctcctccaccgacaagccggacacgctgcccccggggaggctctcgccagtctccccgctcccgcactcctcctccaagcacgggcaccagcaccctcaccccaccccgagctcctcctcgggctcctctggctccgtctcccggtccctactcgcgcccgcctccagcctcgcctcgcgccggagccactccggcgagatcccgctcccctccgacgcgcccccacgcgggaccgcgcgcccgggtcaccgccgcaccggctccggccccctcatcttcacatccggcgcgtgctccagctccgccacctcgccgctcaccaacgcgctccccgcgggcaacatctgcccctccggccgcctcgccaagccgctcccctcctcctgctccgccgctactccgccacccccgccccgcgcctcccgccacgacgtgctcggctccgggaccgccaactacggccacgggagcatcgtccgctcccgcgccgccaccgacgatgacgcggtcctcaggcgcgccatgtcggccgccgaccccgaggagctcaagagggccgggaacgaccagtacagaaagggctgcttcgaggaggccctcaggctctacgaccgcgccctcgccctctgccccgacaatgccgcgtgccggggcaaccgcgccgccgctctcattggcctccaccgccttggcgaggccgtcaaggagtgcgaggaggcgctccggattgatccatcctacggccgcgcgcaccaccgcctcgcgtccctgcatataaggctaggacacattgaggatgctctgaagcacctgtcacttgcaatcccacagcctgacctcctagagttgcacaaattgcaaacagtggagaagcactttgggagatgtctggatgcgcgaaaggctggtgactggaagagtgtgctaagagaaagtgatgctgctattgcggctggggctgactcctctgctctgctcttggctgctagagcagaagcccttttccgtctcaatttacttgatgaggctgatgttgcaatctctagtgcctccaaattgaattatacatcttcatgctccccagacaccaaattttgcgggtttattgccaacgcctacctcttttatgtacatgcccaagttgacatggcattaggaaggtttgaccatgcggtgtcctccatagataaggctagaataatagatccaggaaacactgaagtgataaccatgcataacaaagtgaaatctgtggccagagcacgatctctagggaacgagctcttcaattctggaaaattttcagaagcttgcgttgcttatggtgaagggctgaaacaacaccctgtgaataaagtcctgtactgtaatagggcagcttgtaggttcaaacttgaacagtgggagaagtcaattgaggactgtaatgaagctctcaagattcaacctaattataccaaggctttgctcaggcgggcagcatcttatggcaagatggagcgatgggcagaatctgtgaaggattatgagattctcagaaaagaacttccaagtgacacggaggttgctgaggcctatttccacgcacagattgctctcaagtcatctcgtggtgaggaggtatccaacatgaagtttggaggagaggttgaagcaattattggaatggaacaattccagttggctacatctttgtcaggtgtttcggtcatccatttcatggcagcttcaaatcagcagtgctgcaagatttctccatttgttaacacgctctgtaccagatacccatccgttaacttcctcaaggtcgatgtgaacgagagccctgctgttgcacgcgccgaaaacgtgaggacagttccaacattcaaaatctacaaaaacggcattagagtcaaagagatgatctgccccagccaacagctgctggaatattcagtgaggcattacgggatttaggccacgaagccgatgacttgatgttaccttccgcctccagcttctctggagcgagcacaggctttagccggagcagaaccagtcaagttcatcttgatgaggggtaagcatgagaatggaaaagcgaagagcaactcttccccagcattttcaaccccacagcccacccccattctccatttgttgattacatacctactcgatttattcatttaatctatctcgtccgtacatcattgttgcaaaatttctgtagaacccccaaaaaacatctcctgattcatgtgaagaatgactgtaaatttttacttccatgtttaccagacaactgaggaaaaaaggtatagattgcattttttttgtactatctaaat

SEQ ID NO: 149057 - DNA, 1067 bp, Zea Mays
atgaggagttccatcgccgccgccgtgcccgcgctgctgctgctgctcctgctcgtcccgtgcctgcttcacggcgcggacgcccgacctttcaggatcacaagccactcgtccacctccgtgttcagcttcggcggcgacgacttcgccgacactggcagctccctgaggccgtcgtccgcgtcgctcatcgagagccgccgcgacggcgagaccaccgtctcccgccgggccagcggcgacggccgcgtcatcctcgacttcgccgcaaacgacgcctacgatctcccgttcgtgccgtcgtacctggaggacacatcgcacaacttcagcaagggcgccaacttcgccgtcgcgggggcgacggctctggggggtcacgtgggaagctctgtgtccagctttctacagcacaggccgcccacgccgctgagctcgttcgggacccagatcgggtggttcgagcagctcaggccctcgctttgcgccaccccggagcggtgcgacgagtgcctgggcaagtccctcttcgtcgcagggttcggatggaacgactaccttctcctcctcgccgccaacaagaccgtggacgagacgaggatgcacgcgcgcacggtggtcaaggccatcgccgacggcgtggagaggctggtcaagctcggcgccaagcgcgtcgttgtgccggggatcctgccgatgggctgcgctccggtgatcctgggcatgtacgcgagccccggcgagtctggccacgacaggtacgggtgcctcgtcaggttcaacgacctggcgaggtaccacaacgagctcctcgcggacgaggtggcagggctgcaggagaagcggaaggaggacaacgtgagcatcagcttcggtggtgtttggatcccaggtctaagaattagtcctagattttggatgtcacagagacgggttaagcgtgaattagtcatggctaatcagagttgatagggtcagttcaatggtacgaaggacaggtaaaatcaaagtcaattcaattagactataaatataatcaatagaaatgctgtgtatctatccgtctt

SEQ ID NO: 149058 - DNA, 2983 bp, Zea Mays
ctgccgaaccgccgcctggttccctcctccgctgcctgcttgccgctggcctggttccctcctcagcagcggcgggagccattgctcccacgcgagccttgcactgcaaaacacgggaggaaaagaaatccagaacctaccaaacagcaaagtgggtagaggcaaggcaagaaaaggatgcggttatctactcccgctcgcacatgcttcccatccaccttgccgccttcgcaactaccgcctctgctgctgctgccgtctcggccaccccaccgtctcgcgtccgccctctctccccgctcggcgccgcggcgccgcgggctcccttcccctcctccgcccgtggtctccgccatgcgccagcgcggtcgccgcagggccgcgctccctccggccgctgccggcggcggcggcggcggggagctcgctgcccccgattcccaggagaagagaggtggtacagacctcaagacactagctacaaggttttggaaagtcgctgccccctactggtggtcagaggataaaactcaagcaaggctgaggcttgctgctgtgtttgctctcacattaggaaccacagggattagtgttggatttaacttcctcggccgtgacttctacaatgctcttgctgataaggatcaagagaagtttaccacacaactgctctactatctgggtgcctttgctggaggaattccgttctttgtcttgagagactatgcaagagaaactctttctttgcgatggcgatcttggatgacaagttattatatgaagcgttactttaaaaacagaactttttacaagattcaatctcaatcaataattgacaatccagaccaaaggataaatgatgatctcagcgcattcactggaacggcacttgcattctctctcacacttttcaatgctgctgtggacttggtatcattcagcaacatcctctatggaatctatccaccattgtttattgttcttgttgtgtactctcttgggggtactgctattagtgtcttccttggtaagaatttggtcaacttgaatttcatgcaagagaagaaagaagctgattttcgttacggacttgtccgtgttagagaaaatgcggaatcgattgctttttatggtggtgaggaaaatgagttacaacttttattggatcggttcaggagggcttttgagaacctaagtgaattgctgatagcttctcggaatctggagtttttcaccaatggttatcgatatttaattcagattctgccagctgcagttgttgctccaatgtacttctcagggaaaattgagtttggagtaataaaccaatcggtgtctgctttcaatcatattcttagtgatttctctctcattgttttccaatttcagtcaattagtgcattctcagcagtcatcgatcgtctaggtgagtttgatgatctattggatggaaacgagtcctctcaatcatctcaacgtgatagcattgatgggatcaacattgttttcaaaagcagtggtccttgtgttcctagttctaatggatcgctaacacagtctgatccatgcatggttctggaaattcgtaacttgacattgttaacaccaagaagtggaaatgttcttattactggcctcactatggaactaaaagacaaggaccacctactggtgatgggacctagtggaagcgggaagacgtcactgttacgtgctttggctggcctctggactagtggcactggggagatcatataccacgtgagaggttctacgcagcttcaaaaaccaaatccaagttctgataaaccatccagcatgaatttaaagggcgaagaagaatcgttgcaaagttccaagcaaagaagagataatggcatattcttcgtcccacaaaggccgtatatggttctgggaacacttcgtcaacagttgctctatcctacgtggactgaagaggttcaacactcaccagataatgatgataaaaactcagcagatcctcttccttttctgtccgaagtctccacatcagatctggtcggtgccaaatccgaggtgccctcgacagctgaactgatcgaagtccttgaggacgtcaagctgggttacatattgcctcgtttcaacggcttggactctacccatgactgggccagtgttctttcgctgggggagcagcagcgtctcgcgttcgcccggctgttacttgctacacccactttggtcctgctggacgagtcgacaagcgcactcgatgaagcaaacgaggctcatctatacagtcagattgaagctgccggcattacctacgtaagcatcggccaccggaaaacacttcacaagttccacaacaaggcgctgtacatttccatgtctgattcgacggacaccaatccacgcaactgggagctaaagcccgcggacaagcttccagctgaggagccatcgcagttcccttcatgataatctcagcatttgtacccctggttgctgcttcctcatttttcgtccgttatttggcccccaatcagaagtatggctcaactgtaatgtaccgccatagtgctgcaagctgaagttggactgtttcaggatgatcgtcaaggttgctgccatgcatgctacgacgacccgggccgccggacatgatagctctcatgtgcactcagaccttagagaacagaacagtatagaatgtacataactcggatgcaagtacttatggtcttggtgttggtaatcgttgatctgtactacgctcttaatgctctgattcttttgttggatgatgaagtgctaggaatttcagttctgactataggagtgtgctaacttgggtcccccccttttttttttgttgcgttcgcgtggaatgttcgatttaatggcccgtagcaggccgttgggcggggtctcgagtgcaactacggcccgcattcttctcgttctctctcaaagaagaaagaaagaaagaaagaaa

SEQ ID NO: 149059 - DNA, 2596 bp, Zea Mays
gccgaaccgccgcctggttccctcctccgctgcctgcttgccgctggcctggttccctcctcagcagcggcgggagccattgctcccacgcgagccttgcactgcaaaacacgggaggaaaagaaatccagaacctaccaaacagcaaagtgggtagaggcaaggcaagaaaaggatgcggttatctactcccgctcgcacatgcttcccatccaccttgccgccttcgcaactaccgcctctgctgctgctgccgtctcggccaccccaccgtctcgcgtccgccctctctccccgctcggcgccgcggcgccgcgggctcccttcccctcctccgcccgtggtctccgccatgcgccagcgcggtcgccgcagggccgcgctccctccggccgctgccggcggcggcggcggcggggagctcgctgcccccgattcccaggagaagagaggtggtacagacctcaagacactagctacaaggttttggaaagtcgctgccccctactggtggtcagaggataaaactcaagcaaggctgaggcttgctgctgtgtttgctctcacattaggaaccacagggattagtgttggatttaacttcctcggccgtgacttctacaatgctcttgctggatcaagagaagtttaccacacaactgctctactatctgggtgcctttgctggaggaattccggtgagcatattgctgctcttttgtagttctttgtcttgagagactatgcaagagaaactctttctttgcgatggcgatcttggatgacaagttattatatgaagcgttactttaaaaacagaactttttacaagattcaatctcaatcaataattgacaatccagaccaaaggataaatgatgatctcagcgcattcactggaacggcacttgcattctctctcacacttttcaatgctgctgtggacttggtatcattcagcaacatcctctatggaatctatccaccattgtttattgttcttgttgtgtactctcttgggggtactgctattagtgtcttccttggtaagaatttggtcaacttgaatttcatgcaagagaagaaagaagctgattttcgttacggacttgtccgtgttagagaaaatgcggaatcgattgctttttatggtggtgaggaaaatgagttacaacttttattggatcggttcaggagggcttttgagaacctaagtgaattgctgatagcttctcggaatctggagtttttcaccaatggttatcgatatttaattcagattctgccagctgcagttgttgctccaatgtacttctcagggaaaattgagtttggagtaataaaccaatcggtgtctgctttcaatcatattcttagtgatttctctctcattgttttccaatttcagtcaattagtgcattctcagcagtcatcgatcgtctaggtgagtttgatgatctattggatggaaacgagtcctctcaatcatctcaacgtgatagcattgatgggatcaacattgttttcaaaagcagtggtccttgtgttcctagttctaatggatcgctaacacagtctgatccatgcatggttctggaaattcgtaacttgacattgttaacaccaagaagtggaaatgttcttattactggcctcactatggaactaaaagacaaggaccacctactggtgatgggacctagtggaagcgggaagacgtcactgttacgtgctttggctggcctctggactagtggcactggggagatcatataccacgtgagaggttctacgcagcttcaaaaaccaaatccaagttctgataaaccatccagcatgaatttaaagggcgaagaagaatcgttgcaaagttccaagcaaagaagagataatggcatattcttcgtcccacaaaggccgtatatggttctgggaacacttcgtcaacagttgctctatcctacgtggactgaagaggttcaacactcaccagataatgatgataaaaactcagcagatcctcttccttttctgtccgaagtctccacatcagatctggtcggtgccaaatccgaggtgccctcgacagctgaactgatcgaagtccttgaggacgtcaagctgggttacatattgcctcgtttcaacggcttggactctacccatgactgggccagtgttctttcgctgggggagcagcagcgtctcgcgttcgcccggctgttacttgctacacccactttggtcctgctggacgagtcgacaagcgcactcgatgaagcaaacgaggctcatctatacagtcagattgaagctgccggcattacctacgtaagcatcggccaccggaaaacacttcacaagttccacaacaaggcgctgtacatttccatgtctgattcgacggacaccaatccacgcaactgggagctaaagcccgcggacaagcttccagctgaggagccatcgcagttcccttcatgataatctcagcatttgtacccctggttgctgcttcctcatttttcgtccgttatttggcccccaatcagaagtatggctcaactgtaatgtaccgccatagtgctgcaagct

SEQ ID NO: 149060 - DNA, 2738 bp, Zea Mays
ctgccgaaccgccgcctggttccctcctccgctgcctgcttgccgctggcctggttccctcctcagcagcggcgggagccattgctcccacgcgagccttgcactgcaaaacacgggaggaaaagaaatccagaacctaccaaacagcaaagtgggtagaggcaaggcaagaaaaggatgcggttatctactcccgctcgcacatgcttcccatccaccttgccgccttcgcaactaccgcctctgctgctgctgccgtctcggccaccccaccgtctcgcgtccgccctctctccccgctcggcgccgcggcgccgcgggctcccttcccctcctccgcccgtggtctccgccatgcgccagcgcggtcgccgcagggccgcgctccctccggccgctgccggcggcggcggcggcggggagctcgctgcccccgattcccaggagaagagaggtggtacagacctcaagacactagctacaaggttttggaaagtcgctgccccctactggtggtcagaggataaaactcaagcaaggctgaggcttgctgctgtgtttgctctcacattaggaaccacagggattagtgttggatttaacttcctcggccgtgacttctacaatgctcttgctgaggcgagaataatgacatttggaccatacaaacaagtctccctatagctaaaggttcatttgtgctatttaaattggttgtacaatagccacttcggttgtttgtttatacatgttttgtgttttcttttgcaagataaggatcaagagaagtttaccacacaactgctctactatctgggtgcctttgctggaggaattccggtgagcatattgctgctcttttgtagttctttgtcttgagagactatgcaagagaaactctttctttgcgatggcgatcttggatgacaagttattatatgaagcgttactttaaaaacagaactttttacaagattcaatctcaatcaataattgacaatccagaccaaaggataaatgatgatctcagcgcattcactggaacggcacttgcattctctctcacacttttcaatgctgctgtggacttggtatcattcagcaacatcctctatggaatctatccaccattgtttattgttcttgttgtgtactctcttgggggtactgctattagtgtcttccttggtaagaatttggtcaacttgaatttcatgcaagagaagaaagaagctgattttcgttacggacttgtccgtgttagagaaaatgcggaatcgattgctttttatggtggtgaggaaaatgagttacaacttttattggatcggttcaggagggcttttgagaacctaagtgaattgctgatagcttctcggaatctggagtttttcaccaatggttatcgatatttaattcagattctgccagctgcagttgttgctccaatgtacttctcagggaaaattgagtttggagtaataaaccaatcggtgtctgctttcaatcatattcttagtgatttctctctcattgttttccaatttcagtcaattagtgcattctcagcagtcatcgatcgtctaggtgagtttgatgatctattggatggaaacgagtcctctcaatcatctcaacgtgatagcattgatgggatcaacattgttttcaaaagcagtggtccttgtgttcctagttctaatggatcgctaacacagtctgatccatgcatggttctggaaattcgtaacttgacattgttaacaccaagaagtggaaatgttcttattactggcctcactatggaactaaaagacaaggaccacctactggtgatgggacctagtggaagcgggaagacgtcactgttacgtgctttggctggcctctggactagtggcactggggagatcatataccacgtgagaggttctacgcagcttcaaaaaccaaatccaagttctgataaaccatccagcatgaatttaaagggcgaagaagaatcgttgcaaagttccaagcaaagaagagataatggcatattcttcgtcccacaaaggccgtatatggttctgggaacacttcgtcaacagttgctctatcctacgtggactgaagaggttcaacactcaccagataatgatgataaaaactcagcagatcctcttccttttctgtccgaagtctccacatcagatctggtcggtgccaaatccgaggtgccctcgacagctgaactgatcgaagtccttgaggacgtcaagctgggttacatattgcctcgtttcaacggcttggactctacccatgactgggccagtgttctttcgctgggggagcagcagcgtctcgcgttcgcccggctgttacttgctacacccactttggtcctgctggacgagtcgacaagcgcactcgatgaagcaaacgaggctcatctatacagtcagattgaagctgccggcattacctacgtaagcatcggccaccggaaaacacttcacaagttccacaacaaggcgctgtacatttccatgtctgattcgacggacaccaatccacgcaactgggagctaaagcccgcggacaagcttccagctgaggagccatcgcagttcccttcatgataatctcagcatttgtacccctggttgctgcttcctcatttttcgtccgttatttggcccccaatcagaagtatggctcaactgtaatgtaccgccatagtgctgcaagct

SEQ ID NO: 149061 - DNA, 2603 bp, Zea Mays
ctgccgaaccgccgcctggttccctcctccgctgcctgcttgccgctggcctggttccctcctcagcagcggcgggagccattgctcccacgcgagccttgcactgcaaaacacgggaggaaaagaaatccagaacctaccaaacagcaaagtgggtagaggcaaggcaagaaaaggatgcggttatctactcccgctcgcacatgcttcccatccaccttgccgccttcgcaactaccgcctctgctgctgctgccgtctcggccaccccaccgtctcgcgtccgccctctctccccgctcggcgccgcggcgccgcgggctcccttcccctcctccgcccgtggtctccgccatgcgccagcgcggtcgccgcagggccgcgctccctccggccgctgccggcggcggcggcggcggggagctcgctgcccccgattcccaggagaagagaggtggtacagacctcaagacactagctacaaggttttggaaagtcgctgccccctactggtggtcagaggataaaactcaagcaaggctgaggcttgctgctgtgtttgctctcacattaggaaccacagggattagtgttggatttaacttcctcggccgtgacttctacaatgctcttgctgataaggatcaagagaagtttaccacacaactgctctactatctgggtgcctttgctggaggaattccggtgagcatattgctgctcttttgtagttctttgtcttgagagactatgcaagagaaactctttctttgcgatggcgatcttggatgacaagttattatatgaagcgttactttaaaaacagaactttttacaagattcaatctcaatcaataattgacaatccagaccaaaggataaatgatgatctcagcgcattcactggaacggcacttgcattctctctcacacttttcaatgctgctgtggacttggtatcattcagcaacatcctctatggaatctatccaccattgtttattgttcttgttgtgtactctcttgggggtactgctattagtgtcttccttggtaagaatttggtcaacttgaatttcatgcaagagaagaaagaagctgattttcgttacggacttgtccgtgttagagaaaatgcggaatcgattgctttttatggtggtgaggaaaatgagttacaacttttattggatcggttcaggagggcttttgagaacctaagtgaattgctgatagcttctcggaatctggagtttttcaccaatggttatcgatatttaattcagattctgccagctgcagttgttgctccaatgtacttctcagggaaaattgagtttggagtaataaaccaatcggtgtctgctttcaatcatattcttagtgatttctctctcattgttttccaatttcagtcaattagtgcattctcagcagtcatcgatcgtctaggtgagtttgatgatctattggatggaaacgagtcctctcaatcatctcaacgtgatagcattgatgggatcaacattgttttcaaaagcagtggtccttgtgttcctagttctaatggatcgctaacacagtctgatccatgcatggttctggaaattcgtaacttgacattgttaacaccaagaagtggaaatgttcttattactggcctcactatggaactaaaagacaaggaccacctactggtgatgggacctagtggaagcgggaagacgtcactgttacgtgctttggctggcctctggactagtggcactggggagatcatataccacgtgagaggttctacgcagcttcaaaaaccaaatccaagttctgataaaccatccagcatgaatttaaagggcgaagaagaatcgttgcaaagttccaagcaaagaagagataatggcatattcttcgtcccacaaaggccgtatatggttctgggaacacttcgtcaacagttgctctatcctacgtggactgaagaggttcaacactcaccagataatgatgataaaaactcagcagatcctcttccttttctgtccgaagtctccacatcagatctggtcggtgccaaatccgaggtgccctcgacagctgaactgatcgaagtccttgaggacgtcaagctgggttacatattgcctcgtttcaacggcttggactctacccatgactgggccagtgttctttcgctgggggagcagcagcgtctcgcgttcgcccggctgttacttgctacacccactttggtcctgctggacgagtcgacaagcgcactcgatgaagcaaacgaggctcatctatacagtcagattgaagctgccggcattacctacgtaagcatcggccaccggaaaacacttcacaagttccacaacaaggcgctgtacatttccatgtctgattcgacggacaccaatccacgcaactgggagctaaagcccgcggacaagcttccagctgaggagccatcgcagttcccttcatgataatctcagcatttgtacccctggttgctgcttcctcatttttcgtccgttatttggcccccaatcagaagtatggctcaactgtaatgtaccgccatagtgctgcaagct

SEQ ID NO: 149062 - DNA, 1984 bp, Zea Mays
gcagcactacaagatcagaatatctgattcaaagatgcagtgtacatttacagataaatacactgacatacatttacaaaaaaaaagtacatattaactcgttttgtttacaaaataaagttaaacccaaaggaaatggacaaatgagaagaacccataggtttatcaggcttcagacacagaagaattttgttgttgttgttattgcgtgcagcagctcaaagttcagtgtcacagaacttcaccatcaggtcggaaaccatccttcgtgccaaaggaatgtagctcaaactatacctgaggtgcaaaaatatggagaatacagaagcataataaattggtttgttcagaaaattttgctcctactgtaaaatataccagtaatttgacgcaaacgagcagcacactgcttgctaagatcgagtttcagagtgccacagtaccaccatccagcaagactggcctagtggcctgtgcacattcattcaaaaaatgacaagaaggtatgacagtcacaagccataacctataaattcagttttacagtttggtactccctccattcaaaactgtagttcgtttagtgttgtcctaaatcaaacttgtctttgatcaaatcataggaggagagaccaacatctagcacatcaaagtagcttcattaaataaaatttgaaatgcattggtaatacatttatttcgttttgtaaatgttaacatatttgtttattaaattggttaaagttagagaagtttgacttgaaacaaaaattaaaccgacttacaaaacagagggagtaactggaagccacactgtttatgaacagacagtgagcagcctagcatatactccattactgggaagatagttcaaagaattttttatctttcatattatgcacagtcatttaatttatggtatcaaaactagaagtatcttatgtaaaatgcacattgtcacttaccactaaacagtaccatgtaaaataccctacagctaacagctgtatatgtacataaacaaattagcactattttgttcttctgaacatgccaaccccactgagtaataaagcacaaaagaacagtgttatatcagcatcagtagccagagtcccagatcatgagtggtacacaagtttgagatggttctctgtttagtactcatttgtttctttgacatggattgaacatgtaaaatgattgaggacatcatgcataacatagacgaaaactatgagtaacaactgcagtcgattcatggaaaatagcaggtgacaacaattttgtattgtcccgatagtaaggtaccagctaccagtctaattggcagctattttgactcataagatatttagaagggtaacattccatatgatgtctgatatgttatttatcagtcacattaaggaagacatatttgcattcagtattgttagtgcaacggcagttgtatgagtatgacttaccaaaatagggcgcagatctcacatatgacagcgatcagtgttagcagcttgtcatgaatctgcccagttgaaccaaatgcaaagatggttatgtgtcttgaatatatgcctgctcaatttagtggctagagaacaagtccatgggaacgttgttgtcagttgggcaaaccatttgtgctcattccatctaggctggtgtttaggttgtggtaattttatttcattttaaaaactattgtaattccgttgctcttgagtaatgatatttggtttgtccatggtgaaaaaaaaagagaataaggccatgagataaaaagaacaagaacagttcaaatatacgaacccaaagagcaaagattagagccaaaacaacacatccaacataaacagccgttgcatacagacgaactggatcaaacatcatccttagctgtttttgagggcccataacaaaggctgtgctgccaaacaaaggttgaaatcagcatatggtaagcattcaaaattcaagaaaa

SEQ ID NO: 149063 - DNA, 660 bp, Zea Mays
atgaaaaatcagcattttcatgaaagtccatactctatcttaaccaccaccaaaccgaggaatggaaagggtggatgctggttagtgagcgcctactccatcgagaccacctgccacgcgcccaggctgcaggatgcctacggcgaggtctactgcctgctagatgtgttccttgttcagtcatatttcaatattgtaaacattgatggacacaaactcatattgtacttaaaacaaggtattgaaatggcatgcttgacaggtaactgtattgcaaaagaatatggtacttatgcacctaaggagaaagggaagaagcatacttttttggctctgaatgaatacttcttcaggtacagggatgaccggaatgcagcagaaattttcagagctaatggtgatataaatgtacttaaatcacactgtaatagtcagagcaatcaagtgaagagtgggtcgatggatgcgggcgggtggggcgcgtggagggggaggctgctggagcagcgccgaggcagggggagcggagtcgaggggcaggggcgtgggcgcggacctaggagaggcagcgcgggggataacgaagagtgtagccgcggtatcgcgagcgcccactctaggcacttaattagtagtagggatgaaagaagaaccttttga

SEQ ID NO: 149064 - DNA, 102 bp, Zea Mays
gctgaacatccttccagtcccaaaattatttccatttatcgtgccttgtatcctgtttgagaataccatgtcagtaaccaagttcaatgccatgatctatgg

SEQ ID NO: 149065 - DNA, 964 bp, Zea Mays
cacgacaaagcagctatcaactatcccggccgccggtcgtcgtacgtccaagctacatatatatacgggaaaaaaatgagcggcgccagacgagctccagccctcgcggcggcgctgctgctgctgctggtggcgtcgccgccggcctctgccgccgcgacgctgcagtgcgcgcaggtggcgcagctcatggcgccctgcacgccctacctgacgggcgcgcccgggatgacgccctacggcgtctgctgcaacagcctggccgtgctcagccagctcgccgccgcgcgcgccgaccgcgtcgccgcctgcgcctgcgccaaggccgccgccgcggggctcccggccgccgtcgacttcgcgcgcgccgcggggctccccgccgcctgcggcctctccatcagcttcaccatctcccccgacatggactgcaaccaagttacagaggaaccatgacgccaaccggacccgagacaacacacgtacgtcttccaacgaaataaaatgagcaaagctacaccggccggctgtgggtcttgctcttctcttttattaattccttcaggtcatcccctctctgtctctctctctctctctctctctctctcaaaccaaaaggtttttccgttcaggttgaaattttgagtgtttctcattcctgtggatttaaactgtatgatcgatccggtgcgtgcttttcaattccaagcaaccgcagccgcagtagatgaagttcaaatttctattttactgagaaagctccaaatccacgagaacaacgtattgttcaagctcctaccaggtttaattttacagcaaccgaatgcacgaacggcacagatgaaacgacagaacaggacacactgctgacgagacagcgaaatgaacagctagctctcgaagtgtgtaacacccactttgtaatttgttagaaataatatcaacagagaaataatttctcctt

SEQ ID NO: 149066 - DNA, 464 bp, Zea Mays
gtcctcgttctctcctccgcaggcattggtttcgaatatgttttatcgttgaatccccaacgaggccccccttattatgtgtgagatctccccaaacgacgacatttggaaattcatgggcttcggcgaggtaagcagttccctctaaattatttggtgctaccaatttagcgtgcctttttgttggcctttaattttcggtgatatcttcatgtgtggctactactgcttgtgaggcgacggtactacgaggagctctcgaaaattctatggaatgccatgtttctcaggtgcctgcactaccatctactccatgtggtaccagtggagaacacatctgcagagaaaaaacaatcccaagtcctcgtatgctgaaaaagaatcttaataccaagaggaagaagacctacttcttaccctaatgcaaactgtgtgtttgtattgacacaatgtctgtgaattat

SEQ ID NO: 149067 - DNA, 2533 bp, Zea Mays
gtcgagcgtagcagggcgcattctacggccgtaaatggcgatgaccatgcgtggctttcactcccaagtttcgcttcgcctcagacagagtgcagggccgcgggtagctagcgtcgtcgtcttctttcgcggcctcttcccccggccggcccggccctcctatatataaacgcatacagcctcgtcggcctccacccagagcggcggcactgagagagcagggcacagggcgagatcgcgctgcccattgcgcttgcgccgtcctttccttcttttctccggtagtccggtaacttcgttctgggccctctcggccatggccggctactccatggccgccgtcgcccttgccggcatcgccctagcgctcgccgccgcgacgacgacgcaggtggcgtcggccgccggcgggcacgactaccgcgaggcgctgagcaagagcatcctctacttcgaggcgcagcggtccgggcggctccccggcagccagagggtcgcctggcgcgccgactccgggctgctcgacggcaaggccaacggggtggatctggtgggcggctactacgacgccggcgacaacgtcaagttcggcctgccgatggcgttcacggtcaccatgatgtcctggagcgtcatcgagtacggcgaccagatggcggcggccggcgagctcggccacgccaccgacgccatcaagtggggcacggactacctggtcaaggcgcacccggagcccaacgtgttgtacggagaggtcggcgacggtgactcggaccacgactgctggatgcggccggaggacatgacgacgagccgccaggcgtaccgccttgacccccagaatcccggctccgaactcgccggggagaccgcggcggcaatggcggcggcctcgctcgtgttccgcagctccaaccccggctacgccaacactctcctccagcactccaagcagctgttcgatttcgccgacaagtaccggggccggtacgacagcagcatcacggtggcgcgccagtactacgcctcgtccagcgggtacggggacgagctgctgtgggcggcggcgtggctgcacgaggcgacgggcgacgcgcggtacctggactacctggccaacaacgccgacgcgctgggcggcaccggctggtccatcaaccagttcggctgggacgtcaagtaccccggcgtgcaggtcctggccgccatgacgcttctgcggcggcggggagacgccggcgccggcgcgcacgccgacgtgctgcagcggtacaagcagcaggcggacctcttcgcgtgctcctgcctcggccggggcgggcccaacagcgtgcgccggacgcccggcggcatggtctaccaccagaactggaacaacgtgcagttcgtcaccagcgccgcgttcctgctcgccgcctacgccgaccacctcgccgcggccggccagggcgcgcggtgcccggccggcgggaccgcgcagccgtcggagctgctggcgttcgccaggtcccaggtggactacatcctcgggagcaacccgagggcgacgagctatatggtcggttacggcgccacgtacccgcggcaggtgcaccaccgcggcgcgtccatcgtgtccgtcagggccaacccctcgttcgtcagctgccaggccggatacagcagctggtaccaccgccgcgctgccaaccccaacctgatcgtcggcgccaccgtcggcgggcccgacgagtatgacaacttcgccgacgagagggacaactacgagcagacggaggccaccacctacaacaacgcgccgctcatgggcgtgctcgctcgactggctgccggtcacggcggtggcggtggcaagtttggtcatcactcgctcgccgccgatgcagtttcttcatcgacatccatcaatgacaccaatcgcacctcactgccatctccttctccggattcagaacacccgtcggcgtggcccatcgagatcgagcagaacgcgacggcgtcgtggacgaagcagggcaagacgtaccgccggtacgcagtgacggtgaccaacaggtcgcccaagaccgtccacgagctccacatcggcatctccaagctctacggccaggtgtggggcgttgacaaggcgcggtacggctacgtgctcccgagctggataccgtcgctgctcgccggcaagagcgccgtgttcgtctacgtccaggctgcgccaccggccgacgtctgggtcaccggctacaagctcatctgagatggcgcccctgtggtgaacgtcctgtcctgagtagtgtccctgcccgtgtgtggttgtgtggaaggagtgaaatgaaggtttgctagtttaagaggacaacgagtgatgtggctagtatcaacctcggtcatcctcattgtccgttaatataaaagctaagcagttcactagcagctatagtgttgttcgtatagttgtgtggtgattgaaattggaataattagatggtgaattgtacgctacaacaacaacatattggaataatttgagattctg

SEQ ID NO: 149068 - DNA, 769 bp, Zea Mays
agcatggttgtggacaacggagcgcccgaagcaccacatgctggtgctaccggcagcgtcatgtcatccgagatggccgtgagcccctcatcagcggcttcaagcaaccatgctccatttatgccgccggagatcccaggcatggccatggacgtgccaggcctagactcgacattcggatctgacgtagggaatggacctctgcaattaggaccagatggctcgtcgagagactccattagatccttggggcagctctggaacttcagcctctctgatctaacggcggatttgacgagtttgggagcagatttggacgtgctggagaactacaccggcacccctttcctgccttcggactcggacattctgctcgactccccggaccaagatgacatagtcgaatattttgctgacgccatcaacgggtctcagtcagacgaggagaggtcatagcgaagctagctcaaggtttttcaggcagggcgcagggatgtgtcttctcatggcctgctgcgagagatgctgcggctaatgtaatgtaactgtgccttgggcccgcgcccctgtgtgctgcggcaagtgtagctggtttaattagactttttttttaatttgtagctggttaattagaatcctaattctttggaataaaaaagtagtagctggagttatcggtaagaatcgctggatgtaatgcaaagctcgctctcacagtcacagctgggtgaccacaggaggacctcctttttgtttgttgtatatttgc

SEQ ID NO: 149069 - DNA, 1035 bp, Zea Mays
cccgtgctcgcgcgcgcgcgcgctctctctctctctctctctcccctccctgtctccctccccctctcggagtctcggtcgtggcgacgacgactgggcaggccgacgagcacccaccaggaaaagtattgctcctagcctcctacagctagttctttttatgattaagctccaatgaaggattctcaggatattcagagcacaacagagttgcagtcatcagcacagggtactaatgaagtgcaaagtcagcaaccaaacccgatgaccactgatgctcctgcaggaaattcgggttccttgtctatagctagtaatgacagtaagaaggtgtctcgcgaagacattgaacttgttcagaatttaatagagcgttgtcttcagctatacatgaacaaaggagaagttgttagaactctttctactcgtgctagaatagaacctggcttcactactttagtatggcagaaactcgaagaagagaactccgagttctttagggcttactatatccggttgaaattgaaacggcaaatcatcttgttcaatcatttattgcaacaccagtacaatttgatgaaatatccagcacctccaaatgttccattggctccaatacaaaatggaattcatcatatgccagttagcaatttaccaatggggtatccagtacttccgcagcctatcatgccggctcccggccagcctcacatggacccaatggcctgtggtctgtccaatggtcatgtggtcaatggaatacctgcaccaggtggttatcatccgatgcgcatgaactctggaaatgaaagactatggcccaaccagcgttctggtagtagcaacccctctgatgataaaatgaaatggccgctcccattcgcagcagatttggacgtgctggagaactacaccggcacccctttcctgccttcggactcggacattctgctcgactccccggaccaagatgacatagtcgaatattttgctgacgccatcaacgggtctcagtcagacgaggagaggtcatag

SEQ ID NO: 149070 - DNA, 828 bp, Zea Mays
cccgtgctcgcgcgcgcgcgcgctctctctctctctctctctcccctccctgtctccctccccctctcggagtctcggtcgtggcgacgacgactgggcaggccgacgagcacccaccaggaaaagtattgctcctagcctcctacagctagttctttttatgattaagctccaatgaaggattctcagacttgttctacaggatattcagagcacaacagagttgcagtcatcagcacagggtactaatgaagtgcaaagtcagcaaccaaacccgatgaccactgatgctcctgcaggaaattcgggttccttgtctatagctagtaatgacagtaagaaggtgtctcgcgaagacattgaacttgttcagaatttaatagagcgttgtcttcagctatacatgaacaaaggagaagttgttagaactctttctactcgtgctagaatagaacctggcttcactactttagtatggcagaaactcgaagaagagaactccgagttctttagggcttactatatccggttgaaattgaaacggcaaatcatcttgttcaatcatttattgcaacaccagtacaatttgatgaaatatccagcacctccaaatgttccattggctccaatacaaaatggaattcatcatatgccagttagcaatttaccaatggggtatccagtacttccgcagcctatcatgccggctcccggccagcctcacatggacccaatggcctgtggtctgtccaatggtcatgtggtcaatggaatacctgcaccaggtggttatcatccgatgcgcatgaactctggaaatgagtaagt

SEQ ID NO: 149071 - DNA, 989 bp, Zea Mays
gaaccaagcgagcaataatacaagctagcaccaagtagtagttgctggctctccaacagcagcagcagcaggcagtagaagctgcagagacaagatagatcgaggaagaaggccgcatttcgagctagcttagctatagagagcgggcgcagctagcaatggcgaagcagcagcaggaggtgtacttcgtgttcatgaactttgaccccgtgtacgagcgcctcagagctgagcggtcgtccaaggaggggtcggccacgctggacgcgtacctgagccacaagcacgacaagctgctcgccaagctgctccagcctgactcctaccggaagaggtcgtcgctcgccatcgtcgatggcttcgccgtcgagataaccgaggatcaggcaagcgttctgagatcggccaaggaggtgagggtggtggagaagaaccaggagctcgcatgatacgatgatctacttctcagtcaaaccggccggccggacgggacggactagttttatctgtagatgctctggcacgcaccgatcagctggtagctatggctatatttatacatatatattgtttattactaaggtaataaggtaaaggagagtggtcgtcgtcgtcgagttgttcctagctatagcctatagctacttatatagctagtcaatcgagtgttagttgtgagtgagtgtgtgtgaactcccatgcatgcatgcatgcatgcatatggctttgttgactgcctagtcaaacttagctgctgcaagtagtactgagtactgccctaatatgtataataatatagttcttcgctagctatagggcctaatgatcatcagaggatcgacgacttcgagacgactatattattgaactccatccatctgtaatggccgtgatttgttcttcagtcatgcatgtacggcctgagtaaccactattcacaaattaatgtgcatcaatgtgaactcacgtactgtgattttggatgttaa

SEQ ID NO: 149072 - DNA, 185 bp, Zea Mays
ttcttcacatttttttccaatcccatccaatccatgtgtattgggaataaccgaacaagcccttactgctgctgcctggatggatctgaaggaaggaaggaaggaggagggctagtcagccgcaaccagtggtggtgacagcgacgccatgatcgactcgagtcgagtgacgagtgaggataagg

SEQ ID NO: 149073 - DNA, 742 bp, Zea Mays
gtgttttgattactaattaataggggttttatttcactcgatccaaagacgacactactaactttgcaaacaggcacaaatgcgatgcgtcatctacgcgcagatcgagcacctggaatcctgtgaatacacagcagcacagctgcatgcagagtctacaactacctgaggatctgtcgccaccgaacgcagcgggttcagtcgtaggcggcgctgaagaaggccttgacgacgttggcggagaggatctggaggacgccggagttgttggcccggccgacgcagcgcggcgacttgaactggctgacgggggcgccgagggagaggtagtggcggagcaccttctggaaggtgccgcgctgcagcacccgcagctcgagcgggccgatgccgcgcgccctccgcgacccgacgtagcccgggtccgcgaaggcgcggtccagctcgtcgcagcagctctgcagcacgtcgtcgccggcgtcggcgttcagctcccagaacaccacgtagtggcccgggtcgcgcgacacctccgcgtggctgctgtagtccaccacctccagcttctccgccgccaggaccttggccgcgctgtccacggccagctgcaggtcctgctcgctgctcttgtcgatgttgatgctcagcaacaggttccgccggcacacgaacttgagcttcggcgtcgagttgtagaacccggccacctgcaccacgtcccctagacggtaccggtacagcc

SEQ ID NO: 149074 - DNA, 286 bp, Zea Mays
atgtgtttgcactagacaagcttctgctttatatgttgccatttgacctcggggtgaaggaaggggatgaactgcgtacgaattcttacgttctggaaatcttaagagagaccaggttcccacgggttcgtggtgccggtgaagttacgtcacctaaaacaatccttcagcacgaccggatcatatggcttggggggttgaattatcggattgccctgtcttattgttcagcaagggctctcgtggaaatgcatagctgaaagcagttattggagaaagatcaggt

SEQ ID NO: 149075 - DNA, 273 bp, Zea Mays
atgacacccagaggggatgaagctgctgctagtgctgccaaggtattggaaaatagtgtcaatgttgattgtgctcatggaaatctgaccatttataaagaagagttcggagatgtaccaattgtggagaaaaatgatttatcaccccattcagcaacaaaaaccaatacgaatgtgctagcaatagtaccagcagcagacatgacccccgcaccatttccagaaaatttcgatactgctaactcagcctacaattgttcaaaactattttag

SEQ ID NO: 149076 - DNA, 876 bp, Zea Mays
cgcaccgtctttgcttggactgaagggtgctccctccgatcctttccttgtttactttacccatgcagcttcatcattcgtatctcaagtcaaggttttacttcatatgatctgtattttattttccaacctgctgtctcgaactcttgatctgtctttgcttgagctgcttattaattattatcttgcatatatattaggcatctgatgcatacatccatagcagctgccaggctattttaattttaccatgtgcgtgcttactgttcttctgtggttgttatatagctgttgtatatatataatggagatccgatgcttttttgtacttttcttgcccttttgatatgtacacatactagctatatatataatccttgatctgctccctgaatctatatactgttcgatctcttccaaaaagttatcccagtttctgaagaaaagaaaaggaagaaattgatttgctttgcatgtgtgtagatcttacaggacaggaccggatccgatccatgcaggtttctgctgtctttctgtgatctgtggaagaagatggtgtgcactgtacgttctagactagctagctaggactatatataaacgagaatctgtggaatcataaaaacacactttcgttcgatcgattcgtcgtgtcgtgcaacagcgaaacgtctttcgatctccctgtttatttgctttggaactttgcatgcaactagctattgattcgacgtgtgctagcatagcagctgtgtcgtctgtgtgatgctcctccacctttcttttatttggagcatattatgaccaccactacttggaccgaatcatcaggtttccaattcttttgccctattcccatgaggtttgtgatttatc

SEQ ID NO: 149077 - DNA, 2646 bp, Zea Mays
gggaattgaaggcgcagatcgctgaccgcgccgccgtcacttgccgagcacgcaccgcggtagtagccgacaccgccgcgcacaacgttccgttcgtctcccctcgaaccagtcctcccaccaaaaacgcactcccgaacccgactctcctcttgctcgctctcggtggcgtctccgcctccgcagtccgcactcgcgcacgcttcccttcccttcctcgcccacgcggacgcggccacggccgctccaagctagcagcagagcgagagcagccaattttggcgcacctctctcactctccctccctccgttcagcagcgttcgtttcgttgctcactcagatccagccattcaggtgagagagtaggggcagcgatgcccacgccgccgctccgtggggcggggctcctgctccgtatctgcctcttcctctgcctctcactccgcccccgcctggcctcctccgagcccgacgccgacaaggcggcgctgctggcgttcctctccggcgtgggccgcggcgccaccgcccgcgcgcgcatcaactggtccaccacccacctcgcctgcagcgccgacggccccggccccggctggacgggggtcacctgcagcgcggacggcgcgcgcgtcgtggcgctgcacctcccggggctgggcctctcgggcgccgtgccgccgggcacgctcggccgcctcaccgcgctgcagctgctcagcctgcgctccaacgacctctccggcccgctccccgccgacctcctgcgcctgcccgcgctcgagggcctccacctccaccgcaacgccttctccggcgcgctccccgccgccctcgcggggctgaccgcgctccaggtgctcgacctctctttcaacgccttcgacggcgccgtccccggcgcgctcgccaacctcacccgcctcgtcgcgctcgacctctccaacaactcgctttccggccgcgtcccggacctcggcctccccgcgctccgtttcctcaacctctccaacaaccgcctcgacgggaccgtgccggcgtccctcctccgcttccccgacgccgccttcgccggcaacagcctcacgcgcccggctccggctcaggcgccgccggttgttgtcgctccgcctcctggcctcgctgcgcctccccccgcgaggcggcggcccaggctcagcgaggcggccatcctcgccattgccgtgggagggtgcgtcctcgggttcgccgtcgcggcgctgctgctcctcgcattctgcaacagcagcagggagggccgcgatgaagagacagtaggcggcggcgcggctgcagggaagggcggggagaagaaggggagggaatcgcccgagtccaaggcggtcatcggcaaggccggggacggcaaccggatggtcttctttgaggccccgtcgctggcgttcgacctggaggacctgctccgcgcctccgccgaggtcctgggcaagggcgcgttcgggacggcgtaccgggccgtgctggaggacgccaccacggtcgtcgtcaagaggctcaaggaggtgaacgccgggcggcgcgacttcgagcagcagatggagctgctcgggcggatccgccacgacaacgtcgtcgagctccgcgcctactactactccaaggacgagaagctgctcgtgtacgattactacagccggggaagcgtgtccaacatgctccatgggaagaggggagaggacagaacaccattggactgggaaaccaggctaaagatcgccctgggagcagcacgaggagtggcacacatccacaccgagaacaacgggaggttcgttcacggcaacatcaaggcctccaacgtgttcatcaacaagcacgagcgcggctgcgtctcggaccacggcctggcgtcgctgatgaacccggtgacggtgaggtcccgttctctcgggtactgcgcgccggaggtcgctgacacgaggaaggcgtcccagtcctcggacgtctacagcttcggcgtcttcgtgctggagctcctcacggggaagtcgcccgtccagataaccggcggcaacggcggcgacgtggtccacctggtgagatgggtgcagtcggtggtgcgggaggagtggaccgccgaggtgttcgacggcgagctgctgcggtaccccaacatcgaggaggagatggtagagatgctccaggtcgcgatggcgtgcgtgtcgaggtcccccgagcggcgtcccaggatggcggacgtggtgaggaccatcgaggaggtgcgtcggagcggcagcgggaccgcgaccgggacggggacgcggccgtccaccgaggcctccaccccggccaccgccgctgaagcggcccagagcagggcggaggagggcggctcgtcggcggtggcgcagtgaccggacgcgacgcaggccgagctgcttgctggtggctcgtagcttggatgatcctgtgctttattttggcgggtgctgtaccattcgttctttcgtgttacgaaatcgtaacagaatgtcacgtggacgtggacacggtggtcggatttttggcagcaactgctcgctgctgactattgattgactctttgtacaagtgtgaaggaagaaaggcagctgtctcatctgttgatcaaggatatgcttgagtac

SEQ ID NO: 149078 - DNA, 2030 bp, Zea Mays
atggcgtacatggagctccgcttgacagatgcgctggttggccgtggtggcgacagggtggaggacacggtctcagggctgcaatcctccaactccgccacctcctccgtcgccacgccgatgtacgacgacgtgttcgactcttcggtggccccgatgtacccaggcgatctgcacgccaccgccatcctcgacgtgctgtcccgcgtgcacacgctggacaagtgcatgacctcgcaggacaagctcgtcatcgacctcgatccagacgacatggagacaccattatcggagtcggcccttcccgtcgttcccagtgccaatgaaatggagacgcccaccacctgttcgactccggtcctcaccgagcacgcgccggccgaggccgcacacaactgcacactgcgggtgccccgtggagagccgcttccgcgcctgcttcacgcgttcctagcgcacgattggctcgaccactccgccgacacagacgactccgtgctaacatccatgtctgggtgcaccaagctcgtcgagctgcaaccgaggggcgtcaacctcagaggctgcattccggatgctctgttcgatgtcgagcttgagacgctcaacgtgccgtcgcacgcgctctcgggcatacttcccttgggctccaccaagctggcggagatgctacaatcgctcgacctctccgtccaccagctcacctatggcatcctcaccgagatgtcgctcttcttcaagctgcgtgtggatctgtattgcgccatacctgtcgacctctgcgagtctgttacccaaggggttgttccagcaggagaagacgaggatgaccccaagcaactctggcaccacctgcacgctcgctggccaagcgaccaacagaaacagcacctgcgctcacagacacaacacacacagaggcatcacagagcaacgacagccgaagaaagaaccaactatctctctggcctcattccaaagctcgtcaagcccaattcggtatatgctcttgctactaaacttcctgattggattgggcgcacacagtcacaaaaactaagaagctacagaggcaatatccctgggttaagaccaattccatggccatccttcattttactaagcagagagaataagcttaccaagtcatcagtcatggtcactgctagtgcgattcaggcttttgtgaatctggtcctcacttcttgtgatgctggttattccattgtcatgtttacaccaaattatttcatcacctacatgtcgttccagatgacaggtgctaccgacatattagttggtggttgcgattccaggacacttcattatgatgttgattggttggagaaggttctgaaagataaggagcatgtccctaaacttgttactgttttgaattcgaggaacccctctagagcttttattcccaggcctatgcttgagagaatttcagatctgtgcaaaagtgtaggacaacataccggtctgtgtttccatcatcggataacgcctgccgtgctgctcgctttcatattagttgaatttcctacaatgaggtatttttgtaggtcaactaagcttgcatgggcagtattaccttatcattattacaacagtctgttggttggtgtggagttcctgaaacacatgatacttggattgatgtacaacaaagagctctatggccaccacggatccaccagtcattgtctacactatcagcggcttgggggcaagccgcatttcaagcggtggggaatgtcagtacactgccatgtggtgtcatgtgggcccttggaaggtggcatggggtattctctgctataaaatggagaagctgcgcaggcgataggcatcaatgaaatattcagaagacatccattccatattgtgcttctacctcttcagtctcttcctcctatcttctagagttctacttctccgtatagatccttagctcgttgcaactttcctttcctatcgtcatgtactcagatcataattgaatccaattatccagtgtttggttg

SEQ ID NO: 149079 - DNA, 2157 bp, Zea Mays
gcgatggcgtacatggagctccgcttgacagatgcgctggttggccgtggtggcgacagggtggaggacacggtctcagggctgcaatcctccaactccgccacctcctccgtcgccacgccgatgtacgacgacgtgttcgactcttcggtggccccgatgtacccaggcgatgtgttcggctcttcggcggcctcacccccaggcttcgatggcgagcctactttcgacgaggagcacaacaactccatcaccgagtacgtcgacgtctcgtgccacgaccatctcttcctcctcgacaccacctgggactcctcgcagcagcacaacgccagcatcccaggacggcgccaacatcccggttgcagcgcgcggctgcagcgccgaccgctccagcacctgaccgtcgaccccgtcagcgccgtggacaccatgcctctcgatttcaatctcactctcgacgagttcaaccagcggttcgacgcgtccgctagcgtgccgcctagcccggtcgcagtcatcgccgacaattggggcgggtgcttcgacagcgagcagtaccacacgagaccatccgtcgtcgctgatagttggggcggattcttcggtggcgaggacctcgcttcgtcaggcaacgccacgagattcgtcctccccatcgcctccaccgacgagcccagcatcgacatcgcgctagcccgtgccaactccgaagtcacagatgactccgtgttcgtgaccaccgaacctgccggctacgacgactccgagctgcacgccaccgccatcctcgacgtgctgtcccgcgtgcacacgctggacaagtgcatgacctcgcaggacaagctcgtcatcgacctcgatccagacgacatggagacaccattatcggagtcggcccttcccgtcgttcccagtgccaatgaaatggagacgcccaccacctgttcgactccggtcctcaccgagcacgcgccggccgaggccgcacacaactgcacactgcgggtgccccgtggagagccgcttccgcgcctgcttcacgcgttcctagcgcacgattggctcgaccactccgccgacacagacgactccgtgctaacatccatgtctgggtgcaccaagctcgtcgagctgcaaccgaggggcgtcaacctcagaggctgcattccggatgctctgttcgatgtcgagcttgagacgctcaacgtgccgtcgcacgcgctctcgggcatacttcccttgggctccaccaagctggcggagatgctacaatcgctcgacctctccgtccaccagctcacctatggcatcctcaccgagatgtcgctcttcttcaagctgcgtgtggatctgtattgcgccatacctgtcgacctctgcgagtctgttacccaaggggttgttccagcaggagaagacgaggatgaccccaagcaactctggcaccacctgcacgctcgctggccaagcgaccaacagaaacagcacctgcgctcacagacacaacacacacagaggcatcacagagcaacgacagccgaagaaagaaccaactatctctctggcctcattccaaagctcgtcaagcccaattcggtatatgctcttgctactaaacttcctgattggattgggcgcacacagtcacaaaaactaagaagctacagaggcaatatccctgggttaagaccaattccatggccatccttcattttactaagcagagagaataagcttaccaagtcatcagtcatggtcactgctagtgcgattcaggcttttgtgaatctggtcctcacttcttgtgatgctggttattccattgtcatgtttacaccaaattatttcatcacctacatgtcgttccagatgacaggtgctaccgacatattagttggtggttgcgattccaggacacttcattatgatgttgattggttggagaaggttctgaaagataaggagcatgtccctaaacttgttactgttttgaattcgaggaacccctctagagcttttattcccaggcctatgcttgagagaatttcagatctgtgcaaaagtgtaggacaacataccggtcaactaagcttgcatgggcagtattaccttatcattattacaacagtctgttggttggtgtggagttcctga

SEQ ID NO: 149080 - DNA, 1598 bp, Zea Mays
ccgcggtgcaaaaaaaaaggagaggagaaagaacgacgccacagaggccacgcggcctttgccgccacgaaaaaaaaagccggctcacgtgtcggtccctgacacgtggggccgccacgcacgcagcggatgcggcggggctggagcgacacgtcggccgccgccgccgcctctaggatgtccccgtcgctttctggtgggaccggcggggatacggcccggtgccattggatacccggctctgctatcacctacaggtgggtcctgcggcctctgtgggggtggggaaagcaaacggtctgtttcttcgttcgtttggtgcctggctgcctgcggttaaacgggcagcaaagaaaaagaaaatgatttcccgaaatgggctcggggaagggatgctataaaaagtggagttgtcagccaacaacggcggcagcgagcgcacgaaagttggttcggaggtttcttgaggggtttagcttggcggcaagtcaaatgcgagcggagtgatgtggcccatggaggaagaggaggtgttcgtgacggtgaggcggacggagcacgtcgacgtcacctcccgggcggtggtcgtggctgcggggcgcgccgccgtcgcggggcccaggacggtgcgggtcttctgcgacgactacgacgcgaccgactcgtccggcgacgaagcggaggaggaggaggaaaagaaggccgcgcgcaggagggtgaagcgctacgtgcaggagatccacctggagcgggcggcaaaggaggaggaggaggcgacggccgcggcgtctctgggggcggtgctcccggggccgaagcggaagcggaagcccgacggtgaggcctcggagccccggttccgcggcgtgcggcggcggccgtggggcaagtacgcggcggagatccgcgacccgtggcgccgggtgcgggtgtggctcggcaccttcgacaccgccgaggaggccgccaaggtgtacgactcggccgccgtccagctccgcggccgcgacgccaccaccaacttccagcagcaggtggaccccgagcgcctctcacagccggcggcgtccaagagcgccgcgacatcgacatacgactccggcgaggagtccgtgacggcggtggcgtcgccgacctccgtgctccgctcgttcccgccctccgccgacgccggcggcacacgcagcaaggctgccgcgaggaacccggagaccggcgattcgaccatcgtgttcggctgccccttctccttggccagcgagctcccggcgctgtacaccgagttcgacctgctggccgacctcccgctggacttcctcgccgacgccccggaggtggaggcgctgtccctgccgccgttctccgcctgcacacccgaggaggaggaggagtgcccgtccgacgcggtgaggtggcggcaggtggacgaattattccaagacatcaccgacctgttccagatcgacccgctgcccgtcgcctagactctctctgcgcaccgggttcgcctagtccggccaattttggttccgccgtcttgtttttatttgggaaaagctgtattgttttagcgtatgaagaagggaagaagagacaaa

SEQ ID NO: 149081 - DNA, 106 bp, Zea Mays
ccttgtgttcacataaagttagatttctctatcctcgtatttgtttgttcttgtactatgtattgtatagagacattgaagactaaagccatgaatttgttttctc

SEQ ID NO: 149082 - DNA, 1449 bp, Zea Mays
acaaacaaataaataaatcggattcccaaataaaatggcccagctgtatctagcatggactcgtggggctcagtaaagtaacgctgacattttcaatccgaggtaacagtaataatcggcgtattaaacggtaaataagaagaagaggaggaagacagttgctgctactcggcacaccaaaccactccagtggagtccaacaccgcctcttctcctcttctcgattcgaaatcgagtacgtccgaatgctctagaaccttccgggcctagggatctcgatggggcccgagcaggaggaggccgtgctggagaccatctgggacctccacgacaaggtcagcgacgcgatccacgccctctcccgcgcccacttcctgcgcgccgttcgccgccgctcctcggcctccgcccccggcctcgtggacgtcaagggcgggggtctgggtctcggcgcgcgcggcggagacgaggtcgtcgccctggcggccctggctgaggaggccaggagcctgcacgccatccgcgccgcgctggaggacctcgaggaccagttcgagtgttttctcgccgtgcagacacagcaacagaccgaacgagatttcgcgatggcgaggctggagcaaagccgcatcatgctcgcgataaggctcaaagagcatcacgggagaaaccacaaggtcatagacgaggcgtctgccttcgtccgcgatgtctaccaggacgtctggccttccctgtcagctaccaaggccgagagacgcgccgacagttcaggtaacccggcgaagggtccgagcttcctcgcgcggatggtgtcctctagccttgctgtagctgggagcggtttcagtctcaaaaggctggctttagctctcggcctagtcgcggtgctgcagtcttcaggggtcggtgaccgcaggtacaggaggaccaccagcgagaggagctcgtcgtggctgggatcatcatctccgagaggcggtagaacgggtcgtcttgacgtgtctctagccaggggttgaaagggggggagggccttgttttgttgcctgtacatgactcgctaggacgtagtgtcgcagtagaaggtttgttgttcggtctagttggtgtctgttgtcatttcgattggttttgatcgtgaaaaccgcatctattttacgttcagggtttgttgggcgattttgtactaggatttatttgccgcgctgcggtttgtggccttgcactgtatgcccctgtggcaagggccaagctcaggcccgctgcggtgtttttttgttgctttctcgggccagcagcaccaggcttcatcgctgaggctgctctctgcccatcatgccgggcgcagccggtgggcatgtttgatttgtggctaaatgtgacacattttatctaaggttagtcttttgaatggaagaattaaacttagacagaaaagttagataa

SEQ ID NO: 149083 - DNA, 1782 bp, Zea Mays
cacaaataccgcatgccgttgccgcaattcatgggcacagcgacctctcgtctcctctccatctagacaccactttcttctctccgcctcaggcggcgcgcgcgcggctagcttcccggcctcccagcaacatcccgccaccacttcctcctcctcctccgctctctccggccgcgcgcgccgacgtttttttttttccaacggaggccgccgcgcgctgcctttagtttcggacccatccatccatacatagccaacatcacctatagcaggcggagggacggaggaccgtccgtctcgttcactccgcgccgcgcgtggcccgatccagcccggccctcggatggtcgccgctggcacgtacagcgacgacaccagcggcggcgggtgcgggtccatggagttctggccggagttcctggcctccagcggcgggcgcgagttcgtggccggcggggtgggcggcatggcgggcgtgctggcgggccacccgctcgacacgctccgcatccgcctccagcagccgcccgccgcgggcgcaccacgccgccgcgacgcgcacccctcagccccgcgcctcctacgcggcatcctccgcgccgagggcccctgcgcgctctaccgcggcatggccgcgccgctcgcctccgtcgccttccagaacgcgatggtgttccaggtgtatgcggtcctgtcgcggtcgctgggccccgccacctccgagccgccgtcctacgcgagcgtggcgctggccggcgtcagcacgggggcgctgcagacgctgatcctgtccccggtggagctggtcaagatccggctgcagctggaggcggcgtcggggcacggccccgtggagatggtccgtgaaatcctccggcgcgagggcctgcgcggcgtgtaccgcgggctggcggtgaccgcgctccgcgacgcgccggcgcacggcgtctacttctggacgtacgagcgcgcccgggagcgcctgcacccggggtgccgccgcagcagcagcagccaggaccaagacggggacgagggcctgggcaccatgctcgtggccggcggcctggccggggtcgccagctgggtgtgctgctacccgctggacgtggtcaagtcgcggctccaggcgcagggcgcggcgtcggcgtcggcgcccaggtaccgcggcgtcgtcgactgcttccagaggagcgtccgggaggaaggcctccccgtgctgtggcgcggcctcggcaccgccgtcgcccgcgcgttcgtcgtcaacggcgccatcttctccgcctacgagcttgccctgcgcttcattgccagcggcggcggccccaggctggtcatggaggacaagtgagtcagactggaccgtgttgtacataggctagtataagtatccattccagtggttggtggagagtatccatgccactgccagcgcagtgagctgagattcgtggactggagtagcgtaccgtagctgcaagcttcatacaaatcgaagcatgcgtcttgatgatggcgatcgattcaccctggtaatttggggaaatacactgtgcagtgcattgtgcattacattggtgtgctgctattccatatagtatagtactctgcatgaacatcagtgatcaatcaactgaccaattgacattacagtatgtatggataaaccattcatggaaaacatcagaattctgctagttagttgcttgctctcagagtaagcaagaggctgtggttagtcattaagttttttctcttttagaaaaaaaatcagaaaaaaaa

SEQ ID NO: 149084 - DNA, 1330 bp, Zea Mays
gaaatggtcatctcattttcggccgagtgggttaccagacgaacagcaggaaatacctgcatctggcagaatcagtgggcagtgtgggcacgacacatgtttgggttgaatctctggcgaaatgctgcggcgctgcaggcgctcacatggcatgcttcggcttcacatggcctcctttcgccgtgctctctcaccagtctgccacgcgcgctatggtggtgtcaattgtcatgtcccatgctagctaacgaaaatgctcgctgttgctgtctgtgtttgcagaacgcgatggtgttccaggtgtatgcggtcctgtcgcggtcgctgggccccgccacctccgagccgccgtcctacgcgagcgtggcgctggccggcgtcagcacgggggcgctgcagacgctgatcctgtccccggtggagctggtcaagatccggctgcagctggaggcggcgtcggggcacggccccgtggagatggtccgtgaaatcctccggcgcgagggcctgcgcggcgtgtaccgcgggctggcggtgaccgcgctccgcgacgcgccggcgcacggcgtctacttctggacgtacgagcgcgcccgggagcgcctgcacccggggtgccgccgcagcagcagcagccaggaccaagacggggacgagggcctgggcaccatgctcgtggccggcggcctggccggggtcgccagctgggtgtgctgctacccgctggacgtggtcaagtcgcggctccaggcgcagggcgcggcgtcggcgtcggcgcccaggtaccgcggcgtcgtcgactgcttccagaggagcgtccgggaggaaggcctccccgtgctgtggcgcggcctcggcaccgccgtcgcccgcgcgttcgtcgtcaacggcgccatcttctccgcctacgagcttgccctgcgcttcattgccagcggcggcggccccaggctggtcatggaggacaagtgagtcagactggaccgtgttgtacataggctagtataagtatccattccagtggttggtggagagtatccatgccactgccagcgcagtgagctgagattcgtggactggagtagcgtaccgtagctgcaagcttcatacaaatcgaagcatgcgtcttgatgatggcgatcgattcaccctggtaatttggggaaatacactgtgcagtgcattgtgcattacattggtgtgctgctattccatatagtatagtactctgcatgaacatcagtgatcaatcaactgaccaattgacattacagtatgtatggataaaccattcatggaaaacatcagaattctgctagttagttgcttg

SEQ ID NO: 149085 - DNA, 881 bp, Zea Mays
aattcatgggcacagcgacctctcgtctcctctccatctagacaccactttcttctctccgcctcaggcggcgcgcgcgcggctagcttcccggcctcccagcaacatcccgccaccacttcctcctcctcctccgctctctccggccgcgcgcgccgacgtttttttttttccaacggaggccgccgcgcgctgcctttagtttcggacccatccatccatacatagccaacatcacctatagcaggcggagggacggaggaccgtccgtctcgttcactccgcgccgcgcgtggcccgatccagcccggccctcggatggtcgccgctggcacgtacagcgacgacaccagcggcggcgggtgcgggtccatggagttctggccggagttcctggcctccagcggcgggcgcgagttcgtggccggcggggtgggcggcatggcgggcgtgctggcgggccacccgctcgacacgctccgcatccgcctccagcagccgcccgccgcgggcgcaccacgccgccgcgacgcgcacccctcagccccgcgcctcctacgcggcatcctccgcgccgagggcccctgcgcgctctaccgcggcatggccgcgccgctcgcctccgtcgccttccaggtcagtcggcccttcttccacgtcgccgcgcttctgttccttctcacgcggtcacgccgcgtgcgatccggacgggcgggtcacggatcccagggcctcggacggacgccgtggatcctttcgatacgtcttccttttcccctttgtctccaaggattgcttactttttagtaaaaggcgatcgctttcaaagatgacatttttatttgctccacaaaagcacatgcgctacaccactcgctacc

SEQ ID NO: 149086 - DNA, 2286 bp, Zea Mays
cttaccctattacctttctgctcgtggtgagtgctgacaccacctcacgcacacaagccgccggcggcgaccagaccgaccacctcgcgcactagccttgctcgcttctcgtcgccggctcgttgccggctcgtcggcacgatgtcgtcggagcctccacccgccccttctgccgccgcagcagagggactggctgctgacctttccgccgccaccctcagcaagaagcagcagaagaaggacgccaggaaggcggagaaggctgagaaggcggcgcagcgccagcaacagcagcagccggccgacgccgaggacccatttgcggccaactacggtgatgtccccgtcgaggagatccagtcaaaagccatttccggccgcttgtggtcccagatcggcgacctcgacgactcctctgcggggcgctctgtgcttatccgtggatccctgcaggctatccgcccggtcagcaagaagatggctttcgtcgtgctgcgccagagcatgagcaccgtgcagtgcgtgctcgttgccagcgccgacgccggcgtcagcacgcaaatggtgcgcttcgccaccgccttaagcaaggagtccatcgtcgacgttgagggcgtcgtgtccctccccaaggagcccctcaaggccaccacgcagcaagttgagattcaagtcaggaagatctattgcatcaatagggctatcccaacccttccaattaaccttgaagatgcagctcggagtgaggcagattttgagaaggctgaactggctggagaaaagcttgttcgtgttggtcaagatacccgcttgaactacagagctattgatctacgaacaccctcgaatcaagccatattccggatccagtgtcaagttgaaaacaaattcagagaatttctgttgtcaaaggactttgttgggatccacacgccaaaattgatttctggatccagtgaaggtggtgcagctgtattcaagcttctgtacaatggtcaacctgcttgcttggcacaatctcctcagttgcacaagcagatggctctatgtggtggttttgaacgagtatttgaggttggccctgtgtttagagcagaaaattcaaacacacacaggcatctctgtgagtttgttggtcttgatgctgaaatggagattaaggagcattattttgaggtctgtgacattatagatggcttatttgtatcaatatttaaacacttgactgaaaactgcaataaagaactcgagacgataaacaggcagtatccatttgaacctctgaagtatctagacaaaacattgaagctcacttatgaagaaggagttcaaatgttgaaggaagccggaacagaaattgagcctatgggtgacctcaatactgaagctgagaaaaaacttggtcggcttgtcagggaaaagtatgacacagattttttcattatgtatcgatatcctttggctgtgcgtcccttctacactatgccttgttatgacaacccagcttacagcaattcttttgatgtctttattcgaggcgaggagataatatctggagcgcaaaggatacacactcctgagctgttgaccaagcgtgcaacagagtgtggaatcgatgtcagcactatctcgacctacattgaagtcttcagctatggcgcgcctccgcatggtggtttcggggtgggtttggagagggtggtgatgctgttctgcgccctaaacaacatcaggaagacctcgatgttccctcgcgacccgcagaggcttgtgccgtaatttactgagtccaatgccctgagtttgcagcagagcgtactggttgttttgatgttctttgagcatcgaacatcgctaacttgcaatctcagctactgaagccccggttaccgtggttcagagttcctgttaaattcacaaagctacttgtatctattagattgctgaaaccagcaagtacgatcctttttgggatttgatctggtctaattgttgttaagtggaggtattgctctcagtttttttgtgctctgtttgtcggcatatgccaagagctagggcttcttaagttctaagtttttagacgagtggattccttttttttaagagccggcaaaagttctgccctgcacctgttaaaaatagatattaccctgttccaattctaaataatatgacgtgtcgccttctagatatttatattatgtagatgtacaatatgtctagatacagatagtaaagtaatgtatgtctttataaagagagaagaattgtgctgcgaatgaa

SEQ ID NO: 149087 - DNA, 865 bp, Zea Mays
actttaacttaccctattacctttctgctcgtggtgagtgctgacaccacctcacgcacacaagccgccggcggcgaccagaccgaccacctcgcgcactagccttgctcgcttctcgtcgccggctcgttgccggctcgtcggcacgatgtcgtcggagcctccacccgccccttctgccgccgcagcagagggactggctgctgacctttccgccgccaccctcagcaagaagcagcagaagaaggacgccaggaaggcggagaaggctgagaaggcggcgcagcgccagcaacagcagcagccggccgacgccgaggacccatttgcggccaactacggtgatgtccccgtcgaggagatccagtcaaaagccatttccggccgcttgtggtcccagatcggcgacctcgacgactcctctgcggggcgctctgtgcttatccgtggatccctgcaggctatccgcccggtcagcaagaagatggctttcgtcgtgctgcgccagagcatgagcaccgtgcagtgcgtgctcgttgccagcgccgacgccggcgtcagcacgcaaatggtgcgcttcgccaccgccttaagcaaggagtccatcgtcgacgttgagggcgtcgtgtccctccccaaggagcccctcaaggccaccacgcagcaagttcgtctgtcttgtctcatgatttggaattcgtccatttcacgcaaatatgataatttattatcaccacgagttgtaaaacccgtatatcagttacatgttagtaggatatttccttatgtctctaggatgacgatttttttcgaagtagctaggaagatgaattaacgtgggatgactgtgttctttgtacttaca

SEQ ID NO: 149088 - DNA, 1769 bp, Zea Mays
acactcgcccgtccccgtcgctccccatcccacaccaaccctctgtgcctcggtccctccgcccgtacgcgcgacgagagacacgatgcggcggtccctaccccttctcctcgcgcggcaggtggcgcggcggcggcggctgagcaacgtgccggagtccaccgtctacgggggcccacgcccgcaggagtcctcggcggcgcggcgcgtgacggtgaccacactccgtgggaagcaccgccgcggggagcccatcaccgtcgtcaccgcctacgactacccctcggcggtccacgtcgactccgccggcatcgacgtctgcctcgtcggggactccgccgccatggtcgtccacggccacgacaccacgctccccatcacgctcgacatcatgctcgagcactgccgcgccgtggcccggggcgcgccgcgcccgctcctcgtcggggatctcccattcggctgctacgagtcctccgccgcccaggctgttgattcagccgtgagggtcctcaaggaaggtggaatggatgcgatcaagctggaagggggtgccccatcgaggatcactgcagccaaggctattgtggaggctggaatcgctgtcatggggcatgttggcctcacaccgcaagctattagtgttctcggtggatttaggcctcaagggaagacggttgacagtgctataaaggttgtggagacagcacttgccttgcaggaggctggatgcttctcggttgtgttggagtgtgtgcctgctccagtggcagcagctgcaacatcagcattgaaaatcccaaccattggcattggggctggaccattctgtagtggccaggttcgtttgttctttgctccgtaaaatgaggaggagaagtaagatcacttgctttgctcacagatactgagatacaagatgttgactctggtcatatccatccagtagtctacatgccatcaatcatcatacactctaaaaaacacatacatgcctttgtgggcctcgcttaaaatgaaataagcatgtcgtttatgacatgtgaagaactgaagatgcacaacatgtttgttcatgaagcctgatatgggcttattataatgcaggtcttggtgtaccatgacttgttagggatgctgcaacacccacatcatgccaaggtcacaccaaaattctgtaaacaatttggtaacgtgggcgatgtcatcaacaaggcgctatcagagtacaagcaagaagtggaggctcaggctttccctggtccaagccacacaccgtataagataactcccacagatgttgacggctttgcagatgcactgcagaagatgggtttgagtgacgccgcagatgccgcagccgccgctgctgaaaacagggagaaaggtggagaaccaaaaggagagtagctaatctaataatgcctgttgttttcagcagatgcacctagacctagagtagagaatgtgagggcagattacctagcataacggtgtcctgcactagaacaatttttgccagattgcagccacataaagtcagactgcaggtcatacagaatcgtttggctttggatagcctccgaaagtcagaactgtcgacaatcgaatgtttcatacgatctgatggtctccgattctcgtcactatatcagtagagcccaccaggtcacatagaacactcctgctcctgctgtcggtcaatgagcctcgtgcagagctaatcttaagaccttgagtagtcaccaactttggcaacaaaaagcggg

SEQ ID NO: 149089 - DNA, 1633 bp, Zea Mays
tcggcagtgggcacacgcaatttgattactcccccatctttccaaattttgactacttggacgacgtgaagtttaggcccaagttcaaaggcccgcccgccgccccgcccgtattctactccaattccaaacactcgcccgtccccgtcgctccccatcccacaccaaccctctgtgcctcggtccctccgcccgtacgcgcgacgagagacacgatgcggcggtccctaccccttctcctcgcgcggcaggtggcgcggcggcggcggctgagcaacgtgccggagtccaccgtctacgggggcccacgcccgcaggagtcctcggcggcgcggcgcgtgacggtgaccacactccgtgggaagcaccgccgcggggagcccatcaccgtcgtcaccgcctacgactacccctcggcggtccacgtcgactccgccggcatcgacgtctgcctcgtcggggactccgccgccatggtcgtccacggccacgacaccacgctccccatcacgctcgacatcatgctcgagcactgccgcgccgtggcccggggcgcgccgcgcccgctcctcgtcggggatctcccattcggctgctacgagtcctccgccgcccaggctgttgattcagccgtgagggtcctcaaggaaggtggaatggatgcgatcaagctggaagggggtgccccatcgaggatcactgcagccaaggctattgtggaggctggaatcgctgtcatggggcatgttggcctcacaccgcaagctattagtgttctcggtggatttaggcctcaagggaagacggttgacagtgctataaaggttgtggagacagcacttgccttgcaggaggctggatgcttctcggttgtgttggagtgtgtgcctgctccagtggcagcagctgcaacatcagcattgaaaatcccaaccattggcattggggctggaccattctgtagtggccaggtcttggtgtaccatgacttgttagggatgctgcaacacccacatcatgccaaggtcacaccaaaattctgtaaacaatttggtaacgtgggcgatgtcatcaacaaggcgctatcagagtacaagcaagaagtggaggctcaggctttccctggtccaagccacacaccgtataagataactcccacagatgttgacggctttgcagatgcactgcagaagatgggtttgagtgacgccgcagatgccgcagccgccgctgctgaaaacagggagaaaggtggagaaccaaaaggagagtagctaatctaataatgcctgttgttttcagcagatgcacctagacctagagtagagaatgtgagggcagattacctagcataacggtgtcctgcactagaacaatttttgccagattgcagccacataaagtcagactgcaggtcatacagaatcgtttggctttggatagcctccgaaagtcagaactgtcgacaatcgaatgtttcatacgatctgatggtctccgattctcgtcactatatcagtagagcccaccaggtcacatagaacactcctgctcctgctgtcggtcaatgagcctcgtgcagagctaatcttaagaccttgagtagtcaccaactttggcaacaaaaagcggg

SEQ ID NO: 149090 - DNA, 798 bp, Zea Mays
gtccccgtcgctccccatcccacaccaaccctctgtgcctcggtccctccgcccgtacgcgcgacgagagacacgatgcggcggtccctaccccttctcctcgcgcggcaggtggcgcggcggcggcggctgagcaacgtgccggagtccaccgtctacgggggcccacgcccgcaggagtcctcggcggcgcggcgcgtgacggtgaccacactccgtgggaagcaccgccgcggggagcccatcaccgtcgtcaccgcctacgactacccctcggcggtccacgtcgactccgccggcatcgacgtctgcctcgtcggggactccgccgccatggtcgtccacggccacgacaccacgctccccatcacgctcgacatcatgctcgagcactgccgcgccgtggcccggggcgcgccgcgcccgctcctcgtcggggatctcccattcggctgctacgagtcctccgccgcccaggtactcctccgcctctcccctccgtcctggacaagatattccgatgtgatagggatagaagtagaatagaatggtacgggtggtgccacagatcacaatgcagccagcacatgggccttggctatcgcgttcgtctcactgtcgaaggtgatctccatttttgtcactgcagaaatgtgatgcctgttaaatttggataggaaacatctggttttacagtataattcactaactgcagctctctctctctctctctctctctctctctctctctctctctctctctccctccctccctccctccctctctctctctctctc

SEQ ID NO: 149091 - DNA, 1717 bp, Zea Mays
ctctgccctctccttcctctcctcaaaagtctctgtaaaaaaagtaggtagtgtctcttttcgaccgctgcagaggagcgagagggagctcccactcgtgccgctgttcctcgcgccatggactccttcagcttcctcaagtacctgcgcggcggcgtgctcaccggcgcccatcgcgcgcccgcggccgccacgaccatcgccgcgtcggcgtgcgagtacggcgacgacgcctcctccttcttcgacctggagttcgcggtgcccggcgacgagagcgccacgtccgacgtcgaggaggagcgggtcgagctcagcttcgccgcgggtgacgaaggcgtcgtggcgcccgtggccgccgtcgcgccggcggcagaggcggagcctgaggccgcgccgccgccgtcgctgccccgtccggccaccaggtttcgcgtgctgctgctcaagctacggaagcccaagggcggcctggcggcggcggacgcggccggcaccagcgccgcgccggtggcgagccggttcctggtaaagctccgggtggacgacgcgacgccgctggcgtcactgttcacgcgcgacaacagctcgcgcgcctcggacgccgtcgcggaccggccggctacggcagcggcggcggcggcggagccccagcagcaggagcaggaggtggcggcgtcgatcaccgcggaggagcggcggttcgccaaggaggtggtcctgcggtacctgagcaagatcaggccgctgtacgtgaaggtgtcccggcggtacggcgagcggctccgcttcggcggcgcggcgagcgagggagaggaggagacggacgcggaggcggacccgtccccgtcgcaggctcctccaccgtccgtgccggcgggggtggtggcgtgcggcgtgcgcgcgccacgcgccagcgtgcccgcggggctgaagcaggcgtgcaagcggctggggaagagccggtcggcgtcgtccgcggttgcggtggcgccctctcccgcggcggcggctctgagtggcccgcagccgcagcggcgggacgactcgctgctgcaggtgcaggacggcatccagagcgccatcgcgcactgcaagcgctcgttcaacgcctgcaatggtacgggcacgggcccacctcagcgatgcaacagcagcccctagtaaacaaagcacggcatgcatgcatgcaatccggctgcatgaccttgccgtctagttccttcgatgatgatcttttgtcttcctgtgtgatggtggttgcggttgcattgcattgcactgcactgcaccgcaccgtgtgttgtgcagttgtccagtggggtatgcgacggagagaggctagtagtaccaactccacttgtaaaaatcctggtacgagcactcgtggaaggtatgtgcacgacctgctctttcatggctagccattgtgtactgtactgtgactagagaagggacgggacggcggcgtcgtgtcggggtaaaagggtgaccggcgcttttggcgattccgcagttgtttgcagtgcatcattccccgtcgcggtcacgtgtgacagcgagcgtgcgtctccagcagtggtactcctggttcgtgttttcccgtcgcgggcagcgcgcggctttccgtaccttcacacgtccatccatcggcaacctcgatcgcggtgaaaggctactacagtctacagtaaacggagcgacgcgagctgagggc

SEQ ID NO: 149092 - DNA, 240 bp, Zea Mays
atggaggtttctcactggggaagaagaccctcgccggagccgagaggaaatccgtcgattgccggagattcggggatccaatcgatgaaccgaatacgctgcgacgaagccctcgatgagacgaacgcagcggtaccctcgaattcggcagacgatgcacggattggaagtaattgctcgccggagttgtcgacagagttagaaccgccccgaacttcggcgagcaataccgagagctag

SEQ ID NO: 149093 - DNA, 3099 bp, Zea Mays
cccgtctctccaggccgccaccaacaccacaccaccacccgttgccacgctgccggccgcccacgcctcgcgccagccgatcctttcattccatcctccctccctccgcccccgcctcccaattttagccgcacggccgccgccgccgccggccggccggagagcaggagcagctaggccgccatggaggcgaagagcgtggtcatgtcggcgctcgggatcgggatcggcgtcggcgtcggcctgggcctcgcgtccgcgccctgggccgccggcgcctcggcctcctccagggccgcgggggtcaccgtcgaccgggtggagcaggacctccgccgcctcctcgtcgacggcgccgacaccaaggtcaccttcgacgagttcccgtactacctcagtgagcaaacacgtgttgtgctgacgagcgctgcgtacgtccacttgaagcaagcagatatttctaagtacaccaggaaccttgctccagccagccgtacaatcctgctgtcaggtcctgcagagctctaccagcagatgcttgccagggcgcttgcccactattttcaagcaaagttgctcttgctagatcctactgatttccttataaagatccatagcaaatatggcacaggtggcagcacagagaagacggttaaaagatcaatctccgagacgacgcttgaacgtgtgtcgggattgcttggatctctttctattcttccacaaaaggaacagcccaaaggaactatacgtagacaaagcagcatgatggatgtcaaattaaggagttctgagagtatgagcaacttaacaaagctcagaagaaatgcatctacttcctctgatatgagtagcatggcttcgcaaggaccttcaactagtacagctcctcttaggcggtcaagcagttggacttttgatgagaaaattttagtgcaagcattgtacaaggttctgctttcagtgtcaaagaagtacccagttgtactctatataagagatgttgagaagttccttcacaagtccccaaaaatgtatctcctgtttgagaaactactaaacaagcttgaaggtccagtgttaatcctcggatcaaggattgtagatatgaacagtgatgaggaatcggatgacagattgactgttctgttcccatataatatagaaatcaagccacctgaaaatgaaaaccaccttgtaagttggaactcccaattagaagaagacatgaagatgattcagtttcaagataaccgaaatcatattatggaagtgcttgcagaaaatgatcttgaatgtgatgatttaggttcgatttgcctatctgatactatgtgccttagcaagtatatagaggaaattgtggtgtctgcagtttcgtatcacttgatgaataacaaagatccagagtatcgaaatgggaaattagttctatccacaaagagcttgtcccatgcattggaaatttttcaaggcaacaagataagtgataaggacagcatgaaattggaagcgacagatgacgccttaaaggctgctgaaaaggcaactgctccaaccactgcaaaatcagaaacaaaatcagcaacatcactgccacctgctcgggctccggctgctgctgctgctgctcccgctagtgcccctgctcctagaattgagagcaaaacagaacttgaaaagaaggataatccacctccagttgcaaaagcaccggaagtaacacccgataatgagtttgaaaagcgtattagaccagaagtgatacctgctaatgaaattggagtttcatttgatgatattggtgccttggatgatatcaaagaatcccttcaagagcttgtcatgcttcctctaagacggcctgacctcttcaaaggcggtcttcttaaaccctgcagaggtatattactttttggtcctccaggaacaggcaagactatgcttgccaaggctatagcaaatgaagctcaagcaagttttataaatgtctctatgtcaactatcacatcgaagtggtttggtgaagacgaaaagaatgtccgagcattgttcacgttagcggctaaagtatcaccaaccatcattttcgtcgatgaagttgatagcatgcttgggcagcggaacagagctggagagcatgaggcaatgaggaagatcaagaatgaatttatgacacactgggatggcctcttgtcaagaccggatcagagaattcttgttcttgctgcaaccaaccggcctttcgatcttgatgaggctataatccgtaggttcgagcgaagaatcatggtaggtctgccatcgatgggaagtcgggaactcataatgcggcgacttctgtcaaaggagaaagttgatgaagggctggacttcaaggagctagcaaccatgacagaaggatatagtggaagtgatctcaagaacctgtgcacgacggcagcgtatcgccctgtgagagagctaatccagaaggaaagaaagaaggagctggagaagctgaagtgtgagaaaggagaaactccgtcggatcctccgaagaaggaaaaggaggagaccatcattctaaggccgctgaacatgacagatctgaaagaagcaaagaaccaggtggctgcaagtttcgctgctgaaggcgccataatgagcgagctgaggcaatggaacgagttgtacggtgaaggcggctccagaaagaagcagcagttgacatacttcctctgagcaatatgaaaatcaggcgcaaaaatgtatgaacataatttgagaagtagagtagagcacaaagcagccatgaggaaatagaccgaacatgtaatcgtgtataagaagaacatgagaaaagggtgcgtgttagggggacaaggacaagaaatcaggccgtaaaagccagtatctggtgtaggacaaggaaggacagttttcatctccaccaaaattccagtttgcctgtgctggttgttgttgtattacactaataatggatctgcggtgtagatcgctcttctcttcatcttttcctggtcgcatcatccttctgtatatgtacaaactggtaggttgtggcaacgaaaggtttttaaagcagcttatatatat

SEQ ID NO: 149094 - DNA, 922 bp, Zea Mays
gtccaacagcacgtcgacaaaatcccgatggtcgtcgccgtcacactggccgccacggcgcctctgacgacggtggtccgtgatgacccgctccaggaaggcgtccaactccgcggacgtgcgcgtggccttggcgtccaggcccatgagcgcgtcgacccacgccagccagggcacgaactcccccacggtgacggtccccaggagctcctcgaagtcggcgaacagcttcgcgagcttctcgccgccgtcgggcccgtcgtagtacctccctcctttgtcgccgtacgtggcgcgggagatgatgccgttggtgtaggagatgatgtgggcggtgaggttgacgacggcgccgtcgcgtccaccggcggcggcgcggacgcgggcgagcatcgcggcgacctcctgctcccgggcgtggcggaaggagctgacgcggcgctggctgagaaggtggagcacgcagacgcgtcggctctgacgccagtgctcgccgtaggggacgaaggccacgtcgcggccgtacacgaggcgctcggccatgcgcatcctggggcggctcgcgaacgccaggtcgcgggtcttcatcacctcctgcgccgcggccgccgacgaggccaccaccgtcggcacgcggccgaagcggaggagcatcacggggccgtgcgcctgcgccatcgcccacagcttccggtgcggcagggggcccagaagaggcaggtgtcccaggataggaaggccccgaggcgacggcggaagcggccggccatcgccgacgccgctgggcggagaaggctgtttcttcctccaagtggagaggaagaagagcagggaaaggagggtaacgagcagcagtgcaaggaacggtgacacgtccatggttttcaccgacactgcacgtataggtggatggtccaataat

SEQ ID NO: 149095 - DNA, 183 bp, Zea Mays
atgcattattgcattcaaacatggcatgagttggtaaggtttgttaaactgaatgctaaactttcctccaagagtactcttgtgttttcctttggtgattacagagctagcatttacaggaaaacatgtaagcgcctagctacaatagcagatgtcgtccacagcaccaagttcgtccattaa

SEQ ID NO: 149096 - DNA, 283 bp, Zea Mays
ccggtgatgaagaaaatgacggggacttacccgtggcgcaaaaacaggattcatggggaaggcggggtggcgagcgcggcaggagtgggggaacgcgggggtgtggggaggaagagggtgaggtgagggtcggggtgccatggacaggggcacaacgggcaacattgcgatggagggaaatgtgtgggggcacgaaatcgcctgggcgacgccgacgaccagggcatgcggggcgaggatggagacgtgacagccatggaatcgcgggcgtcgcgagagggtg

SEQ ID NO: 149097 - DNA, 918 bp, Zea Mays
ggagttcacgaacgatcctctccctctccctctccgtcccccaagcaaagaaaagaagctagctagctaggcgtagaacgaatgacgacgcagggcggcaacaggtcgacgacgacgctggtcgccgccgtggccgtagttctggccgtggcggcggcgtcgtccctggccggcgtggcgtccgcggagaaggcgggcgggttcgtggtgacggggcgcgtgtactgcgacccctgccgcgccgggttcgagacgaacgtgtccaggagcgtggccggcgcgacggtggaggtggtgtgccggcacttcggcgcgtccaaggagacgctcaaggcggaggcgacgacggacgacagcgggtggtacaagctggagatcgaccaggaccaccaggaggagatctgcgaggtggtgctggcccggagccccgacccggggtgcgcggagatcgaggagttccgcgaccgcgcccgcgtcccgctcacctccaacaacggcatcaagcagcagggcgtccgctacgccaaccccatcgccttcttccgcaaggacccgctcaaggagtgcggcgccctcctcgagaagtacgatctcaaggacgcctccgagacgccatgatcgtcctccgtcctgtgcatgcctgcatccattgctgccctgcccgctcgcccaagaattgaagatggtagctgccttccgcgttttttgtattgtgtatgtctatgcactgcattcgagggcagcgataatgggcctggcctcgtaagcaaacgttcgatccgcttcttttgatgggcctaaatctgcatgcatgcagatgtactgctacttctgctcttttatattgcttttttttttaattttattaacttctcgttttctccctcatccctcgtcgaggaggaagggtatccgttt

SEQ ID NO: 149098 - DNA, 1127 bp, Zea Mays
ataataaaaataaaaataaataaaaagtgagagagggaggaaggcgcacacttcctccttccttctttccctcttcgtcttcgcttggccggtgggtggtgcggtggggatgcggcggctatggcggtggtaccagcagtgcctggccgcgcacccggtgcgcacgcaggtcgtcagctccggcatcctctggggcctcggcgacatcggcgcccagaccgtcacctactactccgctagccccgaccgtcgcggccacgacagcagccctcccgaccccgaggataaagataataaagacaataaagagtttaaagttgattggaagagggtgggcatcacaagctccttcggatttgcttttgttggtccagttgggcattactggtatgaatacctggatcgcatcatccggcggaggtttcagcctaacacgttcaaattcgtcgcctcaaaagttgccgcggatggattcctcttcggaccactagacctcctcctgttcttctcatatgttggtctgggtcaaggaaggagcatagagcaggtgaaggaggacgtgaagagggacttcattccggctctggtgttaggcggaaccatctggcctgctgtgcagatcgcgaacttccgcttcgttcccgtgcggtaccagctcctgtatgtgaacttgttctgcctcctggacagctgcttcctgtcgtggattgagcagcagggtgacgcctcctggaagcggtggttcacttcgttccagaaaatcgaagaccagaagggtaaggtttgatttgagtcatgcatggttcgttgtctggatcagtacctgtaaactccggttgatcaaggaagataattgcgatgccagcaaggctgaacattggcgtcgctatagagaattctttttagtctttgacgggatgaaacggttgccgagttgctctgttaactgaagtgcctgtgttttgccgatgtgttaaactttctttttagtctttgatccaagatgcttaagtcatgtctgggaatgggtggaattgacgattgcaacgcgagcaaaagctgaatatatatcctgttgcagcagttccagtccaggaatagctagcgagggatgggtggggatcatg

SEQ ID NO: 149099 - DNA, 149 bp, Zea Mays
aacacataaaaagagataaaacccacaagaaccagcaagatctaaagggcacaagaaaaggtcagacgattaaggaggaaaagcgaaactacaaatcagggttctgccacgtgaattgcacacttccaccccttcctatccacggtgag

SEQ ID NO: 149100 - DNA, 1731 bp, Zea Mays
cattatatatatagagtgcgataagccggtaacagtatcttcctgcagcagctgggtggcaagagagttgtatcctggtaggctcagcggtatcttcttattaatttgttaactataccggatttcatcccttccttgctctaccatacatacacacactagtgttgtttgtttagatcactagtggtgcttgtttagatctgtattgctttctcacttgaactacgccgaggtaataatctgattagcgaatcctggtcccatcatctgaagctgcatttttaggccataccaatgtgtcattgagttgcttggcacgctgtttgttttcagcatgagcatatatagagtgcagtaacgttatcttcctgcagctgagtggcaagagagttggtatcctggggcttggcaggatagggtcagcgatagcgaaaagagccgaggcattcggttgttccataagctacagctcaagatcagagaagcctttcccagactacaaattccacgtgagcgctgtcgacctggcagccaactgcgacgtgctcatcgtgacgtgctcgcttaccgccgagacccaccatgtcgtgagccgcgaggtcatcgacgcgctgggtccagagggcgtgcttgtaaacgttggccgcggagcacacgtggatgaacccgagctcgtcgccgcgctcctcgagggtcgcctgggaggagcggggcttgacgtgtatgagcacgagcccttggctcctgagcagctcctgggcctggacaacgtcgtcttggtgcctcacgtgggcagcgatactgaagaaacgtgcagggcgatggccgacctagtgctagcaaacttggaggcgcacgcgtcggatgagccattgctcactccggtgatctgattattgttatcttttgtttcagcggcaagcgggtgggcatcatcgggctgggcaggatagggcaggcggtggcgaagcgagtggaggcgttcgactgcccggtgagctaccaccagcggacggagcagcgggcgacgtacccgagctacacctactacccgtcggtggtggagctggcggcgaacagcgacgtgctggtggtggcgtgcccgctgaacgcgcagacgcgccacatcgtgagccgcgaggtgatggaagcgctaggccccagcggcgtgctgatcaacgtcggccgtgggccacacgtggacgagcgcgagatggtggcggcgctggcggacgggcggctcggcggcgccgggctggacgtgttcgaggacgagcctaacgtgcccgaggcgcttctggggatggacaacgtcgtgctgctgccccacgtcggcagcggcaccaacgagacgcgcaaggccatggccgacctcgtgctcgggaacctggaggcgcacgtgctcagcaagccgctgctgactccggttgtctgacgtttccttgtttctattacgaaataacaagcgcctgcgcctgacagcgagtggggattaaattcaaaatgttttgttttgatttgatcgccgctggtgaatggaactgaaatgtgctgtcaattctcagtccagtgcacacgacacgcttgcacgaatgtcgagcaaattatggcatcttcttttgcgaagccgcctcctcgtctgtacactctcttcccctttggagactttacgtatctgcgatgaggtttgttcatcctaagtccttttcggttggagggatttagtgagga

SEQ ID NO: 149101 - DNA, 3906 bp, Zea Mays
tatacaccatctgactgtttcagcctgtctgttcctccaccttctggttgctccagaaaacacagcgatgcaccaagacagtttcaggtcggtggtctgcagatccctctcgaagagcctgcccccaaggagcaaagatggcagctgttccgaaacagtccagtgcactgtcccctgtatcgtcacgctgcagccttcggtctgtcggagctgccaaggtcgggatgtacagagcgcgtcgcagagctacagggaggatgaaaggtccatgtcgttccacggggactacctgatggtgccctcgctgtccaagcattttgctgaggacctcctaataagaggcgccatggatctccaggagtcccttgcgatgcttgagaggttccaagctgcgtcactgagcatgagactactgtccagcaagaagataagaccggaaactggtgaacagtctcctgcgatagacaccatagtccgtgaagttctcctgaggccatcgaacgccaagcaggtgcaggtcaatggattaaaacaacagctaagcgattctaccagtgagttgaaaaatattgtcaaggatagtttttacaagaagaaccactctctggtgtccaacaatgagcaggcctctttgactttgagccagtcggcacggcacttgccgaacagttacctgatgcccaagcctgctgctcatcagaagaaatctgtgcccatgtcgtcgccatcttgtgcagcagtgcgacctgaaaagtctaagacgccaagcttggtagccaagctcatgggtctcgatggattgccctcgccgaaagctaaatccaccatgaaagacgacaagaacaaggcagcgagttcaccaagagcgctgttcgataccgagaggcccaggtcgaagaggctgctgccgcagttactcaaacaggaggctggttttggctcagagatgcctcggtcagaaaagctgccaccattgcaatctaacgttcaaaagaactctaccagctcaaagaagggcatcgtcggcacttcgtatactaccggagcggttcatgatactgcatcgatcaaaccgatccaaagagcggcatacgttgagcaggctcgaccgaaatccccgaaagaaatcaagatcgtctcttctcctacaggcaggaagcaacgggcgaatgagatcaacaggaggagcacggagaaacaaaggccttattcaggtgaaagaagcagagaaaggatgaatgctgcgaagtcaagagctggatcagcgtctcgtagcgcggaagcagtagcgaaacagtgtgataggagatcagttgcgtcaaggagcaatcgtacttgtgactcggtggtgaagcccaactcaccgaaaccacagagcaattccagagcgaggagagtgcccaggagaaatgttaagagctccaccgttgatgaattagtggcttacgagatagaaaaagagattctccatgccctggaccaaactgacggtccatccacagaacatagcgcgacaccgagcgacgaagcctgcccgagcgctgactgggacgaagcatcttctgtgggcgacatcctgaaagatcctggcgaggccagcgaaacatcgcagtctgctgtccgtgactgtagaatcagctcagctggtgcggatgcagatgctattcactcaccgacgcacagagccccgacaagggaagctgaaataaaagacgagatcggcttgcttctcctcagtgacaaaccgttccttagcagagcagctgagctcataggcgttgatgtgtatggggatctgagtaaccagtgtgacaggatctccaaggctagaacgagaaaccgtcggctctatctggacgcggcaggagagcaactggagctgaaacaccgccagcagaacatcctgtggccttacgctaggccgctgggccggagatggaggtcatcgtcatcggcgtacctgtcgctggaggagctgctgagagatgtcagcgacggggttaggaatctggaggatgggtattgcagtggagatgcccgccgtggcagcaaggatagcctggacgtgaagctggagagggatctcacctcctccgcagatgcgttgatcagtagtgtttgggacatgggctggcaaggtttggcttgtgtggaggcggaatgcttcgtcagagatgccggggaggagatcctgtccttgctcgtcgaggaagctgctctagacatgtgtctgcactgccatagtgccatgtgatgatatgaacatacagcgataagttgctgccatcgggacgatctataacaacttgcagcttcagttcttgtagttgtttttctttttttaggtttgaagtagatttcgtccgtgtaatcaccaggattgtagtagtataggaaccagtgaagtgatgtgttcatgagttcatcaagacatgactgaacaaaacaaggccatgaaaggaaggaaaaaaaaacagaaaaggtcacatacctgtcgtgttttgttgagtggcgacttgcgagcaccaacaaagccgagtcacgggccgagcccacgggagattcctattggcatctccatccgtcctcgtcggcatcccagccacacacacacacacaccgcacctagccacctaccctgctgtcccccgtgccgtcgccgatggagtccttgggcgtgctgctgctccaccccttcaacgcgtacctggagcaggagctggaccgccgcttccgcctgtaccgcttctgggagacgccccgcgaggagttcctccgcgcgcacgcgggcgccgtgcgcgccgtcgtcggcaacgccagctacggcgccgacgccgcgctcatcgacgcgctcccggcgctcgagatcgttgcctccttctccgtcggcatcgaccgcgtcgacctcgccaagtgccgcgaccgcgggatccgggtcaccaacacccccgacgtcctcaccgacgacgtcgccgacctcgccgtagggctcgccatcgccgtgctccgcaggatcccgcaggccgaccgatacgtccgcgcggggctctggaagtccaggggagactacaccctaaccacgcggttcagcggcaagcgggtgggcatcatcgggctgggcaggatagggcaggcggtggcgaagcgagtggaggcgttcgactgcccggtgagctaccaccagcggacggagcagcgggcgacgtacccgagctacacctactacccgtcggtggtggagctggcggcgaacagcgacgtgctggtggtggcgtgcccgctgaacgcgcagacgcgccacatcgtgagccgcgaggtgatggaagcgctaggccccagcggcgtgctgatcaacgtcggccgtgggccacacgtggacgagcgcgagatggtggcggcgctggcggacgggcggctcggcggcgccgggctggacgtgttcgaggacgagcctaacgtgcccgaggcgcttctggggatggacaacgtcgtgctgctgccccacgtcggcagcggcaccaacgagacgcgcaaggccatggccgacctcgtgctcgggaacctggaggcgcacgtgctcagcaagccgctgctgactccggttgtctgacgtttccttgtttctattacgaaataacaagcgcctgcgcctgacagcgagtggggattaaattcaaaatgttttgttttgatttgatcgccgctggtgaatggaactgaaatgtgctgtcaattctcagtccagtgcacacgacacgcttgcacgaatgtcgagcaaattatggcatcttcttttgcgaagccgcctcctcgtctgtacactctcttcccctttggagactttacgtatctgcgatgaggtttgttcatcctaagtccttttcggttggagggatttagtgagga

SEQ ID NO: 149102 - DNA, 1722 bp, Zea Mays
cattatatatatagagtgcgataagccggtaacagtatcttcctgcagcagctgggtggcaagagagttgtatcctggtaggctcagcggtatcttcttattaatttgttaactataccggatttcatcccttccttgctctaccatacatacacacactagtgttgtttgtttagatcactagtggtgcttgtttagatctgtattgctttctcacttgaactacgccgaggtaataatctgattagcgaatcctggtcccatcatctgaagctgcatttttaggccataccaatgtgtcattgagttgcttggcacgctgtttgttttcagcatgagcatatatagagtgcagtaacgttatcttcctgcagctgagtggcaagagagttggtatcctggggcttggcaggatagggtcagcgatagcgaaaagagccgaggcattcggttgttccataagctacagctcaagatcagagaagcctttcccagactacaaattccacgtgagcgctgtcgacctggcagccaactgcgacgtgctcatcgtgacgtgctcgcttaccgccgagacccaccatgtcgtgagccgcgaggtcatcgacgcgctgggtccagagggcgtgcttgtaaacgttggccgcggagcacacgtggatgaacccgagctcgtcgccgcgctcctcgagggtcgcctgggaggagcggggcttgacgtgtatgagcacgagcccttggctcctgagcagctcctgggcctggacaacgtcgtcttggtgcctcacgtgggcagcgatactgaagaaacgtgcagggcgatggccgacctagtgctagcaaacttggaggcgcacgcgtcggatgagccattgctcactccggtgatctgattattgttatcttttgtgtaagtcaggctgctgttactcagatcagccatggttaataagggtacacccatcttccatctatataggaatggatggagatactcacactgactgacatttatgtattgagattgagagcatgatgcatttttcttatctatgaagtgcagttcagcggcaagcgggtgggcatcatcgggctgggcaggatagggcaggcggtggcgaagcgagtggaggcgttcgactgcccggtgagctaccaccagcggacggagcagcgggcgacgtacccgagctacacctactacccgtcggtggtggagctggcggcgaacagcgacgtgctggtggtggcgtgcccgctgaacgcgcagacgcgccacatcgtgagccgcgaggtgatggaagcgctaggccccagcggcgtgctgatcaacgtcggccgtgggccacacgtggacgagcgcgagatggtggcggcgctggcggacgggcggctcggcggcgccgggctggacgtgttcgaggacgagcctaacgtgcccgaggcgcttctggggatggacaacgtcgtgctgctgccccacgtcggcagcggcaccaacgagacgcgcaaggccatggccgacctcgtgctcgggaacctggaggcgcacgtgctcagcaagccgctgctgactccggttgtctgacgtttccttgtttctattacgaaataacaagcgcctgcgcctgacagcgagtggggattaaattcaaaatgttttgttttgatttgatcgccgctggtgaatggaactgaaatgtgctgtcaattctcagtcca

SEQ ID NO: 149103 - DNA, 2022 bp, Zea Mays
agccaagagccaggcaagcaaaacaatagggcttcatcccaccgcgcgccaccggaccttgaacggttgaacccccctgcctccccagttccccagccatggcggcggccccctacgaccgggaggacggtctgcagccgtcggcgccgccgcacgcggtggacgcttacgatcccagctacgtgccggactccgtcaagaccttcgtggtgcacctgtaccgccacatccgggacaagaacgtctacgagatccaccagatgtacgagggcggcttccagcgcctctccgaccgcctcttccgcgacgctccctggccctccgcggaggccgtcgcaccctactgcgacggcgatcccgtcttcctcctcctctaccgcgagctctggtaccgccacgcccacgcccgcctctctccgctcactgccgcgcaccgcgccgagtcctggaccaactactgcgacctcttcagagtcgtccttcacggcgtcgtcaacatgcagctgcccaaccagtggctctgggacatggtcgacgagtttgtctaccagttccagagctgctgccaataccgcgccaagctcaagaccaagacggaggacgagctcaaccagctcaagcagttcgacaaggttgcgtggaacgtgtacggggtcctcaactacctgcaggcgctggtcgagaagtccatgatcacacagatcctcgagagggagaaggagggcctggagcagttcaccgccaccgatggctacgactacgagggcgggagcaacgtgctcaaggtgctcggctactacagcatgattggcctcctcaggatacactgcctccttggggattaccacactggcctcaagtgcctcggtcccatcgacctcaaccagcaaggggtctacagcattgtcatcgggagccacatttccaccatctatcactatggcttcgcaaaccttatgatgcgcaggtatgttgaggccactcgtgaattcaacaagattcttctgtatatcctcaagtacaagcagtatcatcagaagtcccctcagtatgatcagatactgaagaaaaatgagcagatgtatgcactgttggtgatttgcctatctttgtgcccacagaacaagctcattgatgaaaatgttagcacccagctgaaagaaaagtataacgacaagatgacaaagatgcagaggtatgatgatgaagcatacgctgcttatgatgagctattttcgtatgcttgccccaagttcattacaccatcacctccagtgctggaccagccgctaacaaactataaccaggatgcataccgtctacagttgaagctgtttctttatgaagtaaagcagcagcagttgctttctgggatccggagttatctgaagctatattcaacaataaccattagcaaacttgcccaatatatggaagtggatgaagcaacgctaaggtcaatcttgatgacatacaagcacaaaatgcatgcggttgacagtgacggaaagatggtatcgagtgcagactttgacttttacattgttgaggatgttattcatgtcgtggagtccaaacctactaagcgtcatggcgattactttttgagacaaattttgaagttcgaggaaatgatcggtggactggataaagtacagcttgactgaacctggtagcaaatatggagagaaatgccactgctttctttttgctaatataggaatagatgtttatgatggatgtcattagcaagttatgtttgtgccttctgtagcccatgcaaaaacccgtcattttttctctcttttcactggattcgactttgaagcccgttgaggcaattagcagagtcgtgatgttaattttggtcgcccagttgcttgaatagtgatctcatatcctatctgggagtggcatgcaaattgagttgtgccagcaaccggcatgtcctagctaaagaggatcggtgctaaagggaacaaatttgtaccgatgagaatttagatgagtcgctcatcagca

SEQ ID NO: 149104 - DNA, 2019 bp, Zea Mays
agccaagagccaggcaagcaaaacaatagggcttcatcccaccgcgcgccaccggaccttgaacggttgaacccccctgcctccccagttccccagccatggcggcggccccctacgaccgggaggacggtctgcagccgtcggcgccgccgcacgcggtggacgcttacgatcccagctacgtgccggactccgtcaagaccttcgtggtgcacctgtaccgccacatccgggacaagaacgtctacgagatccaccagatgtacgagggcggcttccagcgcctctccgaccgcctcttccgcgacgctccctggccctccgcggaggccgtcgcaccctactgcgacggcgatcccgtcttcctcctcctctaccgcgagctctggtaccgccacgcccacgcccgcctctctccgctcactgccgcgcaccgcgccgagtcctggaccaactactgcgacctcttcagagtcgtccttcacggcgtcgtcaacatgcagctgcccaaccagtggctctgggacatggtcgacgagtttgtctaccagttccagagctgctgccaataccgcgccaagctcaagaccaagacggaggacgagctcaaccagctcaagcagttcgacaaggcgtggaacgtgtacggggtcctcaactacctgcaggcgctggtcgagaagtccatgatcacacagatcctcgagagggagaaggagggcctggagcagttcaccgccaccgatggctacgactacgagggcgggagcaacgtgctcaaggtgctcggctactacagcatgattggcctcctcaggatacactgcctccttggggattaccacactggcctcaagtgcctcggtcccatcgacctcaaccagcaaggggtctacagcattgtcatcgggagccacatttccaccatctatcactatggcttcgcaaaccttatgatgcgcaggtatgttgaggccactcgtgaattcaacaagattcttctgtatatcctcaagtacaagcagtatcatcagaagtcccctcagtatgatcagatactgaagaaaaatgagcagatgtatgcactgttggtgatttgcctatctttgtgcccacagaacaagctcattgatgaaaatgttagcacccagctgaaagaaaagtataacgacaagatgacaaagatgcagaggtatgatgatgaagcatacgctgcttatgatgagctattttcgtatgcttgccccaagttcattacaccatcacctccagtgctggaccagccgctaacaaactataaccaggatgcataccgtctacagttgaagctgtttctttatgaagtaaagcagcagcagttgctttctgggatccggagttatctgaagctatattcaacaataaccattagcaaacttgcccaatatatggaagtggatgaagcaacgctaaggtcaatcttgatgacatacaagcacaaaatgcatgcggttgacagtgacggaaagatggtatcgagtgcagactttgacttttacattgttgaggatgttattcatgtcgtggagtccaaacctactaagcgtcatggcgattactttttgagacaaattttgaagttcgaggaaatgatcggtggactggataaagtacagcttgactgaacctggtagcaaatatggagagaaatgccactgctttctttttgctaatataggaatagatgtttatgatggatgtcattagcaagttatgtttgtgccttctgtagcccatgcaaaaacccgtcattttttctctcttttcactggattcgactttgaagcccgttgaggcaattagcagagtcgtgatgttaattttggtcgcccagttgcttgaatagtgatctcatatcctatctgggagtggcatgcaaattgagttgtgccagcaaccggcatgtcctagctaaagaggatcggtgctaaagggaacaaatttgtaccgatgagaatttagatgagtcgctcatcagca

SEQ ID NO: 149105 - DNA, 228 bp, Zea Mays
atggaggtggttcacaggtgcaagtatgcaaagatccatattgctgctgcccttgtcacagcaagaatgttggtccttcaacttctccactgcagccacaacagacaacaacaatgggaggatactgtggagaagggtccacacaatttggaatgtgggagcactactagaaaactcttctgtatcaattgctttaagcatgttggttttctttatcaattgctttaa

SEQ ID NO: 149106 - DNA, 126 bp, Zea Mays
cctatcgaaatataaaaacgttcgagttcttttctacttctttttctttcgccacgaacttcaatccatacaaatacattttcttacacatgcacaacatagaccaaagcttaaacagattaatcc

SEQ ID NO: 149107 - DNA, 441 bp, Zea Mays
atggaagcgaagcaggctgaagcacgctgggagaagatgatgttggccatcgagaagctgacaggaaaggttgatgccatggaggaagagaggacgctgtttcgcaagcaaatggaggagaccgggaaggctgtttctcttcttcgggtggaagccatggcaagggatatggatcgttatgggaatgaagaagcaggagaaagagacagcagaaattctcagaacagaggagaaagaatgtacagaggtagagaggagagttctgggcaactggacagagatggggaacagttgcaacagcatataccaaggatgccctttccaaagtttggaggaacaaatccagccagttggattatacaatgtgaagattacttcaacctctaccgggtccctgattttctgaagtccactgtggcgtctctcaactttgaaggttga

SEQ ID NO: 149108 - DNA, 93 bp, Zea Mays
tcaaaaaagaacaatatatataatggccaagtgtatagatataaatgtcacaaatattattacatagaggaagtgtcttataaaaataaatga

SEQ ID NO: 149109 - DNA, 655 bp, Zea Mays
gcttccgctgggcaaaaaccctaatcgcatctgcttccagagccccccgccgccgctgcgccctcctctcggtcctgccgtccgtcgaggtcatgatcaggccgtcatccaaggtgatcatcaagttcctgacggtcatgcagcgccatggttacattggcgagttcgagtacgtggatgaccacagagctgggaagatcgtggtggagctgaatggaagactgaataaatgtggtgttattagcccacgttttgatgtaggtgttaaggagatcgagggatggacggcgaggcttcttccatctcgccagtttggctacatcgtcctaacaacttctgctggaattatggaccatgaggaggcccgccgtaagaatgttggtggcaaggttctaggtttcttttattgaaaatgtgtttttttgagccacagatgcgtccaagaactcgtctgatgttttgaggtttgttaagactgggtgtccgagcctttgtggtttgttaagacagcgatgtgtcatgtatttcagaaattgggatttttatgagatgtacctgcgagagccctgtctgtttcgattttcagatattggttttgatttatgcgatacaaacaggtcctttagtccatataactttttgatgctgactttat

SEQ ID NO: 149110 - DNA, 1949 bp, Zea Mays
gcttccgctgggcaaaaaccctaatcgcatctgcttccagagccccccgccgccgctgcgccctcctctcggtcctgccgtccgtcgaggttagtctccacgttcctttccctccacccatgaactgtatcagtatcagatccgcttttgtttggtttcgcgatgagctagtagagcggggcaggtgctgcggatgggtctagcgatggaggacgacggtgtcgtcgcacgcacctcgtcggcttcatgatttatcccctctgccccatgcgtgctcaaactaggaactaggcttcacattcttctccccacaaatcgtggtagctgcgtccttgcaggatttgtgggaattgcggttgcttttcatgcgccttctgctttgacgtgattgcttgtattgattcccgatgctcctgtgcgaggctgttactctgtattgttttctgtgtgttctgtttttgcatgatccgtgaagcgtctcttgtaatagtgtgttctgcttgtgcattatccgtgaagcttgtcttgcaatactgatatgctgtcctgatggaatgtccagggaggctatatacttagttagcgaacaagtacatcatgatgtaggtgtttgatgctgagagataccgtactttggttgtcggtctgcattaggcaccggttgggtgcttgctggtcagctgttttgtaggttagattagacccggcacaagactgcttattataatatcaatttagctgtggtaattagatggggcattcttcaggatctagttcttgttgatcaaagcagactaattgcaaactagacgatgaagggtgtggaatactgctagtgttaatttaatggtatgttgtttatgaactaaagctttatcctgcacgatctcattgatgaaacgaactaatacacatgtgatgagtagtttacaaccactagagccgatatcatggatatcctgttattagccttacgttgtctcatacattggtctggctttgtacgtactattttgttacctttcttctgagtactaactttcaactgtataggtcatgtggttaagcttggtatctcctttagaatgcatttatttacatgatttttagtatagcaccagatgagtctttttcgttagatgaatgtttgtactaaacaagcaaacctttacattgtttttcattgatgtagcggcatggttacttgtacctttggttgtgttacataaatgcaaatggctgtttcctctgatattcttgtctgtgtctggcatgagacccttacaactgtatctctttgttcaggtaaaaggacagcatggtgagggtcagcgtgctcaatgatgctctcaagtccatgtacaatgctgaaaagatagggaaacgtcaggtcatgatcaggccgtcatccaaggtgatcatcaagttcctgacggtcatgcagcgccatggttacattggcgagttcgagtacgtggatgaccacagagctgggaagatcgtggtggagctgaatggaagactgaataaatgtggtgttattagcccacgttttgatgtaggtgttaaggagatcgagggatggacggcgaggcttcttccatctcgccagtttggctacatcgtcctaacaacttctgctggaattatggaccatgaggaggcccgccgtaagaatgttggtggcaaggttctaggtttcttttattgaaaatgtgtttttttgagccacagatgcgtccaagaactcgtctgatgttttgaggtttgttaagactgggtgtccgagcctttgtggtttgttaagacagcgatgtgtcatgtatttcagaaattgggatttttatgagatgtacctgcgagagccctgtctgtttcgattttcagatattggttttgatttatgcgatacaaacaggtcctttagtccatataactttttgatgctg

SEQ ID NO: 149111 - DNA, 733 bp, Zea Mays
gcttccgctgggcaaaaaccctaatcgcatctgcttccagagccccccgccgccgctgcgccctcctctcggtcctgccgtccgtcgaggtaaaaggacagcatggtgagggtcagcgtgctcaatgatgctctcaagtccatgtacaatgctgaaaagatagggaaacgtcaggtcatgatcaggccgtcatccaaggtgatcatcaagttcctgacggtcatgcagcgccatggttacattggcgagttcgagtacgtggatgaccacagagctgggaagatcgtggtggagctgaatggaagactgaataaatgtggtgttattagcccacgttttgatgtaggtgttaaggagatcgagggatggacggcgaggcttcttccatctcgccagtttggctacatcgtcctaacaacttctgctggaattatggaccatgaggaggcccgccgtaagaatgttggtggcaaggttctaggtttcttttattgaaaatgtgtttttttgagccacagatgcgtccaagaactcgtctgatgttttgaggtttgttaagactgggtgtccgagcctttgtggtttgttaagacagcgatgtgtcatgtatttcagaaattgggatttttatgagatgtacctgcgagagccctgtctgtttcgattttcagatattggttttgatttatgcgatacaaacaggtcctttagtccatataactttttgatgctg

SEQ ID NO: 149112 - DNA, 717 bp, Zea Mays
aaaaaccctaatcgcatctgcttccagagccccccgccgccgctgcgccctcctctcggtcctgccgtccgtcgaggttagtctccaccatggtgagggtcagcgtgctcaatgatgctctcaagtccatgtacaatgctgaaaagatagggaaacgtcaggtcatgatcaggccgtcatccaaggtgatcatcaagttcctgacggtcatgcagcgccatggttacattggcgagttcgagtacgtggatgaccacagagctgggaagatcgtggtggagctgaatggaagactgaataaatgtggtgttattagcccacgttttgatgtaggtgttaaggagatcgagggatggacggcgaggcttcttccatctcgccaggttagtccaggctgctgtctctacaaaatctgattagagtttgtctgtacactttgaccccagtgctaactgtgcctctttgactggtgtagtttggctacatcgtcctaacaacttctgctggaattatggaccatgaggaggcccgccgtaagaatgttggtggcaaggttctaggtttcttttattgaaaatgtgtttttttgagccacagatgcgtccaagaactcgtctgatgttttgaggtttgttaagactgggtgtccgagcctttgtggtttgttaagacagcgatgtgtcatgtatttcagaaattgggatttttatgagatgt

SEQ ID NO: 149113 - DNA, 87 bp, Zea Mays
tctctctctctctctctctctctctctctctctctctctctctctccatcgaccccgatcgagtcgtttatggcgcgcccccgcgcc

SEQ ID NO: 149114 - DNA, 468 bp, Zea Mays
aagaagaatagatctggtttactcctagggcctcctacgggagggctgagtaccgggactatcttgcgagtgcatcgcagttcacaacaaattggtaccggagccactacgcgcgcatcgccaccatggccggcgcgcacgacgatcttgtgacctactccgccaagatggacctcatcctcgagcaacttgccgccatcaatgcccgtttggattcccacgacgctcgtctggccaagctagagcaggcgtgggtcagcccctctgcttctaccgcgggctgcctgggcgcgagcgagggcggcctgggcacgggaggaggcggccgagtcgaggacgatggggtcaatgggctgcaacccaacacacccagggaggtggaggcggcgttctacgttgaggtggctgtgccactgctgcagcccgcctccgtgctcatggaggtccaggcgtggcccgactatggct

SEQ ID NO: 149115 - DNA, 2731 bp, Zea Mays
aacaatggcggccctgacgcaaagcgccattgacgtggtgctgggccagctgtcgaaggtggtcaaggacgaggtgcagctgatcggcggcgtgcacagagatatgaagttcatcaaggacgagatggacagcatgaacggcttcctgacgcacctgaacaagatggagagcgagcacgacgaccaggtgcgcgcctggatgaagcaggtgcgagagaccgcctacgtcgccgaggactgcgtggagcgctacgtgcgcgacatggaacgcttgggcgtcagccagggcgggtgcgcggcctacgcggccatggcgctcctcgccctcagtaaacccaagacgttctgggagctccaccagctcggcaagcagatcaccgagctccggacccgcgtgcacgaggtcggcgagaggcgggtgcgctacgacgtcaaagtcccggacaagcgtaaccgcaggctggtgcggaacgaggcggcgtctggccaggacgaggagaggagggagtgcttcgtgcgcagtctggaagaggagctgcagcaggaagacaagaagagggcgagggaccagggccccgacccgcttggtcgtccatcacttgttctccgcgcgcacgccaagatgggtggcctgcttgctctgccactgcgactcggcggcggcggtggcgacaccattgcccagcttcctggtctcgtatcatctgaatctgccagagtacgtcgcattctcaagagatgctgtcctcctcgtccggaccaccccagacccaccctcaccgatgctgaagcagagaagttcagatgcaccaagaagatgtttgtgtgtgctctgtacgtgtacccttacctgaccaacgcagagctgaagcagctcaaggtgggagtggaggcacccggagtagaagcacaggaggccaggaaccaggtgatggtcttctgctacagtatgctgtccacacagcagaagagctgcctgcagtacctgaccgcgttcaagcacgagacggagatcagcagaacgagcatggtgaggcgatgggtcgccgaagggcttgtgggcaaagagccaggagaggggtccacggccactctacaagaagcaggcgagcgctgcttccgcgagcttcggctccgaggcttcattcgccccgctcgctggggcgataacggcaccgtcaagagctgtgtcatggatggcccagtccaagacttcgtcgacggcatcaccaggagcgagaacttcctttccgacctgccggcacacctgcagcgccagctcgagatccgaagcatagttcgatacggtcgtccctccatgtcggcgccggcggcggcgccggcgccgttgaggagcgtgctgctcagctcctgctgtggcggtggcgtcaccaggaccagcaggtacgacgatgagcaggattacgcggcgtcgaccgccaccctcctcaagcatcgcatggacgcgctggtggatttcgtcaaagaactccctaagctataccggctgaatgtgctggacctgggaggctgcaagggcctcaggcgccgccacctcgtggccttcaccgagctggaatgcctcaggtacctgagccttcgggacacagacgtccccggactggttcccgaccgccatatgaacaggttcgagcagctggagaccctggacatccggggaacacgcataccgcctcgcgacaccaagaggatctacctgcccaagctcaagcacctgctcgccggccgcttcaccatggcctcggccgagaaggagatgctcgtcaccgtggacgtgcccgacaggatcggttccatgaggggcatggagacactatcccgcgtccgggtgtccgtggacggagccgagctggaaagagtcgccaagctgcggcagctgcggaagctcggcgtggtcgtccatgccaacactgccactgctgcagttttgggtcgagtgctgtacatgctagctggaagcctgcgctccctgtcggtttgggtcgtcgacgccaacgccgacgccgtcgcccgcactcgcactcgcactcgcatcgccgccaccagcacccagcaaggatcgggcggcgaaggcatcctccacatttcctccttgcacgagatcgcccgcagcttggccctcgagaacctgcacatcaagggaaaggtgagcctcccttcgtggatcggaacggctccgaagctcaccaacgtcaccctaagcgacaccgagatggacggaggagatgctctgaggaggctcgccaccgtcgtgaacctgtgctgcctcaagctcagccgcaacgcgttcaccgagcaggcgctccacttcaaggacgtccagttccaagctctcaggttcctcgtcgtcgagggcgacgccttcaccagactcgccttctccgccggcgatgcagctccgaagctcgagaggattgtctggtccataggaggaacacgagcggcgcagaagaacgaggagctcatcgtcggaatccaacaccttcccagcctgaagaggattgagctgagggccagcttcagggagcacaatcttttggaatggatgcggcagcagcggcaaacaaccacttcatcggcagcgaagtatcgcatctactacgtatcctcctcaaccgatagacgaaatcaaacaatcgctgaggtcccaaaagctgctactgatactaccttgacacttccggctgctgttatccatcaactaacttaa

SEQ ID NO: 149116 - DNA, 1122 bp, Zea Mays
gatgttggaatggattggatcattcacctcgatactgatgagttgattcatccagttggtgcccgagagtactccctgaggcgattgcttttagatgttcctaacaacgttgacatggttaacttccccaattatgaaagcagcattgaccgtgatgacattatggattcttttactgaggtttccatgtttaagaaatattatgaccatcttgctaagggtacatactttggcctatacaaagaagcaacacgtggtaatccaaactacttccttatggtaatgggaaatcagctgcaagggttcaggagcatttgtgtccgaacggtgctcatagatggcataattacatgaaatccccaaatgaaatcaaactggaagaggctgctattctgcattacgcctacacaaagttctcagacctaacctcaaggagggataggtgtggctgcaaaccaactaaagaagatgtgaagcgatgtattatcttggaatttgactgtttgagagctattgtgtcatggcaggcaactaaggaggagatggggaactagtaccgggaacatgtggtatggaccgataaattaagacaccaatatgaaacttgtgaggaagggtgtcttaacacgtatatacatgcccatgcatggttagtcctgatctcaatcttgtaggcgtgaaagctgtttttcttattgctactacattttatgccccaaaactctacaggctatcatccgtggcctcaaggaatccgacgtctttaccaatgctgtaacatcagcgaaagcacagtcgaagacgaagccgtcaaacatgggtgggtctcggaaacaaggaggccatccaaccgaacgtaactgctggtcagtccacactggaaggtggtcacgagaggttacaggcaaccgtaagaaagatcctggaaatggtggacgcccaggaacaggaacaggaagaagcaatgccactgaggtcgtcccctggtttgctcgagctctcggaacgcgccactgctttgtcatgacgacttgaccgcgttgtgattgcttaaccatgcatgcaatgtattgctgctgcctcgaggatacggtcggataacataggcttgtttctgtcgtc

SEQ ID NO: 149117 - DNA, 678 bp, Zea Mays
gagaaaactcttgtctcttcttctcttctctgtcgtatgtacctagctacttttccatgcatgatgtatacagttcctcaactgtttattatttgtcccacgtacgtccagacttccctggagccaaggtggtgagcgaggcggtggccaagtccggcgcctcgcccctgtctccggcgatcaccttcatcttggacaaggtcgcaccgtacatccccaaggaggagcccaaggcggaggacgcggtggctgaggccacttcccgggaagtcgccgtggaggtggaggatgccgagccggctatagctgatgcagcggccgagacaccatcggaggcgaagaagggagaggaggaaaagccggctgccgaggaggcggcgccaccggcagcggctgctactgaggagaagtaatactccgatccacagccatgcctctccctacgtagctgcagcagagtgaaaagtgattcagtcagtcagacatacacacttgcattggcacgcattattcatggacatgtacgttgctgcgccgtgtgtgcgtgtgcgtgtgcgtgtgtgtgggggttctttgttttttattttggggcgattgttacaaatgtgtaattatttatatcgatatgtttgtttcattgatggaccgcatttaataagacaattctttcttgtgtat

SEQ ID NO: 149118 - DNA, 968 bp, Zea Mays
taccggcccgtttagcccgcttttcggcccctgcatcaccatcattcataggctgccttcctgcctgctgatctcgcacctcaaacccacacacagcagcatgtataggttgagatagatggccagtctgtggaagaccaaggttctgcctggcctcaacaagatcttcgacaaggatggcaagaaggctgcagctgcaggcttcttcaagtccttcaacaaggaggagattggcaaggagattgaggagaagaaggcagaactggagcccaaggttgcggaggcttatgaagcatctcctcctgaggtcaaggctctgttcaaggataagaagccagtcaagatcagcaagaagaactcgactgcagttaccaagttcctcgatgagctggctaagattgacttccctggagccaaggtggtgagcgaggcggtggccaagtccggcgcctcgcccctgtctccggcgatcaccttcatcttggacaaggtcgcaccgtacatccccaaggaggagcccaaggcggaggacgcggtggctgaggccacttcccgggaagtcgccgtggaggtggaggatgccgagccggctatagctgatgcagcggccgagacaccatcggaggcgaagaagggagaggaggaaaagccggctgccgaggaggcggcgccaccggcagcggctgctactgaggagaagtaatactccgatccacagccatgcctctccctacgtagctgcagcagagtgaaaagtgattcagtcagtcagacatacacacttgcattggcacgcattattcatggacatgtacgttgctgcgccgtgtgtgcgtgtgcgtgtgcgtgtgtgtgggggttctttgttttttattttggggcgattgttacaaatgtgtaattatttatatcgatatgtttgtttcattgatggaccgcatttaataagacaattctttcttgtgtat

SEQ ID NO: 149119 - DNA, 964 bp, Zea Mays
taccggcccgtttagcccgcttttcggcccctgcatcaccatcattcataggctgccttcctgcctgctgatctcgcacctcaaacccacacacagcagcataggttgagatagatggccagtctgtggaagaccaaggttctgcctggcctcaacaagatcttcgacaaggatggcaagaaggctgcagctgcaggcttcttcaagtccttcaacaaggaggagattggcaaggagattgaggagaagaaggcagaactggagcccaaggttgcggaggcttatgaagcatctcctcctgaggtcaaggctctgttcaaggataagaagccagtcaagatcagcaagaagaactcgactgcagttaccaagttcctcgatgagctggctaagattgacttccctggagccaaggtggtgagcgaggcggtggccaagtccggcgcctcgcccctgtctccggcgatcaccttcatcttggacaaggtcgcaccgtacatccccaaggaggagcccaaggcggaggacgcggtggctgaggccacttcccgggaagtcgccgtggaggtggaggatgccgagccggctatagctgatgcagcggccgagacaccatcggaggcgaagaagggagaggaggaaaagccggctgccgaggaggcggcgccaccggcagcggctgctactgaggagaagtaatactccgatccacagccatgcctctccctacgtagctgcagcagagtgaaaagtgattcagtcagtcagacatacacacttgcattggcacgcattattcatggacatgtacgttgctgcgccgtgtgtgcgtgtgcgtgtgcgtgtgtgtgggggttctttgttttttattttggggcgattgttacaaatgtgtaattatttatatcgatatgtttgtttcattgatggaccgcatttaataagacaattctttcttgtgtat

SEQ ID NO: 149120 - DNA, 989 bp, Zea Mays
tcctcccctttatttctttcagttatcattaggctgttggcatgctagattttgacgtgttggtaacttcaaatccagaaaatacgaggagatatgtgcaccccaggttgaagaattctgctacataacagacaatacatacttcagagacgaggttctagaaatggaagcttctgtgctgaactacttgaagtttgaaatgacagcgcctacggcaaagtgtttcttgaggagatttgctcgttctgcacaggcgtgtgatgaggatcctgctctgcatctggagttcctggccaattacatcgctgagctatccctgctggagtacagtcttctgtcttaccctccatcactaatcgctgcctcagctattttcttggcgagatttgtactccagccaacgaagtatccttggaactccacgcttgctcactacacgcagtacaagccgtccgaattgagcgagtgtgtaaagacactgcaccgcctttccagtgttggtcctgggagcaacctcccagcaatcagagaaaagtacagccagcacaaatacaaatttgtcgcgaagaagcagtgcccgccacaaatccctgccgaattcttcagggatgcggcatgctagacaatagaaagaagcccagcggttgcttacttgattgattcttctccctgatgtggccagttcctgtttgtggtcatgtatgttacaaatccagagagttcaatagcagcactccacggcatgcatatgtatctggaaccatgtttagctactacgctgatggaatctgcaagtcaagtgctgtgccttgagatagatatatgtaacgaacagctagttcgaccttggtacagaaaagcattcttccagcgccctgtacgtatatgcagctgggtctgatctgttgtatgcctgaactgcacaacaacagatgaagaaccaaatcatgatgactaaccaatttaatttaatttattagctgtttctg

SEQ ID NO: 149121 - DNA, 670 bp, Zea Mays
gccttccgcttcctcaccccgctagtcccataccctagccagggggggatcgcacctcttccgacgatgtcgacccacgccgcctcccgccgctcctcctcctcgtccgcggtcgccaagcgccccgcgatagcggagggagctaccaaggcggcgggaccgggccccaccgccgcgcaggcgaagaagcgcaccgcgctcgtcaacatcaccaacgtcgccgctccgggggcgagggtcgccgccgttgggaaggtcgcgccaccggtcaccggcgcgaagttgaatccagctacctcaggtgcacccttaaagaagccatctttggcaaatgctcgcaccatccggggttctgctgcgaagtcggcttccatcaagccagctccaccagtatcacgccatgacagcagctcagagcagaagcataatgttcttgtgcctaccactgtccatgtgccaagtcgtgctcctgccttggtaccctacagcagtttcgtgtctcctggacgttcaagagattcagtttctactgatgagacgatgtcgacttgtgactccatgaaaagcccggacttcgagtacatagacaatgggggttgctcgatgctggcttcgttgcagcgacgggcggatgaacatctgcgtacatcagaggacagagacgttgaag

SEQ ID NO: 149122 - DNA, 357 bp, Zea Mays
atgaaactgccacttgtgattgatttgatcaactctcttgcctgtagtgtgagaattcccggagcgtgcccgctggacctcctcgacgacggcggctgcgacggctgcctccggcgcggcggagggggcgtcgagcgggagcaggtggcggtcctcgaagagccagagcggcgagggcggggtgagccaggacgaggagctggccggcagctgcggggaggcggagacggaggagaagagcatggacgtggtgagcgagtcgaagggccaggcgccgccgctgccgtccccgtgggcggaggcgggggaggggtcgaagtccatgggatgaaaccttgctgctgctggctgtgctag

SEQ ID NO: 149123 - DNA, 2643 bp, Zea Mays
cgaaaccgaaaaccaaccacaccacccagtagaagtcgctgatcgtggcggagagggacaaccacacacagttccctcagcctctggcggcagaggctgagccggggaggcgcctccctctcccctccctcgcctcctactctcctgtctttctccaatggcggcgattaccgcgccgccggcccctcatccggcctccacctcatgccgccgccgcgcgccactcatccgcttcgccgcctcctcgtccccgtcctcccgcttccgcccatcctcctcctcctccttcccgggcgcagccggcagcagcagcggcggcgggggcgagatcctccacgtctcgccgcttcccccgcccgccgcgcccccgggggcccccgtctacgtcacgctcccagccgacgtcgtcggcccggggggccgcgtcgcgcgccgccgagccatgggggcctcgctcgccgcccttgccgccgccggcgtcgcgggcatcgccgtcgagctctggtggggcgtcatcgagcgccaccgccccggggagtacgactgggccggctacctcgagctcgccgccatggcccgacgccacggcctccgcgtgcgcgccatcctcgccttccaccagtgcggcgccggaccacatgacccgccctggattcctttgccacaatgggttcttgaggagatggataaggttccggacctgtcatataccaatagataccagaagagaaacagagaatacatatcactgggatgtgatattcttcctgttctgaaaggaagatcacctatgcaagcttactccgacttcatgagaagcttccgcaatactttcgaagattaccttggggccatagtaacagaagttcaagttggaatgggcccaggaggtgagcttaggtatccatcatgcccaactgagaagctaaatcagccaggcagttcgtctgaacttggagagtttcaatgttatgataagtttatgcaagcatcattaagtgctcgtgcacaaatttttgggttacaagaatggggtaatgatggttcaactggcacagatggttcgcagaagaaccttgaagaagcaagtttttttaggcttgatggaggatattgggatacaccttatggtcactttttccttgagtggtattcaggaatgcttcttctccatggagagaggctatgcatgatagctgatgcaatcttctctggtactggtgtgaccatctcagggaaggttgctggcatacattggcactactatacttgttcacatccatctgaactgacagctggctactacaatacactactaagagatggctatcttcctatagctcaaatgtttgccaaatacaaagctgcattgtgctgcagttgtttcgacctgagggacacagaaagaacagattctgagagcagcccagaaggtactctccggcagcttgcgggtgctgctaaaatgtgcggccttcctcttaatggtgagaattctatgacaaggctggatgatgcatcactgaatcaagtcataagaagctcaaggctatactcaggccgtacttcaggaacatccttttcctttaactatgttaggatgaacaaaagcttgtttgaatttcacaattggaatcgatttacaaagtttgttaggcagatgtcagatgctaggacctttctagcaagactgtatgtcaggagagggcagcaatgcttgtcttcaatgtcggttgtttgggtggttagtcgggcttgtgtatatacatgaaagttgtcgaaagctactggggaaatcatgtgcttgtaatctcagcaatcaatgattcgaccactgtggaagtaaatgttttgctcagtacatggcttgttcgctgcggcttgctgcggctgcaatccggctgcggctgcggcttctacagtatttttctctctatggattgcagctgcagcagtccaaacagctgcaacagtgtcggcttgcagcctgccgaacacgcccatggctcatttagttgccagaagggcaggcaggcttatgctctcaaggctgtactgatttcatgcgtatgcatatattagtttcatgcatatgccattgctgaacaaaatttatatttatttgttgtaaagtggcagtgtagttgctgccaacaatattgaatcttgaaaaatatgctcctgttaaaggtcccacgagggtcctgtttagccattgtagaaatacttagttggagccttctgttttctccttccaatatgaatgcttttaaactatatgcttatggtaatatgtatacttgtcacaaatgtcaaatataagttcatctaagtttacccgaagtcaatttttttctaactttgactaacaatattataaaattgattgacaacgaatggagtacgatccattactgagcaatgctggattcacaagaggtctactggtatccatttcttttttttataaaacacattaatatatatatatatatacagtttctataaaatcaacgccatggtaaaagacgtgagatatgtgaattttattgatatgatttttagacactaagcatgaagctaatttaacacatttaaccattttgtcaaaactttgaagttcaattttttttaatatattac

SEQ ID NO: 149124 - DNA, 2580 bp, Zea Mays
cgcaaggcaaaggcagccgcagccccgcagcagcagcaccagcagcggcacggccccgaggtcgggtcgtctccccacacccgaaatcccctcgcgcaccacacaaaatcctccagccacctccccaccccaccgccggcgctctgctcgccggaccttcgcacgcggccggagacacagaaagaaagagagatccgggccccgccggctccgatatccgcccctcccctgcccgccgccgctggattccgcgccctcctcctcgatcctaccgcagggccctcactctgtaggtatcatggtcatgaagatggagcacgaggacaatggtgccatcggaggaactgatggcacgtggacagaggacgaccgagctctcggcgctgctgtgcttggagcagatgcctttgcatatctaacaaaaggaggtggtgccatatccgagggccttgttgccacatctttgccgggtgacttgcagaacaaactccaggagcttgttgaatccgagagccccggtaccagttggaactatgctatcttctggcagctctcacgcacaaagtctggtgatctcgtccttggatggggggatggctgctgccgtgaaccccgcgatggagagctgggagctgctgcttctgcaggcagcgaagatagcaagcagaggatgcgcaaacgtgcgctgcagcggttgcacatcgcattcggagttgctgacgaggaggattattcccctggtattgatcaggtcacagatactgagatgttcttcctggcatctatgtactttgcgtttccccgtcacgctggtggccctggccaagcatttgcagcaggcatccccatctgggttcccaatagtgagcgcaaggttgtaccagccaactactgttaccgtgggttccttgcaaatgcggcaggatttaggactattgttttggtgccatttgagagtggcgtccttgaactgggctcaacgcagcacatagctgagagttctggtactgtccagacagtaaggtctgtatttgcaggaacaagtggtaataagtctgcagtgcagagacacgaggctgaaaggtcacccggtttggcgaagatctttgggaaggatttgaaccttggccggccttcagtcgggctggcggtcggtgtatctaattctaaggtggatgagaggacatgggagcagaggagtgctgttggtgggacctcattgctaccgagtgtccagaaaggtttgcagaatttcagttggagtcaggctcgtgggctgaattcccatcagcagaagtttggcaacggtgtgttgattgtgagcaataatgagggtgcacaccgcaacaacggagcagtggacagccctagcgcagcgcagtttcagcttcaaaaggcgcctcagcttcagaaactgtcggttgttcagaaaacgcctcagctagtgaaccagcagccaatgcaggcacaggtacctaggcaaattgacttcagcgccgggagcagttccaagcctggtgtgttggttacaagggcaggtgtcctggatggtgagagtgcagaggtggatggcttgtgcaaagaggaagggccaccacctgttatggaggaccgacggccaaggaagaggggaagaaaaccagcaaatgggagggaagaaccacttaaccacgtcgaggcggagcgccagaggagggagaagctcaaccagcggttctatgcgcttagagctgttgtgccaaacatatcgaaaatggacaaggcgtccctgctgggcgatgcgataacgtacatcactgacctccagaagaagctcaaagagatggagacggagagggaaaggctgttggagtcgggtatggtggacccaagggagcgggcgcctaggccagaggtggacatccaggtggtgcaggacgaggttcttgttcgtgtgatgtctccaatggagaaccatccagtcaagaaggtcttccaagcgttcgaagaggcagaggtccgtgtaggcgagtcaaaggtgacgagcaataacaacgggacggcggtgcattctttcatcatcaagtgtcctggcactgagcagcaaacgagggagaaggtgatagcggcaatgtctcgcgcgatgagcagttgagcatagcagctgtaggatcagactggcacggtagaaggtggccggtttatccaggttgcgaacaagaggcggcggcggcggctgaagcagcccgtcgattgttgataggagagttgtaggtggagagaagcaagataagattcttctgacttaagcaatgcagcagcaaccaaaaaaaaagaattggggctctagttaagcagccattctacggtaggtttcttttggttgtggtccgaccccgaccgtttagttctgatgtttttgctttggaaggatggataccgtgttcgttgtgtaagcctgatgatgcagcagaaccataaacagcaatacatgtttttcttattcttcttcttcttctcatgcgtgatttggaaattaaattcattgcagattgtcttttacatttcctttttatggcgatgatagtttagtatgttaaa

SEQ ID NO: 149125 - DNA, 2577 bp, Zea Mays
cgcaaggcaaaggcagccgcagccccgcagcagcagcaccagcagcggcacggccccgaggtcgggtcgtctccccacacccgaaatcccctcgcgcaccacacaaaatcctccagccacctccccaccccaccgccggcgctctgctcgccggaccttcgcacgcggccggagacacagaaagaaagagagatccgggccccgccggctccgatatccgcccctcccctgcccgccgccgctggattccgcgccctcctcctcgatcctaccgcagggccctcactctggtatcatggtcatgaagatggagcacgaggacaatggtgccatcggaggaactgatggcacgtggacagaggacgaccgagctctcggcgctgctgtgcttggagcagatgcctttgcatatctaacaaaaggaggtggtgccatatccgagggccttgttgccacatctttgccgggtgacttgcagaacaaactccaggagcttgttgaatccgagagccccggtaccagttggaactatgctatcttctggcagctctcacgcacaaagtctggtgatctcgtccttggatggggggatggctgctgccgtgaaccccgcgatggagagctgggagctgctgcttctgcaggcagcgaagatagcaagcagaggatgcgcaaacgtgcgctgcagcggttgcacatcgcattcggagttgctgacgaggaggattattcccctggtattgatcaggtcacagatactgagatgttcttcctggcatctatgtactttgcgtttccccgtcacgctggtggccctggccaagcatttgcagcaggcatccccatctgggttcccaatagtgagcgcaaggttgtaccagccaactactgttaccgtgggttccttgcaaatgcggcaggatttaggactattgttttggtgccatttgagagtggcgtccttgaactgggctcaacgcagcacatagctgagagttctggtactgtccagacagtaaggtctgtatttgcaggaacaagtggtaataagtctgcagtgcagagacacgaggctgaaaggtcacccggtttggcgaagatctttgggaaggatttgaaccttggccggccttcagtcgggctggcggtcggtgtatctaattctaaggtggatgagaggacatgggagcagaggagtgctgttggtgggacctcattgctaccgagtgtccagaaaggtttgcagaatttcagttggagtcaggctcgtgggctgaattcccatcagcagaagtttggcaacggtgtgttgattgtgagcaataatgagggtgcacaccgcaacaacggagcagtggacagccctagcgcagcgcagtttcagcttcaaaaggcgcctcagcttcagaaactgtcggttgttcagaaaacgcctcagctagtgaaccagcagccaatgcaggcacaggtacctaggcaaattgacttcagcgccgggagcagttccaagcctggtgtgttggttacaagggcaggtgtcctggatggtgagagtgcagaggtggatggcttgtgcaaagaggaagggccaccacctgttatggaggaccgacggccaaggaagaggggaagaaaaccagcaaatgggagggaagaaccacttaaccacgtcgaggcggagcgccagaggagggagaagctcaaccagcggttctatgcgcttagagctgttgtgccaaacatatcgaaaatggacaaggcgtccctgctgggcgatgcgataacgtacatcactgacctccagaagaagctcaaagagatggagacggagagggaaaggctgttggagtcgggtatggtggacccaagggagcgggcgcctaggccagaggtggacatccaggtggtgcaggacgaggttcttgttcgtgtgatgtctccaatggagaaccatccagtcaagaaggtcttccaagcgttcgaagaggcagaggtccgtgtaggcgagtcaaaggtgacgagcaataacaacgggacggcggtgcattctttcatcatcaagtgtcctggcactgagcagcaaacgagggagaaggtgatagcggcaatgtctcgcgcgatgagcagttgagcatagcagctgtaggatcagactggcacggtagaaggtggccggtttatccaggttgcgaacaagaggcggcggcggcggctgaagcagcccgtcgattgttgataggagagttgtaggtggagagaagcaagataagattcttctgacttaagcaatgcagcagcaaccaaaaaaaaagaattggggctctagttaagcagccattctacggtaggtttcttttggttgtggtccgaccccgaccgtttagttctgatgtttttgctttggaaggatggataccgtgttcgttgtgtaagcctgatgatgcagcagaaccataaacagcaatacatgtttttcttattcttcttcttcttctcatgcgtgatttggaaattaaattcattgcagattgtcttttacatttcctttttatggcgatgatagtttagtatgttaaa

SEQ ID NO: 149126 - DNA, 2394 bp, Zea Mays
gcagcaccagcagcggcacggccccgaggtcgggtcgtctccccacacccgaaatcccctcgcgcaccacacaaaatcctccagccacctccccaccccaccgccggcgctctgctcgccggaccttcgcacgcggccggagacacagaaagaaagagagatccgggccccgccggctccgatatccgcccctcccctgcccgccgccgctggattccgcgccctcctcctcgatcctaccgcagggccctcactctggtatcatggtcatgaagatggagcacgaggacaatggtgccatcggaggaactgatggcacgtggacagaggacgaccgagctctcggcgctgctgtgcttggagcagatgcctttgcatatctaacaaaaggaggtggtgccatatccgagggccttgttgccacatctttgccgggtgacttgcagaacaaactccaggagcttgttgaatccgagagccccggtaccagttggaactatgctatcttctggcagctctcacgcacaaagtctggtgatctcgtccttggatggggggatggctgctgccgtgaaccccgcgatggagagctgggagctgctgcttctgcaggcagcgaagatagcaagcagaggattattcccctggtattgatcaggtcacagatactgagatgttcttcctggcatctatgtactttgcgtttccccgtcacgctggtggccctggccaagcatttgcagcaggcatccccatctgggttcccaatagtgagcgcaaggttgtaccagccaactactgttaccgtgggttccttgcaaatgcggcaggatttaggactattgttttggtgccatttgagagtggcgtccttgaactgggctcaacgcagcacatagctgagagttctggtactgtccagacagtaaggtctgtatttgcaggaacaagtggtaataagtctgcagtgcagagacacgaggctgaaaggtcacccggtttggcgaagatctttgggaaggatttgaaccttggccggccttcagtcgggctggcggtcggtgtatctaattctaaggtggatgagaggacatgggagcagaggagtgctgttggtgggacctcattgctaccgagtgtccagaaaggtttgcagaatttcagttggagtcaggctcgtgggctgaattcccatcagcagaagtttggcaacggtgtgttgattgtgagcaataatgagggtgcacaccgcaacaacggagcagtggacagccctagcgcagcgcagtttcagcttcaaaaggcgcctcagcttcagaaactgtcggttgttcagaaaacgcctcagctagtgaaccagcagccaatgcaggcacaggtacctaggcaaattgacttcagcgccgggagcagttccaagcctggtgtgttggttacaagggcaggtgtcctggatggtgagagtgcagaggtggatggcttgtgcaaagaggaagggccaccacctgttatggaggaccgacggccaaggaagaggggaagaaaaccagcaaatgggagggaagaaccacttaaccacgtcgaggcggagcgccagaggagggagaagctcaaccagcggttctatgcgcttagagctgttgtgccaaacatatcgaaaatggacaaggcgtccctgctgggcgatgcgataacgtacatcactgacctccagaagaagctcaaagagatggagacggagagggaaaggctgttggagtcgggtatggtggacccaagggagcgggcgcctaggccagaggtggacatccaggtggtgcaggacgaggttcttgttcgtgtgatgtctccaatggagaaccatccagtcaagaaggtcttccaagcgttcgaagaggcagaggtccgtgtaggcgagtcaaaggtgacgagcaataacaacgggacggcggtgcattctttcatcatcaagtgtcctggcactgagcagcaaacgagggagaaggtgatagcggcaatgtctcgcgcgatgagcagttgagcatagcagctgtaggatcagactggcacggtagaaggtggccggtttatccaggttgcgaacaagaggcggcggcggcggctgaagcagcccgtcgattgttgataggagagttgtaggtggagagaagcaagataagattcttctgacttaagcaatgcagcagcaaccaaaaaaaaagaattggggctctagttaagcagccattctacggtaggtttcttttggttgtggtccgaccccgaccgtttagttctgatgtttttgctttggaaggatggataccgtgttcgttgtgtaagcctgatgatgcagcagaaccataaacagcaatacatgtttttcttattctt

SEQ ID NO: 149127 - DNA, 877 bp, Zea Mays
atggccgggagatccgcacccaccttgcctccgctcaacaaccacacacccactccgcatcccaatccactagctccggcctcgccccctcacccgcgtgttcccctcacccgcctcgttcgcccctaccacaccatcaacgtgcctcccctcctcccttgtcctccccatgcccgccactcccttgtcctccagcacataatggagggagcagcagctgtggagacggcggcagcggccaacggaaaggcgtgctgccacgccgccaaggggcccgggtacgccacgccgctggaggccatggagaagggccccagggagaagctcgtctacgtcacctgcgtctacaacggcaccggaattaacaaaccggattaccttgcgacggtggatttggatcccagctctcctacatactcccaggtgatccacaggctcccggtcatccacatcggcgacgagctgcatcactcgggctggaactcctgcagctcctgccacggcgacccatcggccaagcgccgcttcctgatcctgccttcgttgctgtcagaccgtgtgtatgtcgtcgacacagcgacagatccaagggcgccatccttgcataaggtggttgagtccgaggacattgctgagaatactgggcttgggttccctcacacgtctcattgccttgcttctggcgacattatgatttcttgccttggggacaaggaggggaatgcagctggcaatggcttcctgctgttggattcagagtttaatgtcaaaggacggtaagttcttaccgtttaggcccatcggtgttgaagtgtaacatgttactatgcccaattgcagagcatagcctgttactgttgaatcacatcatgctgtt

SEQ ID NO: 149128 - DNA, 1289 bp, Zea Mays
tcttgcctctgctgcagcaggcaaactgagggtcttctccatcagagcagctcacagtggcctgagcgatgcatctgtagagtcttcttccccttcctgataatgaagccccagtcaccggtgctgcttacagcttcacaggagcaacggcatcactcaccaataggatcctaacatcttccaagaagattactcttgtcaggcatggcctaagctcatggaatgcagaaagcaatgtccagggaagttcaaatctgtctgttaacggaaaccggcgccaagcaggcagagacttaactccaagcctactgtatatctaaatgctgagcttataaggaagtgacacttgtatatgtgcaggcaaccgctgaaattatatggaaaaataaggatgaagcccttgtttttctcgattcattgaaagaggcacatctcttcttcttagagggcatgaccaatgcggatgctaagaagcaatatccggagctgtacaccaaatggagggaggaccctgcaaattttcatgtcaatggcatatacccgattaggaagttgtgggggatgatagcgagacaaacctgcgagcaaatcttgctcactccgggagagaacttcttggtggttacacacaaatccattttgcgcgcgctcatctgcacagcgctgggtatacctcctgagaggtttcgtgccattgatgtaaacaacggtggcatgtgtgtcttcagtcttcacggtgaacaagcaaggagaagctatgcttcaagccctcaacatgacagcacacatgtatagtgatcacacctatcagtactagttttgcccctctcttggcatgacattacattacctatcttgtatattattacactcccattagagaggacaagtcattactgaaatggctttggtaaatattaatgtgaccgtagtgtgcatagcaacaggttacagttagtcagttacacagattgcccctgtcggatgtgattgtccaagtgaatgcaaactgaatcatgtgaagccgtttgatctttgagagactgttcatctccatctataatgtgcttgctcaaattaaatacttactgaaaggtgcttctgacttcgagagggagggatgtctccattccccccccaagaaggcacagttcagttcagatgctattagccgaagcaggtggtataccattgctaaggctgtttccatctttggtatactttttttttctcgaaagcgcaggagaactgcgcgatattatattaaagaagaaggacaattacagaag

SEQ ID NO: 149129 - DNA, 1976 bp, Zea Mays
atacaccctggccacgccgctgtggccggccgcgcgcacccgtctcgacgtctcgtcgcctccgcggctgctgcaccacagccacagcccacaggtgcctgcccatctccatctcttttaacttcccctccctcgccctcctcgactccgcggacacacgtcattagatgtttggtgtcgcgggctacgtggacctgctgtcgcgatgcggcgaagcgcgggcgattgtgcggatccaggcggcgctgcttacgtccgggcagctcccgcggagtgtggagctccacgacgcgctcatccgggccctctcccgctccgcgcgcccgcacctcgcgcttccgctctacgcccacctcctccgcgccggcctccttcccaccccgcacacccttccttccctcctcaagtccatggcgctgtccccggcagtaccgggcgccgcggtgctggcacttaccgtgcacacccacgccgtcaagctcggtctggaccggttcgtcctcgtcagcaacgcgcttatccgcgtgcacgcgggcttcctcggcagcctcgccgacgggcttctcctcctgcggacggccgctgcagtggatgcctcgacgttcaacaccctcatcaccgcctacgcgagggcgggccggctcgctgacgcccgggcactgtttgacgaaatgcctgcgaggaatgctgtgtcttggagcgccatggtgaatgggtatgttcaggccggtgatgggagggaagcactgaggatattcgcgcggatgcaggctgaggatgtccgcccggatgacacagtgctcgtgggggtgctcgcagcttgtgcacagcacggggcactggagcaggggaagtgggtgcatggttacctcaaggctcatggcattaagatcaacctgttttttggcactgctttggttgatatgtattccaagtgtggtgaggtgcagctcgcaatggacgtttttgaaagaatgcagtacaagaatgtgctggcttggactactatgataaaaggactggcaatgcacggacgaggttcggaggctgtaatgctcttcgctcagatggagagctcaggtatcagaccggatgacattgccttcattggtgtgttgtgtgcgtgcacacatgcagggttggttgacaagggccgagagcttttcgattcgatggtgagaaagtatggcattaaaccaaagattgagcactacggatgcatggtagacctcctggcacgaaatggctttctttatgaggccaaagagatgattcagaaaatgcccatggaacccgatgccttgatctggggagctctgatggctggttgtagatttcacaagaatgtggaattcgccgagtatgttgccaagcattggatcttgttggaacctgacaaaagtggcgcttatgtacttctatctaacatttatgctgcatcaggtaggcatgcttctgctagggaaatcaggcacctaatgcgtgaaaagggagttgacaagacacctggttgtagcactgtggaggttaatggagttattcatcaattcattgttggagatctctctcatcctcgcataaaagatattttgtcaaaatggtatgagattgatactagaattagattggaggagggttacatcccagacatgaaggaagttttgcttgacatcgaagaagaagagaaggagggtgctcttagtcggcatagtgagaagctggcaattgcatttgctttgattagtataagtgacaatatgcctattcggatattcaagaaccttagagtttgccatgattgccatcatgttaccaaactaatatccaaagtatatgggagagaaattgttgttagagatagaacacgcttccatttgttcaaagaaggcacctgttcttgcaaggactattggtagcagttaacacctttatgctcaaatctctactgtataaagcaccagtttccatggttccac

SEQ ID NO: 149130 - DNA, 1101 bp, Zea Mays
atggagtcgtcgttctcgtcgtccttgggtaataacagcagcaggatactggtcattggtggtacggggatgatggggcagcacctcgtcaaggccagcctcgccgccggccaccccacggccgtgctcgtccgcccagccagcagcagcaagctagagcttctcgagaccatcaaggccagcggagcaaccgttattggaggtgacatctacgaccacgagagcttggtggcggcgttccaccaggttgacgtggtcatctccgccgtcggccaccacggaccgcatgacctagaagacggccagctcaggattgtggcagccatcaaggaagcaggcggcagcgtcaagcggttcgtgccgtccgagtacgggtgcgacgtggagcaggccgcgcgatcagcggcggtgctggagccggcgcggagcatcgtgctggccaaggtccgggtccgccaggccatcagagccgccgggatcccgcacaccttcgtctgcagttactgggcgcacggcttcgtgctgccgcgcctcggtgacccccacgccgacgggcttccggccaccagggccaccgtcttcggggacgacgccacgcgcgccatcttcgtgcacgaggcggacatggccgcggtcacggtgagggccgtggacgacccgcgggcgctcgacaagaccctctacctgcggccgccggccaacacctgctcgctcgcccacctggtgcgcctctgggaggacaagacggggagggcgctggacaagtactacatgcccgacgaggagctcgtcaacaggatcagggactcgccgctgccgctcaacttccagctggccatggtgcacgccaccgtcgtcgccggcgtctgcgaccagaccgtcgacgccgaggccggcggcgtcgaggccacggagctctacccggacgtcaactacgtcaccgtccacgactaccttgacggtctcaaggagagcctcacgcgcaacgtcaattcatgaccgcagctcgaacgattatatatacgtactactgtattatctatttgtgtcgtcttacgttgctatacgtgcgtgaataaaattccctacggctacagccgg

SEQ ID NO: 149131 - DNA, 115 bp, Zea Mays
taccgtcaagcatcccgcctagttccctgctcgcgccgaccaccgtcggtcgatcttctactctccaccgtaaagttcgtcgtcgccgaaatcgcctgcgtccggaactcccgcg

SEQ ID NO: 149132 - DNA, 955 bp, Zea Mays
cacccacttccgctctgctcacgtgccgtgcccgtgtgcatcggggaaaaaacagcagcaggggccgaatcggagctccgccgccggcagatctgcgccggccggtctgctccgcccagcggacatggaccgcgacggccgcccggggtggctaccgtcgctgggcttcgccttcctcagcttcaactgcgggatggccgtctaccgctcctgggacgacccctacgccgtcgccttcgtcctcgccgcgtacgccgccctcgtcctcctcttccgctgcctccaccttctggagcgccgccgggaccagcgcctcaagctcgccgtctggggcctctccacgctcctcacactcatgttctcgtacaagatcgccgccgtgatgccgccctgggcccagctgctcgtctggggcatggggatcctcaccgtcgttgcgggattctacgccttcttcgtcgcccgcccggaggagccctgacccttcgttcgtctccatgccgcccccccccccccccccccccccgacatcaacatggatacctgatgagcatcactcaccgcatcggtctcagttatcttgtgtagtacgtatgtctttttgcagcatgccgaagaagttgacgaacgtaccgagaggcgcgtagcaagactcatcactcttttgaatgcaagagttggtagtagaataaagtaggggttccgtgtgtgtgtgcgtgtgggagagagatcgtgaaaaacggtttgcatctagcggtgacctctttacattggtttttccagtgcctgttgcggttagctatgtgttactaattggaatggatgcaagtaagtgaggatagagtcgttctaaacccactctccaaatcacccatgcatcatcatttgaacaaggtgctccataaaaaattgtttggggccttaatacatgttttagtttcttagatttcgcatt

SEQ ID NO: 149133 - DNA, 1790 bp, Zea Mays
cctccaccagaccaccacccacaaacccttcttattgataccatccacagtcccagcccgcgccagcctctgcctctgccccccagactaccccctgcctgcaggctcctgcaactgcaatgtcggcgctcgggacgctctccggcggggccgccggtgtctccggcctcatccgcctccgccgtcgggtggcccccgcgctcgcggcgccgtcgcaccacgccgctgggacgttgaactgcgccgccttgcccgatgccgccccgctcgtctggggacgccagctccgcccgtcgctcctcctccccgccacactgctcccgtcgtcgtcgcagggcgccaggaggcacacgccacggcggcccgccgcagccgcaggggaggccaagtctgtgggtttcctggagaagtacccggccctggtcactggcttcttcttcttcatgtggtacttcctcaacgtcatattcaacatcctcaacaagaagatctacaactacttcccctatccatactttgtgtccttgatccatctagtagtgggtgtcgtatactgcctcatcagctggagtgtcggtctccccaagcgagcgcctatcaatggcacgctcctgaagcttctctttccagtcgccctgtgccatggtattggtcacatcactagcaatgtgtccttcgctgctgttgcagtctcatttgcccacactatcaaagctctggagcccttcttcagcgcagctgctactcagtttatccttggacagcaagttcccttctctctgtggctttctcttgcccctgttgtcatcggtgtttcaatggcatcccttactgagctctcattcaactggactggcttcatcaatgccatgatatcaaacatctcattcacctacaggagcatttattccaagaaagccatggtctgttgtttacgatttgctctcttgtcttaaccatccttctaatcgtttctggcattgcagactgacatggatagcaccaacgtgtatgcttacatttcaataattgctctcattgtttgcattccgcctgcagtgatctttgaagggccccggctaatgcagcatggattcagtgatgccattgcaaaagtaggcttgacaaagtttgttagtgacctattcttggttggactgttctaccatctgtacaaccagattgctacgaacaccttggagcgagtggctcctctgacacatgctgtgggcaatgtgttgaagcgtgtgtttgtcattggcttctcaatcgttgtttttggcaacaaaattagcacacaaactggaattggcacgtccattgccatagctggtgttgctatgtactcttacattaaggctaagattgaagaggagaaaaggaaaaagagcgcatgatgagctgactgctgtgaatattttaccttctgcgtctgggacacaacaacaacatcgtcgacaatcaagattatgccttgttttgtagtattcgtcttgagtcgctttgtttattaccaatctattatctggtgttgaacagcagcacattgcagaacagatgatcgtcgagtgaccttcatatacgcctgtaactctctctctctccctctctctcagctcagcagtttagatcgactatactcattggacatggacctatctatatatcttctttgtaaacaggacagagtcggactcctgctgcagtattatcaactcatctattttaaactctttaagttggatttattttcaattttttttgtgcttcaataaattactagattttat

SEQ ID NO: 149134 - DNA, 1804 bp, Zea Mays
accccgcgcggcgttgcgtgtgctctatctatccgccccgcgcgcttctccgccaaccaactccccggcgcctccctcctccaccagaccaccacccacaaacccttcttattgataccatccacagtcccagcccgcgccagcctctgcctctgccccccagactaccccctgcctgcaggctcctgcaactgcaatgtcggcgctcgggacgctctccggcggggccgccggtgtctccggcctcatccgcctccgccgtcgggtggcccccgcgctcgcggcgccgtcgcaccacgccgctgggacgttgaactgcgccgccttgcccgatgccgccccgctcgtctggggacgccagctccgcccgtcgctcctcctccccgccacactgctcccgtcgtcgtcgcagggcgccaggaggcacacgccacggcggcccgccgcagccgcaggggaggccaagtctgtgggtttcctggagaagtacccggccctggtcactggcttcttcttcttcatgtggtacttcctcaacgtcatattcaacatcctcaacaagaagatctacaactacttcccctatccatactttgtgtccttgatccatctagtagtgggtgtcgtatactgcctcatcagctggagtgtcggtctccccaagcgagcgcctatcaatggcacgctcctgaagcttctctttccagtcgccctgtgccatggtattggtcacatcactagcaatgtgtccttcgctgctgttgcagtctcatttgcccacactatcaaagctctggagcccttcttcagcgcagctgctactcagtttatccttggacagcaagttcccttctctctgtggctttctcttgcccctgttgtcatcggtgtttcaatggcatcccttactgagctctcattcaactggactggcttcatcaatgccatgatatcaaacatctcattcacctacaggagcatttattccaagaaagccatgactgacatggatagcaccaacgtgtatgcttacatttcaataattgctctcattgtttgcattccgcctgcagtgatctttgaagggccccggctaatgcagcatggattcagtgatgccattgcaaaagtaggcttgacaaagtttgttagtgacctattcttggttggactgttctaccatctgtacaaccagattgctacgaacaccttggagcgagtggctcctctgacacatgctgtgggcaatgtgttgaagcgtgtgtttgtcattggcttctcaatcgttgtttttggcaacaaaattagcacacaaactggaattggcacgtccattgccatagctggtgttgctatgtactcttacattaaggctaagattgaagaggagaaaaggaaaaagagcgcatgatgagctgactgctgtgaatattttaccttctgcgtctgggacacaacaacaacatcgtcgacaatcaagattatgccttgttttgtagtattcgtcttgagtcgctttgtttattaccaatctattatctggtgttgaacagcagcacattgcagaacagatgatcgtcgagtgaccttcatatacgcctgtaactctctctctctccctctctctcagctcagcagtttagatcgactatactcattggacatggacctatctatatatcttctttgtaaacaggacagagtcggactcctgctgcagtattatcaactcatctattttaaactctttaagttggatttattttcaattttttttgtgcttcaataaattactagattttat

SEQ ID NO: 149135 - DNA, 198 bp, Zea Mays
atgggtcagtatggcaaagagaagtcagttccatctgctgacctcttcctggacccctgtgctaccatgaaacaagaaccagatgatgcacgaaaggtactacaaggcactaatttatctgaaattcggtatggagaggcgagctcgcaacaaacagcagacaagaagactcttgagttcattgagcattttatttag

SEQ ID NO: 149136 - DNA, 420 bp, Zea Mays
tcgatcgccatgagaagagccaccgtctttctcatggcgctcgccctcgccctcgccctcatcctcatcccgccgcccacggtggcgacgccgccgccgggtcgtcttcccctcaggagaagtcgcttccttgccagcagcagcgtcgacttcccgtcgtcgttctacgactgcagcaagaagccgccgtccatctgcctctcgcccgggagccccggcgcgacgtgctgccagggcgcatgcgtcgacaccaaccacagcttccagcactgcggcaactgcaacaagatgtgcaagttcgcgcagacctgctgcgaggggaagtgcgccaacaccttcaccgataagaggaactgcggcgggtgcggcgtcaagtgcagaaccaagtgcaccaacggctactgcgactacgcggcctag

SEQ ID NO: 149137 - DNA, 324 bp, Zea Mays
atggccagtggggcccacgcctggggccacgcgagggacacagggcaggcttcacacgcgcgctcctgcgctgggctgggcatggtcgcggtgcaaggatgtcgtaccgggctggggcaggggccggctggccagaggccggtggcgtgggcatgcctgccctcggtggctgggggtgcggcacagggcttaaggggcgcgcggctcgctgctacagcagcagggctggccggtggtggcgcacagccgtggggacaagggaaggcgtgtggggaagcagatggcgcccgcggtcgccgtggaggtgaggatgaggggctttag

SEQ ID NO: 149138 - DNA, 332 bp, Zea Mays
ctcatgcgacttttggccaaagaggtcacattaagcatgctgctatcaatgctcctgtacagggcactgcagctgatgttgctatgtgtgcaatgcttgagatagacagaaatactcgtcttaaggagcttggttgggcgctactcatgtgggtagtttatgcataaagttatgcctgttcgctgcttaaatgttgccatattttgtttttctctttgaaactgtgaagggcacaactttttaacgacttctgtaacttgtgtatctaacatctgtattcggtattctgagttaaaatgggcacatttaattatattttacataatttgttt

SEQ ID NO: 149139 - DNA, 1050 bp, Zea Mays
atgcccccatcggaccccgtcgcgccgtgcgtggcggcgccggtgatggacgcggcgttgctagccgtcatcgtcccgcctcgacgttcgatccgtgctcaccacggttggtgctcgcacgcaatgtggcgtggcgaggttactgcgggcgtcgcggaggtggagggggaaggggaggacgagggcacgggcaagagagcgcatcgcggtggacggtctcgagggaccttgggtgatccgggtgcttggtttcttggttctgcggctttcgctgctgttggatttgccgagtcggagccaccggagatgaccgtcgacgagctgaagctgcaggcaagggccagcggcggccacggcctaaggaccagttccccgtcggcatgcgcgtgctcgccgtcgacgacgacccgacctgcctcaagtgacaacaatgggacaggcagccacggccctgagctgctgagggagaagaaggaccagtttgaccttgtgatcagcaacgtccacatgccggacatggacggcttcaagctcctcgagcttgtgggcctcgagatggaccttccggggattacctctgcacaaaaccccattccaattgatatggttttgttactcgattatgctttggtcccagcccgccatcagtcagatttacctctgaaatgtggcatccaaatgttatgttttctgacatcatgcataatatttgaggaaatgccagtctatcctgatgggcgggtttgcatctctattcttcatccacccagtgaagatccaaacggttatgagctcgcaaagagaaaattaccttgtagtctcattgtttcagtttatggtccaatttacaatggcttcactgtaaatgggaaaacaactcgggattattatattgtttttggtttggatttggaatggtttggggtccacaacgatgatgcgtcagagctgttccaagggttggatgatttccattcccctgctgtcaatttgactaggctcgccgtctccgctctgcccaactggcaccaagcagccaatggaacttga

SEQ ID NO: 149140 - DNA, 261 bp, Zea Mays
atggacatggatatagatatgaatttctacccgcagcccccaggatctgttaccgctgatgctgcacaccctctaagatctgataccgatgctgcaactatgtcggctggtatggcattggctgtgccaccgctacaccaccgggcacaaggtagtaagggggtcgcatcgtgccatcgtggactgcgccaccatggccgcatgctgatcccagctggtggcaccctacccaagaactgcagcagtgaacggaagcactga

SEQ ID NO: 149141 - DNA, 787 bp, Zea Mays
gagtcctctccctgctcgccatggccctggtcctcgcatcgctgtgtgtagcggaagcatggtgagttttggtcgcgggcatggtcgtgcgacttgggatctgggcacgctgttgtggactccccatcgatgcccctcctgtcctaactcgaccatcctagcctgcgcatgtcgtcgaatcgtcggattccatcccccatggcgcttccatttcctcgccattccacgtcaccagcttcgttccaattcactggccatctttctctccacgtcatagttctattaagggaaacgatgttgcttgagtattggtcaggatgtgtgtagagatgagcttgaagatgggactgtggatagggaagatagtgaagttccgtatgtcactcatcagatgttcgacgaaaaccccaaaccaaaaatcatcggtgttcttgcaaatttgagccgagtatagttcgggagaagtctatggatgtcaattggtgaagaagtgaggcccatgtgcatcgcttatcaagtgctcggtcgaagacttcaatcgaaggtcgtcatcgttcgtgtgatgatcgagtcaaattgcaatatggtatgctgctctgttgcgttgttcctaaataaattggaagcgagtagcgttagcgagccaatttcagtcgaaatatgagaaaccccatgataaagtcaataattttatctggtagttattgtattctatgtttagtaatagactcagtgtcatggatgaatgttgattgctactagaataatttaaatgaatagcattgac

SEQ ID NO: 149142 - DNA, 650 bp, Zea Mays
atgccttgtccttggatgatttctagttacagtgcggaccgtggagggaatatttgccggagtcctgctgctgaagctgtgtttcggaccctcgtaagcaagcgtgggcttgactccaagtttctcatagactctgctggtaccatcgggtatcatgagggtaataaggcagactcaaggatgagagcagcttcaaagaagcgggggattgaggtcacatcaatatccaggcctatcaaaccctcggattttcatgattttgatcttatccttgcaatggacaggcagaactatggttgtctctcaggctctattatttgtgtttcagtacctctctaaatttgttgttatatgctgcttgatgcattggagcatttctgttttgaacaatatgcagaagatatattgaactcttttgagagatggagacgcaaagagcccctccctgatagtgcacccaataaggttaagctgatgtgctcctactgcaaacatcatactgagtctgaagttccagatccttattatggaggccctcagggatttgaaaaggttatgcagcctcgggagatcagaagcaatcatccctgcatttgcacagggatgaagcctgaggaccgaaaagacctgcaccacagcaaacagaaaag

SEQ ID NO: 149143 - DNA, 2013 bp, Zea Mays
ggaggaataacagctacatctgttcttgtccatgtttctgtagcatcagtagcgcagcgtggttgtacgtttgctgtgttgttgtatcactctttgtctctgcaagtgctaaaccagtcactttatggacggtggttcctgtggtctcgagggagcgtcggtagtgacatctactaccagcgctggtattcagcttctgccagagaagcactgcaccgatgaagcttgtggagccatggcgggcagtaatggtcctgaaggagtgccagtagtgacttctgctgatgaccctccgacccatgccgatattccatttctctgcaattcagttgatgaaacctgtgaagccacaggggacggcagtgctcccttggatgctcagatatgtacgggtttctctaagttgatcagcttggaggtgaagaaaggcctccagaagtgcgcgacgttcccaccctcgtctagtcagcctcagcaggaggattgttcatgctcccatgtaggtgatggcctcacgggtgctcctactttctggcgatctgtgtccttacctgtgataaatacatgtgtgagctaaatctattgatctgcttgtttatgtaacggtacttcaaaactgtatcaccggttatgtcttggcatgcttctttacggatctgttatccatgcatggcagacaatagttggcattttagcagcacaacaatatttctaactattaagtgttaattatctaatgttatttctaactattaagtgttaattatctaatgtatttaatgaagtaacacagttagacttgcctaaagaggccagtgaagcttcactggctgcatagagaagtacttttttattatcatgtaaatgcatggttctttggaaccatttggcctatctgattaattattactataaccgggaacgggagcccgaggctataacccggactcctcgccctcgtaccttgttgctggcgaagagcgtcatcaatggcgagtggaggttcactacacagcccgccggatcttggagcatcattcgcggtcttggcgcgtctacacaactgtatcctaagggcgtcgaagaggagagacggtacgccggtggcgacaaggtacggtagatttgaactggagtgtggaggtatcgtcggccagtgccatcagcgatgggtggaggtttccgtcgagtcgaggaagaaggagcgcttcgtgtaaagggatcgacgatagcgagcacaacttctacacgctgaagtgggcgcactacagcacttcttcccgccgaccaagctgcaacactactgccttgttgtcgtcaccgccaagccctctgtcgcctccattgttcgccctgccagcccaggaaatcataagtggagattgaagttgatcaacttgacactcgaataaaagaatcaacaagtattgcaagtgctgaaagttgtgactactcaagtccaattgctttatcgcacaagttctggtggagatacttattctggaatcttcaaaagcatcaacgttagtgttcaagggactttttctggactttcaacttaatgcttctctacctgttgtcataccgaagctactgctcctggaagagcatcaccaacatatccctgatggccctctctgcttcatgctccaagcacttggatgttcaccttgaaatataattattaatagggactgtccaaatacttcagctaagcaaaatagcgacctccataaaaaagcaacctgtaactatctctgaaaattttgaaaaaactgatggtaactgataagctgctgctagcaactaccgtcgcctatttgttttgtttcagaaagttaaggtgcatgaacctctgatatagcatttgacacactgtactttacacagcacccaggaggaactcttgtgtgggtgtgggcagggctagaaggaagaaccatgcatgctactacattcatataatctttttcagaggtttaagatatcaacactaatctaactttgattgtc

SEQ ID NO: 149144 - DNA, 186 bp, Zea Mays
atggggctgcgaaggcgaggccgcatccatcagggctacacgggacgacgcgcgggcaaaagggagcttccagaggaggccaaatttgtcgcagcggcggagggcatgcagcgggacatcgagggcccagagggaggatgggggtacgacatttgggcggcgtggaggccgcgcacagcgaagtag

SEQ ID NO: 149145 - DNA, 484 bp, Zea Mays
gtaagaaatgaacctgggcagaaataactcatgtagttattcctaacataaatgaacctggctatgcagttcgtatatgtgctcagtagcagcaaagtagttaagagatggcaaggtcaagacttggcccatcttgtccagctccaagagcagaggagcctaaaaaatcttcatgcttccatcaggctcctgtaattccagatccctgaaaaacaagatagacagctactaaacttcagatagctataagaaaacaatatgtccacacagatgtaactctagctcagatagttgtattttacagaaatatggccaaggcgagacgatatgtccaaataaaagaaatcaatctgactcacaagtgaacgtgaccctccagcagctacctagaattagacaataaaaaagcaagccaaaagctaagcggtaagctacgcctagattaagctgtacgccgagaagtgcatgcagtacctcctggacg

SEQ ID NO: 149146 - DNA, 404 bp, Zea Mays
tgtgcagtgagctctatttcccagcgctctcgcttgctcgacgggatgccgcaacgcgaagcaaccatgggatcccatccgtgtcgcttgcgccgacccggaactgcggagtgcccagtcggtgcttgctatgtgctcaacaaaatgcgcagcaagccacgcgtcgtcgatttcctgcagcagccccggcatctccgcgcgctgccggctcgctgttttataaagcgcagtgaacagcacgccgtcaacactcgccgggtgtttgctgtttttgcgcaaccccattcgcgacgccgtcggaacccgtgctagctgtcaataccattcgtcgcgcacgcgtgttcgatacaagaccggtcgggtgaaccacgtgcttgcacaactcaaatccgatcccgttcagg

SEQ ID NO: 149147 - DNA, 103 bp, Zea Mays
gtgtgttcggcgttcgtacggcaatgtaatattcatttattttgctcacaacaatggagtttatatatattttgttactcgtaatctaggctcagtgagatcc

SEQ ID NO: 149148 - DNA, 404 bp, Zea Mays
tgtgcagcgagctctatttcccagcgctctcgcttgctcgacgggatgccgcaacgcgaagcaaccatgggatcccatccgtgtcgcttgcgccgacccggaactgcgcagtgcccagtcggtgcttgctatgtgctcaacaaaatgcgcagcaagccatgcgtcgtcgatttcctgcagcagccccggcatctccgcgcgttgtcgactcgctgttttataaagcgcagtgaacagcacgccgtcgacactcgccgggtgtttgctgtttttgcgcaaccccattcgcgacgccgtcggaacccgtgctagctgtcaataccattcgtcgcgcacccgtgttcgatacaagaccggtcgggtgaaccacgtgcttgcacaactcaaatccgatcccattcagg

SEQ ID NO: 149149 - DNA, 1214 bp, Zea Mays
cccccctgcccatctcctcctctctcaattcttgcagccaccaaaccctagccgccccccccccctcaatcccctcctcccaaggtgccaatccttgccgctcggatcatcgtcacgtggtgcgagtcttcaatcgttttggtggagggaagaagggaggaaggaaagggggagaatccaaggtggtggactcccagatcgttcttagggatttgcccaaactttcggtgaaggcaagtaaaactgtgatggttattccgtctgtcagatgaggagtcttatacttgtttatgttgtgctattatgttcaaattcatattttgttttgagtaccatcatttgaaaatgttcatgtttcatggatttcatatgttgagtttgagatttgattatgttactcaagtggttattatgtggaatgggtggaagtaaatgcctagcacatttttatttgggaagaactcatgatgttgtcatgcataatgcactcatcatccattgcattgaagtttcgttgcgatcttatggtccgaccgtaccggtacattgagcatcatatgtttcccgagaaggggtatggtgcagcttcatatccttagagatatggaggcagaagtcattattgcatttgtagccatgtgcattcatgggagaggtgttgaatctattatgtggatgtggataatttggacttgtgcatggtgattctacttggcgttgagtttttagttacttgtttacttgctgcaatttactgttcaaaagaaaagaaagaagtcctgaacacttggttgtgtaagcatagttgatttacaatgtcctatttgttgttgttatgtttacttgctgagatgtgttatctcacatcttgcattgtttgatgcagggacctaatttctgctttgggaatagagggatgtagcagcacggccactacacctttaataaaggaaccaccatttaataatgttgttaatcagagttggacaagtctagtgaattgctttgttcttggttgagcgtttattttggggtgggctgagtttcttatcccatttgttttgcttcagttgggtcataattaagttttaccacttttgcatttcagtttctactatgtgaattatatgtctttatatcttgtatgagcttcatgtttcccctccttgttatgctagttttcaaaggaggtgctgccggatttttgctatata

SEQ ID NO: 149150 - DNA, 118 bp, Zea Mays
gaactgatttcaacttcgatattgtaatcagctttggtttacttagaagccagacaaaaatttatctggtaaggaatagattaaattaccaaggttcaagttttagcttgatattaac

SEQ ID NO: 149151 - DNA, 483 bp, Zea Mays
atggttggccgacgaactggagcagacgctggggcagggaccgagcagggagagctccggccgaacttggtagaggaaacagagaaccaggcgtggccacaggggagctccgacccgagccagggagaagacgagggctttgacaggaaggagcgggacgctggggaaaaaacaggggtgagctccataggaggagcgagcagccgagctggggactcaagccgacaggggagagcgcacgcaggaaggagggagaagacctggcagccagcgcgcatccacggcgagcaaaaggccaagcgtcggccatgggagacaggggaactcgcggcgaggaagaagaccacggcgctggggctgaatccaagcgcggcaagcagaggggagggggagggacgcgcaggggagagagccaaggattgctcgcacccagaggtcgacggacatggatccagagcaccacgcgaccactatggaagatga

SEQ ID NO: 149152 - DNA, 1293 bp, Zea Mays
attcatcagcttaccgtttcaacagctgacacgaatcacgagatcggtagcgattttctgatccaggccatttatcgagcgcttggggaatatcgcgttgctagcttcgtcttcacccgattcttgggatttcttgatgacgcacggaattacgacgagatcgagtctggagcgagccggcgagatgggagtatggtcgacgactggcgaccactacagactggagttggggtgaactgcgtgcagaggagcggatcggactcggcggccgagcagacccgacccagcagcgagagcaaacagagggggcgagctggagtatggacagagccgagctcggcgactgggtgagatccgggctaggggaaagctctggccatgggaattccgagcagaagcagaggcgagcaaaatggatggcgagctcgcgcgcgcaggaagcaggaaacaaccgcgcgaccaacagaggagccaggggcgcgcgagatccggaaatccagagtgctgggcgtgcgcaaggagacatgcaagcgcaggaaaattcacggcgcggcgatcagggagctcgaccgggcgagcagcagggagcaaggcgagctagagacggccgagctaggcgcgcgaccctgggcagttcggcgcagcgagctgagcaggaagatgaaaagcggctgcgtgcaggactgaatccgagctggagcaccgcgacgagcgcaggggcgcggcaaacggaaccgaacggagcagaattcaggcgcgcagggaaccgccatggacgggcgcagagatggccgagcgccataggagccgcgacgggccggagctggggccaggccatgacgcgagcaacagggaggctcaagccatgggaggagactcggctgggagcttggcgggcagaatccgagcagagcaccggccatgggaattgagcagggaggaagaggacatggacgaactgggaaccacacaacgtccagggatgtgagctggaaccacggctggcgtgcgtgcggagggaggcaagggggagcagggacgaccggccatggtgtcaccggcgagctcgacaactaaaaaaattaccagcgacttgattgtgctcatccactagctgagcatcgtaccaaagtattggctgaggagcacacaaccgcatggccgatgacatgcggtgaaggaatgcgtagagaattctagagcctgtgcgtgtgcaggaggagtctaagagattatgatggctgaggaagttgctagggaaccttgcgtcaccggaatgaggaggaagctgcg

SEQ ID NO: 149153 - DNA, 1307 bp, Zea Mays
attcatcagcttaccgtttcaacagctgacacgaatccgcgagatcggtagcgattttccgatccaggcaatttgtcctgcgcttggtgaatatcgcgttgatagcttcgtcttcactcgattcttgcgatttcttgatgacgcacggaacgacaacgagatccagtctggagcgagctggcgagatggaatccgagcagggtcaacgactagcgaccactacaaacgagagttggggcgaactgcgtgcagaggagcggatcaaactcggcggccgagcagacccgacccagcagcgagagcaaacagagggggcgagctagagtatggacagagccgagctcggcgactgggtgagatccgggctaggggaaagctctggccatgggaattctgagcagaagcagaggcgagcaaaatggatggaaagctcgcgcgcgcaggaagcaggaaacaaccgcgcgaccaacagaggagccaggggcgcgcgagatccggaaatccagggtgctgggcgtgtgcaaggagacatgcgcgcgcaggaaaattcacggcgtggcgatcagggagctcgaccgggcgagcagcagggagcaaggcgagctagagacggtcgagccaggcgcgcggccctgggcagttcggcgcagcgagctgagcaggaagatgaaaagcggctgcgcgcaggactgaatccgagctggagcaccgcgacgagcgcaggggcgcggcaaacggaaccgagcagaattcaggcgcgcagggaaccaccatggacgggcgcagagatggccgagcgccataggagccgcgacgggccggagctggggccaggccacgacgcgagcaacagggaggctcaagccatgggaggagactcggctgggagcttggcgggcagaatccgagcagagcaccggccatgggaattgagcagggaggaagaggacatggccgagctgcaaggacgaactgggaaccacacaacgtccagggatgtgagctggaaccacggctggcgtgcgtgcggagggaggcaagggggagcagggacgaccggccatggtgtcaccggcgagctcgacaactaaaaaaattaccagcgacttgattgtgctcatccactagctgagcatcgtaccaaagtattggctgaggagcacacaaccacatggccgacgacatgcggtgaaggaatgcgtagagaattctagagcctgtgcgtgtgcaggaggagtctaagagattatgatggctgaggaagttgctagggaaccttgcgtcaccggaatgaggaggaagctgcg

SEQ ID NO: 149154 - DNA, 568 bp, Zea Mays
aagcaactatacaaatgtcattgtgtatatatatacacctatacatggatagagtacgtatcatcgccaaaggctactgtgttcttctcacaaggttatcacatgtatttctttgttagtaattgttttaaaagtgagaaaagctaaggatagtacgtgatcatgtctatgccggacaagaccagttggcccgagttgattggctgggagattaatgatgcaattgaaaaaatagaagaacaacggtcagatgtaacattccttgagtcactagatgtgaatttgaacgagaccccgaggcctgcgaaccaactcgcacccggaactatacgtgttgtcatctacttcagcgtggacccaaacactagcgaggaaaccgttgaagaaactccatatattctctaggttgcctagcaaaggctacctttatacttttttatgccttgatatatgaaaggaaagcatcaattgaataatgcgagtgtgatgtctgatcttactttcatggttgatttcatacatttaagtgtctgtgttgaatctatatttagtagtgtcctactcaaca

SEQ ID NO: 149155 - DNA, 198 bp, Zea Mays
atggcgagctcgtccgcctgcagcttccgcggcgtggatacgacgaacgcggaggctgcgccggtgtcaccgaggacgagcgacgcggatgcgagcgcgacgatgagggagcccgcagccgacgacagcagccggccggcgggtaccaggttgcggagccgccgcgcccacagccatgtcggcgggtaccattcttga

SEQ ID NO: 149156 - DNA, 525 bp, Zea Mays
atggcgcgcccaagttcctccattgctcgcgccctgcttttctccattgctgcgcgggcgcgcccctggagcttcctcgccgcgcggcctgctcctctgccccagctcgtgttgctcccttccatagcagctgagctctctggctcggattccgctcggctgaccgcgcagctcctgcgcgtgcttcctctctgcttctctctccctctcggcgctctgctcccatgccgcgcgcccctgtcctatttccctgcgcgccgccgtgccctcagctcgccggctgcgacccctgctcagggtttcctggtgccgtgcttctgcgcgcgctcgctccagctcgaatttcctctgcccagccggattcctctacgccgaggccctattcgaccgcgcgtccttgggttccagctcgccgtcgaagctctcctgccgcgcacggctcccatgtttgccgaactcgtggtcacggtctcgccttgctgccgcagccgcgcctactgccgcgcacggcctgctccgttgtga

SEQ ID NO: 149157 - DNA, 389 bp, Zea Mays
tattttgttgttggtacattgatttttattttgattatttatttgctagtaatcccatttttgctaggttagtaggctagttgataaaattaaattttatgtttgtagtgatatgatggataaatttgagtgggatatgtttatagatattaaagatgaaaagatttttgcatcattttcaaggcttaagaacgcgaaagatagatttaccttccaacatcaactcatgaatggtatgcattgattattgtatttgtagaattccaattttattttggtatatatatttcttgaatgattaaattatgtcttgtttcttgtgtcatatttgaaagggaattaggcttacccctatttcctaattgattttggtggttgaattgcccaac

SEQ ID NO: 149158 - DNA, 739 bp, Zea Mays
acatttgcacgggctgaaactttaaggtagtgtttggttccggagtcggttgggatggagcagctccgtccgagagattttagggaggctgatagttcaacatttaaacacttgttagagtcactctatcctacatggaaccaatccaaacaataacaattgagagcggagcagctccgtcccaccatgcttcagtaccaaacactatctaagtaaatcctgatgtaccacatcttcattgcttgaacagagttgagaggagtaccagaggagtttgttgtgcaattgatccctcagcatgctaagaagcaatgtgctttcttaggagtttgagaaagcagttcaattttattccagaaaagaaaaaagagagaggatgcagcagttgagaggttacctgagtattgattacttacgttctgtttaaccgcacagtagcattagcctacagtattatcgactaggcaacgtgtgctgttatctttcacgacggcttttacatcgcaatgttctaccacggtggtgggatctttttcaccacattctgtaaagcagaagaagacgtaaatcgactggtcacccgttcttgtggtctgtatattggtctcccccaatcttgagaacacgttcttttgtttttggagatggattcatttcgtatctgtatcactatcaccaaatgaaacaagaactcatgtattcttgaactggattcagttacatgagagtcaaaccatgt

SEQ ID NO: 149159 - DNA, 1318 bp, Zea Mays
tttacctcaatttggtgcttgaatatgtgccagaaactgttcaccgtgttattaaacattacaataagatgaaccaacggatgccattgatttatgttaaactttatatgtatcagatttgtagagctttggcttaccttcacaactgcgtaggagtgtgccacagagatataaagccacaaaatattctggtgaacccacatacccatcagctgaagttgtgtgacttcggcagtgccaaagtcttggtacaaggggaaccaaatatttcatatatttgttctagatactacagagccccagagctcatatttggggctactgagtatacaacagctattgacgtgtggtctgctggttgtgtacttgctgagcttcttctaggtcagcctgtttttcctggggacagtggtgtcgatcagcttgttgaaattattaaggttctaggtactccaacacgggatgaaattaagcgcatgaatccaaactacaccgaatttaagtttccgcaaatcaaagctcacccatggcacaaagtaaaagctacatatttttcttttttttcctttggtttgatgatgaatgtcttcctatattattatatatatactgtgaaatataatgattcatatttttcaccagatcttccacaaaagaatgccatctgaagctgtagattttgtgtctcggcttctgcagtactcaccaaacctccggtgcacagcattggaggcgttaatccatccattctttgatgaactgcggtacccaaactcacgtctaccaaatggccgttcccttccccatctcttcaattttaaacctaatgagttgagaggagtaccagaggagtttgttgtgcaattgatccctcagcatgctaagaagcaatgtgctttcttaggagtttgagaaagcagttcaattttattccagaaaagaaaaaagagagaggatgcagcagttgagaggttacctgagtattgattacttacgttctgtttaaccgcacagtagcattagcctacagtattatcgactaggcaacgtgtgctgttatctttcacgacggcttttacatcgcaatgttctaccacggtggtgggatctttttcaccacattctgtaaagcagaagaagacgtaaatcgactggtcacccgttcttgtggtctgtatattggtctcccccaatcttgagaacacgttcttttgtttttggagatggattcatttcgtatctgtatcactatcaccaaatgaaacaagaactcatgtattcttgaactggattcagttacatgagagtcaaaccatgt

SEQ ID NO: 149160 - DNA, 2550 bp, Zea Mays
caaacatctacgtgcctccctccccacgaaacccccttccccaaactaccttcgccgctctccttgatccgcaattttctcccacatctctcttctgcccacttgcctccatcttggcctccccctccactccccacccccgaacatccggcgccgtccacacccttgcaccccgactcccctcgtccttcgtggccacgatgggggcgtccatggcatcgccttaggggcgatcgatctgggagaaagtgctggagcacgtggcgtcgtaccaccagcagcaacggaggcagaagctacgcaagagcctcacctacaccggcagtgagttctcgttcgctgtccggggtcgtggggacgaccccgcctccacgtccgttggggcacagaacgaggacatgcctcttgagcacgtctttaaaatcattagatccgatggcaaaagtgtgtgtttatggttcctgagtcagatgatctttcttcagttttaggtacttttatgctttaatatagctcatgcaatatgatttattttaacacatatttggaatagaactggattgtgcatattttgtaaagtgtatgttctacattttgtaattcgtattattcattttttcctttagtttttctctttctacaactcctatatctttacaatcaaatttcagatgtgatagatattagtatgaaagataaaactagaatgctatgtctgtcaaaggagctttcttcagtttcaggtactgctctgctttattagccatccagccgatggataatttctatacgtgtatcgccctgcactttcaaacacttatgttcattgtttccaatcacatattttttcttcttctcttagatttactatgtggttgtggtctcagtttggcttgtaggttaatttgtatactcatgtcattttagtttttctgtgtattttatgttgatttagtatgtcttaatttagttactttcaattcttgatgctaataatatggatagattgtgacactactttctggcttgagcagaaatgagtttgttgcatatagcagaatatagtttttgtagctggcaacaatgaccgctctttggatgatctaaaaactattctgtagtcaggtagttaaatatagctgaatatacattattatgttttattaatcttatttgttttttctgtcaaaagaacacacctctccatctttcggtgctaggtggatcaccgtctaaacaatccaccaccagaaccgccctaccccaagataggtatgtgcaggttcaactactcatttagatattggtacaacctgtaatagactttggtacaataggatttggttctgctattcactttgtttttagttccaaacaaccaaaaaattgcatgtcctttagaaaaaatatcacaggaatatcagtaatataacactgataataaaaatgcttcgattctatatatttttcatgttataaggttgaaaacattctgtctcacggatcaaaatgggtacaaggggacgtactgcatttacaaatatatttaaccataataaaacatctttggaaaatgaatatcatttaagtccaaaaatgtttttgttgaatgttcattaagctagagtgaagagtaaacttagcatttcttttctatatctctccctcgtgctcatgtagccgtagtctcctccatccaacatttcctacgcatgcagctccatctcagtcgttgtacccattcaatggcgagctggtggcagcgatgtaggagatgatccatgacgaggtgcacaagtacatgttagtggacgacacctgccaaagatacacaatttctactggtacacattttattttttcatggtgagaattaatttcttagcttgcgcaaaaccaaaggtttagtgatttgtcaaggcagaaatcagtataatgataggtgtgcttgagcttttgataattggtttatttgaacttttatctttttatgatcatgatatattgagacataaatatcttacatgtacctttgcagtttttcagttggagaaaacatttaagacaatattttctcgtttgttctccatatggggcttgttccacgccacttgaaggaagaagggaatggtggtgttaagttcggacaatacatctacacatcttggagcatcggcatcaatgttttcaatcttctcaaatttcaaattattctggtctcttcgtgcaaccataaaagtttattaagtcacttatctgagtggtctaaaagtctagcatatttttgttcctctgcctgtcgagacggatcaactgacatgaataatatccagtgaatactgcaagagctattcatgatctgccgtgaactagctagtatgatataactcagtttgtggagtgctaatgcacaaacaggaaataggatgatacttcatgtatatttttttatttcatgaaaatgaactataggatactgttcacaatccataccaagcttctgcagttatcaacatgttttctatgttcaaccttgttaacatattaaaa

SEQ ID NO: 149161 - DNA, 1928 bp, Zea Mays
gtgcctccctccccacgaaacccccttccccaaactaccttcgccgctctccttgatccgcaattttctcccacatctctcttctgcccacttgcctccatcttggcctccccctccactccccacccccgaacatccggcgccgtccacacccttgcaccccgactcccctcgtccttcgtggccacgatgggggcgtccatggcatcgccttaggggcgatcgatctgggagaaagtgctggagcacgtggcgtcgtaccaccagcagcaacggaggcagaagctacgcaagagcctcacctacaccggcagtgagttctcgttcgctgtccggggtcgtggggacgaccccgcctccacgtccgttggggcacagaacgaggacatgcctcttgagcacgtctttaaaatcattaggccaaagtttgtgcgaccgttgatgtgaatttcctctgggcccaactttgatccgatggcaaaagtgtgtgtttatggttcctgagtcagatgatctttcttcagttttaggtacttttatgctttaatatagctcatgcaatatgatttattttaacacatatttggaatagaactggattgtgcatattttgtaaagtgtatgttctacattttgtaattcgtattattcattttttcctttagtttttctctttctacaactcctatatctttacaatcaaatttcagatgtgatagatattagtatgaaagataaaactagaatgctatgtctgtcaaaggagctttcttcagtttcaggtactgctctgctttattagccatccagccgatggataatttctatacgtgtatcgccctgcactttcaaacacttatgttcattgtttccaatcacatattttttcttcttctcttagatttactatgtggttgtggtctcagtttggcttgtaggttaatttgtatactcatgtcattttagtttttctgtgtattttatgttgatttagtatgtcttaatttagttactttcaattcttgatgctaataatatggatagattgtgacactactttctggcttgagcagaaatgagtttgttgcatatagcagaatatagtttttgtagctggcaacaatgaccgctctttggatgatctaaaaactattctgtagtcaggtagttaaatatagctgaatatacattattatgttttattaatcttatttgttttttctgtcaaaagaacacacctctccatctttcggtgctaggtggatcaccgtctaaacaatccaccaccagaaccgccctaccccaagatagctccatctcagtcgttgtacccattcaatggcgagctggtggcagcgatgtaggagatgatccatgacgaggtgcacaagtacatgttagtggacgacacctgccaaagatacacaatttctactgtttttcagttggagaaaacatttaagacaatattttctcgtttgttctccatatggggcttgttccacgccacttgaaggaagaagggaatggtggtgttaagttcggacaatacatctacacatcttggagcatcggcatcaatgttttcaatcttctcaaatttcaaattattctggtctcttcgtgcaaccataaaagtttattaagtcacttatctgagtggtctaaaagtctagcatatttttgttcctctgcctgtcgagacggatcaactgacatgaataatatccagtgaatactgcaagagctattcatgatctgccgtgaactagctagtatgatataactcagtttgtggagtgctaatgcacaaacaggaaataggatgatacttcatgtatatttttttatttcatgaaaatgaactataggatactgttcacaatccataccaagcttctgcagttatcaacatgttttctatgttc

SEQ ID NO: 149162 - DNA, 1802 bp, Zea Mays
gtgcctccctccccacgaaacccccttccccaaactaccttcgccgctctccttgatccgcaattttctcccacatctctcttctgcccacttgcctccatcttggcctccccctccactccccacccccgaacatccggcgccgtccacacccttgcaccccgactcccctcgtccttcgtggccacgatgggggcgtccatggcatcgccttaggggcgatcgatctgggagaaagtgctggagcacgtggcgtcgtaccaccagcagcaacggaggcagaagctacgcaagagcctcacctacaccggcagtgagttctcgttcgctgtccggggtcgtggggacgaccccgcctccacgtccgttggggcacagaacgaggacatgcctcttgagcacgtctttaaaatcattaggccaaagtttgtgcgaccgttgatgtgaatttcctctgggcccaactttgatccgatggcaaaagtgtgtgtttatggttcctgagtcagatgatctttcttcagttttaggtacttttatgctttaatatagctcatgcaatatgatttattttaacacatatttggaatagaactggattgtgcatattttgtaaagtgtatgttctacattttgtaattcgtattattcattttttcctttagtttttctctttctacaactcctatatctttacaatcaaatttcagatgtgatagatattagtatgaaagataaaactagaatgctatgtctgtcaaaggagctttcttcagtttcaggtactgctctgctttattagccatccagccgatggataatttctatacgtgtatcgccctgcactttcaaacacttatgttcattgtttccaatcacatattttttcttcttctcttagatttactatgtggttgtggtctcagtttggcttgtaggttaatttgtatactcatgtcattttagtttttctgtgtattttatgttgatttagtatgtcttaatttagttactttcaattcttgatgctaataatatggatagattgtgacactactttctggcttgagcagaaatgagtttgttgcatatagcagaatatagtttttgtagctggcaacaatgaccgctctttggatgatctaaaaactattctgtagtcaggtagttaaatatagctgaatatacattattatgttttattaatcttatttgttttttctgtcaaaagaacacacctctccatctttcggtgctaggtggatcaccgtctaaacaatccaccaccagaaccgccctaccccaagatagtttttcagttggagaaaacatttaagacaatattttctcgtttgttctccatatggggcttgttccacgccacttgaaggaagaagggaatggtggtgttaagttcggacaatacatctacacatcttggagcatcggcatcaatgttttcaatcttctcaaatttcaaattattctggtctcttcgtgcaaccataaaagtttattaagtcacttatctgagtggtctaaaagtctagcatatttttgttcctctgcctgtcgagacggatcaactgacatgaataatatccagtgaatactgcaagagctattcatgatctgccgtgaactagctagtatgatataactcagtttgtggagtgctaatgcacaaacaggaaataggatgatacttcatgtatatttttttatttcatgaaaatgaactataggatactgttcacaatccataccaagcttctgcagttatcaacatgttttctatgttc

SEQ ID NO: 149163 - DNA, 1409 bp, Zea Mays
gtgcctccctccccacgaaacccccttccccaaactaccttcgccgctctccttgatccgcaattttctcccacatctctcttctgcccacttgcctccatcttggcctccccctccactccccacccccgaacatccggcgccgtccacacccttgcaccccgactcccctcgtccttcgtggccacgatgggggcgtccatggcatcgccttaggggcgatcgatctgggagaaagtgctggagcacgtggcgtcgtaccaccagcagcaacggaggcagaagctacgcaagagcctcacctacaccggcagtgagttctcgttcgctgtccggggtcgtggggacgaccccgcctccacgtccgttggggcacagaacgaggacatgcctcttgagcacgtctttaaaatcattagatccgatggcaaaagtgtgtgtttatggttcctgagtcagatgatctttcttcagttttagaacacacctctccatctttcggtgctaggtggatcaccgtctaaacaatccaccaccagaaccgccctaccccaagatagccgtagtctcctccatccaacatttcctacgcatgcagctccatctcagtcgttgtacccattcaatggcgagctggtggcagcgatgtaggagatgatccatgacgaggtgcacaagtacatgttagtggacgacacctgccaaagatacacaatttctactggtacacattttattttttcatggtgagaattaatttcttagcttgcgcaaaaccaaaggtttagtgatttgtcaaggcagaaatcagtataatgataggtgtgcttgagcttttgataattggtttatttgaacttttatctttttatgatcatgatatattgagacataaatatcttacatgtacctttgcagtttttcagttggagaaaacatttaagacaatattttctcgtttgttctccatatggggcttgttccacgccacttgaaggaagaagggaatggtggtgttaagttcggacaatacatctacacatcttggagcatcggcatcaatgttttcaatcttctcaaatttcaaattattctggtctcttcgtgcaaccataaaagtttattaagtcacttatctgagtggtctaaaagtctagcatatttttgttcctctgcctgtcgagacggatcaactgacatgaataatatccagtgaatactgcaagagctattcatgatctgccgtgaactagctagtatgatataactcagtttgtggagtgctaatgcacaaacaggaaataggatgatacttcatgtatatttttttatttcatgaaaatgaactataggatactgttcacaatccataccaagcttctgcagttatcaacatgttttctatgttc

SEQ ID NO: 149164 - DNA, 1237 bp, Zea Mays
gtgcctccctccccacgaaacccccttccccaaactaccttcgccgctctccttgatccgcaattttctcccacatctctcttctgcccacttgcctccatcttggcctccccctccactccccacccccgaacatccggcgccgtccacacccttgcaccccgactcccctcgtccttcgtggccacgatgggggcgtccatggcatcgccttaggggcgatcgatctgggagaaagtgctggagcacgtggcgtcgtaccaccagcagcaacggaggcagaagctacgcaagagcctcacctacaccggcagtgagttctcgttcgctgtccggggtcgtggggacgaccccgcctccacgtccgttggggcacagaacgaggacatgcctcttgagcacgtctttaaaatcattagatccgatggcaaaagtgtgtgtttatggttcctgagtcagatgatctttcttcagttttagaacacacctctccatctttcggtgctaggtggatcaccgtctaaacaatccaccaccagaaccgccctaccccaagatagccgtagtctcctccatccaacatttcctacgcatgcagctccatctcagtcgttgtacccattcaatggcgagctggtggcagcgatgtaggagatgatccatgacgaggtgcacaagtacatgttagtggacgacacctgccaaagatacacaatttctactggtacacattttattttttcatgtttttcagttggagaaaacatttaagacaatattttctcgtttgttctccatatggggcttgttccacgccacttgaaggaagaagggaatggtggtgttaagttcggacaatacatctacacatcttggagcatcggcatcaatgttttcaatcttctcaaatttcaaattattctggtctcttcgtgcaaccataaaagtttattaagtcacttatctgagtggtctaaaagtctagcatatttttgttcctctgcctgtcgagacggatcaactgacatgaataatatccagtgaatactgcaagagctattcatgatctgccgtgaactagctagtatgatataactcagtttgtggagtgctaatgcacaaacaggaaataggatgatacttcatgtatatttttttatttcatgaaaatgaactataggatactgttcacaatccataccaagcttctgcagttatcaacatgttttctatgttc

SEQ ID NO: 149165 - DNA, 1177 bp, Zea Mays
gtgcctccctccccacgaaacccccttccccaaactaccttcgccgctctccttgatccgcaattttctcccacatctctcttctgcccacttgcctccatcttggcctccccctccactccccacccccgaacatccggcgccgtccacacccttgcaccccgactcccctcgtccttcgtggccacgatgggggcgtccatggcatcgccttaggggcgatcgatctgggagaaagtgctggagcacgtggcgtcgtaccaccagcagcaacggaggcagaagctacgcaagagcctcacctacaccggcagtgagttctcgttcgctgtccggggtcgtggggacgaccccgcctccacgtccgttggggcacagaacgaggacatgcctcttgagcacgtctttaaaatcattagatccgatggcaaaagtgtgtgtttatggttcctgagtcagatgatctttcttcagttttagaacacacctctccatctttcggtgctaggtggatcaccgtctaaacaatccaccaccagaaccgccctaccccaagatagctccatctcagtcgttgtacccattcaatggcgagctggtggcagcgatgtaggagatgatccatgacgaggtgcacaagtacatgttagtggacgacacctgccaaagatacacaatttctactgtttttcagttggagaaaacatttaagacaatattttctcgtttgttctccatatggggcttgttccacgccacttgaaggaagaagggaatggtggtgttaagttcggacaatacatctacacatcttggagcatcggcatcaatgttttcaatcttctcaaatttcaaattattctggtctcttcgtgcaaccataaaagtttattaagtcacttatctgagtggtctaaaagtctagcatatttttgttcctctgcctgtcgagacggatcaactgacatgaataatatccagtgaatactgcaagagctattcatgatctgccgtgaactagctagtatgatataactcagtttgtggagtgctaatgcacaaacaggaaataggatgatacttcatgtatatttttttatttcatgaaaatgaactataggatactgttcacaatccataccaagcttctgcagttatcaacatgttttctatgttc

SEQ ID NO: 149166 - DNA, 1051 bp, Zea Mays
gtgcctccctccccacgaaacccccttccccaaactaccttcgccgctctccttgatccgcaattttctcccacatctctcttctgcccacttgcctccatcttggcctccccctccactccccacccccgaacatccggcgccgtccacacccttgcaccccgactcccctcgtccttcgtggccacgatgggggcgtccatggcatcgccttaggggcgatcgatctgggagaaagtgctggagcacgtggcgtcgtaccaccagcagcaacggaggcagaagctacgcaagagcctcacctacaccggcagtgagttctcgttcgctgtccggggtcgtggggacgaccccgcctccacgtccgttggggcacagaacgaggacatgcctcttgagcacgtctttaaaatcattagatccgatggcaaaagtgtgtgtttatggttcctgagtcagatgatctttcttcagttttagaacacacctctccatctttcggtgctaggtggatcaccgtctaaacaatccaccaccagaaccgccctaccccaagatagtttttcagttggagaaaacatttaagacaatattttctcgtttgttctccatatggggcttgttccacgccacttgaaggaagaagggaatggtggtgttaagttcggacaatacatctacacatcttggagcatcggcatcaatgttttcaatcttctcaaatttcaaattattctggtctcttcgtgcaaccataaaagtttattaagtcacttatctgagtggtctaaaagtctagcatatttttgttcctctgcctgtcgagacggatcaactgacatgaataatatccagtgaatactgcaagagctattcatgatctgccgtgaactagctagtatgatataactcagtttgtggagtgctaatgcacaaacaggaaataggatgatacttcatgtatatttttttatttcatgaaaatgaactataggatactgttcacaatccataccaagcttctgcagttatcaacatgttttctatgttc

SEQ ID NO: 149167 - DNA, 875 bp, Zea Mays
gtgcctccctccccacgaaacccccttccccaaactaccttcgccgctctccttgatccgcaattttctcccacatctctcttctgcccacttgcctccatcttggcctccccctccactccccacccccgaacatccggcgccgtccacacccttgcaccccgactcccctcgtccttcgtggccacgatgggggcgtccatggcatcgccttaggggcgatcgatctgggagaaagtgctggagcacgtggcgtcgtaccaccagcagcaacggaggcagaagctacgcaagagcctcacctacaccggcagtgagttctcgttcgctgtccggggtcgtggggacgaccccgcctccacgtccgttggggcacagaacgaggacatgcctcttgagcacgtctttaaaatcattagatccgatggcaaaagtgtgtgtttatggttcctgagtcagatgatctttcttcagttttagatgtgatagatattagtatgaaagataaaactagaatgctatgtctgtcaaaggagctttcttcagtttcagaacacacctctccatctttcggtgctaggtggatcaccgtctaaacaatccaccaccagaaccgccctaccccaagatagctccatctcagtcgttgtacccattcaatggcgagctggtggcagcgatgtaggagatgatccatgacgaggtgcacaagtacatgttagtggacgacacctgccaaagatacacaatttctactggtacacattttattttttcatggtgagaattaatttcttagcttgcgcaaaaccaaaggtttagtgatttgtcaaggcagaaatcagtataatgataggtgtgcttgagcttttgat

SEQ ID NO: 149168 - DNA, 855 bp, Zea Mays
gtgcctccctccccacgaaacccccttccccaaactaccttcgccgctctccttgatccgcaattttctcccacatctctcttctgcccacttgcctccatcttggcctccccctccactccccacccccgaacatccggcgccgtccacacccttgcaccccgactcccctcgtccttcgtggccacgatgggggcgtccatggcatcgccttaggggcgatcgatctgggagaaagtgctggagcacgtggcgtcgtaccaccagcagcaacggaggcagaagctacgcaagagcctcacctacaccggcagtgagttctcgttcgctgtccggggtcgtggggacgaccccgcctccacgtccgttggggcacagaacgaggacatgcctcttgagcacgtctttaaaatcattaggtaacttccagatctgcctagccccttgacgtttaacttgatgcccaatcggtagtttgttcattcagaccagcaaacacaactcatttgtttcttgtgaggctaggccaaagtttgtgcgaccgttgatgtgaatttcctctgggcccaactttggtatacataaattccattattgcctttaatttttttgtattctggtagatttgggcatgctaagagctaaggttgtttcatcttgcaacatattgacgtgctctatagctataaatgatatcaagttatttcatcttgcaacagatccgatggcaaaagtgtgtgtttatggttcctgagtcagatgatctttcttcagttttaggtacttttatgctttaatatagctcatgcaatatgatttattttaacacatatttggaatagaactggattgtgc

SEQ ID NO: 149169 - DNA, 532 bp, Zea Mays
gtgcctccctccccacgaaacccccttccccaaactaccttcgccgctctccttgatccgcaattttctcccacatctctcttctgcccacttgcctccatcttggcctccccctccactccccacccccgaacatccggcgccgtccacacccttgcaccccgactcccctcgtccttcgtggccacgatgggggcgtccatggcatcgccttaggggcgatcgatctgggagaaagtgctggagcacgtggcgtcgtaccaccagcagcaacggaggcagaagctacgcaagagcctcacctacaccggcagtgagttctcgttcgctgtccggggtcgtggggacgaccccgcctccacgtccgttggggcacagaacgaggacatgcctcttgagcacgtctttaaaatcattagatccgatggcaaaagtgtgtgtttatggttcctgagtcagatgatctttcttcagttttaggtacttttatgctttaatatagctcatgcaatatgatttattttaacacata

SEQ ID NO: 149170 - DNA, 102 bp, Zea Mays
gtttggtttgtgcaatggaatgagttgattcatcatcacctcatttctcatagttatttagttagtactaatattagatatgtggtcaccccgccaaatttg

SEQ ID NO: 149171 - DNA, 558 bp, Zea Mays
atggcggcgttgccggtgtcggcctcggcgtacgcgcccctcgaccctcaccctctccgcggccactcacccctcgcccgtgttcatgtccaagacgctggcggacacctacgccaaggccagtcacgtcgaattggcagtataggatcttggagtaatctggttggtctacgtatgaataaggatatcacccacactagattagagtgtcaatatgtgccaaacttcatggacaaggagtctcgggatttgaacaatgaagagaagattgaggttgctggtaaggagaaacaggaatggaatgcattgttcaaattggacaaatatgctagagcttccaagcgatatgagaagtacattgagtatgacagttcattcagtgaagatgagaagaagcaatctaagcaaccgaagttcagctgcaacttaaacaatgctgcctgcaaactgaagttgaaggactacaaggaagctgcgaagctttgcaccaagatcagacatgctttcgaaagatcttgcgcggagtctggaaattataggaggagaggagaaacgtga

SEQ ID NO: 149172 - DNA, 363 bp, Zea Mays
acacaaaagactgtggtgaaccgatcctgcctaaaattggcatttaagttcgttggtccttttaaagtcatatcaaggattgggacggtggcatacaagctggaattacctgtggatgcacaagtacatcatgtctttcatgtgtcacaattgaagccatttctacccttctactatccagttttcacagagttacctattgtggtggatttgtctcaaggggatatagagctagagtagatccttgatcgaaggatggtgagaaagggcaatcaagctatttctcaattgttggtgaaatggactggggtgccaaaggaagctgcaacatgggaggattattcagtggctaaggcaagtttt

SEQ ID NO: 149173 - DNA, 533 bp, Zea Mays
tcaccacgatgctccctgcctccttgctggtcggccataccctctgctcctccctaccgtccgcagccccgacgtcgtcgctgggtttagtcatggtgattcctaacccctttcttttatttcactaattcttctaatgcgagcagattttttttgattttatgttgatatgaggttatgtgtatttgtgtgcgagtgtggcagagagaaagtttatagggtttgcttgaaaatgaaagctctatcacgtcgattactaggtgttcggtgaaaaggatgaattggtgatcgttgttgctcttgcgaaattcaagttctattttatgttaataagcacatttgtgttctagttagttcgctcagttattgagttgaagagattgttagatatatgtatcgatgatgctattgtggttagcaagtgtggtgtggtgtgctctccaattccatgttgttgtcggtgtcttgctccattgtgaccttagggaaggatgtctttcctctagattactcataatgattgtgtttggatt

SEQ ID NO: 149174 - DNA, 1304 bp, Zea Mays
ttcacctcctgctcgcccgcatccgacttgcccgccgaccacctcatccctcctaccgtgtagccctagccccaaccccttggtggcctagctccgtcggtcggcggccaaccgtagcagtcgctcgtcagcaacatcacccagccctagcctcacactgctctcaccagcagtcgccaacaacagcagccagtggcagtgagcatccgcgcacagcacagctcccgccttgattccccgccctccgctcgcggcctcgcgctccagtcactaacaggtagcatcagcaagcagtggcatcgaaggcgtggagaccggccagccgccaacgccctctgtagatcgctcggcctctccaaacgaccagggccagaagtagtgctaacatttcatggaggaccactgagggtgaactatgggccaccgccacccatggctctgttgaggaggtcaacaatgccatatcaaacctgatggcatcataggtacgctagatgattatgcgatatgaagggcatgaaccaaactgaaccacaagatggatgatctgacccagtgccaggatgagagatgctcaccgagtggtcgtcgtttgacaacactagcttagtgttattcgaggcaactctttcacatggatttttaaaatctgtagtgtttaaagaaccagaaatggatttgcttgtttctaattcattttgcttgttggatgtcgatatgcacatgcattttcagtcagcttatgatcaagggtacaaataagatcatgccaactctactccatgtactgctggtgtcacagactcacctctgcggcagtatgccctgcctttgctgtgtacttaaatctgctggaggatgatgcatgggcatgcacgacattagattctattgctgtttgtttgactcacgataatgatcacagaaaagtggaaaaaacactgttgaaaaaagaggccattcagaatttagtgaagttcttccaagattgcccagaacagttttttggccatatattggacgctttcttgaagataataacgaaatcttctaggctaaatacaacaatggctaccaatggtttaacaacattgctcattgcaagacttgaccattcaaatttggtggtcgcaaaagtgtggagacttgaattcatataatgtgaggcttaacattagtgcaaacagttgtattttagtttagatttagagcacacttatgtatgcgttgtttgacaatgcttatttatgatatattgaatggtacttatttatattatattaattataatgttgttcaatata

SEQ ID NO: 149175 - DNA, 211 bp, Zea Mays
ggaatttggatatggattatgggagtacaattaacaatgtaattatagaacggtttttcttaccaatattttgctggtggtaccgagcacttcatgaattttgtaccgtcaatattatgtattttcaaaaaccttaagacgaacaactatgatgactatgaaattaattttgaagacagtgagtacctttttatggctttaactttagagc

SEQ ID NO: 149176 - DNA, 1484 bp, Zea Mays
atgcgcgcgcacggcaggccggtctcccacccgcagctcaccctcctcgtctgcctccacatcgccgcgcgccgccccctccgcgctctccacgcgcttcgccgcttccaccacgagttcgacgtccaaccccaggtccacgcgtgcaaccgtgtccttggcgcgctggctgctgcgggccacgttgaggacgcgctcaagctgttcgatgaaatgtcggagggtggtgtgcagcccatccctgtaacgtttgccatcatggttcgtgcactagcacatgcgggaatggttgataggcttctggagataattgggaggatgcggaacgaggtgtgtcggctcatgctacaacaccatgatgaaggaaaattggataccaaatcaaaaagcctagagaaagtcatcaatgtggtgtatgagatgattgaagtaggttgttcaatggaagaaattgtctattttgctatcatatatggcttctgcaagtatgcaagttcaactgaggcgaggcaggttccagaggcaatgaggcttgcagccagtgctggatatgcaagttccaagagccacaatgctttcattcttgagcaggtccggctattcctagatcgtcaagattatgttcgagcacaaattttatcaaggaaaatcagtactagagtatttgacgcagatccatcaaaggaaaaaaagaaaccaaaggagggtgacaacattgttcaggatgctcctgcagatattccttccctcttagaattgaagcgtatctactatgaactgatgattcgatattacttgcacaacaatgattacctggaaatctgtcgttgttacaaggctctttatgatatcccagcaacaaaggaagatccaaccaagtggataccaattcttaggaagatctgttggtacttggtgctagcacctcatgatcctatgcaatcgagccttctcaatgctacactagaggataaaaacctttcagaaatcccaaatttcaggttattgctgaagcagctggttaccatggaggtcatctagtggacagcattgtgggaattctctaagcacgaatttgaaaacgagaagaatctgctaggaggagctttgggtgccaaagctgcagaagatttgaagctgagaataattgaacataatatcttggttgtgtctaagtactattcgagggttaccataaagaggcttgctgatctgctctgcctgagtttgcaggaggcagagaagcatctttcagacatggtgaactcaaaatctctgactgcaaagatcgacaggccgatgggagttgtgagcttccgggtagttcaggactgcaacagcacacttaactcgtgggctacaaacctcaagtagcttcttgaccttgtcgagaagagctgtcaccagatacacaaggagacgatgatccacaaggcagtattgaaaagcttgactgattagcgctggctgtttttgcttcgtaa

SEQ ID NO: 149177 - DNA, 378 bp, Zea Mays
atgacgggcggtggggaggagggtggggggatccatgacaccttccatccgcggcaagaaatcaagaaatcaacagcatatgcggcaccttccaaattgcggcctcggttccaggtaatcgcggatcagatgggggtggaggatggaagcaaccgccgctgcttgatccgcgggcgggattcgaggatgggagccgctgagggggttcgaggatggaaggaaccacgactgcttgacccacaggtgggattcaaggatgcaaggatggaagccgcaggaatctgggatcaagcacggaagacggatggagcgcggagggagcgcgaaggcagaaccgtgtgccatcctggactgtggacgcctacgatacaaacataa

SEQ ID NO: 149178 - DNA, 1140 bp, Zea Mays
ctgagctgactgtggatctcatccgtatcgtatatacgtcgtcctgtttggatccaccgcgttttgctaattcccttcgaaccggccggtggccttcgttctcccaccaggcctgtctgtctgctgtatccgccagagcttccatggattccaccctcttcatcatcggcgtcataggcaacatcatctcagttctcgtcttcatatcgcctatcaagacgttctggaggatcgtgcggggcgggacgacggaggagttcgagccggcgccgtacgtgttgacgctgctcaacgcgctgctgtggctctactacggcctcaccaagcctgacggcttcctcgtcgccaccgtcaatggctttggggctgtcatggaggccatctacgtcgtcctcttcatcgtctacgccgccaaccatgccacaagggttaagaccgcgaagctggcagcagcgttggacatcggtggcttcggagtcgtgtttgcggccaccacattcgccatcagtgaatttgaattgagaattatggtgataggaatgatatgtgcctgcctcaatgtgctcatgtacgggtcaccccttgcttctatgaaaacggtgatcacgacaaagagcgtggagttcatgccattcttcctgtccttcttcctcttcctcaacggaggcgtctgggcaacgtacgcggtgcttgaccgcgacatcttcctcgggatccccaatgggataggcttcgtgcttggcaccatccagctgatcgtctacgcgatctacatgaacagcaaggcctcccaatgcagcaaagaaacagcgtcctcgcctcttctggcctccgaccggggagaagcatctagccatgtctgatgatgagcttcgatcagtgcgcgcgctggagtatagcatagaagtctcttgctgtcaaaaacttccaagaccaacggtacctaccagcatgcatgcatgcaagaggttaccaatttttattgtttgaaaattcatgtaaacttgtgacctccatggattgtttctttctttggtataagcttcgaagatgttagattgttagcacggtagttttgccagagaagggtgttgtcaatataatgaagaaatggtgaaaatccatacatttgattatcga

SEQ ID NO: 149179 - DNA, 690 bp, Zea Mays
cggtgctcaggctgtggcagccggcggcgaaggccgaaatgctgctgctcaattcgtgcactatcccagactttacattgaccacttgagttccatctccaatgcaagttccattggttctccatgcaagagggatgccgcagcgcgatgttctccatcatggagatccactagctggcgctcgggctgtggcagccggcggcgaaggacgaaatgctgctgctcaattcgtgcactatcccagagccttgattggtggtcaggaagtcgctatccaagggctaagtaaagattcagaataagctttacattgaccacttgagttccagctccaatgcaagttccattggttctccatgcaagagggatgccgcgacgcgacgttctccatcaaggaaatccactagccggcgctcgggctgtggcagccggcggcgaaggtcaaaatgttgctgctcaattcgtgcactatcctagagtatgtccctagctgagtagcagttgtcgcatctgttctctattttggtcctaattacttgttcgatattctgtcaatagcagtagtaatcagatcgacttacccaattaatttaattaatttgtccatatgatattgcattttggggaggccttgattggtggtcaggaagtcgctatccaagggctaagtaaagattcagaataaggtat

SEQ ID NO: 149180 - DNA, 1169 bp, Zea Mays
acccatagtataaaccatagtgagtccagaataacatcccgtacatggtatccagacaagccgggattggctccgttgacagatcctgatccagtgtgatatttgggctgctcacagcacaattgggtccaataaagcccagccgggacgcagaggaagaagacccggagctgcgtcttccttccgtttcagcaccgcgcgcaatcggcctctcatcccctcttcctatcgcccgccgccgccgccgccgccgcccgtccgcttcagtacgacgtcgagcaaggggaggtaaaagttcgtttggcgtgcgccatgtttaagaagttctcttcagaagatatatctggacagaatcaagttaaggcttctgtacaacgaaagattcggcaaagtatcgctgatgagtaccccagccttgaacctttgctagatgacttgctcccaaaaaagtcacctatgattgttgttaaatgccaaaatcatcttaatcttgtagtggtgaataatgttcctctatttttcaatatacgtgatggtccttacatgccaaccctgcgtcttcttcatcagtatcctgatatcatgaaaaagttccaagtggatagaggtgctatcaaatttgttctatctggcgcaaacataatgtgtcctgggttgacttcacctggtggtgccttagacgacgaagtcgaggaggaaacaccagtggctataatggctgaaggaaaacaacacgccctggcaattggatatacaaagatgtcagcaaaagacataaggaccatcaacaaaggaattggtgttgacaatatgcactatctaaatgatggcctatggaagatggaacggctcgaatgagtagaattctctgaggggttcataacttgcggcagatcgtattgatggacatatgaaaccagcaggaccctatttgcacagctggtatcgttttaaagatgaagtactaagaagctttatttacctgaggcaacttgagcttactccgaccctttggtgtggagtgcatgtcagaaacaggattatgaatgctgtgttcagtgcttttcacaaattgttgtattttcaccagaacaatttgccctcaattggaagtgaggaaatccataacgatctataagttatttgatcttacagtttgttgtgtgtaa

SEQ ID NO: 149181 - DNA, 1431 bp, Zea Mays
acccatagtataaaccatagtgagtccagaataacatcccgtacatggtatccagacaagccgggattggctccgttgacagatcctgatccagtgtgatatttgggctgctcacagcacaattgggtccaataaagcccagccgggacgcagaggaagaagacccggagctgcgtcttccttccgtttcagcaccgcgcgcaatcggcctctcatcccctcttcctatcgcccgccgccgccgccgccgccgcccgtccgcttcagtacgacgtcgagcaaggggaggtaaaagttcgtttggcgtgcgccatgtttaagaagttctcttcagaagatatatctggacagaatcaagttaaggcttctgtacaacgaaagattcggcaaagtatcgctgatgagtaccccagccttgaacctttgctagatgacttgctcccaaaaaagtcacctatgattgttgttaaatgccaaaatcatcttaatcttgtagtggtgaataatgttcctctatttttcaatatacgtgatggtccttacatgccaaccctgcgtcttcttcatcagtatcctgatatcatgaaaaagttccaagtggatagaggtgctatcaaatttgttctatctggcgcaaacataatgtgtcctgggttgacttcacctggtggtgccttagacgacgaagtcgaggaggaaacaccagtggctataatggctgaaggaaaacaacacgccctggcaattggatatacaaagatgtcagcaaaagacataaggaccatcaacaaaggaattggtgttgacaatatgcactatctaaatgatggcctatggaaggtactcctacatgggtttccctgtcgacctcattgtcttacttctcaaattccaaataatgaatacttgcatcatgttgtcttaaatagaacatcaaagtacatttgacatttgttgtcttatcatcttgaatcatagcagtaagccttaacggtaaatgtttatgctgcagtgagattgtatggagggaagaaagagctgagtgtaatatatctaggttctttgttcaacttgggtgatattgaccactttttccttggacagatggaacggctcgaatgagtagaattctctgaggggttcataacttgcggcagatcgtattgatggacatatgaaaccagcaggaccctatttgcacagctggtatcgttttaaagatgaagtactaagaagctttatttacctgaggcaacttgagcttactccgaccctttggtgtggagtgcatgtcagaaacaggattatgaatgctgtgttcagtgcttttcacaaattgttgtattttcaccagaacaatttgccctcaattggaagtgaggaaatccataacgatctataagttatttgatcttacagtttgttgtgtgt

SEQ ID NO: 149182 - DNA, 958 bp, Zea Mays
acccatagtataaaccatagtgagtccagaataacatcccgtacatggtatccagacaagccgggattggctccgttgacagatcctgatccagtgtgatatttgggctgctcacagcacaattgggtccaataaagcccagccgggacgcagaggaagaagacccggagctgcgtcttccttccgtttcagcaccgcgcgcaatcggcctctcatcccctcttcctatcgcccgccgccgccgccgccgccgcccgtccgcttcagtacgacgtcgagcaaggggaggtaaaagttcgtttggcgtgcgccatgtttaagaagtgagtcctctcttctccccttccgtatctcttttacctgtaactcctttccgatttccgggctcagtaattcgatctgtcgttgccgtccgctgcgttcaccgatctggttctctcggttacgatttggcacagctaattactctggaaccaccatgcgtaattcgggaccgtgtttttatcttttattttagctgggttcgggatctggaaaacgatcagcttttggcctcttagtttctctcaaacaaagtacggggctttatgggagaagatgtgataatggtattgggcattgagctcttgatacatgagttgcgatgtgctgaagctgctggatgttgcatcaactggctggcaagggcgttatgaacttatggcactagggtgcggttgtggttagatgctgccgttgtgcagttggtgtttctggatgttgaggtgtgccgtgtgcgaatgtttcatgttttccctcaaagtgcatggcttgttttagtgttttaccttggtaccctcattcgagccagctaaaacgttcatgctttggtagcaaggcatctcctaagacccaaactgacttgtttcatcaaaataataaatgcagcaaaacttgacactacaatcgtttttctttg

SEQ ID NO: 149183 - DNA, 2542 bp, Zea Mays
cgaagcaaaccgaaacaaacaaacccaagtgcgcgtccgagcctcgaggcggagaagaaaccggagcgagatatttgcatttcagtccctgcgaagagaaaaccgtcgcgtcctcgccgcgccgctcgcgtcgggatcccgccgccgccctactcggtcgaccatggggacggcgacgatggcgactgcggtgggcgcggccatgctgctctacttcgtgctgagccggcggctggcgggcgaggacgtctcagcccgcggcggtggagggggaggagtcgggtctggaaagcggcggagggggcgcgcgctgcggcggccggtgcagccgccggcgacgtggatcgaggcggtgggcacgctcgcggaaacgctgcgtttcacctactcggagacgctcggcaagtggcccatcggggacctcgccttcggaatcaagtacctcatgcgccgacagggcaatttacatgttgccagtgtatatgctggaagtgattgcattgaattgaaaggacctcaaatcatggaagagctgattgttctacggcggttgattgacctgtgctttcttttctctaagaagccatttccagtgtttcgggaattagctggattttcacaggaggatgttcttattgaggaaccaaaggcggggattttgaagcctgcccatacaattatacgtgatgagtgcaccaaatccttccttgttttgatccgagggactcatagcatgaaagatactctgactgctgctactggggctgtagtgccatttcacctctcacttttggatgaaggcgatgtgagcaaattagtgttaggttatgcacactgtgggatggttgcagcagcccgctggattgcaagaggtgtaacaccatgcctccgtgaagcagtcagacaatgcccagagtaccaaatcaagattgttggccattcattgggtggtggtactgctgcattgctaacctacatccttagagaacacaaagagttttcttcaacaacttgtgttgcatttgcacctgcttcttgcatgacatgggaattagcagaatcaggcaagcattttgtgacaacggttgtcaatggagctgatctggttcccactgtatcaactgcatctattgatgatctccgttctgaggtaacagcttcatcatggttaaatgatctgagggatcaaatacaacagacacgcttcctaaatgtcgtttaccggtcagccactgctttaggaactcgcctgcagtctttttctggtgcgagagagagggttgcaggtgctggagcatttctacgtcctgtttcaaacaaaacccaggttgtgatgaaacaagcacagaatgtcgcacaggctgttgctagaagtcggtctgcattttcctcatggtcatgcatgggtgcacgtcgtcgaggtgtaggtgtagttactgcatgttctaaagatgatatgagagtggaaacccatgtaacatcaacagttgagtcaaagtctgtccttgtagaacattgtggcgccaagaccatagaagaactgcagtatactgcagctagtgtttctgttcatgatgcagcagaggaagaagaggctcttttgagtgaacatgaaacctccagggagaatgccgaagaagaaacaacagagggtgagttgtggtatgagtttgagaaggacttggatcgacaagctgaaatggaggcacgaacaagggaggaagaggcagctgcagccaaagaaataatggaagaggaaagtgctgtgctaaaaggtgtagatgacaggcagtccttcacaccagatagcttggagaggcagcaattctacccccctggtagaatcatgcacatggttgcaatgcctcccacagacgctgacccagatgatccggttgctgctgacgagtgctgtgttggaatatatgagacccctagagatctttacagcaagattcgactctcaaataccatgatcaatgaccactacatgccaatgtataagaaaatgatggaaacattgattgagaagttcgcgagggatgaggactgctattgtacaggttctactgcagaataacatggaagcatgaatgacctatgtacatcgataactgtacaatactccgtgttagctgttattagcctatctgacattgcaatatacaagaggtgatgtcctcctgacccgtgaaaaaaggattttagttagggtcatgtgagtgtgtgatgtgtaaatgtaaaagaaaccagaatcagcaatttaataccttttccagtcatatttgcttgtactttacaagcatgtgatgcttggatcttgaaatctaaatgtttacaaggcattttaaagtcaggcgcttagcaagaagagcgttttgacattgttcatacagaccaatgggcaatgactacagggaactaaaacgataagagttgcaatggcgcactggtgcttgtttagctagccatactatttgatacttgacatggctgttaagaactgaaatgtaaagtgaaagtagagaacggaagaaattgt

SEQ ID NO: 149184 - DNA, 518 bp, Zea Mays
atggcgagtgcgctaggaaactctggccgcgagcagagcagagggatgcgcgagggagcagagagcttcggcgagctgaaaaataccgcgcgcagggagcacggctggagaggaagcgcgctggctggggatgaagatccgagcgcaggggctgagggaggaaggagagggcttgggctggacgccggcaggggagcaggcgatggccggcgttgggacagggcacgtgcggttcagagtaaaactggagcaggatacgacgcgcacagggaaccgctcgtccggcgccatgggggatccgacctgatgctggagacggagatgagaggaaggagcaggtggcgcgcagagcaaggaagcagaagggcggccgacgctggggctctgagcaccacgcgaggagctcggccgtccgcagttggaggaagaaggagtgcgcgtgggaggagcagagatggacgtgagcgcagggataagaacagcgctgcaacaaagatctgatggggagggcggtcagg

SEQ ID NO: 149185 - DNA, 1162 bp, Zea Mays
aggggacggttgagaaacacacgtgtagcatgcgggcagcgttggccgtcggccacgcgtgcggctagatgtaaagcatcagcggccatgattttttatgggacatggatagtgcgaatggctaggaagttgtattggtttaatagttttagttttcatatttgataatttagacagagcccgttttttttcccccgcggtgcaaaaaatatgcaccagactttggactccaagcccataacataagacttgatgatatcgaattgggaacgaagaagaaacgctagcttgtggggcgcacgcaagttacaactcagtacaagtcgcgacacataagaataaaaataagcaagaagaacacacgtctcttctgccgctcaagctcaaacagccgtcggtagccgcagcgtggcggcggcaggcgcgccggcgagaggcccgccgcgcgcgagtatggacctgtagatctccaccagcaccttctcgtcgtactccttgagctgcgccggccgcgcgaaggccgccgccgccgccgcgccgtgggtcgccgtggcgcagaagggcgcgccggcgccgtacccgacggcgggggaggaggccagccgcagcatggcggacacgtacgcgtcgcggagccgcatgagccaccggcgaggggacagcgcgcggagcagccgccgccccagctggccgcggcgcacgcgccacccgcggcaccggcggcgccggcccgagccatcccccgccggcggctgggcctgggcctgggcctgggagacgccatttccgagctccacggtggggagcggctggcggcgccgcgcggcgtcgccgtccatgcggtagtagccccggcgcttccagtacgccttgatgccgcccttgtaggtgcggtcgtccatgcctagttgcttcttgattcagaggtggacgaagctaggcttgtggttgcggcagactgtcctctatggaaacggggctgtacgacgcccacggtagcagaatggcagcagaatttaaagaagcatgggattcctcctcctctcctctgtcctctctcattttttgacatgtgtgcaatgaagccccgcaggattacctgtatttcaacaagaaccaccgcaagcactacttaaaacgagaaaaccatgtttgtgtataa

SEQ ID NO: 149186 - DNA, 115 bp, Zea Mays
atcctttcaaacctaactagctcgctttccggactaactcacataacacacttaacacaattagccttaacaaaacttatcagctaattgattaaatgctaaacttatccctcac

SEQ ID NO: 149187 - DNA, 489 bp, Zea Mays
atgtcggaaaccaaagaaataatagataatcttgttcaggatttcctaacgatactaaacttgctggagcatccagctgctgcttctatccttgaggttctctctgtgttgctccttcacaatgctggattgaaatctaaggacactaatgttcggtgcttttctattgatcttcttggtggtattgcatcaagattgaagcatgattcggtcatctacagtgaagagaagctttggatattgcaagatctcactgatgcagtacgtggtgttgctgtcggtgaagtagacgtcgccggtctccaggtcgacctccacgctgttgacgaagttgagtggcgcaccgccaccgcctccgccagcccgtcgcggcgcccgccgcccatcagccccaggcccagcagctgcctgcacgcgctctcggtcggcctcgagctggacgcgattctcgagcctactggcgtcgtaggcgaaggggatctcgcctga

SEQ ID NO: 149188 - DNA, 1453 bp, Zea Mays
aaaaagaaacgaagccccatttatttaatataacgcagagcgcagtcctacacctagtcgtactggtctactggacgtcgtgttgtttatagtcaactagcttggacctacgccgtcgtcaccttccgcggccgccaccaggcgcgcttccatgcgcatcgtctgttccccggcccccgttcgccgttgcgcgtttgcctccgcgcctaagaaagcagaccacgcaatcgagaaccttaaaggcaaagaaaccgtgaactttatgttcgcgcaccgcagcaaaggtgccgccgcagccacagccacagccgcgctcgccccaagagcaacgtccaagtcctccccctcccaccgcccgccatgtcttgctccgacgatatggcggcgttctacgacgcctgggtgggacgcgaggagcagatcgtggcggaactaacggcggcgctcgcgctccagccccggcgcaggggcgacgcgctagcgctgctcgttgacggtgccgtcgcccacgtggccgcctactacgagcacaagtcccggctcgccgaccgcgacgtcgtggccgcgctggacccccgctggctcaacccgatcgagcgcaccttcctgtgggcctgggggtggaagcccgcgctcatgttccgcttcgtggagagcgtcggcgtcggcttgcgcctcgagcagcggcgcgcgctggaggagctccgcggcgccacggcggccgccgagcgggaggtggacctgcaggtggcggccgtgcaggagtcgctggcgggcccgagggtgctggccgccctgcgcaggcagcccctgcggaacggcgaggccgaagatgccgtggcggtcgtcgggcgctcgctgcgcgtgctgctggtcgcggccgacgcgctgcgggaccgcacgctgcgcggcgtcgtcgggctgctcgcgactgaccaggccggcgcggtcgtcgtggccatgctgaggttccatctcggtgtccgccgcgccggccgcgactggagctccgggcacggagcccagcggcgcacctaacagaacggagctgctttttatgttatgttacgtgcatgggcaccaaaagccggtcaaatgtcactgtcagcgtttgtgtccggtccgtcgaacaaacgttggcactaagcggaacctgagtcatcctgtgacggcatctgctcatgtgttttcctttcagcatatcatgcgaacagtcaaccgagactgttcgtcgacgttcaagactccagagtccagcgtcatcgtctgagtcatggtcgtgtactcgtgtgagtcctttttggagtacgttcggttggcatgcccaaatccgctcggcgcgcgcgctctccgatttgtagcgaactaacgactttcaacataagtctaggttcatataatgtaacttaaatggcaacgttaacgattcaaatttgaataccaacgataataa

SEQ ID NO: 149189 - DNA, 1222 bp, Zea Mays
agccaaagatgccgagtgaactggacagataccgagtagaatagaatagcgaagaagaaggatagcttgttggattgagttttgaacattatttttctatttttactgatgctcatcaatttagctaatttcttggagttgctcgattgtccattctctgaatgccaagtttcctttttttttcccaggtggtccctgatcgccggtcatttgcctggccgaactgacaacgagatcaagaaccactggaactcgcacctgcgcaggcgcgggcgggcgggcgactcccgcgacgacggcgtcgtcgtcaacatcgacctcgtcaagctgcccggcggccgccgggccagcagccgaggcatcgtggccgcggccaagccagctggaaagaacaaggagaagaggaagaacggcaagggcaggaacaacgtagcagaagcggagcagcagctcgaggaggaggacgccaacgtgtcaacaactacgccgaggactcagtctcactgcgcctccgctgcccagagcgaggagcaagcgcaggccagcgctagcggcctgacctccgaggaggacctgctggccctgagcgaggagatggtggtgagtgcgctactggccccgggaagcccgaagctgctggaggtgggccccgacggctcgtgcgtggacggtgacggtggcctgtctggggacagcggccgtgggtcaggcgggccttctggcgatgtggcccaggagctgcacctcgacgacgacgccatcatggactgggactccatggggctggacatcccgaccgccgatgacacgtggaaccccctggtgtgggactacgaccagacgtcgttggtcccggaaccggaaggagaggggcgccggcagcgggacgagatgatgtcagacctcttcttcctcgacaatctctaggaggcgacagtgtgcgcctttggcgtggctgctgccatgttttcagcttttggtctgatccagtactggtttggttttgggtgtgttcagttcagagatgagtgtgacagagtgagtgggttctgagtttgagtaaggagtgctgcagtgacatttttgtctgctagcctggtctcatatgaacccgtgaaatgtaagaatgtagggggagaaagcggtagaatgaacccctacaactttatttctttgtttctttcaactttctttctttgaataatacgagagatttattaat

SEQ ID NO: 149190 - DNA, 1137 bp, Zea Mays
gtgtgcgtccatttgtgtatccacggaccgcagaagaacctcaaaagctcttcacttttcccctccactccacagcgcaggcgaggcaggcacacgcaagctgccgcatttcttgcagttgcacctcgcaaacagatggggagggcgccgtgctgcgggaaggtggggttgaagaaggggaggtggaccagggaggaggacgagatcctggcgaggtacatcgaggagcacggggaaggctcatggagatcactgcccaagaatgctgggttgctgcggtgcgggaagagctgcaggctgcggtggatcaactacctgagggcgggtctcaagagggggaacatcacggaggaggaggaggacgtgatcgtcaagcttcacgccacgcttggcaacaggtggtccctgatcgccggtcatttgcctggccgaactgacaacgagatcaagaaccactggaactcgcacctgcgcaggcgcgggcgggcgggcgactcccgcgacgacggcgtcgtcgtcaacatcgacctcgtcaagctgcccggcggccgccgggccagcagccgaggcatcgtggccgcggccaagccagctggaaagaacaaggagaagaggaagaacggcaagggcaggaacaacgtagcagaagcggagcagcagctcgaggaggaggacgccaacgtgtcaacaactacgccgaggactcagtctcactgcgcctccgctgcccagagcgaggagcaagcgcaggccagcgctagcggcctgacctccgaggaggacctgctggccctgagcgaggagatggtggtgagtgcgctactggccccgggaagcccgaagctgctggaggtgggccccgacggctcgtgcgtggacggtgacggtggcctgtctggggacagcggccgtgggtcaggcgggccttctggcgatgtggcccaggagctgcacctcgacgacgacgccatcatggactgggactccatggggctggacatcccgaccgccgatgacacgtggaaccccctggtgtgggactacgaccagacgtcgttggtcccggaaccggaaggagaggggcgccggcagcgggacgagatgatgtcagacctcttcttcctcgacaatctctag

SEQ ID NO: 149191 - DNA, 751 bp, Zea Mays
gttctcctgatatttttcttcttcggctgccttatcctcttcttcttccagccatcgtctacatccgtcgctggattttttttcccctgcgccgctcatctgctgttcttatcccatgccgccgttcgctggccgcgtgtactctggggtcgtcgtgctggccgcctccctcgtcttctcctcaggccctcccgcgctctccctgccttctgcacgcgcgcagctcgccccagatcctcccagccatgacgcgcgcttccctgtgccccgcgttccttctctgcactgcttcctctgctccatcttcaagcacgccgcgctccaaatcgcctgctgttcctcttccccagccatggccgcgcctggctcgccggcgttcaggccgcggcttcctcctccaactccggtcggccaagagcctagctgcccccttgcttctctccctccatttcccagcagcgccctgtccctgtcgaagcccttctatggcgcgcgtggatttctcctcctccatccccagctagcctgcgagctcctccctcctccctgcatccatggatctcggcgcccatctccatggctcgccctgcgtttagccgccgcgcccggttccgagtccctttcctggccgagttccctgctccatctctgccctctgccggcgctccagctcctccatccatggccatgcctgctgctcgtcggtgctcgccgcgggagacggcgcttggtcgtctaaccttcctgctcc

SEQ ID NO: 149192 - DNA, 1345 bp, Zea Mays
acaaggcggctggcgtaggccgggtcggacttgcggaagacgagggaggcggcggcgagagccgcggcagtctcggcggcgacgtcggatcccggggtgccacggtccaccttgtacaccgtcctgggggtgtccatgtcctccggccgctcccagcacgcgtggtccttggtcgcgtcaccgacctggacgtagatggtgtccgggtgcgccgtggccttgagcaggtagtcggcgccccagcggacggcgtccctggcgtgctgcagctccgacttcatgaggccgccaaactccaccacgctccacgccagcatcgtcatgctgaacgccatcgggaacccgaacttgacgttgtcaccagcgtcgtggtacccgcccaccaggtccacctgcccgccacacattcaacaagaacgccggccatcaacagataaaacaggactgaaagcagagaggccgtccggtgacataacctccacgctagggagtacttaccttggcggagtgaccgtcggagagtcccgagtccctgcgccaggacacgcgctgcgacggcggcagcttgcccgaccgctggccctcgaagaagaggatggacttgacgagcgcgtccctgtagtcgtgtgcggcggggccatggtgcccccgggaggcaatggcgtcgcctggaaggcggagggcagacgagagcaggacgaagacgacgaagacgcagcggagacgagccatggccggccaatggaccacctcctcgctcgcctactggacagtggacactggaacgtcgccgctcactgtcactggccactggctcccgtctccgcactgcctcctcgcttggcacaagtggccacccgagcgctgcttttaaaggcgcgcgggactgttttccgccgtatatttattgtcgtttcctttttcggttttagaacggccattacttttctcccgccatggacgcgtgccccgagagccctctgagctccttcacatggacatgggcatggcgactggctggcatgcgccaaatgcaaatgcgcgacgtgcttcagcttttgtccattgtggctgccgaggaaatcgccattgccaagaaatcaagcacggtcaggctttggtttctcaaggcggcgaattggtttttgttaatggaagcagagctcggaaatgggaagaggcagacggttagctcaaggagcttggcccaccacagcaataactttgcagacgagggaaccgtgcagccatcaccgccggccgttaagccacaggaggagcacttttccgattttttaatttgagcggcacaagatcccgctctttcgttgctcagggaccccga

SEQ ID NO: 149193 - DNA, 575 bp, Zea Mays
tagatagcatcagatagagttgcgagctgcaaccttagtagcagtacacttggtggagccgtggagcacagtttgtctccgcgcttacatacgtgcgccagcagcggcgtcgcgtaacaaacaaatcacgcctacgagtactagtggcaatatattaagacccacaagcgaagcgtccttggttttgcttgcactggggtcgtcaaatcgcgatgctctaatttccgaacaatcaatcaacacggcaacaattaacgctagggagcttagagctggccgtaggagtgcgcgaggtaggcgagcgcgccgacgagcggcgcgttgatgtaggtggccggctccgagtgctcgtggtcgttccgctcgtcggggaacctgtcctgcatgtcgggtcccccgacgacggcaccgacgagcaggttgggattggccccacccgcgtacagcgcggtgaacccctgcgagcaaccgatcctagccgggtgcgccgccacggacggcagcgacgaagcgcggtggtggatgcggcgcgggtacttggcgccgtagcccaccatgtaggacatccccatcgg

SEQ ID NO: 149194 - DNA, 90 bp, Zea Mays
tatttgtgcatgaacatgaacatgagagtgaaaacagacttcatttcaagacgcaacaccgtgttatttaaaatgatgcatcgtgcaaag

SEQ ID NO: 149195 - DNA, 399 bp, Zea Mays
aagcccaagggatacacgtctcggtgccccccaccaccacctcttgttcattatccttggtcttcacctccacctacacctacatctccacctaccgaacatcagacccctccagctaccttgccgatgcatgaacgagaagacgggttagactttgtccaaaccctcttcactagtggaggtatcgaccatcactcgccactataactcgatggtgatcggcgaccgtgagcttccatgttattgtgttctgatacttgagacttttattatgactatgtatgagatattgtctcttattagtactggatgagatgtgtcttattatgactatggatgagacttctgtgatgtaattgatgagactatggatttaaatattgttatgtgtgattgtgt

SEQ ID NO: 149196 - DNA, 812 bp, Zea Mays
gtttatgaagttttgtcggggttctggatgcataagatagtggtgtatgtgatttgcccatagtttctgcagcctcattgttttccatttggtatcaataaagcttcacgctcatggatagggctgatacatcaggttgtcagtggtggtatacattacatgaacatccatgtgtatattcattttctgtatactatgtgcttcctcagtggtgaagttgtaaagctggagttctgatctctactggttggattaagtatctggtctctggacaacatataaatttcttcctatcataatcctaccttatttatactaagaaagatggaccttaataggacaaatatttggtttcatggaaaggaacatatagctactgcttcattctcccaggcccaaccatctgccataaattgcaggaatgaagaactatctatgtcagccgtgaacttgggttacattaggagcttagaaatagcacagaactctagaaaatcatttcagcatggcaatcaaagtttgaccgctccagatatgcaaccagacatgctttattcttgttcctgttttgttttccttatgtattaattccttaacttgtaatgcacatgatgttttccttatgtattaattccttaacgtgtaatgcacatgatgttttccttatgtattaattccttaacttttaaagcacataatgaaggctggttgtcgggtaagttctcttaaactttggtaagattacgtacttttgctatggatattttgaatcaaatacaaggtaattcatttaaaaatcgtagtaacacatg

SEQ ID NO: 149197 - DNA, 807 bp, Zea Mays
aggacacgagagagacggccaaatatggcttccggaacgccctacactgccgtcggcgtcatcttcctctccgtcttcctcgtcgccgcggcatccgcaggccgcaccgcggcacctgcggccgcgccgtcgagcaagtactcgctcgaggaagcgtgcgagcagaccgcggggcacgaggacctgtgcgtggagacgctgtccgcggacccgtcgtccaagactgccgacactacggggctcgcacggttggccatccaggcggcacagcggaacgcgtcggagacggcgacctacctctccagcatctacgacgacgacagccttgagaacaagacggcgcagctgcagcagtgccttgaaaactgcggcgagaggtacgagtcggcggtggagcagctgtcggacgcgacgtcggcgctggacacgggcgcgtacagcgagtcggaggagctggtggtggcgagccaggctgaggtgaggctgtgtcagcgtggctgccaagccgtgccgaaccaccgcaacatcctctcggcgcgcaaccgcaacgtcgaccagctctgcagcatcgcgctcgccatcaccaagctcatccacggaccgccatcttgatacacaggacgtagtaaacatttagggcttgttcatttcgccgttaatccatgtggattgggtggtattgagtcggtttaattccatagcaagtcaaaatacatcccaatccatcccaatacacaccaatacacatggaattgaaggtggttccatacttgtaacgtaattggtaactaatgatgacgttaaatc

SEQ ID NO: 149198 - DNA, 585 bp, Zea Mays
tcatcgtactgccttcgtctcttccgtcagtagctgcagatttctgtctggtacaggttgtcgtatacgttgcgtgttgctgcttgctggggagaggggagcgctgttgcagatggcaagcttcaaccaagagagcagagcaggcacacagagggaggaggcacctctacagggcaagtacggaggcatttctccgaagaaggcgctcatcaacaaggaccacgagcgcgcctacttcgactccgcagattgggtgctcggcaagcagcaaggcgtgagcagcaacagcccgacgacggtgcccgcagccgagcccctcaagcccaagctgcagcggacggcgtaccaccagcttccccctcggcggcccgcgtacacgtcgtcggagtagctcggcgagcggggagtcgctgcagtgcagcaccgtaggaagccggaatccacggaggtggcgccaattgggttgtacatgttgagaaacactaatgaaggattacgtggtaaataccgaatatatttctaaaggatatcacgtctatatatatatatatatacatatatatatatatagaacatatacaaatg

SEQ ID NO: 149199 - DNA, 450 bp, Zea Mays
tcatcgtactgccttcgtctcttccgtcagtagctgcagatttctgtctggtacaggttgtcgtatacgttgcgtgttgctgcttgctggggagaggggagcgctgttgcagatggcaagcttcaaccaagagagcagagcaggcacacagagggaggaggcacctctacagggcaagtacggaggcatttctccgaagaaggcgctcatcaacaaggaccacgagcgcgcctacttcgactccgcagattgggtgctcggcaaggtagcaaattactcgtcaactcaactggtcgcagcccaaagaccgcgcgtgagtaaccgcgggcgatatactcacatgtcagagctaaccccaccccccctggtgggtgtctgcagcagcaaggcgtgagcagcaacagcccgacgacggtgcccgcagccgagcccctcaagcccaagctgcag

SEQ ID NO: 149200 - DNA, 102 bp, Zea Mays
gtcaattcctgtcatcatggacgaagtgccttacaacagcatttgctaagggctgtagttggaatggtgcctttacactggatggtttcaaatttattgaag

SEQ ID NO: 149201 - DNA, 1485 bp, Zea Mays
gccgttttcacgcagcttccttccacaccctcgttttctcccgctctagctctctgctcacagccgcaagctccatcttcctccctgctgcagctcccgagcgccctgccctttgctccagcttgccgcgtgctctagcgtctgtgccgtggagcccctggcgcgggttcttctgcgcccggccatcctctctctccatcaccatggagcttcttttctccagccgcgccctgctcggttccatggccaacgttccccaagctcctccctccagtccagccgcggtgctccctgcgcgcctgctcccgcgcgcgttcctctgctcgtcgcgcccagcgagtctccatggtcaagcacgcgcggatctcctctgagctcgcccccggcctctactccttccagccggtcgagtctcgactgcgctcggcctccagctctgttgtcgcgcagctcgtcggcgttgcccctgtttccatggctgaccgggcggctcctctgcgtcgtcgttctctgggcccgggcatggggcttcctcgccgtcgcgcgcgctccttcctttgctctgctcggccatggacgccatgctgcagctccctgctcgtgcccaactccctgcgtacgcctgcgcccgagctgaacttcctcgccgcgccctgcgctctgctcacctcggctcctagttcggcgcgtgattttggagctctgcgcgaatggcgtgcgatttggtgctctgcggcaagcgcttcgtgtgggtggtgtggttcccaaaccgcgtgatgcactggctcgatgcccagaccccggcctccatcgtgctcgtctgcctcggcagcaagtacttcatgtcggagcagcggcagcaacaccctcctttgcgtcgtgctcactagatcgggcctcgcgcgtcgatctgtgcaattcctgttcaattcatgttcggctatcggtttcactggttgtcgatttcctattcgccatggtcagcctagctcgccaaccgtcgcgccctctttacccgttgagttgtgtgttgccgcgttcaccttattgtgtcattatggacttgtcggcgtactgcgctcgcctcaactcgaacgagtcgaattgtcatcatctttgtcaaatggaaattgtcgcgttggcacgttgatatcgtcgatcgcaattctcatctacgccaagtcccaagccgtgaagacgctcttgtgctggccacgcgtcaccagctcaacaaaaggaatcctatggatatctggtcaagaatagaaattgtgtgcatcgctcgccacacgtgtgtgatcaaagacgtcaaccagaaactgtcatcgtgcttccgactatcccgtcgaattagtcagggtaagcaaatttgttattcgtgctagtggattgatgaatggttggactaggtatattaatcgtgatacttctgtggtgagtcggattgctaattcggttattagttcgatgaagggaactataggt

SEQ ID NO: 149202 - DNA, 333 bp, Zea Mays
atgggtacccgggaaactcatgggcttgacaacatcgatccagcgtttctgaggtacaagaacacaggtcatggcggcgagaagccccaacgtgaggctacaaaggctatcgacaggaagaaccagaggtgtaacccaatgtatcttcagctgctccagttgttgcccagatatcaaaggaagccggttatcttacagttggtgttgtcacctatccattcagtttcgagggccattcaaaagcgtgccatctctggaacctcccactcattctggagtctggacgcacgactaacggaattgcagaacgtgaagcttgccgctgagcgttga

SEQ ID NO: 149203 - DNA, 1236 bp, Zea Mays
ggaaacccagcggcggccgcgggcgccccaaacccagggcagagtcgcagggtgacgcggatagcccatcatggcgccgcagcagccgtgaagcacaagagctttgctgcagcacgacggctttgtcctctctcctttaaagcggactgctctcctcaattgtcaggcagtagcatccatttgattgttctatcctcttctctgttctcacccccttgcaagcaacaatcgttcaccgatcgatccagtgcgtcctgcatggaaactgccgccgtcgccgcctccagtgccgggcgccgcatcatggtggccgtggacgagggcgaggagagcctgcacgcgctcaactggtgcctcgccaacgtcgtctccccggcaggaggcgacacgctggtgctcgtccacgcccgccgcccgcgcccggtctacgccgccatggacagcgcagggtacatgatgacctcggacgtgctggcgagcgttgagaggcacgccaacgcggtctcggcggcggcggtcgacaaggccaagcgcgtctgcgccgaccacccgcacgtcaaggtggagacgacggtggagagcggggacccgcgggacgtcatctgcgacgcagccaacaagatggccgcggacctgctcgtcatgggcagccatggttacggcttcatccagagggcgttcttgggcagcgtcagcaaccactgcgcgcagaactgcaaatgcccggtcctcattgtcaagaggcccaaggagtagaaggttcctcgcatgtaacgctgcagcttagccaataatgtttcatggcgaccatataggcatatatgtacacacttcacatcccattgcatggcagtgtcttccctagttcaacaactagctttctgctggaataaggtgttcagagttcagacagagtatgtactgtacatactatcttcttgcatttggtactcttgtttagtgaaaagcgttccgtaaccttcggttgcctagctgtttgtttctgctaacacgattagcttatcttaaaaccccgctgcacataacaaatgtggcaacttttaacagttacaggcctccatcaagcagaggtatttcagtcccgtcaccaccaaaatttcacaccttttaatttatcatgtaactgtttcgcgagcacctaagcagcagcggtatcgacaagctgtagaaacccaacttagtgggtgtttggaagtgaaatttttttatagtttt

SEQ ID NO: 149204 - DNA, 137 bp, Zea Mays
ccacgccctcctcctctccccagcactgcgggcagagcatagacgtgtcccgtcccgtctgcgggaacggccccccactccacgcaaccgcccgtccgtcacaccgcctgcgccgccacctcctcctcagccgccgt

SEQ ID NO: 149205 - DNA, 503 bp, Zea Mays
cacaatcagggggaagcttaaacgcggggcggagtggtcctcgcctggcccaacccaagcggacgggggaaagaggaacaagagcgaaaaggctatcttcttcctttttcccatccactcgtcctactctactcctgctgcagtgcatttgacgctaaaccactgaaacctcagctcaaattaacaaactggattgcagatggggcgggttctgcttagcacaaccgaggacatcagcttaaaaaaccttttttttcccgttatggacaaggactccctcgcttttggtgaaagctacacgacattttgcttgctggcttgctacactacagcagcgggacaaaacacagctccagaggatgaacaccagagatgataaacaaccttttgtccaaaataatctaccctcagccggtagaggcggggtcatagctcaaaccaccaccagcatgcgtcttcttcctgatgaactagttcgcagctaccagtaagtattaagcttc

SEQ ID NO: 149206 - DNA, 1484 bp, Zea Mays
gtctgctacaggcacttgctgctagctatgtaaatgctggagaatttggaaaagcaaatctgctctgaagaaagttgagggccttatcagtgctcatgatgacagacagccttttgatttccttctgagcctatacgcttcactaggaaatttgagcgaggtcaatagggtatggaatgtgataaagtccaaattctcgaaggtaactaacacaagctaccttggcatgcttcacgctctttacaagctcaatgatattgaccgtatgaagcagatctatatggagtgggaatctaattatgaaacctttgatgtaaagctgacgaatatgatgattcgcagccatctgaaggttggcatgaccgaggaagcagaaatgttggtggagaaggtcaaggaaaatggtgcagagtttgacaccaaaacatgtgagttgtttcttgatcactacatgggcactgaggacatgaactcagcactgaactggttagagaatatgactaaactctccaagaaagcagagaagctcgatcaggacaggatctacaagttccagaagtatttcgaagaacacaaggatgctgacggtgcagagaggttctgcaactgcctgaggacgctagggtgcattgacgggaaagcatacgagtctctcttacgcacatacttggcagccggtaagaaaagctgttcactccgccaacagataaaaaacgataaggttgagatctgctatgacattgggaagctactcaagaggttgggcgacaaggggcgatgagatacatatttatcttcgtttttaatttgagagagattagttctgttgatcctgtacgtccatgagcatcagaaaccaaatgtcggtccaacggttgaaaatgtatcagttctttcgttgttcatgaaaaggatagctcatggctgggctggtatcgttccggcttttgcgttcttacaagaagcagtggggaacaataagattcttgtaagtgcaacgtgaggtcttgtctagctaggcttttttgagatacacttttcttctgaaatgaaattgctgttacaacacgaatcctgctacagagccgcttcactttccatgtctaaagtcagtgtgccgtcaggacatcaggtttatgtcgtgacaacgatatgtgcacgctcgcgaggagtgtagtgtggataggtctttgtgaacagagcagcaattcgtgctggaaataattggctgcaggacgttagtccaaagctgtctacaggtgtgctatgcttctgtcgtgtcaaaccgcgaaaaatggtgaatctgaaaccgagataattcttttttggtggtaaagacatacaattgctgaacgtcgtagtctaattctagacgtactgtatcattgttgccatgtaagtgtcattcttttgtcatgtgaccatttgttgtcaaatatactatcataaacttccttatgactatccttatgaatggttttcgt

SEQ ID NO: 149207 - DNA, 1024 bp, Zea Mays
gagcggtctaaccccaaaccctaaaccatggcgccgccggccccatccgtcggtccccgcctcctactccgccgcctcctctctacggctaccgaagcggcggcggagacacctgcgcccaccgcccccagctccgccgccgccgcgaagccggcgaaacaggacccgaggctgctctaccgtcgtttgtcggcgcttggaagcgccggggaggggagcgtgtcgcgggttttgaacaagtgggtgcgggagggcggcgcgacgcgaagcgacgacctcgtcaagcatgtcaaggagctccgcaagtacaagcgtcacgcccacgccctcgaggtatacgcctggatcctccttgtctatcaaccaggcgcgcccattcgattccagttctggtttggcagtttgtgatctatgatatcaaccaggcgcgcccattcgatctcagttctggtttggcagtttgtgatctatgaatcgtttagtgtttgttggctacatgagtttgggaagagttgtaattagttagtaaccgcaattagttaggaaccctcccctagtctggtgttggagatcaatgatgtcggtggttgaatggggttttgccagcccagtgtatcttggcctccgaggacaggttctgtgagggacttggtgctggctggcaagataaataagcaattgacgggaggcagtgtggctggcaagataaattggcaattgactggagacattctggttgcaattgctacattgtcaccacccgtgttgcccatagcgagattgaaacacagacttgagcaaatcacagataatcaaatgacaccgatatatgagggagtttgactcctgttctttcctgtttctcaattctttcttgtccccccttttgtctccagcttctctcctatatagctaccacttggttctgccaacccaaaactgcaaggtccaaaggccatgacaactgggcccacatatctaatggtgctaggtatgataatgttgcccccacgaaacattgctt

SEQ ID NO: 149208 - DNA, 81 bp, Zea Mays
aggaggagcagcaagggcgcccacaacaggaaggagatcaagtctgactcggctgcggctccatctcggattccaggacca

SEQ ID NO: 149209 - DNA, 225 bp, Zea Mays
atgcgccgtagctgcgcatcacgcccaccaggccgcccaatctcctattcatcttctccaaactgcctctccccacccatctcgcccatgttcgcgaaacccagagccgaaccgcccccagtcgacctcggctctccggtgagctgccctccatgttctggccacacagtcgttcgtcgcgccgatcgcccaggaagatctgcgatgctctcgtcgttgccgagg

SEQ ID NO: 149210 - DNA, 308 bp, Zea Mays
tttcataagacaagcataattatagagactaagctacagacggatcgacatatatccctcgcattgtcgcgatgaacataaaaacacggtgttcccttatccaggatgaaacctaggaggagataaacatgtatgcactacatagttcttgcgaacacaaaagtgcaacatccccgaattcatgataaaacgtcagcctcaccggaccgtaggacgctaggaccgtgcgatcaggtctctagcaaggagtcgtatatgggcatattgttcagtttatttcctgagtcatttaactgggaattagccta

SEQ ID NO: 149211 - DNA, 723 bp, Zea Mays
acacggactggattttcattaccacttagccagcagcatggccaagctccacttccaaaccagcagttaccttctagtcatcaacatcccagggcccttagtagccagccaaatattcctggagttggtgggcctttatatccttccaagcatctgcctggtggatcattctctgctgagactaataacatgggttttatgaactcacctgctcaaatgcatcaaggtggagcaggtacaaactaccagcaaaagtcagttagtggtcatgcagttccaaatcatgttggtccatcaccaattcgacctccaatgggttctaatatgggtaatagtgatggacactttgaaagagatggccctcacacttatggaaggtctaacattcaccctgatttgcataaacctgatatcaataacattgaccgaggagagatcctccaatgtgggagcggtgcttgtcctcccgctgttgccctgatgccctctgttcgtcgaggaatcttcgggtcatggagtagcagagctcaagcacgagcagcgtcccgcagagctcgggcatctcattatagcgaagccgaagccaaggtcgaggcagccattgagctccttcgggtcgttctccgtgaggcacttcgtcctggcgctttgctggagatggtcatagggaaggggagcgacgaaggcgcgcacttccatgaacggcgcggaggcgaaccttag

SEQ ID NO: 149212 - DNA, 246 bp, Zea Mays
atggcaggacaaaaatcaggacctgaatttgcaactcaacataaaacacacaatctagtgctgactagtgatgttcgtcttcctctctctctggctttcttttttgcaagtgctcgatttaatgaagtgtacaggcaactggaagctctaggcgataataatactttattatgccttgcaaagaatggctttctcacttggtgtaaagtacatcctcccatgggtgacggtagagtggctgcttga

SEQ ID NO: 149213 - DNA, 703 bp, Zea Mays
ctgttgggccgaactgggcagcgtggaaaggctacgaagagcggagaggcgctccattgaagcggacggcgacgagctctgcatgctgcgctgcgcccttctcaccgccgccagcccgccagaacgtctcctccccgtctctagagtggctctttctttctccgtcaaatggctctcgcgtgcgcctctcacgcgtgccgctttctcctcgccggccaggcgagatctttccacgcccagccctaccatgccaaggtcggcgtggtggagttcctgaacggcgtcgggaaaggggtggaggcgcacgccgcgaagctggaggaggctgtgggcggcgacctccagaggctccttgaggcccgcacgctgcggctcaagaagctcggcatcccctgcaagcatagaaaattgattttgagttttgcacacaagtaccgtcttggtctctggaagccccaagcagaacccaggaaagtttaaagttggttcgttcttgaaagatagtctactgttggactgaggcatgtttgggacattgaatatttgctttgtaatttagaaacctcaaacctttgttctctgtctctagccatacttatttgcaaccattacgcaaaaaaaaaagattctagaaagattccaacttattgtgtgtgggtttgttccttttgtaataacaaatcataaggctttgttggtttca

SEQ ID NO: 149214 - DNA, 1499 bp, Zea Mays
acacattacatttgctcttgataataaggccacagaatcgcagtgtcgagtgccgtccgcctcgtgttcatggctgcctccggagcagctaatgacgccgccgctgctacggggctccgcctccgctacgatgtcatcgtcgtgggcgcgggcatcatgggaagctgcgcggcgcacgcggccgcgtcccgcggggcgcacaccctgctcctggagcgcttcgacctgctccaccagctcggctcctcgcacggcgactcccgcatcatccgcgacgcctatgtgaaggcacagtacccgcccatggtgcgcctcgcccgccgcctgtgggcggaggcggaggcggagtccgggtaccgcgtgctcacccctgccccgcacctctccatgggaccgcgcggcaacgccgcgctcctcgctgccgtcaagagcgctggcgcagaggaggtggatctaagccagatgtggggaggcgcgttccaggcaccggaagggtggttgaccgcggtgagtgagcacggcggcggcgtgctgaatgcgaccaagtcggtggccatgttccaggcgctcgccgtcaagatgggcgccgtggtcagggacaacgccgaggtcgtggacatcaggaaggagccggagggaggcgtcgtggtgaagacgagctccggcgaggagttccgcggcgccaagtgcgtcgtgacggtgggcgcctggacaagcaagctactgaggtccgtggccggcgtcgagatccccatccagccgctgcacacgctgaccctgtactggcgcatcaagcccggtcgcgagcgcggcctgatggccaaggctggcttcccgactttttccagctacggcgacacgcccgtttacggcacgccttcgcttgagctcccgggcctgatcaagatcagctgcgacggcgggccgccgtgcgacccggataaccgcgactgggcatccggcgacagagaaatcaccgagcgggtggctaggtggatccaggagttcatgccgggccacgtggactccgccggcgcgccagtcgtccggcagtcatgcatatgttccatgacgccagataaggatttcgtgatcgactggctgggtggggaattcggggaggacatggtggtcggggctgggttctctgggcacggcttcaagatggggccggcggtggggaggctcctagctgagatggccatcgacggcgaggcgaggactgcagtggaggccggcgtggaactcggtcacttcaagatcaacaggttcaacgttcaagatcaacaggttaaagggtaaattattatataaaaagtctcaaaaaaagtttattattgtaataacagtgggctcggatctcatctgccacttattctactggatctgttattagctatcgcgtgctcgacgcatcgaaataacataaatttattggatcgacatgtaacttgggaagctttttatatttgaacacgaatccatatacatgttttttt

SEQ ID NO: 149215 - DNA, 1495 bp, Zea Mays
caaacctgcccctgcgagactccggaggcgcgcctcttttattataaaacgcaagcggaaccatggagttaaacacaagtgcctgctcacaattagcagtgtacgtagttgacaccacacagctgcgccattaacatatagcaggcctagcagtgccgttctggaaagggcgggagaggggatgaggacgagaggtggcagcggattcgccggcctgcaggtggcgtgcgtcgtcgccgccctgtgcctgctcctgccgacggggagccgcgcccaactgcaggtggggttctacaacacctcctgccccaacgccgaggcgctcgtgcgtcaggtcgtcacggctgctttcgccaacaactccggcgtcgcacccgggctcatccgcctccatttccatgactgcttcgtcaggggttgcgatgcctccgtgctcctgtccgtgaaccccgccggcggcaaaacggagcgtgagtccccggccaacgacccgagcctgcgcggcttcgacgtgatcgacgccgccaaggccgccgtggagcggagctgcccacgcacggtgtcgtgcgccgacgtcctcgcgttcgcggcccgcgacagcgtcaccctgacgggcaacctcttctacgacgtgccagcggggcggcgggacggccgcgtgtccaacgagacggaggccaacgacaacctgctggggccggacagcacggcggagatcctcatcgacggcttcgggaagaagaacctgagcatcgaggacatggtggtcctgtccggctcccacaccatcggccgctcccactgcttctccttcctgtccaccaaccggcagcggctggccaacgggaccataagcccagcgtaccaggcgctgctggaggcgctgtgcccgcccaacccgggccagttcacccccaacaccacggagatcgacgtcagcacgcccaccgtgctggacaacaactactacaagctgctgccgctcaacctgggcctgcacttctccgacgaccagcttatccgcaacggcactctcgcgccgttcgccagcgcattcgccgccaacgagacgctctggaaggacaagttcgccgccgccatgatcaagatgggcaacatcgaggttaagaccggcaccaccgatgagatccgcctcaactgcagcgtcgtcaacccgtcgtcgtcgtcgtccaccgctggggtgatcgagatgctgttccctgcagccgacgaggttgccacgagctcatgactgatcgaaaaaatatatccactcgtgttaataacgcgcgtgcggagtacgtacatatcttcgcctttgtacgtacgtggacctcgattgtttgctgcgcgcacagtcgtactgaactgggtttggtttgtgggtgtggtgaaagcatgaataaaacttgcttacatcactaccgaaaatagcttctttgtcgagtgtctgaaccactcaacaaagtctgaaaaacatcgagtgtggcactcc

SEQ ID NO: 149216 - DNA, 1371 bp, Zea Mays
atgagcagacatgatgccaaagtgctgcaaaacttggtcctcaatcttgcatcctcagtggaaactggtgctttcaatattaggagctttttagaagaggctttccatcatttgggtgacgagcattaccttctgaatgctctacttgctattcgaaaggaggtagacctgatggagcaggatgcactggagagcaaagcaaggtctgacccagagaaggagaggatggaggaacaaattaaccttgctgaggctgcgaagccagtgcctagacattttactttcaccccccttcctcacctgaattgtatgaggccagtgacaatgactcctacgactcggacaggtccactagattttcccccccacccatgtggggatcctcagatgtggcaggcccaaggtttcgacccaacacaggcttctacatttactaatcctacatcccatatgaccaatcctacctggtcccagggacctcatgacccatcttcatatacctttcgtaatccatggaacccattttttttggtttccacccatgttcccaaccagactgaccctatcaattttgaatccgaagcagaacacagtgtccaggaagttaacagccctagcaaaccttcagatacacctgggacatttaggaggacaaaggaacagaacttcaaaccagatgaagacctgttgctttgcaaaacatggctagagattagtagtgacccagtcattagcacagggcagaggaaggagggtttatgggctagaattgagaaaaggtacaatgaacttagaggtgagtttccattgagacttaatagggctctcagcagcaggtgggacaaaataagagctaaaacaggcaaatttgctggattctacgcaagagtcctaagggaaaaccagagtggcctcacagataacgacaagacttcgaaagctgcaactctatatgccacatcacagaaaaagccttttcatttcatgcattgctggacgcggctcaaaaacgaacccaaatgggatgccatggttcatggaagcccctggagaggcaatgcggggacggagcctgttcgtattctaacacctataggttctgttaatgaagtcaaatttgaggaaggtggttcaaaaggtaagagaccattaggacgtgactcgacgaaagcatcaaggaaaaaggcaatatccagttcatcccagtctaatgagtacctgtgcagactccatgacattcaaatagcacgattgaagcaaagtgaagaaaaatcagacctaaaacaacagaacattgagttcatgaaggaagttgaactgaataagttggaggttcaatccaaggaaatagaagtgaaggaaaaaaattga

SEQ ID NO: 149217 - DNA, 804 bp, Zea Mays
acctttagcgttagcacagacacacacaggtaaggagagcgagaggtgggttgggtttgatcggagacagggacgaggcagagcatgggtagggggccatcaacagaattccaaatttgatttctgtttgctcgctcacaaaatggagggactcaccacaaacacactcaggcgttgttgctccctcccctgcactgcctcttccctggctcctcaccgtctcccatccacctatcctctctctttctctctctcgttatggttttgtataattttttttcctgcattcttttctcagtacaagtcctacactaatttggctgtctttgcaccagtactaataaacaccgcaggtccctgcaatagggtttacaacaattctattgtaatgactgctgtaaaacatccgcatcatttaattcaactttccggtttcagtcagccctgcaaaagtgctcctccgttcgtccgcgtttggtgttggcttctgcggctccggtgcccagagttgctgccggcggaggccgagcaggagcgcaactaacaagagcggccaaggcgccagtgatcctcaccatggacaggagatcgatggagatgagcgtgagcttccgatgcttcggtacccgaagaaaagaacgggaacaaaggcgagaaacatgatccacctctatgcttttttggcaacatatcctatgcttaaacagttatggtgttcaaatgtacacattaatagagcgtttggtttgaagaatcacaccatctaaattgaggtggtgcatcatgaatttattccttaaattt

SEQ ID NO: 149218 - DNA, 1207 bp, Zea Mays
agaaaagaaagaaaaaattaacagcgggcgggacaaagagcaatggccgggaaggagatgacgccgaactcgaaggcggcggcgccaccggcgacgatacgcctcgtgaacttcatctccgaagaccagcttgacgaggtgaagcggacacgaggggagcgtgtggaggacggcaccgcgcagcgcgacaaacccctcttccagatcctacaggagaacaaggagaagaaggacgccgagttcaatgagcgtttcaagcacagacctccaaaggctttggatgaggatgagacagagtttcttgataaattggctttgtcaagaaaggaatatgaacagcaggtggccaatgaagaagcagaacagctccgcggtttccatgaggctgtagctgcacggtccaccgttgttcatgaactcgagactcctacagtatctagacctgagctgaagctgaactatgctagcacctacccctgtttaggagagcagacctaagccacctacaaagaggagccagcctgcgctcctgaagaacataataatttccgtgaagccgcatgccaagaaaccaaaggttgagacggaagctaaacctgctcccgaggagcggcggccttcagataggcacggctcagatcagaagcaaccagacgacacaaaggcaacgcttggctctctagtggcttatgacgacgacgacgacgaaagtggtgaggacgttgactgacagtggcggcgtttgagaattcagctgtggataacccgcaagatgatggataactgcgttcgagtgttcaggtatggatatggataccgcaagaggttactgggagagatgctgcagccttttgggttttcctcgaggagaggcacttctattgcattctaaaaatcggaagcctttacagaaattttcttgtatgtattgtacaatttgaaaacgagccgggaacattactaatggttggtacgtacgttggtaccacgttgtttgacgaaggaactctgtagatagttgttgtagtttatctgatgagcgcattttgctttcacaaggacgtttagaaaactcgaacgcatcattctcgtctcagagtatgtttcgttggacagtctgtttggttgtgttgcgtggctatgtaaaaagctgcttggactgtgagttgtgaaaaaaatctgctataagctataaaaaaactaaaaa

SEQ ID NO: 149219 - DNA, 1047 bp, Zea Mays
agaaaagaaagaaaaaattaacagcgggcgggacaaagagcaatggccgggaaggagatgacgccgaactcgaaggcggcggcgccaccggcgacgatacgcctcgtgaacttcatctccgaagaccagcttgacgaggtgaagcggacacgaggggagcgtgtggaggacggcaccgcgcagcgcgacaaacccctcttccagatcctacaggagaacaaggagaagaaggacgccgagttcaatgagcgtttcaagcacagacctccaaaggctttggatgaggatgagacagagtttcttgataaattggctttgtcaagaaaggaatatgaacagcaggtggccaatgaagaagcagaacagctccgcggtttccatgaggctgtagctgcacggtccaccgttgttcatgaactcgagactcctacagtatctagacctgaggagagcagacctaagccacctacaaagaggagccagcctgcgctcctgaagaacataataatttccgtgaagccgcatgccaagaaaccaaaggttgagacggaagctaaacctgctcccgaggagcggcggccttcagataggcacggctcagatcagaagcaaccagacgacacaaaggcaacgcttggctctctagtggcttatgacgacgacgacgacgaaagtggtgaggacgttgactgacagtggcggcgtttgagaattcagctgtggataacccgcaagatgatggataactgcgttcgagtgttcaggtatggatatggataccgcaagaggttactgggagagatgctgcagccttttgggttttcctcgaggagaggcacttctattgcattctaaaaatcggaagcctttacagaaattttcttgtatgtattgtacaatttgaaaacgagccgggaacattactaatggttggtacgtacgttggtaccacgttgtttgacgaaggaactctgtagatagttgttgtagtttatctgatgagcgcattttgctttcacaaggacgtttagaaaactcgaacgcatc

SEQ ID NO: 149220 - DNA, 1041 bp, Zea Mays
agaaaagaaagaaaaaattaacagcgggcgggacaaagagcaatggccgggaaggagatgacgccgaactcgaaggcggcggcgccaccggcgacgatacgcctcgtgaacttcatctccgaagaccagcttgacgaggtgaagcggacacgaggggagcgtgtggaggacggcaccgcgcagcgcgacaaacccctcttccagatcctacaggagaacaaggagaagaaggacgccgagttcaatgagcgtttcaagcacagtatgttttgccacggatgccttgacaccatgttatgttgtgtttgttcactgacctccaaaggctttggatgaggatgagacagagtttcttgataaattggctttgtcaagaaaggaatatgaacagcaggtggccaatgaagaagcagaacagctccgcggtttccatgaggctgtagctgcacggtccaccgttgttcatgaactcgagactcctacagtatctagacctgaggagagcagacctaagccacctacaaagaggagccagcctgcgctcctgaagaacataataatttccgtgaagccgcatgccaagaaaccaaaggttgagacggaagctaaacctgctcccgaggagcggcggccttcagataggcacggctcagatcagaagcaaccagacgacacaaaggcaacgcttggctctctagtggcttatgacgacgacgacgacgaaagtggtgaggacgttgactgacagtggcggcgtttgagaattcagctgtggataacccgcaagatgatggataactgcgttcgagtgttcaggtatggatatggataccgcaagaggttactgggagagatgctgcagccttttgggttttcctcgaggagaggcacttctattgcattctaaaaatcggaagcctttacagaaattttcttgtatgtattgtacaatttgaaaacgagccgggaacattactaatggttggtacgtacgttggtaccacgttgtttgacgaaggaactctgtagatagttgttgta

SEQ ID NO: 149221 - DNA, 709 bp, Zea Mays
tttagctcaactctgcagtctagctacacacaatagagcgcagccgcggcgtgatatggttctatgatggttctttgctgttggctagatatatatgctgctagctactaggtgcgtcatccccttgctatgcgcgggttaagtatatatacacagtatataaaaagtatataaagtcttgctgctggcttgagctccttggatacacctatctgcttctgctagctttctttacagagacgacaggatagctagagccgagggagagatcagggtcgacgatagatgggggtgcatggggctgttgccaaacgaccctgcagcaggcagcatctcctcctcctcgtcgtcgctattctcataggtagctacttcgccgccgccgccgccgccgctgcggacgagcagaaaagcaggaatagaggagctggtcgtcgcagccgcaggaggcgggccgcggcggcagtgacgtcgccgcctgcgcccctcatggtgcccatcaccatcctcgagtccgccgtcgacttgggagccgtgtgcatggacggaacaccgcctgcttaccacctgcacccgggctccggagcagggaacaacagctggatcgtcaacctggaggtgatgagttactacctgcaattgttttaccaccccctgaatgcatgcaccagccggtgatcgatgcctgatgattaattgctcatcaact

SEQ ID NO: 149222 - DNA, 900 bp, Zea Mays
ttccatcaattgataatttatggtgctcgttgtcaacactggaaacctttaatgtaaactactcttttatgctgatctttaattactactagtctactactttggtgcagacggatccaaattggagtaattttctgtatgatgatgctacaaggaaattcaatctgatagattttggagcagcccgtgattttgcaaaacactttgtagatgattatctacgaatggtagttgcctgtgcaaatagagatcggaccggtgtcttagagatgtcccgcagactaggattccttactggggaggaaccagaagtcatgctggatgctcatgtccaagcagccttcattgttggtgtgccgttctcaaagccaggcggtcacgattttcgagcgaataatatcacgcatagtgtttccaatcttggggccaccatgttgaagcacaggctgaccccaccaccggatgaagtgtacagcctccatagaaagctgtcaggtgcattccttgcctgcatcaagattggggcagttgtaccctgcagagagatcctgttccaagtttacgagcaatataatttcagcgacggccattcagacgttgaatctagtgctggatagtagggtcaaagaaattcgttttcgatgtcttatgtaactgaaatactccctctgttttctatttatttatcgcgttttagtataactgacttgagctacaaatattcgagaacggacggaatccttgtcggctgcagttcatttttcggagaggttgccggtcaccttttattcttaattggcgtcaaaagaatgtaaaataccttattctggatttggatagtcaatagtggtggcgttatttgcacatgaaggaataaagacattagaacaaagttttttt

SEQ ID NO: 149223 - DNA, 971 bp, Zea Mays
cggaccacgcagctccgctctggttcctggtccaggggccttccacgccttccctttccatggcgtccagggatctccggcgcctgctcgacggtgtcgccctcgtcgcgcgcgaggccacgcggggtacctccctgcgtgatgtcctcaggtctgcgctccttgccaccaccgacctcgccggcctcaccagaggcaccccgcgccgtccgccgcaccctccaggcgcaggaccgctgcccgccaccgaatcctcccgcccctcctccgtcgtgtacttctcccacgatgaagccacggcgtcgccgcaagatcatgcactggagcgtccgccgccagcgcaagaggccccgcaccccgcgcggacgcaggagaccgtccgaactggtacaaccgcctccgttgcagccgaacctgctgccgtcgcggcggacaggcccgaacctgcggcacctcctcccgatccctcgcctttgccccaacaggcgccccctttggcctcagcggcgcctggggagaagaggaggcggctgcgggaacggaaggttccatccacgcccttcaccagagcactcgggtttgcaggactgggcgccgggttagcgtggggcactgttcaggagtcggcccgtcgggtaatgtatggcaccccggtggacacagagggcaagcgatcagcgctctccccattcttgtctgatcagaatgccgagcgtgttgcacttgcgctctgcaggatgcggggagcagcgctcaaggtggggcagatgctgagcatccaggacgaatcccttgtacctccgccggtgttagcagctcttgatattgttcgtcaaggtgctgatgttatgccaaggaagcagctaaattcagtccttgatgccgagcttggtcctgactggtcctccaggttgaggagtttcgactatgaaccgctagctgcagctagcattggccaggttggttcagca

SEQ ID NO: 149224 - DNA, 875 bp, Zea Mays
cggaccacgcagctccgctctggttcctggtccaggggccttccacgccttccctttccatggcgtccagggatctccggcgcctgctcgacggtgtcgccctcgtcgcgcgcgaggccacgcggggtacctccctgcgtgatgtcctcaggtctgcgctccttgccaccaccgacctcgccggcctcaccagaggcaccccgcgccgtccgccgcaccctccaggcgcaggaccgctgcccgccaccgaatcctcccgcccctcctccgtcgtgtacttctcccacgatgaagccacggcgtcgccgcaagatcatgcactggagcgtccgccgccagcgcaagaggccccgcaccccgcgcggacgcaggagaccgtccgaactggtacaaccgcctccgttgcagccgaacctgctgccgtcgcggcggacaggcccgaacctgcggcacctcctcccgatccctcgcctttgccccaacaggcgccccctttggcctcagcggcgcctggggagaagaggaggcggctgcgggaacggaaggttccatccacgcccttcaccagagcactcgggtttgcaggactgggcgccgggttagcgtggggcactgttcaggagtcggcccgtcgggtaatgatgcggggagcagcgctcaaggtggggcagatgctgagcatccaggacgaatcccttgtacctccgccggtgttagcagctcttgatattgttcgtcaaggtgctgatgttatgccaaggaagcagctaaattcagtccttgatgccgagcttggtcctgactggtcctccaggttgaggagtttcgactatgaaccgctagctgcagctagcattggccaggttggttcagca

SEQ ID NO: 149225 - DNA, 113 bp, Zea Mays
ttcacataaaacatctcacacacaatcacataacaatatttaaatccatagtctcatcaattacatcacaaaagtctcatccatagtcataataagacacatctcagccagta

SEQ ID NO: 149226 - DNA, 1902 bp, Zea Mays
cgcccacacagctcccctccaataaaaacacccaccttgctgccgatttcgggggcgggagtgccaagtggtttctagagctgggtagagattggcggtttgccgatggggagaggcgacggggaaggagggatggcgacgcggggcggcgtggttgggtcgggggcaatgctggggctggacatgcacctcgccgcgcagcagatgcacccggccgccgccgcgttccagcaccagcaggaccaccaccacgatgggttccagctgcagcagccgcccccgccgccgtcgttctcgccctactccaacacgtcgtcgtccagggtcgtggtgagcgcggcgacggtggggcacgatgaagacacggtgggcaacggctgctgcgggaagggaggagtggtggtgcagcagcagcaacagcaacagatggcggcggcggggtgcccgtggacgaggatgaagtggaccgacgacatggtgcgcctgctcatcagcgtggtctacagcgttggggatgactgggagggcgcggcaatgcctggcggcgcggggggaggcaaggcgagcagggcgggctcgtcggggcacggccacggtcatgcggcggcggcgcagcagcagaagaagggcaagtggaagtcggtgtcgcacgccatgatggacaagggcttcgtggtgtcgccgcagcagtgcgaggacaagttcaacgacctcaacaagcgctacaagcgcgtggtcgacctgctcggccgcggccgcgcctgccgagtggtcgagaaccacgcgctgctcgacgccatcgacgagctcacgcccaaggccaaggacgaggcgcgcaagctactcagctccaagcacctcttcttccgcgagatgtgcgcctaccacaacagcggcgttgccgggggctcgcacctgccgccgcacgccggcggcggcgcggcgggcgacgccgcctgcctccaccacccgccgccggtgcccgtggccggcgcagcctcgtccgccgctcgccactaccaggcagccccgtccccgccgtgcatgaaggactcctccgccgacgtcgcggacgatgaagacgacagcgacgccgtgagcgacaacggcgaggaggacgaggacgactacgacgaggaggacgacggtcacatgtaccacagccacctcaccagtcgtcagcacagcggcggcggccgccggcgcggcaagcgcgagcatggcgaggatagcgccgcggccgaggacctcgaggacgaggcggccggcggtgggaaacgcgcgaggacgggggcggcacccgacccatcggcaatgctgcagcagttgaagagcgagctcgcggccgcggctgccgcggcgatggacccgcagcaggccaggtgctgggtgcgacgccgcgcggtggaggtggaggagcagcagatcctcctcgaatcccacgcgtacgacctggagcggcagcggctgaaatgggatcggttccgcgccaacaaagagcgcgacatggaacgcgcgcgcctgcagaatgaccgcctccggatccagagccgacgcttgctgctcatgctccggcacaaggaggtcgagctcgacatggccgaggccaactcttcctcggtcgaccaccaccccggcgcgtcgccgctcgcagcacaccagcagacaattgggtccagcccgtccaccgccggccacccaaattagatgccgtgcgtgcatttccattccattaacagtagcggtcagtagctgaaaagagaaaaagggcagtagtgctaaagtttcagggttttttattgtggtccgcgtcagtgtttcagtgtagcatgttcatattatgtgcggctgtgtccggtcagactacttcgtatagttttcttaactattcagtcaaaatac

SEQ ID NO: 149227 - DNA, 1262 bp, Zea Mays
cttcctctctgtaatttgtaacatatgcaaaatcacgtgtggaggatgtttggaagaagatgaatggtggctttcctaataagatgcccaaacctgcaatgacgaagctcagttcaacagcaacagaaaagaaaaataagccaacaaatgtcagtaaaatttgttttgaacttagcagcattgaggttgctttgtgaaatatctactggttggatttttgacagaattggatgactgttctaggcctctcaccaagtaaggcatgtaattccagtcaaggatcaaaaaatggtctaaaatggacacaacatgaaacgagagaggatgccaaaaaacttgcagcaaaggcccttgcagctgccaaaaatgccgctgctgtggcatctggacgagggaaagtggagatcactgaggtaagggactttgctgtcaaggacatcgaaatcaagaaattggttgatcctaattcgaaggaggcaatagagaaggccaaggcagctggtgccgccccatcagctgtcgatagcattctagagcaaatacggaagaagcagaagctgagcgtcctggacaagacgaagaaagactggggagagtacaaggaagaaaaccgaggcttggaggaagagctggacgcctacaagaagagctcgaaccagtacctcgacaagcaatcattcctgcagcgaactgattaccgcgagtttgagcgcgagcgggatgcccggctgtccatgatggccaaacggaggaccgatatgcgggaggacgatgtgaagggtccattgaccggaactgccttcgacccgcttcatttgccaactggtgttccagtgcctatgtgtttttgtggtaatccttgcaaggttgacaagtctgaggatcatgacacgtatcgacaaaagtattggatgtgtgctaactatgcatttgagccaatgattgttcagcgccggatgaatttaatgactcctccaccactctgtgattttgagcagtggattgacacagaaatctcacagaaagacaaaaagtggttggagaatcttaagaagtgggacgcggaggacaaagaaaggatagagaaaagacgagaggagcttgctgccgagcaacaatgggtagacgagcaggaaatgaggcgtgttgttgaatacagggagaaggagaagaagcttgagcgtgcacgtcgtgcaaaggacgcagtggaggagaaccctgatgcttttcgcaagggcaaatggcctcattgcatgcagtag

SEQ ID NO: 149228 - DNA, 1072 bp, Zea Mays
cccttttgtgttcccccggaggttggtttgggcctcgtaacttttgtgccccagttcgtttatcctctcctctctctttctctgtcttgctgcggcgacacctccgcttccgccggccgagtcccgagcggagccgaagcaacaaccgccggggaggcgagggattgattcggagatggcgtcaactagctctataggcgacgtgggagcctcagggtcaaaaggggttgcatgtaaaacatttcctgcttctgcaaataccagtagctcacaccaagagtctcataatgttgatgcaaaatcacgtgtggaggatgtttggaagaagatgaatggtggctttcctaataagatgcccaaacctgcaatgacgaagctcagttcaacagcaacagaaaagaaaaataagccaacaaataattggatgactgttctaggcctctcaccaagtaaggcatgtaattccagtcaaggatcaaaaaatggtctaaaatggacacaacatgaaacgagagaggatgccaaaaaacttgcagcaaaggcccttgcagctgccaaaaatgccgctgctgtggcatctggacgagggaaagtggagatcactgaggtaagggactttgctgtcaaggacatcgaaatcaagaaattggttgatcctaattcgaaggaggcaatagagaaggccaaggcagctggtgccgccccatcagctgtcgatagcattctagagcaaatacggaagaagcagaagctgagcgtcctggacaagacgaagaaagactggggagagtacaaggaagaaaaccgaggcttggaggaagagctggacgcctacaagaagagctcgaaccagtacctcgacaagcaatcattcctgcagcgaactgattaccgcgagtttgagcgcgagcgggatgcccggctgtccatgatggccaaacggaggaccgatatgcgggaggacgatgtgtaggactgaaatatatcccttcctgtggacattctttttcttttgagatagtggtaaacactaagggcctgttcggttcggtctcaattcatatggattgag

SEQ ID NO: 149229 - DNA, 2044 bp, Zea Mays
caagcatacgacgatacgagtcatcacatgctaaacaaaacgaatagcgacatgtatccgatcgattgcacacagtaattcgcaaattaattcaggggccgagaatggcatcataaaaacatagtacaagattaattcaaaaaccattcgaattcaacagtgcttgacaggacccataacaacatgatataattaaacccaaactacgcgtcgccaaaagagatacaggtgttctgttccaagaaactactaccattgcaacaaaacaaaacaaagcaaaaaggattatcacctagcaagacttcccattttccttcccgacagaaaggaggggcatcctacgcctgctggttgtagacgtaggtgaggccacacttaccgcagtagtggcggtcgaagtggttggccatgaagacccccgcgccgcactcggcgttggggcactccttgcggaggcgggtgaccttgccggtggcgtcgtcaaccttgtagaactggagcacggccagcttcaccttcttgtgcttgtgcttgatcttcttgggcttggtgtacgtcttcttcttgcgcttcttggcgcctcccctgaggcggagcaccaggtgcagcgtcgactccttctggatgttgtagtcggcgagggtgcggccatcctcgagctgtttgccggcgaagatgaggcgctgctggtccggcgggatgccctccttgtcctggatcttggccttcacgttgtcgatggtgtccgaggactccacctccagcgtgatggtcttccccgtcagggtcttcacgaagatctgcatcttggcaaccgcgcacttctccggcggcggccgccctaacctaaggtggcgctggttctcgcctgcggcggcgggatggggctgtgtgtgtatgggcggaggctagggttcaagaggggagagatgattcttttatagctcgggtcgggtgctctctcccactggatccaaaaggatttggatcggacggcacatatgggcctcctgtgatgagagttgggccgcatgcgcttcattttctaatcccttttgtgttcccccggaggttggtttgggcctcgtaacttttgtgccccagttcgtttatcctctcctctctctttctctgtcttgctgcggcgacacctccgcttccgccggccgagtcccgagcggagccgaagcaacaaccgccggggaggcgagggattgattcggagatggcgtcaactagctctataggcgacgtgggagcctcagatgcaaaatcacgtgtggaggatgtttggaagaagatgaatggtggctttcctaataagatgcccaaacctgcaatgacgaagctcagttcaacagcaacagaaaagaaaaataagccaacaaataattggatgactgttctaggcctctcaccaagtaaggcatgtaattccagtcaaggatcaaaaaatggtctaaaatggacacaacatgaaacgagagaggatgccaaaaaacttgcagcaaaggcccttgcagctgccaaaaatgccgctgctgtggcatctggacgagggaaagtggagatcactgaggtaagggactttgctgtcaaggacatcgaaatcaagaaattggttgatcctaattcgaaggaggcaatagagaaggccaaggcagctggtgccgccccatcagctgtcgatagcattctagagcaaatacggaagaagcagaagctgagcgtcctggacaagacgaagaaagactggggagagtacaaggaagaaaaccgaggcttggaggaagagctggacgcctacaagaagagctcgaaccagtacctcgacaagcaatcattcctgcagcgaactgattaccgcgagtttgagcgcgagcgggatgcccggctgtccatgatggccaaacggaggaccgatatgcgggaggacgatgtgtaggactgaaatatatcccttcctgtggacattctttttcttttgagatagtggtaaacactaagggcctgttcggttcggtctcaattcatatggattgag

SEQ ID NO: 149230 - DNA, 1687 bp, Zea Mays
caagcatacgacgatacgagtcatcacatgctaaacaaaacgaatagcgacatgtatccgatcgattgcacacagtaattcgcaaattaattcaggggccgagaatggcatcataaaaacatagtacaagattaattcaaaaaccattcgaattcaacagtgcttgacaggacccataacaacatgatataattaaacccaaactacgcgtcgccaaaagagatacaggtgttctgttccaagaaactactaccattgcaacaaaacaaaacaaagcaaaaaggattatcacctagcaagacttcccattttccttcccgacagaaaggaggggcatcctacgcctgctggttgtagacgtaggtgaggccacacttaccgcagtagtggcggtcgaagtggttggccatgaagacccccgcgccgcactcggcgttggggcactccttgcggaggcgggtgaccttgccggtggcgtcgtcaaccttgtagaactggagcacggccagcttcaccttcttgtgcttgtgcttgatcttcttgggcttggtgtacgtcttcttcttgcgcttcttggcgcctcccctgaggcggagcaccaggtgcagcgtcgactccttctggatgttgtagtcggcgagggtgcggccatcctcgagctgtttgccggcgaagatgaggcgctgctggtccggcgggatgccctccttgtcctggatcttggccttcacgttgtcgatggtgtccgaggactccacctccagcgtgatggtcttccccgtcagggtcttcacgaagatctgcatcttggcaaccgcgcacttctccggcggcggccgccctaacctaaggtggcgctggttctcgcctgcggcggcgggatggggctgtgtgtgtatgggcggaggctagggttcaagaggggagagatgattcttttatagctcgggtcgggtgctctctcccactggatccaaaaggatttggatcggacggcacatatgggcctcctgtgatgagagttgggccgcatgcgcttcattttctaatcccttttgtgttcccccggaggttggtttgggcctcgtaacttttgtgccccagttcgtttatcctctcctctctctttctctgtcttgctgcggcgacacctccgcttccgccggccgagtcccgagcggagccgaagcaacaaccgccggggaggcgagggattgattcggagatggcgtcaactagctctataggcgacgtgggagcctcagttcctcgcaggtaaaaaaaatggaaagggagatgacaagttagttggtgcgctccttgtgggatttgcgcgtccaattccaccttgagtgcagggatcttcctctctgtaatttgtaacatgtatgtgtgtgctgggtatcgcagtcctgtacggctcctgataagattactgttcgttacttgctttcccttgtacagtggctgcattaggattagataatgcatatggtcaaaccttgccattagattgttaacagcgtacctacagtttgtcctaccatggatgtgaaagtactccttttcatgcttcagctccaccgctccgggacaaagaggattgttgataggacaagtctgcagttttacctcttcagatacgatgactaatttatgcaaggcgcttaattaggatgagataaca

SEQ ID NO: 149231 - DNA, 1815 bp, Zea Mays
aagcgcccgcggagagagatgatgctggcgatcctagcgaggcggcgtgccgcggaggccgtgctgcggcggccgcaggcggccttgtccgcctggagggcgtacgcggcggcgggcgaggagagcgatgtggtggtggtgggtggcgggcccggagggtacgtggcggcgatcaaggccgcgcagctggggctcaagaccacctgcatcgagaagaggggcaccctcggcgggacctgtctcaacgtcggatgcattccatccaaggctcttctgcattcatcacatatgtaccatgaagcaaagagttcttttgcacatcatggagtaaagttttcaaatctggaagtggacctcccagccatgatggctcagaaagacaaagctgtggcaggactaacaaaaggaattgaagggctctttaaaaagaacaaggtgacttatgttaaaggctttggaaaattgtcatccccctcagaagtgtcagttgacttgattgatggtggtagcactgttgtcaaaggcaaaaacataataattgcaactgggtctgatgtaaaatcacttccaggaataacaattgatgagaagaaagttgtttcatctactggtgcactgtgcttgtcagagatcccgaagaaactggtggtaattggagcaggttatattggccttgagatgggttcagtctggaaccgccttggttcagaggtcactgttgttgaatttgcgccagatatagtaccatcaatggatggcgaagtcaggaagcagttccaacgcatgctagaaaaacaaaagttcaagttcatgctcaagacaaaggttgttgggtgtgataccagtggagatggcgtaaagctgacacttgagcctgcagctggtggtgagcagaacatccttgaagcagatgttgtccttgtctctgctggcagaaccccatttacttctgggattgggcttgaaactcttggcgttgagacagataaagctggcaggatccttgttgataagcgcttcatgaccaatgtgaagggagtctatgcaattggggatgcgatccctggtcccatgcttgcccataaagctgaagaggatggtgtcgcttgcgtagagttcattgctggaaaggaaggccatgttgactatgacacagttcctggtgtggtttatacgcatccagaagttgcatctgttggcaagactgaggagcaggtgacggctctaggaattccctatcgtgtgggcaagtttccacttttggctaacagtcgtgcgaaggccattgatgatgctgaaggggtagttaaggtgatcgcggagaaggaaaccgataagattctaggtgtgcacataatggcacccaatgctggtgaaatcatccatgaagctgtcatcgccttgcagtatggagcatccagtgaggatgttgctcgaacatgccacgcacaccctaccgtgagcgaggccctcaaggaggcttgcttgcaaaccttcgataaagcaatccacatataatttctcattttctatttccttgccatccaaacttttggctcaacaagatccaaagtttatggtaattttgggcctgttggaacagaaggcctccagttgtccttttgttttgttggcaataatgtgaattctttgagttgcccacatcttatagtcgtttatgcttcattggcatggcatatccatccaaattccaaaataatgttctgatactatgttttactgtgtatgcccatgaaccattgatggatacatttcggacgttccagtatggccgtgttcgtgccttgatttctt

SEQ ID NO: 149232 - DNA, 848 bp, Zea Mays
ctcccagggtgacccgtatttttccagttttcaggagctagcttcttccaccttagctccatcgcttggattggagcccctttagcttccttgcttctgcctgcactgtccttgaaacagtcatctgatcagcctccgcaatagcccgtgccttaggaagttcctgagtgagaaagcaccatcaatggcataaagaagagtggaccctactcctttcctcccttagggtttcgatgcgttggtggtgcagcaccgacaggtcatggttcaagaagttgcaagaatgcatcctcccttgcacgaggactagggtatcatttccatccacccattaccgacaaatgaggtaatcttttagaatgttagagatatagtgagagaatttcttgttgaccacatgggtttgaacatcagagagattcaacgatcaccctaaggtcaggccttggttcggtacagaaacatcttcgatagggataatctgattgctttgagccctatgcaatatttggatacaatgttcattgttgttaggcataatcgagcctagaattggaggaatctgaattttgacagagaatgttggattatgttgcttggatttcctatggattatcacacttcagagaatttgcaaaatgctattgggtcttttggtagattggtctattcggaggatgacagagccaacatcactaggccgctcctcaaaacccgggttatcttgctagaggatattcctcagtttattttttagtgatgttgaaggcttcttaggatcgtcgtcgatgatacagtgtgaaatcatgcgtgtgaaatcatgcagtaagagttgcttggtgctcttc

SEQ ID NO: 149233 - DNA, 1593 bp, Zea Mays
gccttcttttcctcgtgcgcatattcgcttgcagcggcgccgacaccatttcataaacaccggaaacgcgcgcgaagtgaggagcagcaccaaacgcccctctgcttctcctctatttctccctcttgcggagccgcctcttgtgtgtaggggtgtgtcgagtctatggcggcggcggcggatacctcggaggcgtctgcggccgggatcgcgcttgcggaggccaatatcaactgggagaggttggacaagacgaggtttcatgtgattggagctatcctgtttacggcccagcaaggtgctctgcacccaacagctgttgtgaagactaggatgcaggttgctgaagggcggcttgcacgtatgtctgggtttactgtttttaggaggatattgagaagcgatggaatccctggtattttcagaggatttggcacctctgctgttggagctctacctgggcgagtgctagctctaacatcactggagatatctaaagaaatgacatttaagtattgtgaacattttgatatgtcagaggcgtcacgaattgctgtagcaaatggcgttgcaggcctgatgtcgagtatctgttcatgttcatattatgtgcctctggatgtgatttgccaaaggctcatggttcaaggagtgccagggatggcaacgtacaggggaccatttgatgtgataaataaggttgtcagaacacaggggatccaggggctttaccgaggttttggaatcactatgttgactcagtcgccagcttcagccctttggtggagtgcatatggtggtgctcaacatgctatttggaggagtttgggttatggaaatgactcatcaacaaaaccatctcaatcagaacttgttgctgtccaagcaacagcaggaacaattgctggtgcttgctcgtcgattatcaccactccaatagatacaatcaagactaggcttcaggttatggacaactatggtaatggtaggccttctgtcatgaaaactaccaggctgctgcttgatgaagatggctggagggggctttatagaggttttggacccaggtttcttaacatgtctctctggggcacatcaatgatcgtgacatatgagctcataaagaggctatctgtgaagtcggaatgacacgttttggcagattctcaactgagttgatttactgttcagtatcatctttatgaatacaggcaatcaagttagtttgcctcgctaaaagtataggccagtattatgatagggtaggatgcagaattatggtttagttacataataacatccttctgtaggactcgtgatgtatatatttgtgctaaagaccctcctttcaggatgttgtaggcttgtagccagcttctttaggatgcaacagatggaggccaagatacatgttgtgtctaatgaggcacattgtagctgtagctgtagctgttcatggtgcagcaaaattttggcagagttctgcgtccttttcgttcagtgaccagctctccagttgttgtcgtccaacttacatttttagaatctacagagattgtgttcgtcattgaggatgtgtctggtttgttcgtc

SEQ ID NO: 149234 - DNA, 324 bp, Zea Mays
atggtggggaagaagttcaacgaggccgtgtgcaagaatgagggcatcgccggtgacgtttggcagcatcgttcccaagcaacgtcaccagaatatgtgtcatcatatggtttgatcgggcagataacagagctgcacgatgagctccagtaccttcagcatgagaccgaaaatgtccttccacgtgagcaaggaagatgcaccgacgaactggaagaggtgctagaagcaaggatcagagtgcttgaagtgtgtgaaaaaatgattattcgcatgcatgctagtcgttggcgtaacatcacccagctgatggagagattttag

SEQ ID NO: 149235 - DNA, 104 bp, Zea Mays
gatattaaggtcaatgattgtccaacccggttttggaaggcaaaccaaatgcaaaccatatatgtgccaagatcagaaattcacgtacacaacgattacataat

SEQ ID NO: 149236 - DNA, 1566 bp, Zea Mays
ataatggcctgttctacagcagcgaggaggcatcgtcgtccactcttcaccatcctggtcgctctctccttgctgcaagtatccgcgatgatcgtacccctagacgagcaggaaggcgaccgggtgggtctcctcccggggcagccgaggagccctgccgtctcacagttctcggggtacgtcaccgtgaacgagcgcagcgggagggcgctcttctactggttctttgaggctcagacgtcgccggctgaaaagccgcttgtgctgtggctcaatggaggtcctggctgctcgtcggtgggctacggagcagcttcggagctggggcctctcttggtcaatagcaacgggaccggattggagttcaacaagtttgcgtggaataaagaggccaatctgctgttcctggaatcccccgttggtgttggcttctcgtacacaaatacttcctctgacctagaaaacctcgacgatcgcttcgtcgccaatgatacctacaccttcctagtgaactggttcaacaggtttccacagtacaggagccatgatttctacatatcaggagagagctatgcaggccattacgttccacagcttgcagaagtggtgtatgagcacaacaagcaccttgaagcgaagcagcgaatccatctgaagggatttattgccggcaacgcagagactgacgattactacgactacacggggatggtcgagttcgcctggagccacacagtcatctcagaccaactctacgagcgagtaaaaaccgcttgcgacttcaggctctcgcccacttccacggaatgcggccatgtaatggaccttctataccacacgtacgatgagattgacatctacaacgtgtacgcgcccaagtgcaacactgacgatggatcagcgccactgccgtcgtcgtcgtctagtgctgatgacagcagcgcatcgagcaagcagcagtccaagaggcggttgaggatgtactcggggtacgacccgtgctactccagctacgtcgagacctacttcaacaggatggatgttcagaaatcactccatgctaataccagtggacggatcagggacagaaggtggagcctctgcagcgacccagtttttgacatctacgacatggaggtcttctctgttcttccgatttactccaagcttgtcaaggctggactcaaaatttgggtctacagcggagatgtggacggcagggttccggttattggatcccgctactgggtagaggcacttggccttccaatcaagtcacagtggcaaccatggtatttaaaagatcaggttgctggaaggtatgttgagtacgaagggctgaccatggccactgtgagaggagcaggccatgcagttcctcaagataagccagcagaggcacttgtgctgatcaaagccttcctttcggggacacaacttccagcaaaaagtgggaagtgcagtattatgtttcagaaaggttcagcaagtgtttttccagagaagcatacctgttttgataagcttagagtagattggtaagatagaaagagaccaaaaattgta

SEQ ID NO: 149237 - DNA, 2004 bp, Zea Mays
gtggatagtggacacagagcgcgcacacatacccacagagatttgcactcttttcacttcatcgtgaacgggaagcgagcatacaatagactgaaacccaaataatggcctgttctacagcagcgaggaggcatcgtcgtccactcttcaccatcctggtcgctctctccttgctgcaagtatccgcgatgatcgtacccctagacgagcaggaaggcgaccgggtgggtctcctcccggggcagccgaggagccctgccgtctcacagttctcggggtacgtcaccgtgaacgagcgcagcgggagggcgctcttctactggttctttgaggctcagacgtcgccggctgaaaagccgcttgtgctgtggctcaatggaggtcctggctgctcgtcggtgggctacggagcagcttcggagctggggcctctcttggtcaatagcaacgggaccggattggagttcaacaagtttgcgtggaataaagaggccaatctgctgttcctggaatcccccgttggtgttggcttctcgtacacaaatacttcctctgacctagaaaacctcgacgatcgcttcgtcgccaatgatacctacaccttcctagtgaactggttcaacaggtttccacagtacaggagccatgatttctacatatcaggagagagctatgcaggccattacgttccacagcttgcagaagtggtgtatgagcacaacaagcaccttgaagcgaagcagcgaatccatctgaagggatttattgccggcaacgcagagactgacgattactacgactacacggggatggtcgagttcgcctggagccacacagtcatctcagaccaactctacgagcgagtaaaaaccgcttgcgacttcaggctctcgcccacttccacggaatgcggccatgtaatggaccttctataccacacgtacgatgagattgacatctacaacgtgtacgcgcccaagtgcaacactgacgatggatcagcgccactgccgtcgtcgtcgtctagtgctgatgacagcagcgcatcgagcaagcagcagtccaagaggcggttgaggatgtactcggggtacgacccgtgctactccagctacgtcgagacctacttcaacaggatggatgttcagaaatcactccatgctaataccagtggacggatcagggacagaaggtggagcctctgcagcgacccagtttttgacatctacgacatggaggtcttctctgttcttccgatttactccaagcttgtcaaggctggactcaaaatttgggtctacagcggagatgtggacggcagggttccggttattggatcccgctactgggtagaggcacttggccttccaatcaagtcacagtggcaaccatggtatttaaaagatcaggttgctggaaggtatgttgagtacgaagggctgaccatggccactgtgagaggagcaggccatgcagttcctcaagataagccagcagaggcacttgtgctgatcaaagccttcctttcggggacacaacttccagcaaaaaataactgagggcacctaccagagtgatatgtgatgaataagtaagagagaacaaataaccggtattgggattgatgtaaccaatatccagttgagtatggttctgtttgtaaccaagtaactcaatttatgcagcaactggaaatgaaatccttactaattacaaccctaaacaatcttgccatctgtgtgtgggaagctgtttgcccaattgccctgaaggaatgtttccataagtgcgaacccttctgaaggtttgttgaggggcaccaaatggccagcttctctgattagaatattgcacatggtactccacaaatcttcctgcaaccaacaacattgcacatgtcctccacattagtcgtacgacaatacaaaactgaaaatgctgctatcttcggaggacggagatcttgttccttcttttacatcttggaggctctgcttcaatgac

SEQ ID NO: 149238 - DNA, 647 bp, Zea Mays
agcccaacccaaccacccattccatccaacagatcgtgcgcggcctctcattctaccgagcgctccattctaccaccagccgcctccactcattctcccacacagaaaaccctagccgccgccaccgaagcggcctcccaggtaagcaggagcgcccatcccgccgcggccatgaagcgcaatccccgcatcacgagctcccaccggaagtgccgcaaggcgcacttcacggcctcgtcctccgtccgctgcgttctcatgtccgccgggctgtcgacggagctccatcccgatccgcaaggacgacgaggtgcaggtcgtgcgcggcacctacaagggccgtgaggggaaggtggtgcaggtgtaccaccgccgctgggtcatccacgtcgagcggatcacacgcgagaaggtgaacggctctatgcctggatgaacgatcatccaagagatcgactaggctcttcacggtcatctgatggttgtcgtaccgccttttcctcatctatttagtttttgctaccaatgattatgtgatagaggttttatgttatttgaaaactgctctgtgcctggatgagagttttggaacataatgtgaacctgtgtgtctgtgatctgagctttgaagatctgattatgtggtt

SEQ ID NO: 149239 - DNA, 1654 bp, Zea Mays
ttttatttttttattgatggatagcatttacaaaactctgggcacatttacttgatgaaaatgcaggaagcaacttctttccaggaactgcttttctcagatacttgtaaaagcttagttcatgtgttcttttctcagcgggcaacgtctaagattccaggtgctacagacttggggttgatgcctaggaaaataactaaagttgccattctaggtggtgggcttatgggttcaggaattgcaactgcgatggtattaagtaactatcctgtgctacttaaagaagtaaatgagaagttcctaactgctggaatcaacagaatccaagccaatttgcagagtcgagtaaagaaaggaaaaatgaccgaggagcgatatgagaaggctatgtctctcgttactggtgtccttgattatgaacgtttcaaagatgtagacctcgttatagaggcagttattgagaatgtgaagttgaagcagcaaatattttctgacttagagaagtactgtccttcacattgcatccttgctactaacacatctacaattgatcttaatctgattggggagaaaacaaaggctcaagatcgtattgctggtgcacacttctttagtcctgcgcatgtgatgccacttctggaaatagttcgtactcagcacacttcaccacaagttgttgttgacttgctggatgttgggaagaagattaaaaagacaccaatagtcgtcgggaactgtactggctttgcagttaataggatgttctttccatacactcaatcagcactcttttatgttgatcttggtatggatgtttataagattgatcgtgcttgtaccaaatttggaatgcctatgggtcctttcagactggcagatctggttggttttggtgtggctgtggccactggtatgcaataccttgaaaatttcccagagagggtctacaaatcaatgctacttcctctgatgatggagggcaatagggcaggtgaagccacccaaaaaggattttacaagtatgagggcaagaggaaagcgactcctgatcctgaaattatgaaatatattgaaaaatctaggagcatggcaggagttacaccagatcctgagctgatgaagctaagtgagaaagacatagtcgagatggtgtttttcccggtgataaatgaagcctgccgagtccttgatgagggtatcgccgtcaaggcttctgacctagacatcgcttcaatctttggcatggggttcccaccttataggggaggtgtcatgcactgggcagattccatcggcgcaaagtacatccatggaaagttggaggagtggacaaagcggtatgggggcttcttcaagccctgctcttacctcgctgaaagagctgcaaaagggattcctctgagtgcaccaacaaagaaagttcaggctcggctataagatgatttccttgtggatggaggagacaataatggattccggtgaagcatttggaatgcgtagagctgtaggctaccactatcacatgcatgtaacgcaatatactactgtgaaaataaagtgcactgcacggcggtttttttatatataaatacaaggatttttttcttgtcacctgtaaaaatttaaacagattttttgtggaatctcatgagaa

SEQ ID NO: 149240 - DNA, 2845 bp, Zea Mays
tttttttataccatcactagtgttatagaaaggattcggacatgtaaaaaaaatttatcctccaatgtcactagcacatagaattttctcttgttcctgttgaatacagtatgtatactacacgtcctcgagaattcgcggtaaaacacaagggcagatctgatccttcgacgcgctgatatttccgttttccgacaatatcctaatctacaaactcaaatttcgcagcagctgagccgagttccatgccttctcgggaaacaaagcagtagatggatgaggcacatcgcgtcagcggcaaccgcctgcggtacgcgccagaaataataattaggggatcctgataagtgttggcacaagtagcttgccagcacccaactccaagcaagccataactgcaagaaagcaacggcagcaagaaaccttgtaaacatcggagcatagatcgcggcggtgatggcggccaaggtgaggacggagctggacgtgggcgccgacggcgtggccgtaatcaccatctacaatccgcccgtcaactccctctccatcgacgtcttacatagcttaaaagaaagctatgaagaagcacttcggagaaacgatgttaaagctattgtcgttacagggaaaggagggaaattttctggaggatttgatattagttcctttggtggtgttcaaggaggccaaacaatgcaaccaaaggttggctacatagcaatagatattctcacagatactgtagaagctgcgacaaagccatcagtggcagcaattgatggtcttgctcttggtgggggtttagaagttgccatggcatgccatgcacggattgcaactccaacagctcaattaggtcttccagaacttcagttaggaattattccaggatttggaggaacacagcgactcccacgactggttggtctgacaaaatctttggaaatgatgctgttatctaagccaatcaagggcggtgaggcacaccaactgggtctggttgatgccttagtttctcctaatgatttggtgaatactgctcgtcaatgggctttggatatatatgaatgtaggaggccctggatcaaaagcctttataagactgacaagctagaacctcttggggaggctagggaaattctgaagtttgcaagagctcaagctcaaaagcaggcagctaatcttcatcacccacttgtttgtattgatgtcattgaagaaggtatagttgcaggaccacgggctggactctggaaggaagcaacttctttccaggaactgcttttctcagatacttgtaaaagcttagttcatgtgttcttttctcagcgggcaacgtctaagattccaggtgctacagacttggggttgatgcctaggaaaataactaaagttgccattctaggtggtgggcttatgggttcaggaattgcaactgcgatggtattaagtaactatcctgtgctacttaaagaagtaaatgagaagttcctaactgctggaatcaacagaatccaagccaatttgcagagtcgagtaaagaaaggaaaaatgaccgaggagcgatatgagaaggctatgtctctcgttactggtgtccttgattatgaacgtttcaaagatgtagacctcgttatagaggcagttattgagaatgtgaagttgaagcagcaaatattttctgacttagagaagtactgtccttcacattgcatccttgctactaacacatctacaattgatcttaatctgattggggagaaaacaaaggctcaagatcgtattgctggtgcacacttctttagtcctgcgcatgtgatgccacttctggaaatagttcgtactcagcacacttcaccacaagttgttgttgacttgctggatgttgggaagaagattaaaaagacaccaatagtcgtcgggaactgtactggctttgcagttaataggatgttctttccatacactcaatcagcactcttttatgttgatcttggtatggatgtttataagattgatcgtgcttgtaccaaatttggaatgcctatgggtcctttcagactggcagatctggttggttttggtgtggctgtggccactggtatgcaataccttgaaaatttcccagagagggtctacaaatcaatgctacttcctctgatgatggagggcaatagggcaggtgaagccacccaaaaaggattttacaagtatgagggcaagaggaaagcgactcctgatcctgaaattatgaaatatattgaaaaatctaggagcatggcaggagttacaccagatcctgagctgatgaagctaagtgagaaagacatagtcgagatggtgtttttcccggtgataaatgaagcctgccgagtccttgatgagggtatcgccgtcaaggcttctgacctagacatcgcttcaatctttggcatggggttcccaccttataggggaggtgtcatgcactgggcagattccatcggcgcaaagtacatccatggaaagttggaggagtggacaaagcggtatgggggcttcttcaagccctgctcttacctcgctgaaagagctgcaaaagggattcctctgagtgcaccaacaaagaaagttcaggctcggctataagatgatttccttgtggatggaggagacaataatggattccggtgaagcatttggaatgcgtagagctgtaggctaccactatcacatgcatgtaacgcaatatactactgtgaaaataaagtgcactgcacggcggtttttttatatataaatacaaggatttttttcttgtcacctgtaaaaatttaaacagattttttgtggaatctcatgagaa

SEQ ID NO: 149241 - DNA, 3097 bp, Zea Mays
tcctgtcgtgtttccttccaattccattctagcagttggccagaaggcaccacctttcccttcgcccgcaggcttttccgatccgcaaccagaccaaactccacaacatttcctcaagctgttccttcaagaaacctggatcaatccaaccttcaatcgcacagtccgtgggatctcccttgagttgcgatggaagaggggaccacggaacctggatcattctcccgctcttcctccttcgttggattcgaggagtgggtggcattggtgaggaaacgcaatgggaaggcctcttcgtgcgggcgtctgggtctccgttcaacagccagttcagaagtactagaacttgcagatcctgatagcaatgtcattaatcctgacccttgtgaccaagtgccagaaggaatcctttgggagaggcttgggagggtttccatgatggatattgagtcaagtgacttcagttggacctctctcacctcactgcaccatacaaaacatacggctacaagtactgatccatctgaggatgacattagcagaagttttgaggtgacagtaaattctgggggcattgtttttattgcattattcaaagctattgaaaatgttgatcttccgtccaaggaaacagctgcagtaattaaaatagcaccttcaaggatggccacacagtctgaacgctttgggtacgaactcgctaaatggcttggagtgagaactcctcaaggtagagtcattcatagctcctcagatgaatggcaacaagtcaaggatgcagttgaaaatgctcgaaatgcatcgatagcttctggtgatgaacttgaggagatgatttgcgccgaggttttagaagcccttgaattgagtcgttgcctatttctgatgaattatgtacatggctccgctctgctagagaatgtaatgcccttcgagtcacggcaagctgctgaaaaaactgctgaagcattaggtagggtcttaatcttggacctcgtattgaggaatgaggatagactgcgatgccgtccccttggctggcgtggaaattatgcaaatctacttgttgccaacagggaagcttatgccaaccttgactcactagatgatgtttatgattctgctatcattcgatacaagccagagatcattagaagccctcagaaacagaagcagagaagagctgtttcaattagtggcagtattggctcagatgtctctgacctcacattggaggactcttatgcttctagtggacatgtgttttctagctttaatattgtagccattgattcaggtgtaccacgcaggccaccagccagtaagcgggcaaaagatcaggagagctaccccaaactagtggagttaacattgaacaacttcgactattcttccaaacttctgtttgaggtgtccttcggaaaacttggcaccccaggacatgaagaatttgatgtaccatcagactacagttataattctcctctctctgagagtgatatggtagcaacagtgcattcattccgaggaggttttcgtagtgctctgagagaccttcagcgattccacatttttctcatcacactgtatcagaagctggatggtctattaaaaattttcttcaaccttatgtataaatgttccaatgaatatgctagggaggatgctggtacttcggattcaccattgtgttcagtggaaccacaaggagattcaaatgatactgatgttccaaggcatctgcgtaagccttcccgaaccttatcccgtgagagtctagaccaatcatctccttgtcgggatagctttatcaccagacatttcaaaggaaatggtgattcctcccgtggtcttcggttgacaatgaagctgcgagattttaacaagtatgccaagatagacagtgaattaagcaaagagatagaacaatggaatgacatgctgaggactgaagtagtaaagttgtgtcaagacaacaattttcaaacaggtttttttgaaggcactgataatagcactgttgttgatgcttacgagttgaaggttcgacttgagcacattctcgagaggatatctttgatctctgatgctgcaagtactgagcgtccatcacagatcacagattatctgtatattggtggtgctcttgctgctcggtcaacacacacacttaaacaccttggcatcacccatatattgtgcttgtgtgcaaatgaaattggacagtcagaatcgcagaagcctgacctttttgagtataggaatttctcgataaacgatgatgacaatgcagacattggtgatctctttcaagatggttctgatttcatcagttatgtggatcacttgcgtggcaaagtacttgtgcattgctttgagggaaaaagtcgaagtgcgactgttgttcttgcctacctgatgctgaggaaaaactgtactctcctggaagcatggaacatgctgaagaaggtgcaccgacgcgcgcatcccaatgatgggtttgctaagatcttgctggatcttgacaagaaactgcacgggaaaatctccatggaatggcaacacaagaggcctgcaatgaaagtgtgtcctatctgtggcaagaatgctggtctcagcagcagttcactcaagctccacttgcagaaggcacacaagaagatatcctctgggagcgtagacagtgcaatgactctggagatacaaaaagcattagaggcaatcaaagctggctggggcggcagtgacagcccagtgcataaatcacaatcacacatagaaggattttgacgtttaatcttacgttcctacggtcctattaatatatcaacaaggctggtagtcggcgaccgctttaagagtgaagcctcagctctagacttcatgacacttgtaagtagcacatttttggaacatttggtttttattctatagttcatgagcttggattgacaagaaccatccatagagggaatgtagtttctgttataaaattgtgcgattcttttttcatgaaacttgtacgagatgagcattcagattctttggctatcaaattttgaatctgttgtcctgtataatcagtttgttcaaatgg

SEQ ID NO: 149242 - DNA, 561 bp, Zea Mays
atggaaataaagatgcaggacctaagtaaaaaggagaaagaactgcaggcaaaggaagctgagctaaacaaacgggaaagtttaggtaattcaggatcccttccagcattgttgcctgaccaggtccgaaagctaaagcaactcagtgtgctaactctggtagagtcaactaagatactaccatatgatcagctcatgcaagagttggatgtttccaacgtaagagaactcgaagattttctaatcaatgagtgcatgtattcaggtattgtcagaggcaaactagatcagctgagaagatgctttgaagtacaatttgcagctggaagagatcttacacctgatcagctaaataacatgatagagatcttatctgactggtttatgggaggtatagatgaatctgcgttggatcgtctctcgctggtcacagatatgacaaagcacatacgtgtccgggcctcaggtggaaggtccactgcatccgaacttgggcagctgctagcgttcgcaacgagcataattatgaggccagctgaagtgcagccagataggaaatag

SEQ ID NO: 149243 - DNA, 1953 bp, Zea Mays
gattatattgttgcctcaagctgggtccgcccgtcttcttcttcctcctcagctaatttccattattccgttccaatttccaaccgcacccaggagcaagtctgggttcgcgccacagttggagtttcgacgggtctcggtcgggggtggtgccttcgtcgcggccgttcgacctacaccatggaatcgccgcagcagcaagccccaccgccgagccagggagctagctctggaagctgcgacgctcctctgcagctagcagctcgatatggtgccaccgtaccacgtacatcctcgccacctgcctcagtcactcggccgcaggaagtcaacaatagaatggagctaaagagcagcaacagtgagacactatgtgacagcttgacgctaaatacggtatccgtgatgctaaccgtcagcttcttcagagaagacggggacggtggtactgacgtgtttcttggcttctcatgcgtgctcggtttcatcattcgcaagtatctgtgggtgctgcgctccgagagcgcccggttcacgggtctggatatctacacgaacacggtcgttctagtggtcaccgcatatgcaatgctgctcgcgaacagtttgcagtacatcatccttgctcccttcccgatcagtgtggctgccttcatcgcttacctgtacaaggaaagactggagcaccatggcagtagtggagctgatcagcaggataataaggacggatgcaaacctggggacggcaatggcaagaaagccggggagctcgaaatggtggtagcgccgtactctatgctgctgatcagtgcaatagtgatgccgtacgaagatagccctgtcctcctgtctcacttcctgctcttctcatgttgcgcgctcgggacgctggcgctgctctactccagactggcggaagcaagtccggccttgagaccagcgttggagtgcatccagatggcctacatggtgacgctgttcataacggtgcacacggtggccgcagaatggctgggagacgtcatggcgctggtcaccatgccggagttgatcgcagggcttgtctggttctgtaatcttctccacggcgacactgcttgtaatactgcagcagtagcccacattctcagatcagatgaaggttccagcagtagttcggatgcaactcatcatcaagtcccaacaaattcggaaacaagacaagggttcgtcttcgatgggtccatgttcactcccctcggagctgttttggcagggttagtaacatccactttcgcacatgacgaagaactcctggccagctggaacaccaaggcgaccgtcgcctgcagcattgcagggtgtttgccatatctcagcatatggatggtgtcgaggtggcccgggcgcatacctagctcagacaaggcgactcggctgctcaagtttgctgcaaatgtgtgcttgactggagcttttctgatgctgtttgccttgcttgatgaaaaggcactggcctatcgtctctttggtttggatgagattattgatcctagtcaactcaaatatcttccggctgttcacttcagtacagcggtagccctgtatttctttcggaagcatcttgctggtgcgttggcaaatttaggggaggagctagggaatctcctatccctccttattgctgcttctccaacagagaagcaggggagaaagagaaggaggaagaagaagacaaaaagtatagatgtgagaagacgtcgataatgaagagcagctatagatgagcttcgttctaacatgagtccggcctctgttttaactgttttgttgctgagtgtaaaagcactccggctaagcgaccatgcaaaaaaggtgtaaaatcggacattgattgctctgagatggatggacgtttgtaaattgtaatccccgtccaattgtatgtttatggcattctttgtagatgttatg

SEQ ID NO: 149244 - DNA, 958 bp, Zea Mays
tatgaacaagacaacatgcaacatgtcttagagaggatagttatgttccaacgcttagctacaccactctattgaggcatataatgtatagtgcagtgcctagcaatgtgttgagacttacaatatgctttaaactcatcagccactgccataatggtctaactctgaatttgttgatctaatggccacactcctttttacatatttgctttgccttgatgtaacctccgtgatcgctccacgtgtcacctttgattcccgtttaaaatgctctccgagttctaaggtcaaacccatgaaacatcgctggctggtttttcgggttcaacccccgaaccgccgcagatagcatatccatacacatcccccacttcctagatatgtgtcatgtcggtcctcgaccacatctagcatatccatacacatcccccacttcctagatatgtgtcatgttggtcttcgaccacatcggcaacacgtctaatctatcatgtcatgacacctatcagtcttccttaggtatcagccaccatagctagtcaaccgacttctctgatccctcaatcaagttttagcgctcatccttcatcgccctcggcacgagccaatataatattttccttcgttgtcgaccactgccaatggactccatacctgcacaccagaaaccaagtgacatgttgtatacacttacaccctgattagtctacttaacccaagatgacactttgacgatatatcttttattcattttctttcttttatatatttattttagttttctacatttatttcccatgtattttttataataataaaatattctctaacaataattatagggttggtttcgacttttggtgtcctgacattagataagattgtggattgactccttgacgtgaatatcatgtgaatccagtactaaaaagacttcagaacaggtatcttcgataag

SEQ ID NO: 149245 - DNA, 992 bp, Zea Mays
cacacacatcccccttcccttcccttccccgcaactaccctctactctctactgcacgcttctactatctaagaaacaacgcacacgggccgaaactaaatttctccaagcgcgcaatcctgtcgccaaccccggccacggatcggggatgtcgtctgctgcgggccgcgcgccggcgccgacgccgatgggctccgccgatcgctgtaagatcgacgggatcgtggcggcggagaaagccaccaggagctgcgtcgaatgccgcgccaccaccacgcccatgtggcgcagcggcccgaccgggcccaggtcactttgcaacgcctgtgggatccggtaccgaaaaaagaggaggcaagagcttggcctagaccgcaagctgcagcaacaacaaaataatggcgaggcgaagacggatgaagcaaaagacagctctagcaacagcagcagcgggagcagcaacttgcaggtggtgcagaaacggaggctgctaatgggagtggaggaggctgctctgctgctgatgaccctatcttcttcgcccacatccacgttgcttcatggataaggaccctcctccaacgccagatcagcagtgtacatacaacgtaccccctgcacagtgactgccgaacgattgcaggcctatctcagggttgtgtgatcttgtgattggggcggattattagtgccaagctaatcactccgttgatcgtcttgtcttcctctgttttcgccgcacccgtagatcttgatgccagccagccatatatcttctacgtgatttgtggtaggctccataatcagaggtctgttgatcccattccccccgcacatcttttttctcttgtcttttctctttttggttttttgtatgtactttgatgttgccccatttgtgagggatgggtgatcaaagaggagacgccatcccttctcgttctggaataatggtccaaataataaaggatttgagctgttttgttttgttt

SEQ ID NO: 149246 - DNA, 429 bp, Zea Mays
atgggatccagccttcctgttcagtgccacaaccacggcgagcaggggagcagatcactgctgggagggagcagcttgggagagggtatggacttgcagaagagaaccaagtgtgtggcctctgaaaacgatatagctcttttagtcatggaagtagtcaagatcgaggtggacattgttgaagccatagagggaggcgctagtccaaaacatcaacagaggcacacgagtatacataatcaacagcttctctctgacaaccgcagcaagacaaagagacggtcagatggcaaaggtaggccatgctactcgaacacattgacaagcactcacatgtccatctacaacaccaacagcgtcatcctggaggtggcagcagtaggaacagactctaagactcaggctgagactgagagccaaccagagtaa

SEQ ID NO: 149247 - DNA, 1174 bp, Zea Mays
tactgatgaagatgcttacttgttttcatgttgcttctggcttgaaaacatctgcttaagcactgcatgtgcttataaatatggatattatgatatgatttttttttagcttggattgacctgtcatggaacatggaagcttgggtgtctgatagatacttttgcctatggtctccatttctgctacaccaggctgggagtctcattgtgcatgttgagcagtgcatgacccagtgcttttgtcttattggtcttctgtagtacataagaatttgaccaacatttagcagttcacatagcattgtatgtactaaactatgatttatcatttaacttttacatcatgcacttgcatgtttatattatgtgtccattgcaattttggtattaaatattctcccaatctttcaggagttggtaatatcttgtaaaattacatgtgctgtttgatgttttctgtacctgcaaaagtgcaaatagtcttggaatcacttgcaactgtggttgctttactcatgctggagaaaatatcacattcttcaatgttttcttttcccccagacacatccaacacagtcctgcttcctttcttccgttgacctccacaaccattattcttatcaggtcatgctgcctgaagcaattgcaatagttatggcacctactgacacaacaagaaaacatggtatatttcatctcacggatccaggtggtatgggcgtgatccatgattgtcaagagagaggtttccatcctcataaggcacctcttgatggttcgccaatctacaagcaatgctcccatgtgtacatggacaccgacataaagtttgatatgattgatctccgagaacgatgagagcctaacttttttgggtttattttggagcccatactgtagttaaatcaagttgctgcctttttcttagtcgtgctgaagatttgtggattcttatgtatgctgttgtacatagctattgtattgtatagagaaaacaattgagtgaatgatatcagtcattgctgctttgttgcgattcatcccatatcctcgcgaggcacgtttgtgtggcaagatgaagtgatgtctagattttataccatgccaattctccatacttgaatatttgacttgaagagcactaaatatcactgattgttaaagctctattatc

SEQ ID NO: 149248 - DNA, 776 bp, Zea Mays
ttccttttttattgctagttaaccacacatgccatgctgtaccctgtacctgagtttagtactgaatgacatgactttctttgtccagtgtgaagctacaaatgaagaagaactatttgaagttcaggacatgggctcactgttcactcttggttggattcatacacatccaacacagtcctgcttcctttcttccgttgacctccacaaccattattcttatcaggtcatgctgcctgaagcaattgcaatagttatggcacctactgacacaacaagaaaacatggtatatttcatctcacggatccaggtggtatgggcgtgatccatgattgtcaagagagaggtttccatcctcataaggcacctcttgatggttcgccaatctacaagcaatgctcccatgtgtacatggacaccgacataaagtttgatatgattgatctccgagaacgatgagagcctaacttttttgggtttattttggagcccatactgtagttaaatcaagttgctgcctttttcttagtcgtgctgaagatttgtggattcttatgtatgctgttgtacatagctattgtattgtatagagaaaacaattgagtgaatgatatcagtcattgctgctttgttgcgattcatcccatatcctcgcgaggcacgtttgtgtggcaagatgaagtgatgtctagattttataccatgccaattctccatacttgaatatttgacttgaagagcactaaatatcactgattgttaaagctctattatc

SEQ ID NO: 149249 - DNA, 1425 bp, Zea Mays
accaatgtaaaggcacctgaacatgtattggtcaagtcgactctattgaatagaattttgaaagaaagattcttgatcacccaagttaaaagagaaacttagccttgcctttcagattaaactagaggagacatgtatgaaaatggctggaaggactacaagatgcaattaatcatttacatatttggaaagtagtccatcctcatagctatgccattttgtttcctattgcttgacattatcagatgatttgcttctgcagtttagtgccatccatcttgaaccaagatgatccgcaaggtcccagtactgcacctccacctccagatagcccctccaatgacaatgacgatatgaaatctgttctctctcttgatgatggtcgatggtctgtatcagcagacgaacacacttcatttacttctgctaatttggaagaagagttgttacagttgaatatcaaacaaccttctcctccaccagttctggcagaggtacaaagaccaatttctccatcaagagttgctgatccaacaccaggacttccgacctcgggaactgcccgttttcagaacttgcatgttccgatcaagttgatggattgttttctaagggttgccgagtcaaacaccaaaagaagcttagaaacctgtggggttcttgctggtaccctgaaaaatagaactttttatgtgacaaccttaattatcccaaagcagaaatcgacatctgttacgtgtgaagctacaaatgaagaagaactatttgaagttcaggacatgggctcactgttcactcttggttggattcatacacatccaacacagtcctgcttcctttcttccgttgacctccacaaccattattcttatcaggtcatgctgcctgaagcaattgcaatagttatggcacctactgacacaacaagaaaacatggtatatttcatctcacggatccaggtggtatgggcgtgatccatgattgtcaagagagaggtttccatcctcataaggcacctcttgatggttcgccaatctacaagcaatgctcccatgtgtacatggacaccgacataaagtttgatatgattgatctccgagaacgatgagagcctaacttttttgggtttattttggagcccatactgtagttaaatcaagttgctgcctttttcttagtcgtgctgaagatttgtggattcttatgtatgctgttgtacatagctattgtattgtatagagaaaacaattgagtgaatgatatcagtcattgctgctttgttgcgattcatcccatatcctcgcgaggcacgtttgtgtggcaagatgaagtgatgtctagattttataccatgccaattctccatacttgaatatttgacttgaagagcactaaatatcactgattgttaaagctctattatc

SEQ ID NO: 149250 - DNA, 2126 bp, Zea Mays
tttttttttgagagaaacttaaggaccttcaaaataaataaataaaagattcttgacctttttaatccgtcaaacttaaatttaccgatccttgaagagcataagcgccgcatccgcccgcagtccaatgtgacgacatcacgagttcacgacatactgacattcggcaattccttccctccaaactaccgaagtctacttccattccttcctttctcctttcatatacccgcgtcgcccacgagcccgccgtgccgacagaggtgtggacctcgccggagcagaggctatggggccaccgcagccagccaggcccggcgtcatcaacatcgaggcctgcgcgcggccgatcgccgtcgaccaccgcatcagccttccctactacttccgcatcgcgggcagcctcctccgacaggctaatatatatcggaacgagagtaacttcctcgacctatatgtcatccttctgagatactcgagcttgctgtgtgaaacaattccgaggcatcgtgattaccatgccttcaagttaagagaaaaggcattttttgataaacttgttgatgttatcaaagaacttgagacattgaagccagttgtgcagcggcagattgccgatcataacagaggaggtactgtggaatctaatatgaatagtctaaatggagacaatggtacaactcataggatagagcagcatactccaagctcttatactccacagccatttgtaggtagcactaatggagcatcgcaaaaatccttccatgctgggagacaagtggcatcattactgagtgtccagaaacaatatatgaatctaccatatccaaaagaagaaacactagctagacactccatattaggacctaacggtcttaatggtcgatggaatgggcctgttactggaattaaggttcagtatccaagcaattttgaattaacacaaaacgatataacaagtttagtgccatccatcttgaaccaagatgatccgcaaggtcccagtactgcacctccacctccagatagcccctccaatgacaatgacgatatgaaatctgttctctctcttgatgatggtcgatggtctgtatcagcagacgaacacacttcatttacttctgctaatttggaagaagagttgttacagttgaatatcaaacaaccttctcctccaccagttctggcagaggtacaaagaccaatttctccatcaagagttgctgatccaacaccaggacttccgacctcgggaactgcccgttttcagaacttgcatgttccgatcaagttgatggattgttttctaagggttgccgagtcaaacaccaaaagaagcttagaaacctgtggggttcttgctggtaccctgaaaaatagaactttttatgtgacaaccttaattatcccaaagcagaaatcgacatctgttacgtgtgaagctacaaatgaagaagaactatttgaagttcaggacatgggctcactgttcactcttggttggattcatacacatccaacacagtcctgcttcctttcttccgttgacctccacaaccattattcttatcaggtcatgctgcctgaagcaattgcaatagttatggcacctactgacacaacaagaaaacatggtatatttcatctcacggatccaggtggtatgggcgtgatccatgattgtcaagagagaggtttccatcctcataaggcacctcttgatggttcgccaatctacaagcaatgctcccatgtgtacatggacaccgacataaagtttgatatgattgatctccgagaacgatgagagcctaacttttttgggtttattttggagcccatactgtagttaaatcaagttgctgcctttttcttagtcgtgctgaagatttgtggattcttatgtatgctgttgtacatagctattgtattgtatagagaaaacaattgagtgaatgatatcagtcattgctgctttgttgcgattcatcccatatcctcgcgaggcacgtttgtgtggcaagatgaagtgatgtctagattttataccatgccaattctccatacttgaatatttgacttgaagagcactaaatatcactgattgttaaagctctattatc

SEQ ID NO: 149251 - DNA, 1988 bp, Zea Mays
tttttttttgagagaaacttaaggaccttcaaaataaataaataaaagattcttgacctttttaatccgtcaaacttaaatttaccgatccttgaagagcataagcgccgcatccgcccgcagtccaatgtgacgacatcacgagttcacgacatactgacattcggcaattccttccctccaaactaccgaagtctacttccattccttcctttctcctttcatatacccgcgtcgcccacgagcccgccgtgccgacagaggtgtggacctcgccggagcagaggctatggggccaccgcagccagccaggcccggcgtcatcaacatcgaggcctgcgcgcggccgatcgccgtcgaccaccgcatcagccttccctactacttccgcatcgcgggcagcctcctccgacagaaacttgttgatgttatcaaagaacttgagacattgaagccagttgtgcagcggcagattgccgatcataacagaggaggtactgtggaatctaatatgaatagtctaaatggagacaatggtacaactcataggatagagcagcatactccaagctcttatactccacagccatttgtaggtagcactaatggagcatcgcaaaaatccttccatgctgggagacaagtggcatcattactgagtgtccagaaacaatatatgaatctaccatatccaaaagaagaaacactagctagacactccatattaggacctaacggtcttaatggtcgatggaatgggcctgttactggaattaaggttcagtatccaagcaattttgaattaacacaaaacgatataacaagtttagtgccatccatcttgaaccaagatgatccgcaaggtcccagtactgcacctccacctccagatagcccctccaatgacaatgacgatatgaaatctgttctctctcttgatgatggtcgatggtctgtatcagcagacgaacacacttcatttacttctgctaatttggaagaagagttgttacagttgaatatcaaacaaccttctcctccaccagttctggcagaggtacaaagaccaatttctccatcaagagttgctgatccaacaccaggacttccgacctcgggaactgcccgttttcagaacttgcatgttccgatcaagttgatggattgttttctaagggttgccgagtcaaacaccaaaagaagcttagaaacctgtggggttcttgctggtaccctgaaaaatagaactttttatgtgacaaccttaattatcccaaagcagaaatcgacatctgttacgtgtgaagctacaaatgaagaagaactatttgaagttcaggacatgggctcactgttcactcttggttggattcatacacatccaacacagtcctgcttcctttcttccgttgacctccacaaccattattcttatcaggtcatgctgcctgaagcaattgcaatagttatggcacctactgacacaacaagaaaacatggtatatttcatctcacggatccaggtggtatgggcgtgatccatgattgtcaagagagaggtttccatcctcataaggcacctcttgatggttcgccaatctacaagcaatgctcccatgtgtacatggacaccgacataaagtttgatatgattgatctccgagaacgatgagagcctaacttttttgggtttattttggagcccatactgtagttaaatcaagttgctgcctttttcttagtcgtgctgaagatttgtggattcttatgtatgctgttgtacatagctattgtattgtatagagaaaacaattgagtgaatgatatcagtcattgctgctttgttgcgattcatcccatatcctcgcgaggcacgtttgtgtggcaagatgaagtgatgtctagattttataccatgccaattctccatacttgaatatttgacttgaagagcactaaatatcactgattgttaaagctctattatc

SEQ ID NO: 149252 - DNA, 784 bp, Zea Mays
acgtgatatttcatgttacatgctgatgttaccattatttcctattgtctttgcacattatgctatccttattccttgcaccaaaatttgtgaagcaatgattagttgcggacagttgtggttcgttccctgtgttctatctttgttttgcttctctctataagctaattattttgcttatgcatctgcttttattccaccagaaactgcttttcatatatgtctgactgaattttctttttcatattgcaacaggttgatgctgtagtatacctggtagatgcgtatgataaggagcgatttgctgaatcaaaaaaggagctggacgctctcctgtcagatgattccttggcaaatgttccatttctcatccttggcaacaagattgatatcccgtatgctgcctctgaagaggagctgcggtatcacctaggccttagcaacttcacaaccgggaagggcaaggtcaaccttggcgactccaatgtccggccacttgaggttttcatgtgcagtgttgttcgcaagatgggctacggcgatggtttcaagtgggtctcccaatacatcaagtagggcccttgccggggcgcttgctcagcccagcgatttttttgccttgttatttgttctggttggtatttcgtcacgtgaacgatgatcatcatatcatgacagtatcatggaggggtatgaagaggaaaaaacagtgcttaacattggggaacatgttgaatctttagcgtgaaaacattttgttatgtcagtcaaactcctggaattc

SEQ ID NO: 149253 - DNA, 1141 bp, Zea Mays
atacgtgattcgtgatttagcatcgacacgatggttcaaagcaaaagggtctacatgcagcactcgctcgcttccctccgcctcgaatggtcacgccacccagaccctgcagcagcagttaatcgtcacgcccccatccttccccagcaaacacaacacaagcagacggggagagattcagatccactcgtcacacatccgcgttaccccctctcccttggtttcctctcccaccaccaacccccatcccggttatctccgccgccgcccgctttgggaaggcgcgacgaaggcaggcgagaggctccagccggacgaggaggaaagaggagcagcagggccggaggagagatgttcctgtgggactggttctacggggtgctggcctccctcggcctgtggcagaaggaggcgaagatcctcttcctcggcctcgacaacgccggcaagaccacgctgctccacatgctcaaggacgagcggttggtgcagcaccagccgacgcagcacccgacgtcggaggagctcagcatcggcaagatcaagttcaaggccttcgacctcggcggccaccagatcgcgcgccgcgtctggaaggattactacgcaaaggttgatgctgtagtatacctggtagatgcgtatgataaggagcgatttgctgaatcaaaaaaggagctggacgctctcctgtcagatgattccttggcaaatgttccatttctcatccttggcaacaagattgatatcccgtatgctgcctctgaagaggagctgcggtatcacctaggccttagcaacttcacaaccgggaagggcaaggtcaaccttggcgactccaatgtccggccacttgaggttttcatgtgcagtgttgttcgcaagatgggctacggcgatggtttcaagtgggtctcccaatacatcaagtagggcccttgccggggcgcttgctcagcccagcgatttttttgccttgttatttgttctggttggtatttcgtcacgtgaacgatgatcatcatatcatgacagtatcatggaggggtatgaagaggaaaaaacagtgcttaacattggggaacatgttgaatctttagcgtgaaaacattttgttatgtcagtcaaactcctggaattc

SEQ ID NO: 149254 - DNA, 790 bp, Zea Mays
atacgtgattcgtgatttagcatcgacacgatggttcaaagcaaaagggtctacatgcagcactcgctcgcttccctccgcctcgaatggtcacgccacccagaccctgcagcagcagttaatcgtcacgcccccatccttccccagcaaacacaacacaagcagacggggagagattcagatccactcgtcacacatccgcgttaccccctctcccttggtttcctctcccaccaccaacccccatcccggttatctccgccgccgcccgctttgggaaggcgcgacgaaggcaggcgagaggctccagccggacgaggaggaaagaggagcagcagggccggaggagagatgttcctgtgggactggttctacggggtgctggcctccctcggcctgtggcagaaggaggcgaagatcctcttcctcggcctcgacaacgccggcaagaccacgctgctccacatgctcaaggacgagcggttggtgcagcaccagccgacgcagcacccgacgtcggaggagctcagcatcggcaagatcaagttcaaggccttcgacctcggcggccaccagatcgcgcgccgcgtctggaaggattactacgcaaaggtcgagctcgattcatccgtccttataatacgtgccgtgtggtcagatctatgttcgtcccttgcgcccttgattaaaaacgtgtgtttcgaatttcgatctgtgctaaggttacaattttccttttcaatgacgttcaagggacgccagaaattgttgatttgacgagttcgaatct

SEQ ID NO: 149255 - DNA, 2204 bp, Zea Mays
tcatcccttttcttcaccgcttcgaatcctccgcccgtcgccaaaaaaccaccctcgttttcgtccaccctcgccgcttccgcccatttcacctcgtcttcttctgttacgcctcgccccccgccgcctctctcgctagcaccagaatccatctctactcgctgccaccatgcacctcacggtcatgtccctctcggcggcggttgccaacggcgccgctgcctacaggtacgacacgatccagccggttgcgaggctccgcttctgcggcctcaggcgcaaggcccaccggctccactcgccccggtactcgcggcacttggtggccgctaggcggagcgtggtggttgcggcgacggctggcaatggcgcggccgcgagcggcacgttcgactacgacctcgtgatcatcggagctggcgtcggcggccacggcgccgccctccatgcagtcgagaagggtttgaaaactgccataattgagggagacgtcgtgggtggaacttgtgtcaacagaggctgtgttccgtcaaaggctctccttgctgtaagtggtaggatgcgagaacttcaagatgaacatcacatgaaatcactgggcctacaggtctcatcaccaggatatgacaggcaggttgttgctgaccatgcaaataatcttgcatctaaaatccgcagcaacttgactaattcaatgaaagctctgggtgtggatatactcactggtattggcaccattgtggggaagcaaaaagtgagatatgggaaagttggtttcccagacaatgaaatcactgctagaaacatcataattgccactggatctgttccttttgtccccaagggcattgaaatagatggtaaaactgtatttactagtgatcatgcactaaaacttgagtcagtccctgaatggattgctattgttggaagtggttacattggacttgaattcagtgatgtatacacagctctaggaagtgaggttacttttgttgaagctcttgatcaattaatgcctgggtttgatcccgagattgcaaaattggcgcagaggattcttattagtcctcgtaaaattgactatcacactggtgtttttgcaagcaagattaccccagcaaaggatggtaagcctgttttgattgagctgattgatgctaaaacaaaagaacacaaggagacacttgaggtggatgcagcactcatagctactggaagggcacccttcaccaaaggacttggcttggaaaatatcaatgtcgttacacaacaaggttttgttcctgttgatgagcggatgcaagttatggatgcaactggcaatgtggttcctaatttatattgtatcggagatgccaatggtaagctcatgcttgctcatgcagccagcgcacaaggaatctcagttgtggagcaaatcagtgggagggacaacattttaaatcacctaagcatcccagctgcttgtttcactcaccctgagatcagtatggttggcttgacagagccacaggctagggagaaggctgacaaggaaggatttgaaataagtgttgtaaagaccagttttaaggctaacacaaaggccctggcagagaatgaaggagatggacttgctaagatgatttatcgccctgacaccggagaaattcttggagttcatattttgggcttgcatgctgctgatctcatccatgaggcatcaaatgccattgcccttggaacccatgtgcaggacatcaagtttgctgttcatgcacacccaacgttgtctgaagttctggatgaactcttcaaggctgccaaggttaacacagctggttcgcattctatgaatgagccagttgcggtgtagagaggagccatagttgaaacaatctatctgctgcagccccacaccccagttatattgcctttagtacttaactagcctgctactcagaaaactgattttgtagccatttgcggacattttcgttatgagattcaggattagtgccagcactatctatttcatgagaaaatagaaatccaatgatctgtcccatgtatggaaaaatgtaaattttgtagtccttgtagagtaaatgtagtgcctttacgtggcaaaactcgctcttatgaatctatgattacttcaattcataagatgggcttgtttggtcagcattatgaatttttacagcttaggtcagcagcta

SEQ ID NO: 149256 - DNA, 2050 bp, Zea Mays
tcatcccttttcttcaccgcttcgaatcctccgcccgtcgccaaaaaaccaccctcgttttcgtccaccctcgccgcttccgcccatttcacctcgtcttcttctgttacgcctcgccccccgccgcctctctcgctagcaccagaatccatctctactcgctgccaccatgcacctcacggtcatgtccctctcggcggcggttgccaacggcgccgctgcctacaggtacgacacgatccagccggttgcgaggctccgcttctgcggcctcaggcgcaaggcccaccggctccactcgccccggtactcgcggcacttggtggccgctaggcggagcgtggtggttgcggcgacggctggcaatggcgcggccgcgagcggcacgttcgactacgacctcgtgatcatcggagctggcgtcggcggccacggcgccgccctccatgcagtcgagaagggtttgaaaactgccataattgagggagacgtcgtgggtggaacttgtgtcaacagaggctgtgttccgtcaaaggctctccttgctgtaagtggtaggatgcgagaacttcaagatgaacatcacatgaaatcactgggcctacaggtctcatcaccaggatatgacaggcaggttgttgctgaccatgcaaataatcttgcatctaaaatccgcagcaacttgactaattcaatgaaagctctgggtgtggatatactcactggtattggcaccattgtggtaaaactgtatttactagtgatcatgcactaaaacttgagtcagtccctgaatggattgctattgttggaagtggttacattggacttgaattcagtgatgtatacacagctctaggaagtgaggttacttttgttgaagctcttgatcaattaatgcctgggtttgatcccgagattgcaaaattggcgcagaggattcttattagtcctcgtaaaattgactatcacactggtgtttttgcaagcaagattaccccagcaaaggatggtaagcctgttttgattgagctgattgatgctaaaacaaaagaacacaaggagacacttgaggtggatgcagcactcatagctactggaagggcacccttcaccaaaggacttggcttggaaaatatcaatgtcgttacacaacaaggttttgttcctgttgatgagcggatgcaagttatggatgcaactggcaatgtggttcctaatttatattgtatcggagatgccaatggtaagctcatgcttgctcatgcagccagcgcacaaggaatctcagttgtggagcaaatcagtgggagggacaacattttaaatcacctaagcatcccagctgcttgtttcactcaccctgagatcagtatggttggcttgacagagccacaggctagggagaaggctgacaaggaaggatttgaaataagtgttgtaaagaccagttttaaggctaacacaaaggccctggcagagaatgaaggagatggacttgctaagatgatttatcgccctgacaccggagaaattcttggagttcatattttgggcttgcatgctgctgatctcatccatgaggcatcaaatgccattgcccttggaacccatgtgcaggacatcaagtttgctgttcatgcacacccaacgttgtctgaagttctggatgaactcttcaaggctgccaaggttaacacagctggttcgcattctatgaatgagccagttgcggtgtagagaggagccatagttgaaacaatctatctgctgcagccccacaccccagttatattgcctttagtacttaactagcctgctactcagaaaactgattttgtagccatttgcggacattttcgttatgagattcaggattagtgccagcactatctatttcatgagaaaatagaaatccaatgatctgtcccatgtatggaaaaatgtaaattttgtagtccttgtagagtaaatgtagtgcctttacgtggcaaaactcgctcttatgaatctatgattacttcaattcataagatgggcttgtttggtc

SEQ ID NO: 149257 - DNA, 107 bp, Zea Mays
ataaaactatggagagaaggaagttcatttgttttctaaacctcttttcaaaaatgaatttctatagccacaagtctctactaaaatattccaacatatagatccac

SEQ ID NO: 149258 - DNA, 559 bp, Zea Mays
atccaatcttatgatgaccagttacttcatttagctgctgacttagctcagaggttgttgcccgcatttgacactcctacaggaggtctctgacaataactgtgtctatcggaacgaggtgcaccacactgctggggagcgaactgaggtcttgcaggatgtagcttctgatccaactcttcccagaaccaagactgtccgctgcaatctctgtgggcatggagaggctgttttcttccaggccgcaacaagaggggaggaggggatgaccctattctttgtgtgctgcagccctgattgtggtcatcggtggagggaatgatgcgatgaaatcttcgctctaatagttgtttcatcagagcatgaaacttaacttgttttgtagttttcttggaactatgtatttcgaatctgtcctaagattaatgagagaatgtctttccaatattttatttaattctacgtatataattgtagaaattgtttcgggctggctcggtttttgcacagacctggttttctctgcccatgtctggccaacttgaacaaaataccattt

SEQ ID NO: 149259 - DNA, 507 bp, Zea Mays
tggggtagagtgtgcaggctagttgagtttggaggtttgggcattttcagccttaaggagctaggatgggctctaagaatgagatggttgtggatggctacagtggagcctggtaaaccttgggcagggctccctatgcattttcctttaaaggtgaaatccttcttccatgctgccattcacacagaaattggcaatggatgttcgacatttttctgggaaaatagatggatacaggggcgaaatgtgatggacattgctcccagattgctggcagttgtgccaaggcgaattcaaaacagtagaactatccatacagctctagcaaatagaagttggctaaatgacatcaaaggagctctcacagtggaagtccttgctgattatctagatctttgggatgctattctcacagtaaacataaacccacatagggaggacaaacacaccttcagttttgctcataatggcaaatactctgccaaagtagcctacgagagtctcttc

SEQ ID NO: 149260 - DNA, 6308 bp, Zea Mays
aggggttggggacacatatttatagccctaggggctgcactaccacaccttctcacacacactacacaacaggattgtcctctagatgctaaagagactacagaggacagtcaaaaagcaggctgtcctctagatgctaaagcgactacagaggacagtcaaaaagcgactgctgtcctctagatgctaaagaggctacagaggacagtcaaaaagcgactgctgtcctctagatgctaaaggactacagaggacagtcaaaagcaggctgtcctctagatgctcaagacttattccatcaccagcgaccactccagtgaaccccctccggctgggagtttctctgacccccaggttggtcgtccgaagtcccagcgatggagtgacgctagcccggattcttctggagattcttgccgggcgccccattcctataaagaagccctgcttgccacccccacgtttccagtggttgcaactccggggacgacagagttacttgctggtgaggagaagacggaggctggctcacgatctaaggtccagagtcggctggggccccagcgtctaggcgaggacggttggcaggtggtgcagcgcagaagtaagtattgcggtgatcatcttcctcgtcgctggtcccaggtggaccttcggggaaaatgctataactgcttttcttccacacatcttgctgtgacctgtcgccggcctactagatgctttaagtgcttcaagcttggacaccaggccgttgtttgcccttccctcccagcagcagcgaagaagaactctgtgtggcagcggctgagtatccagagtgtgagggcttcggtgtggcaacgtttggcagtgcagcagaaccatccgcctctgttggccgcagactcccatagaagaagggcggtgtggaggaggatcactccgttggagcctgcgctgaaggaagacacttcaaggatgtttgctgttggcgactcccaaagaagcctacgcaacaagaagaaaagacgtcgctccaagcggggcaaaggatcgttggggactgatgctggtccaggtgctatgtccccggtttcctctgatactgctgacgcctccaggaaggtccaaaggtcgacgatgaggtctggaggacaaatggagatattcaagaagtccttgccttcttgtgtgttggaattcaccactgagatggcgcgtgaagaggtatttctccgccgtgccctgtacgtaacagttgttggaactaggccggaggtgcttggagttgaagtgttagaagaagttgcacataattttgaggtccatattgaagccatgcggattcatcaagtccagccagaggattttctcctgattttacctgatgaagaaacagcctcaagagtgcttaatgatggcaaggcttatagggggcctcatttcagtttgaagttcaaacgctggtcgaggtttactcatgcatcttcgaaggtcttgtctggcatggtggaggttgagattagaggaatcccagagcacgcttggtttcgttctacggcagaaaacatcttgagagactcctgctggatatcgaacgtgcatcctgatactttgcaaaagaaagattactcaacctttcgggttagtgcttggtgcttcgatcctggaagactacaacgtgatatggaccttctcatcgtcgagcctggattgcatgcgactgagaagagatgcctcacttacaagatcagtgtgagcgctaccctgtcagatctttccacggcggacctggggcctccaccgcccccacctccggcgtacgacaggaggcctgatggtgatggcggcggcggcgaggaccaggacccccagtctcgtcgttcgaacgggtccctgttccagaggcgaccggttcatcttcgcctgggcccgcagccgtcgtcgggttgcggggcgacatccttggcgcctcgggcggcggttcctgcgctgtccctgttcctgcggcgctcggtacatcttcgcctggaccctcagttgtcgttgggacgcggcgctgcatccctgacgcctcgggctgtgcttccaccgctgtcaatgacctcgggtagggaaacagcatatccggatagagatgcgcggccttctttgcgcattgaagagataccggttcccaaggagccccaggaagacggagagactaccgtgacagttatggggggacagatctcctcggggaagataaacagtccccgaattgattgcgacaggactgctggaacgtcgtctgggttaattgggccgcctgagatggcctggaatgactcggtctcgccgcttcggacaactgggccgcttgagacatggctcccaaggcctgtctcgccccagccttgcccgacgctagagatgaggcttccagcgctggtctcgccccactgcctacctgggctcctgaacacgacgatgactggggatgtctcgccccacattcgagatgggaagcttgagatcgtgtcttctgggcatgtctcgccccgacctcgagttgggccgccagagatgaccccagacgatgttttgtcgtttgaagatactgggacattgaagatggccttgcctgcgcctgtctcacctcagcatccgcctgggtcgcttgagacagctgcttccttgcagacagagccaactagtaagctgaaggtctattaccgcaaaggatcgaaagcacgtcaacgtcaatttcacgacggccaacaagatggaacaggaagggagttactggcattggagaatgggcttacaactgatccaagacctgataccctcacagccctgggtgctccgctggttgcgacaagaaaagaagagttcctcaacaaaatttgtagaagacctgacgcttgtttgctgttaccaaataaaaacagcaagaaagcaactcctccctctccaacaacaactgctgctgcgccaagacgaagccggcgagtcgctggagctggagtggaattcagcatgcaagactggggtggcagggccaccaaaaaagctatgaaagccctgcagataattactgaagatgaaggcatcagtcaggaatccctcaaggcttatgcagagcttttcaagcacccactttctcagctccaggtggaggccttgtccgctcttttcgggtggcccacgccaccagcagggcctgtatgaaacctagtttcctccccctgttctttgtggttgtgttatgtagacagtgatccatgaatccaaacaaaattttatcctggaatgtgagaggaatgaactcttcagtgcggcaagactcagtcagagagcttgtggtctcatctcaagtggatgtggtttgtgtccaggaaactaaaatgcagaacatttcaacaagaactatcctctccatgcttggagctgagttcactgattatgtctacctgccatcaacaggggcaagtggtggcatcttgatcacttggaaaagacatataggtcatactgggcagcaaagaatcgacaatcacagtgtttcagtccagttgcgcatggagcaagggcaggcttggtggcttacctgtgtgtacggccctcagggagatgatgaaaaaattctttttcttcaggaactcagagatgtcagaacagcctgtgctggcccttggttggtggctggggattttaatctcatctataaaacatcagataagaataactccaactttaatagagccatgatgggtcgtttcagggatttgatcaatgacctgggcctcaaggagattccgctggtaggacgcaaattcacttggtctaaccaacaagataactcggtccttgttaagcttgatagagtgttttgtactgtggattgggagctaaccttccccagagttcttcttcatagtgttgcgtcacttgattcggatcactgccctctgctcctgggtctcagtgacaataggcctggaaaacggcggttccatttcgaatccttttggcccaagcttgaaggttttcaggaggaagtgcattctgcatggaactcagtcgaagctgtcagatgccctttccagaccctggagaagaagctaaagatgacagcaagaagactgcaagggtggagtgacaagcaggttgggcatgtaaggttgcagttggctttggctaaggagttgctgcatagactggagatggcacatgatgaaagaccacttaccccagcagagatctggcttataaacaggctcaaaaaacaatccttgatgctgtcatctttcaagcgaacaatggcaagattaaggtcaagaatttcatggctcaaagagggggatgcgaacacaagatttttccatattcatgcaaggcatcgtaagaggaagaattttgtggccatgctggttgatggagatcgtatcctaaccaaccactgcgaaaaggcagcagcagtggatcagttttatacaaacctcattgggcagtgtggaaacagggaaaggactattgatttggacgccattggtctgtctagacataatctggagaatctagactcccctttttcagaacaggaggttttggaaaccattaaaggcttgcctttggataaggccccagggccggatggattcacagggcgattctatagagaatgctggggaagtattaaagcagaggttatggctgcagtaagggcagtttggagcaggaatttcaacaatttccacaagctcaacacggcttttattaccttgataccgaaaaaagagggggcagagcaggtcaaagactttaggcctattagtcttgtgcacagttttgcaaaactgatcaccaagattctcgctaaccggctggccaaaaggctcaatgagttggtctctccaattcagagcgcatttataaagggaaggttcatccaagataatttcatgttggtacaacaaactgcaaggctgtttcaccagcagaaattgcctcgcctgctcctgaaacttgatatcactaaggcctttgactcagtggcctggccattcctaattgaagtcatgcagcagattggttttggtcagatctggagggatattgtttgtgggttattggcctcctccactacacaagtgctgctcaatggttccctgggggaacgtttagcccataggagggggctcaggcagggagaccccctctcccccatgctattcatccttgttatggatgttcttggcctcttattcgctaaagctgaagaagcaggtttgctacagcagttatccagaagaaagaagctccacaggttttctatttatgcagatgatgtggctgtgtttttacatcccactgctgcagaaacttctatcactctagacattctgcaactttttggagatgcttctggcctcattaataatgtgcagaaatcaaatgcatatcctattcaatgctcggaggagattttgatggatgttcagagtttgctgccttgtgagatggcaaccttcccctgcaaatatttggggctacccctttccttgcataaactttctcggcagcagttccagccctttgttgaaagaattgcagatcaactccctaattggaaagctgacttaatgtctagagcaggaaggagaattcaggtgcaacatgttctcacaggcatgacagtttatttagcaatggcaattgacatcccccaatggaccttagatgccattgataagataagaaagggttttctttggagaggcacaaaggaagcaaagggaggacactgtttggttgcctggggaaaggtgtgtcgtccccttcaattgggaggcttgggaatctctagtctccctgagctttgttgggctctccgcatgagatggctgtggttgcagaaaacagatatggggaggccttgggcaaatcttccaatacaggtccctaacaaagctagggcttttttctctatggctcttgtttctatgattggggatgggtcaaacaccttgttctggaatgatagatggctgcatggcactcgaatcgctgatattgcccctagcctgcacaagtcaattccaagaagaattgctaacaaaaggacggtgaaagaagctcttgtaaacaggaaatggatttcagatattaagggggctcttacagtaagagtcttggttgattatctaaacctttgggaatccctttcaggaattgagttacagccaaacattagggataagcatgttttcagccttgctgcagatggtaaatacacagcgaaagcagcttataatggtctgtttttaggatctgcctccttt

SEQ ID NO: 149261 - DNA, 2498 bp, Zea Mays
ggcgaccagaccatgggctccgcagcggcggcggacgtggtcatcccggcgtgcgcggcggtgggcatcgccttcgcgctgtggcaatggttcctcgtctccagggtgaagatgtccgcctacgcggcgcccggcaacggcggccaccacgggggccccgtcttccggatggaggacgacgaggaggacgtcggcatgggcggtgccggcgaccgcgacgaggaggaggaggagaccgccggcgacggcactgtcgccgtggcgcgctgcgcggagatccagagcgccatttcggttggcgccaactcattccttttcacacaatacaagtatctcgccgcgttcacggtagtcttcgccgtggtgatcttcctcttcctgggctccgttcaccggttcagcactgacagccggccgtgccagtacaccagtggtcgcacctgtaaaccagcgctggcaaacgcggtgttcagctctgtggccttcctcctcggcgccgccacctctgtggtgtccgggtacctcggcatgcggatcgccacctacgcgaacggcaggaccaccctggaagctcggcgtggcgtgggcgcggccttcgccacggcgttccggtctggcgccgtgatgggcttcctcttggcctccctgggcctcctcgtactctacatcaccatcaaggtgttcgggctctactacggcgacgactgggagagcctgtacgagtcgatcaccgggtacggcctcggcgggtcgtcgatggcgctgttcgggcgcgtcggcggcggcatctacaccaaggcggcagacgtgggcgcggacctcgtcgggaaggtggagcgcaacatccccgaggacgacccgaggaaccccgcggtgatcgcggacaacgtgggcgacaacgtgggcgacatcgccgggatggggtctgacctgttcggctcctacgccgagtccacctgtgcggcgctgttcgtcgcgtccatctcctcgttcggcgccgaccacaacttcgcggcggtggcctatccgctgctcatcagctccgcggggctccttgtctgcctggtcaccacgctcttcgccacggacctgttcaaggtgaagaccgtccgtggcgtggcgcccgcgctgaagctgcagctcatcatctccaccgtgctgatgaccgtcgccgcgcttgtcgtgtccttggcggcgctccccgccaaattcaccatgttcgatttcggagaagcgaagcaagtgaagaactggcacctgttcttatgcgtggccattgggctttgggctggtctcgccatcggcttcaccaccgagtacttcaccagcaacgcctacagcccggtccgggacgtcgctgactcatgcaggacgggcgctgcgaccaacgtcatcttcggcctcgccctcgggtacaagtccgtcatcgtgcccgtcttcgccatcgccgtgtccatctacgtcggcttcacgctggcatccatctacggcatcgcggtcgccgcgctcgggatgctgagcacggtcgccacggggctggccatcgacgcctacggccccatcagcgacaacgccggcgggatcgctgagatggcaggcatgagccgcaggatccggcaaagaaccgacgcgctcgacgccgccggcaacaccacggccgccattggcaagggattcgccatcggatcggctgcgctggtgtcgctggcgctgttcggcgcgttcgtgagccgcgcgggggtcgaggacgtgaacgtgctcaacccgaaggtgttcgtcggccttctcgtgggggcgatgctcccgtactggttctcggcgatgacgatgaagagcgtgggcagcgcagcactgaagatggtggaggaggtgcgccggcagttcatcaccatccctgggctcatggagggccgcgccgcgccggactacgcgcgctgcgtcaggatctccacggacgcgtcgctcaaggagatgatgccgccaggagcgctggtgctgctcgcgccgctggtcgccggcaccttcttcggagtcagcacgctcgcgggactactcgccggcgcactggtttccggtgtccaggtatatgtggcaacgaattgccgtgccgtgattgccatatctgcttcgaacagtggtggagcatgggacaatgccaagaaatatatagaggcaggtgcgtctgatcacgccaagtctctgggccccaaggggtcggacgctcacaaggctgccgtgatcggcgacaccatcggcgaccctctcaaggacacctccggaccgtccctcaacatcctgatcaagctcatggccgtcgagtctctagtatttgcgccattcttcgccgcccatggaggcctgatattcaagtagacagggcggaggattattgtacaacgtgattctgtagtaaaggcgcactggttgaacaaatgattctgcatcgtagattgagtagccatgacctgtgtattgttttcacatctcatgaatctgtt

SEQ ID NO: 149262 - DNA, 807 bp, Zea Mays
cttacattgtccactgcgctagctagctcgcatctacctggaaagctgaaagctagccagagcgctagctagcttcgttcctcgtcgccgcgcgccggccagatgactgctcaccagacttgctgcgatgatgccgttgccgccggcactgcaccggctgccaggaggaggcgcctcaaattgacgaggccgtcggcctcgctcttgatggcgaggaagctaaggaagaaggctgccggcagcaaacgcccaagggcggcagcgtcgaggaagcgcgcgatggcgatcaggaggaagatggaagcgctgaggctgctcgtgccactctgcggccgagacaacggctcggtgaccggtggggcggtcgaacgactggacgagctcctcatgcacgccgccgggtacatcctgcgcctccagatgcaggtcagagtgatgcagcttatggtccatgcactaaatgaccggcccgaggattaatcttcttcccaagaccatgtgatcttccttctttaatttcttcttcatcttcttcgcgtgcctgtgttgcacgaggcagctgtgcgtcggtgtctgggtgcaaatcattggctgagtgtgttattggtgatattatttgttcgtatatacagaatatatactcatgcatgcatactgtatgagatgatagagtaaatctagacatatatagttcaaggaaacctacagccaacagttgtatgcatgtgaggggggttccttgtctgtatgtacgcaattgtctattgtgtgacggttgaaattgaaatttcgtcaatcatcatttct

SEQ ID NO: 149263 - DNA, 1931 bp, Zea Mays
acaaattcttgtagctttatactgctaggaagtgattacttcataagtagcaacacattagtatttgtagcaagttagtgaaggctgtgcaggcacacctaggtgatctaagtttagtctttgtcatagcatgtctagtttttctgtaagtccgtaatataaagcttcctttctcctgagttggtttatttattttaaaagtagttatgaattgtttattatattagaagatacagatttccatttgttgctttgacacaacactactcatattgatttgaacttcaaggttgactgacaaattattggactgtgggaaccatacaaatgacatgaaatgtctcttcaatcctttagctcactgttggctatcttttaaaaattctgaaaaataatgtacaaacctaatttaaatggagtaaaatgtttgttgagttttgagtacagttgcacatgtatatcaacttcgtccaaattatgcctcacattgattgtcatcccttttttggttgcatttaggggctttggagttcaatttacctcgctgtttaggtatattgaaattggatgatgactaacagggtagatgattgtttggagctgcagaacctcagtcatttttccttaccaattcagaaatagcgaatctttaaatcaacagaggattttcctaccaatatagagaaaccagatccataaagaatatggtatcctctttttatacttgttttgtatcatatttgtagtactttttatataactttggccaaacttaaatcgtttgactcctcgaaaagtgacaatcgctcttttttgtggatggagagagtaataattgataacttgttgtatataaattttaaaattcaagttccaaactagggcaagtgtatggtgaacatttttttcattacttatgttttaataatttgtgcattttttatccatgtatagcagtaaaagttatgttgccattgccaagcttgaggcatttaatttaccttctgtttctgccctatgggcttatgactttccacaatactgccacacatagtcttttatactgtcttgcactgtctttttctgcaccactaaaatagttccaccagccatgtgaagccttagaaggctaatccagacagttagtcataggtttttgcaaatttgtttgggggaaacagacaaccatatctctatactgcaagctttgctaatttagacagctttgatccatttctttactatatgtgtatggctactttgtgtagcttactggttagtgttactgtctgtgtgtggctactttgtacagcttactggccagtgtcctatggtctattagagctgaaataacttcttgcaatcactggttgaatcttggttgttacggtagtaactaaggccactttggatgagtcatttacctgaaccctttatgtgtaactaatttaagtcatccgaatatgtcaattggcctataacagtgaaatatgttataagttgttctttagaattactcccattactgttttgtggtttcccttcaactcaactcattttgcaattattgtacaatgctatcaattcatctgcagcttttgcataagcatacctccataagctttgtgagctgtgttcatgtccaaaaggactcgcaaagagaacagggactacaagttggtattgtcattcggtgaaaatatggtcattgcacaaaagcgtcccatctgcgcacataattttcaactgtgatcatggcacaaaaagaaaatgttcaagcctgtgcacatttattcatgttggaagtgtgatgatcagctcatttgttacaaataagatgaagtttaaccatttagttctgcaattcatcgcctttgtagtggcaagaattgttgatttatctttaaatcaggattgttgattttcatcta

SEQ ID NO: 149264 - DNA, 3694 bp, Zea Mays
tttcatccgcgccgtcgacgaccttcggtccctcctggccgacgccgatgcgctcaagggctccctctcggcgtcccactccgtgcttctctcctcggcggccccgctgctcgcctcgcttgagtccttcctcgctgcgcgcttgctcgcggggaacctctcctccgcgctagcctcctcccgacggtgcgtacggctgctcgcgctcgcggcgcgggcgaacgcgcacctccaggccggcaaccatgggctctacctcgccctgcgcgccgtcgacgccatcgaccgtgatctcgcctcgggatccgagctgctgccgctacccgcgctccgccgcatgcttctcagcgtcgtccctgcggtgcgcgcgcatgccgagcgcgagatctccagggagttttccgactggatggttagcatccgcgctgcttcgaggcacctcggtcaggtggccatcggccgctcggctgccgccaggcagcgccaggaggagctccgctccaagcaccgcccgctggagggctgcatcaccttggatgacgatggagttggtgacctcgatgattttgcggcagccgcggcaactgctgacgcggcagatggtgctgctgcagcctcttttgaccttacgccgctctatcgagcgatgcatatacaccagacgctggcgctgggtgagcggttcaagaagtactacctggaaaacaggaagctgcagctgacatcggacttcgatgtcattgcggcgacgccattcctagagtcccaccaggtgtttttctcgcagattgctgggttttttattgttgaggaccgggtgtttagaacagggggtgggcttacatctcggccagatgtagatgcactttgggatgctgctgtggggaagatggtctctgtgatggaagacaacttctccaggatgcagacagcaaatcacttgcttctcatcactgattatgctgctttgctttcggccacaatgcggcggtacggttatccagtaggaatgctgctcgatgtgctggctaagcacagagacaagtaccatgatttgctgcttgcagattgccgtaggcaggtggcagaggcactggctgcagataagtttgatcagatgctcatgagaaaggagtatgaatactcaatgaatgtccttgcatttggaattcagagctcagacatcaccccagctttcccatacgttgcaccgttctcctgcactgtcccagatatttgccgtattgttcgctcattcattgaagattctgtgagcttcatggcacaagggggtggtggggatacttatgcagcagtgaagaagtaccttggccgtatcctttctgaggtggtggatgcttccattcaaaaacttgttgattcaggcagtggtctaagtgtgtcccaggcaatgcaggtcgctgctaacatgtctgtgatggagcgggcatgtgagttcttcacacgccatgctgcacaactgtgtggtgtgccactgcgtgctgtggaccgtggtcggcgggacttcccacttcgcaggtcacgtgatgctgcggaggcgctcctgctgcggctcctatgtgctaaggttgatgagttcatgcggcaatctgatggtgttaactggatggctgatgacgctcctcctggcggcaatgagtatgccaacgaggtcatcatctaccttgagacgctcacatcaactgcacagcagatccttccccttcccgtgctccgccgtgtacttgtggcagtgcttgcccacatctctgaaaggatcattgagctcttcttgaacgattcagtgaagcggttcaatgccaatgcggtcactggaatagatactgatctcaaaatgtttgagacgtttgcagagggcatgtctagcctgttcgtggactcaggtcaagaatctgcaaaaaatgaaatgaaggctgcacttgtggaagcaaggcagctagtgaatcttcttatgagcaatagtccagagactttcctaaatccagtgattcgtgaaaagagctataacaagctagattatagaaaggttgcaatcatctcagaaaagtttagagatacctcagagagttatttctcaacattcggaacaaggggtgccaggcagaacccaaagaagaaatctctggataccctgatcaagaggctcagagaagccagttagatatcctccctgctaagatagggatgcttttatttcctccctccagttccatgcacttggtgacaagcgacttgatgttatatatttgaaagttataaaggggctttggagttcaatttacctcgctgtttaggtatattgaaattggatgatgactaacagggtagatgattgtttggagctgcagaacctcagtcatttttccttaccaattcagaaatagcgaatctttaaatcaacagaggattttcctaccaatatagagaaaccagatccataaagaatatggtatcctctttttatacttgttttgtatcatatttgtagtactttttatataactttggccaaacttaaatcgtttgactcctcgaaaagtgacaatcgctcttttttgtggatggagagagtaataattgataacttgttgtatataaattttaaaattcaagttccaaactagggcaagtgtatggtgaacatttttttcattacttatgttttaataatttgtgcattttttatccatgtatagcagtaaaagttatgttgccattgccaagcttgaggcatttaatttaccttctgtttctgccctatgggcttatgactttccacaatactgccacacatagtcttttatactgtcttgcactgtctttttctgcaccactaaaatagttccaccagccatgtgaagccttagaaggctaatccagacagttagtcataggtttttgcaaatttgtttgggggaaacagacaaccatatctctatactgcaagctttgctaatttagacagctttgatccatttctttactatatgtgtatggctactttgtgtagcttactggttagtgttactgtctgtgtgtggctactttgtacagcttactggccagtgtcctatggtctattagagctgaaataacttcttgcaatcactggttgaatcttggttgttacggtagtaactaaggccactttggatgagtcatttacctgaaccctttatgtgtaactaatttaagtcatccgaatatgtcaattggcctataacagtgaaatatgttataagttgttctttagaattactcccattactgttttgtggtttcccttcaactcaactcattttgcaattattgtacaatgctatcaattcatctgcagcttttgcataagcatacctccataagctttgtgagctgtgttcatgtccaaaaggactcgcaaagagaacagggactacaagttggtattgtcattcggtgaaaatatggtcattgcacaaaagcgtcccatctgcgcacataattttcaactgtgatcatggcacaaaaagaaaatgttcaagcctgtgcacatttattcatgttggaagtgtgatgatcagctcatttgttacaaataagatgaagtttaaccatttagttctgcaattcatcgcctttgtagtggcaagaattgttgatttatctttaaatcaggattgttgattttcatcta

SEQ ID NO: 149265 - DNA, 3704 bp, Zea Mays
tttcatccgcgccgtcgacgaccttcggtccctcctggccgacgccgatgcgctcaagggctccctctcggcgtcccactccgtgcttctctcctcggcggccccgctgctcgcctcgcttgagtccttcctcgctgcgcgcttgctcgcggggaacctctcctccgcgctagcctcctcccgacggtgcgtacggctgctcgcgctcgcggcgcgggcgaacgcgcacctccaggccggcaaccatgggctctacctcgccctgcgcgccgtcgacgccatcgaccgtgatctcgcctcgggatccgagctgctgccgctacccgcgctccgccgcatgcttctcagcgtcgtccctgcggtgcgcgcgcatgccgagcgcgagatctccagggagttttccgactggatggttagcatccgcgctgcttcgaggcacctcggtcaggtggccatcggccgctcggctgccgccaggcagcgccaggaggagctccgctccaagcaccgcccgctggagggctgcatcaccttggatgacgatggagttggtgacctcgatgattttgcggcagccgcggcaactgctgacgcggcagatggtgctgctgcagcctcttttgaccttacgccgctctatcgagcgatgcatatacaccagacgctggcgctgggtgagcggttcaagaagtactacctggaaaacaggaagctgcagctgacatcggacttcgatgtcattgcggcgacgccattcctagagtcccaccaggtgtttttctcgcagattgctgggttttttattgttgaggaccgggtgtttagaacagggggtgggcttacatctcggccagatgtagatgcactttgggatgctgctgtggggaagatggtctctgtgatggaagacaacttctccaggatgcagacagcaaatcacttgcttctcatcactgattatgctgctttgctttcggccacaatgcggcggtacggttatccagtaggaatgctgctcgatgtgctggctaagcacagagacaagtaccatgatttgctgcttgcagattgccgtaggcaggtggcagaggcactggctgcagataagtttgatcagatgctcatgagaaaggagtatgaatactcaatgaatgtccttgcatttggaattcagagctcagacatcaccccagctttcccatacgttgcaccgttctcctgcactgtcccagatatttgccgtattgttcgctcattcattgaagattctgtgagcttcatggcacaagggggtggtggggatacttatgcagcagtgaagaagtaccttggccgtatcctttctgaggtggtggatgcttccattcaaaaacttgttgattcaggcagtggtctaagtgtgtcccaggcaatgcaggtcgctgctaacatgtctgtgatggagcgggcatgtgagttcttcacacgccatgctgcacaactgtgtggtgtgccactgcgtgctgtggaccgtggtcggcgggacttcccacttcgcaggtcacgtgatgctgcggaggcgctcctgctgcggctcctatgtgctaaggttgatgagttcatgcggcaatctgatggtgttaactggatggctgatgacgctcctcctggcggcaatgagtatgccaacgaggtcatcatctaccttgagacgctcacatcaactgcacagcagatccttccccttcccgtgctccgccgtgtacttgtggcagtgcttgcccacatctctgaaaggatcattgagctcttcttgaacgattcagtgaagcggttcaatgccaatgcggtcactggaatagatactgatctcaaaatgtttgagacgtttgcagagggcatgtctagcctgttcgtggactcaggtcaagaatctgcaaaaaatgaaatgaaggctgcacttgtggaagcaaggcagctagtgaatcttcttatgagcaatagtccagagactttcctaaatccagtgattcgtgaaaagagctataacaagctagattatagaaaggttgcaatcatctcagaaaagtttagagatacctcagagagttatttctcaacattcggaacaaggggtgccaggcagaacccaaagaagaaatctctggataccctgatcaagaggctcagagaagccagttagatatcctccctgctaagatagggatgcttttatttcctccctccagttccatgcacttggtgacaagcgacttgatgttatatatttgaaagttataaaggtaaactttggggctttggagttcaatttacctcgctgtttaggtatattgaaattggatgatgactaacagggtagatgattgtttggagctgcagaacctcagtcatttttccttaccaattcagaaatagcgaatctttaaatcaacagaggattttcctaccaatatagagaaaccagatccataaagaatatggtatcctctttttatacttgttttgtatcatatttgtagtactttttatataactttggccaaacttaaatcgtttgactcctcgaaaagtgacaatcgctcttttttgtggatggagagagtaataattgataacttgttgtatataaattttaaaattcaagttccaaactagggcaagtgtatggtgaacatttttttcattacttatgttttaataatttgtgcattttttatccatgtatagcagtaaaagttatgttgccattgccaagcttgaggcatttaatttaccttctgtttctgccctatgggcttatgactttccacaatactgccacacatagtcttttatactgtcttgcactgtctttttctgcaccactaaaatagttccaccagccatgtgaagccttagaaggctaatccagacagttagtcataggtttttgcaaatttgtttgggggaaacagacaaccatatctctatactgcaagctttgctaatttagacagctttgatccatttctttactatatgtgtatggctactttgtgtagcttactggttagtgttactgtctgtgtgtggctactttgtacagcttactggccagtgtcctatggtctattagagctgaaataacttcttgcaatcactggttgaatcttggttgttacggtagtaactaaggccactttggatgagtcatttacctgaaccctttatgtgtaactaatttaagtcatccgaatatgtcaattggcctataacagtgaaatatgttataagttgttctttagaattactcccattactgttttgtggtttcccttcaactcaactcattttgcaattattgtacaatgctatcaattcatctgcagcttttgcataagcatacctccataagctttgtgagctgtgttcatgtccaaaaggactcgcaaagagaacagggactacaagttggtattgtcattcggtgaaaatatggtcattgcacaaaagcgtcccatctgcgcacataattttcaactgtgatcatggcacaaaaagaaaatgttcaagcctgtgcacatttattcatgttggaagtgtgatgatcagctcatttgttacaaataagatgaagtttaaccatttagttctgcaattcatcgcctttgtagtggcaagaattgttgatttatctttaaatcaggattgttgattttcatcta

SEQ ID NO: 149266 - DNA, 2577 bp, Zea Mays
atgcggcgcaagcttcccggagacgcgccgctgtcggcggcgagggccggtcatgcttcgtccgcatccgcgccgtccgaggcggacctggctcagctctccgcggccatcgcagccggggaggacctgggccccttcgtgcgccgggccttcgcgtgcggccgccccgagccgctgctcgcctcgctccgcggcgcggcgcgggaccgagaggccgagatcgaggagctctgccgcgcacacttccacgatttcatccgcgccgtcgacgaccttcggtccctcctggccgacgccgatgcgctcaagggctccctctcggcgtcccactccgtgcttctctcctcggcggccccgctgctcgcctcgcttgagtccttcctcgctgcgcgcttgctcgcggggaacctctcctccgcgctagcctcctcccgacggtgcgtacggctgctcgcgctcgcggcgcgggcgaacgcgcacctccaggccggcaaccatgggctctacctcgccctgcgcgccgtcgacgccatcgaccgtgatctcgcctcgggatccgagctgctgccgctacccgcgctccgccgcatgcttctcagcgtcgtccctgcggtgcgcgcgcatgccgagcgcgagatctccagggagttttccgactggatggttagcatccgcgctgcttcgaggcacctcggtcaggtggccatcggccgctcggctgccgccaggcagcgccaggaggagctccgctccaagcaccgcccgctggagggctgcatcaccttggatgacgatggagttggtgacctcgatgattttgcggcagccgcggcaactgctgacgcggcagatggtgctgctgcagcctcttttgaccttacgccgctctatcgagcgatgcatatacaccagacgctggcgctgggtgagcggttcaagaagtactacctggaaaacaggaagctgcagctgacatcggacttcgatgtcattgcggcgacgccattcctagagtcccaccaggtgtttttctcgcagattgctgggttttttattgttgaggaccgggtgtttagaacagggggtgggcttacatctcggccagatgtagatgcactttgggatgctgctgtggggaagatggtctctgtgatggaagacaacttctccaggatgcagacagcaaatcacttgcttctcatcactgattatgctgctttgctttcggccacaatgcggcggtacggttatccagtaggaatgctgctcgatgtgctggctaagcacagagacaagtaccatgatttgctgcttgcagattgccgtaggcaggtggcagaggcactggctgcagataagtttgatcagatgctcatgagaaaggagtatgaatactcaatgaatgtccttgcatttggaattcagagctcagacatcaccccagctttcccatacgttgcaccgttctcctgcactgtcccagatatttgccgtattgttcgctcattcattgaagattctgtgagcttcatggcacaagggggtggtggggatacttatgcagcagtgaagaagtaccttggccgtatcctttctgaggtggtggatgcttccattcaaaaacttgttgattcaggcagtggtctaagtgtgtcccaggcaatgcaggtcgctgctaacatgtctgtgatggagcgggcatgtgagttcttcacacgccatgctgcacaactgtgtggtgtgccactgcgtgctgtggaccgtggtcggcgggacttcccacttcgcaggtcacgtgatgctgcggaggcgctcctgctgcggctcctatgtgctaaggttgatgagttcatgcggcaatctgatggtgttaactggatggctgatgacgctcctcctggcggcaatgagtatgccaacgaggtcatcatctaccttgagacgctcacatcaactgcacagcagatccttccccttcccgtgctccgccgtgtacttgtggcagtgcttgcccacatctctgaaaggatcattgagctcttcttgaacgattcagtgaagcggttcaatgccaatgcggtcactggaatagatactgatctcaaaatgtttgagacgtttgcagagggcatgtctagcctgttcgtggactcaggtcaagaatctgcaaaaaatgaaatgaaggctgcacttgtggaagcaaggcagctagtgaatcttcttatgagcaatagtccagagactttcctaaatccagtgattcgtgaaaagagctataacaagctagattatagaaaggttgcaatcatctcagaaaagtttagagatacctcagagagttatttctcaacattcggaacaaggggtgccaggcagaacccaaagaagaaatctctggataccctgatcaagaggctcagagaagccagttagatatcctccctgctgtaagattatatacatgcaactggcttctcacatcctgattttttcatgaaagtctgtatcttgtttgtgttatgcctgtttcttgttaatcttgtgctgtaactttgctgttgttagattctatgtttc

SEQ ID NO: 149267 - DNA, 357 bp, Zea Mays
atgagcagcagggcatggccatggatggaggagctggagcgccggcagagggcagagatggagcagggaactcggccaggaaagggactcggaaccgggcgcggcggctggacgcagggcgagccatggagatgggcgccgagctccatggatgcagggaggagggaggagctcgcaggctggctggggattgaggaggataaatccacgcgcgccatagaagggcttcgacagggacagggcgctgctgggaaatggagggagagaaacaagggggcaactaggctcttggccgaccggagttggaggaggaagccgtggcctgaacgccggcgagctaggcgtggccatggctag

SEQ ID NO: 149268 - DNA, 472 bp, Zea Mays
ggattcggcatggaggacggcgtgtccgccgggcagctggtcagcaagctggcgagggaccacctccccttcatgatcctgagccagcggaacgcgctgctcctgggctccgacggtgacggggacgacctgacctttagcgacgtcgcccgcggcgtcgtcgtccacggacggcagccgcagcgagcggtcgtcgtcgtcgctggcgccggcgcggatgctggaggtgtggcgggaggcctgcgtcaacgcgttcaagaccatggacagggagctcggggtccaggctagggtggactgcggcttcagtggcaccacggccgtgtgcgccatcaagcagggggaggacctcgtcgtcgccaacctcggcgactccacggccgtgctggtgaccgtgtcggagacgggctacctgaaggccatgcagctcaccaccgaccagaagcccaatgtgcctcgtgagtcctcctaa

SEQ ID NO: 149269 - DNA, 1995 bp, Zea Mays
aaaaattaaaacaaaccacattctctattctctcatcgaaagaccgccctctcgctctcgctctccaccgccgctagggtttccaccgcccccggcgatgggcgccctcactgacagccggaagcgtctctcggcggaccgctgcctctcggccgaccatcgcctcccctatccctcgttccccccaccgccccttacccctccctccaagcggaccaagctcgccacattccctgaactcgatccctccacctccgccgtcccgcctatccgtccttctccccaaatcatccactccgccgccgcggcatccgcctccttcacgccgggcccttcctcctcttccaccatcgcttccaccccgcttccgcacaggcgccgactcccgccgccgccgccattgccgcgcccgatccacggcccacagcggatcctccgcgtcttccggcttggtggggctgcacggacccacgctgccggccgctcgttgttctccccgtcatcacccctgccttgttctctcggattccagcagtacgtagagctcgtcaacagcgtctcccacccggcgccatccactcccgccgccacaaccgatgctacgaggcaggcggtgcccctcgaggtggtggccatcgaggaggaggaggagggggaggaggaggaggaggacgaggacgagaggaagcagcaggacgaggaggaggtgaggggcagcgtggtagtgagaagggtgccacagtacaaggagctgtacgagaagtcacggaagcgggatgccaagctcaagacgctcgagtttgaggtgcggctcgcccaggtgggccgtcttagccttgagcggcttgctgaggccctcccgcgaattacgccaaagaaggaggaggtgcctgaaccttttgttcctcttactgatgaggatgaagaaatggttcgtcgggctcttcatggcaagaacagtcgtgagaggttagcagtacatgaaccttcaaatattgtgataacaagggagatcttgcaatgcttgaataaccaggaatggctaaatgatgaggttatcaatttgtatcttgatctgcttaaagagagggaactaagagaacctcgcaagttcttaaaatgccatttcttcaacacctttttctacaagaagctgatttccagtgggtatgattataaagctgttagaagatggacaacaaaaaggaggttagggtacagtctaattgactgtgacaagatatttgttcccatacacaaggaagtccattggtgtttagcagtcatcaacataagggacaaaaagtttcagtatctggattcacttggtggcatggacacgagggtcttgaggatcttggctaagtatattgtggatgaggtcaaagacaaaagtgaccaacagattgatgctctctcatggaagcaggaaagtgtcgaaaatcttcctttgcaggagaatggatgggactgtggcatgttcatgctcaaatacattgacttctacagcagagatatggacctcatttttggacagaagcaaatgcactacttccgcaggaggacggcaaaggaaatactgagtttgagggctgaataaaccttggaggacatcataggtcattttggttaggttcagatatttgttggaatatgtacttaacaaatggctgcaacggcttaaaggtatagcattgagtggaatgattttgaaaatgttccggatgcacaacggtcaagcaacaggttgaagggaattttgcatgagcacagcagcgcctagttttgacagtgagcctttgcatggtcaagcattagattgcaatgagattcatcaaagatagggaggtatagattaacttggaactatatatatatataccagtgttcttgagcatcctgtgagctgtgaccaagtgagcaatcactgggttaagctgtatgaccggcttcggtgcatagttgtgtgaaatgctcaaatcccttttgttttta

SEQ ID NO: 149270 - DNA, 2048 bp, Zea Mays
aaaaattaaaacaaaccacattctctattctctcatcgaaagaccgccctctcgctctcgctctccaccgccgctagggtttccaccgcccccggcgatgggcgccctcactgacagccggaagcgtctctcggcggaccgctgcctctcggccgaccatcgcctcccctatccctcgttccccccaccgccccttacccctccctccaagcggaccaagctcgccacattccctgaactcgatccctccacctccgccgtcccgcctatccgtccttctccccaaatcatccactccgccgccgcggcatccgcctccttcacgccgggcccttcctcctcttccaccatcgcttccaccccgcttccgcacaggcgccgactcccgccgccgccgccattgccgcgcccgatccacggcccacagcggatcctccgcgtcttccggcttggtggggctgcacggacccacgctgccggccgctcgttgttctccccgtcatcacccctgccttgttctctcggattccagcagtacgtagagctcgtcaacagcgtctcccacccggcgccatccactcccgccgccacaaccgatgctacgaggcaggcggtgcccctcgaggtggtggccatcgaggaggaggaggagggggaggaggaggaggaggacgaggacgagaggaagcagcaggacgaggaggaggtgaggggcagcgtggtagtgagaagggtgccacagtacaaggagctgtacgagaagtcacggaagcgggatgccaagctcaagacgctcgagtttgaggtgcggctcgcccaggtgggccgtcttagccttgagcggcttgctgaggccctcccgcgaattacgccaaagaaggaggaggtgcctgaaccttttgttcctcttactgatgaggatgaagaaatggttcgtcgggctcttcatggcaagaacagtcgtgagaggttagcagtacatgaaccttcaaatattgtgataacaagggagatcttgcaatgcttgaataaccaggaatggctaaatgatgaggttatcaatttgtatcttgatctgcttaaagagagggaactaagagaacctcgcaagttcttaaaatgccatttcttcaacacctttttctacaagaagctgatttccagtgggtatgattataaagctgttagaagatggacaacaaaaaggaggttagggtacagtctaattgactgtgacaagatatttgttcccatacacaaggaagtccattggtgtttagcagtcatcaacataagggacaaaaagtttcagtatctggattcacttggtggcatggacacgagggtcttgaggatcttggctaagtatattgtggatgaggtcaaagacaaaagtgaccaacagattgatgctctctcatggaagcaggaaagtgtcgaaaatcttcctttgcaggagaatggcactattcccacttgttcttcagtttgcctaatgtactgagtctgtcacttagatgggactgtggcatgttcatgctcaaatacattgacttctacagcagagatatggacctcatttttggacagaagcaaatgcactacttccgcaggaggacggcaaaggaaatactgagtttgagggctgaataaaccttggaggacatcataggtcattttggttaggttcagatatttgttggaatatgtacttaacaaatggctgcaacggcttaaaggtatagcattgagtggaatgattttgaaaatgttccggatgcacaacggtcaagcaacaggttgaagggaattttgcatgagcacagcagcgcctagttttgacagtgagcctttgcatggtcaagcattagattgcaatgagattcatcaaagatagggaggtatagattaacttggaactatatatatatataccagtgttcttgagcatcctgtgagctgtgaccaagtgagcaatcactgggttaagctgtatgaccggcttcggtgcatagttgtgtgaaatgctcaaatcccttttgttttta

SEQ ID NO: 149271 - DNA, 2177 bp, Zea Mays
aaaaattaaaacaaaccacattctctattctctcatcgaaagaccgccctctcgctctcgctctccaccgccgctagggtttccaccgcccccggcgatgggcgccctcactgacagccggaagcgtctctcggcggaccgctgcctctcggccgaccatcgcctcccctatccctcgttccccccaccgccccttacccctccctccaagcggaccaagctcgccacattccctgaactcgatccctccacctccgccgtcccgcctatccgtccttctccccaaatcatccactccgccgccgcggcatccgcctccttcacgccgggcccttcctcctcttccaccatcgcttccaccccgcttccgcacaggcgccgactcccgccgccgccgccattgccgcgcccgatccacggcccacagcggatcctccgcgtcttccggcttggtggggctgcacggacccacgctgccggccgctcgttgttctccccgtcatcacccctgccttgttctctcggattccagcagtacgtagagctcgtcaacagcgtctcccacccggcgccatccactcccgccgccacaaccgatgctacgaggcaggcggtgcccctcgaggtggtggccatcgaggaggaggaggagggggaggaggaggaggaggacgaggacgagaggaagcagcaggacgaggaggaggtgaggggcagcgtggtagtgagaagggtgccacagtacaaggagctgtacgagaagtcacggaagcgggatgccaagctcaagacgctcgagtttgaggtgcggctcgcccaggtgggccgtcttagccttgagcggcttgctgaggccctcccgcgaattacgccaaagaaggaggaggtgcctgaaccttttgttcctcttactgatgaggatgaagaaatggttcgtcgggctcttcatggcaagaacagtcgtgagaggttagcagtacatgaaccttcaaatattgtgataacaagggagatcttgcaatgcttgaataaccaggaatggctaaatgatgaggttatcaatttgtatcttgatctgcttaaagagagggaactaagagaacctcgcaagttcttaaaatgccatttcttcaacacctttttctacaagaagctgatttccagtgggtatgattataaagctgttagaagatggacaacaaaaaggaggttagggtacagtctaattgactgtgacaagatatttgttcccatacacaaggaagtccattggtgtttagcagtcatcaacataagggacaaaaagtttcagtatctggattcacttggtggcatggacacgagggtcttgaggatcttggctaagtatattgtggatgaggtcaaagacaaaagtgaccaacagattgatgctctctcatggaagcaggaaagtgtcgaaaatcttcctttgcaggagaatgggtacttctcatctttgttcctagcaagcatagttgtacctttgtttttccttgtgcagttaatgaatcctttaaaaaaaaattgcacgcaattgccaacctgagaacatttagtttgcctaatgtacagcactattcccacttgttcttcagtttgcctaatgtactgagtctgtcacttagatgggactgtggcatgttcatgctcaaatacattgacttctacagcagagatatggacctcatttttggacagaagcaaatgcactacttccgcaggaggacggcaaaggaaatactgagtttgagggctgaataaaccttggaggacatcataggtcattttggttaggttcagatatttgttggaatatgtacttaacaaatggctgcaacggcttaaaggtatagcattgagtggaatgattttgaaaatgttccggatgcacaacggtcaagcaacaggttgaagggaattttgcatgagcacagcagcgcctagttttgacagtgagcctttgcatggtcaagcattagattgcaatgagattcatcaaagatagggaggtatagattaacttggaactatatatatatataccagtgttcttgagcatcctgtgagctgtgaccaagtgagcaatcactgggttaagctgtatgaccggcttcggtgcatagttgtgtgaaatgctcaaatcccttttgttttta

SEQ ID NO: 149272 - DNA, 108 bp, Zea Mays
gcctacttcaatagcctacaacattagcagtaccttgctttttacttcacaagaaaaggttggccgaggtccctcctctagcgcaaggatttctactgcaatgattgc

SEQ ID NO: 149273 - DNA, 332 bp, Zea Mays
atggtcgcatccttaggacctcgacgtgcaacagcagcggtaagaactcgcccccttcctctccggtggtagtctcatgatcttcctccgctccctttgaactttaaaatgagaaccaaaagcacatggtttctagcctccctattaggggattccacggagggactcctctcagggataaaccaagtggtatgtgccttgattgcgttgcgttttgtcccatttttaaaattgaaacaaacaatctgagccttttgtcatctaaaatttgtcttgattttttcctacaatttacacgcggtttggtgctcagccctgaagctttttgtcat

SEQ ID NO: 149274 - DNA, 5117 bp, Zea Mays
ctgccccggcacacgtcgtctctgccactcaccgcgagtccgcaaccaaacaataagaagcagccttccttgctctgcgtcagtgcatctccttcccctcccctccttcccctcccctcctctcgtctggggactgggcgtctggctggcacgcagccaagccacacactccctcgtcagcctctgcatgccacgccgcccctgatcaccagaacccgcccggccgccgcatggccctcgcgtcgcagccgccttggtggctcaccacggaggcttgcgacctcccatccgcgcccgccgcggggctcggggaatgggtcgccttcctcttcctctccacgtgctcgcagcagatgctcctctccgccgcgtccgccgtcttcctcgtcgcgctgctctgcctcggcgccgccaagctcatctccacacggcgacgacgccatggcggcggcgccctcaacggcgacaagcagccgctgctggacagggccggggggcgggccggggttcgggtcggcgccgggttcgtcgtcgcgctggcggcgtccggtgtcctcgccgcgttctacgcctcgctgctcgtcctttccctggtcaacagaggcggcggagagggcgaggccctggaggcggtgttcctggcgctgcagtgcgcggcgcacctggccgccgcggccgtcgtcgcgcacgagaagcggttccgcgcggcggcgcacccgctggccctgcgcctgtactggctggcggcgcccgcgctgacggcgctcctcgccggcacctccgtcgcgcgcctcgtggtggccgccgctaggctcccggacgacgcgctcgcgatcgcggcgctggtcctgtcccttcccctcccggtcctctccatcctcgggtcgacgggcatatccgtggcggtggtcaacgacgccaccggggcggcggaggaggagacggcaagcaacaaggcgacggagaaaaacgtgaccccctacgcgacggcgtcgtgggcttcgcgcgcgacgtgggcttggatgaacccgctggtgcagcgcgggcaccgcgcggcgctggagctgtcggacgtgccgacgctggcaccgtcccaccgcccagagcgcatgcacgagctcttcaccctgcactggccgtcggcgtgggcgtccaaggacaacaacccggtccggcacacgctgttccggaccttctgggcgcagttcctgctgaacgcgttgctggcgctgctccggctgaccgtcatgtacgtcggcccgacgctcatccagagcttcgtggacttcacgtccgccggcgggcagcggccgttcggggagggcgcgcggctggtggcgacgctgctggcggccaagtgcgcggaggcgctgtgcagccaccagtacaacttccactgccagaagctggggatgcagatccggggcgccctcatcgtggcgctgtaccgcaagggcctccggctctcgtgctcagcgcgccagaagcacgggctcggcatgatcgtcaactacatggccgtcgacgcgcagcagctctccgacatgatgctgcagatccactacctctggctcatgccgctccaggttggcgttgctctgggcctgctgtacacgtaccttggccccccggtgacgtcggctctgatcggcgttgccggcgtgatggtgttcgtgctcctgggcacccggcgcaacaaccggtaccagttctcgctgatgaaggagcgcgaccagcggatgaaggcgacgaacgagatgctcaactacatgcgcgtcatcaagttccaggcgtgggaggagcacttcaacgcgcgcatcggccgcttccgccgcctcgagttcggctggctctcccgcttcatgtactccatctccggcaacatcatcgcgctctggagcgcccccgtcgtcgtctccgcgctcgtcttcgccacctgcgtgctcgccggggtgcgcctcgacgccggcctcgtcttcaccgccacgtccttcttcaagatcctacaggagcccatgcggaacttcccgcaggcgatgatccaggcgtcgcaggcgatgatctcgctgcagcgcctcgactcgtacatgactagcgcggagcttgacgagggctccgtggagagggaccccgccgcggcgtcgggcggcatggccgtgcaggtcaaggacggcgtgttcgcgtgggacgacgaggtggacgccggccaggaggtgctgcgcgggatcgacctggacatccgtacgggtgcgctggcggcagtggtgggcatggttggctccggcaagtcgtcgctgctgggctgcatcctcggcgagatgcgcaagttctccggcaaggtaaaggtttgcggcagcacggcatacgtggcgcagacggcatggatccagaacggcaccattgaggaaaacatcctgttcgggaagcccatgcaccgggagaggtacaaggaggtgatcagggtgtgctgcctggagaaggacctggagatgatggaattcggggaccaaacggagatcggggagcgcggcatcaaccttagtggcgggcagaagcagcgcatccagctcgcccgcgccgtctaccaggacttcaacatctacctcctcgacgatgtattcagcgcggtcgatgcgcatacgggcactgagatcttcaaggaatgtgttagaggtgcactcaagaacaagaccatagtactcgtgacacatcaagttgatttcttgcacaatgctgatatcatatatgtgatgaaggacggaatgatcgtgcaatccggcaagtacgatgagctcctccaggcaggcaccgacttcgcggcactggtcgcagcgcacgacagctcaatggagctcgtggagagcgcggcgccggcgagcgagcgcgagctgcccctctcccggcagccgtcaagcaagaacgcggcgtccaacggcgactcgtcctcgtcctccatcgtggcgcccaaggccgagaaggcgtcggcgcggctgatcaaggacgaagagcgcgcgagcgggcacgtcagcttcaccgtgtacaagcagtacatgacggaggcctgggggtggtgggggccgcttgtggtggtggctgtctccgtggtgtggcagtgctctctcatggccagcgactactggcttgccgaccagacctccgacgggaacgaaacctcgttccagccgtcgctgttcatcaacgtgtacgccatcatcgctgccgtctcggtggtgctcgtcgcggctcgctctttcattgtggcgttcattggcctccagacggcggaccggttcttcaagcagatcctcaacagcatcctgcacgcgcccatgtccttcttcgacaccacgccgtccggcaggatcctcagcagggcgtcgtcagatcagacgaacgtcgatctcttcctgccgttcttcgtctggatgagcgtatccatgtacatcaccgtgatcagtgtgctgatcgtcacgtgtcaggtggcgtggccgtccgtcattgccataatccctctggtgatactgaacatctggtaccggggctattacttgtcgacatcgagggagctgactcgcctcgagtcgattaccaaggctccagtgatccaccacttctccgagacggttcaaggtgtcatgaccatcaggtgcttcaggaaggaggaaaacttcttgcaggagaacctgaaccgggtgaactcaagcctgaggatggacttccacaacaatggtgccaacgagtggctcggtttccggctcgagctgattggaagctttgttctctgcttcacagccgtgctcatggtcacattgccgagcaacttcgtgaagccagagtatgttggtctgtcactatcatatggtctatctctcaaccaggtgttgttctgggccatctggatcagttgcttcattgaaaataaaatggtctcagttgagaggataaaacaattcacaaatattccttcagaggccacatggaggatcaaggactgcctaccagattctaattggccaacaaaaggcgacatcaatgtcattgatcttaagtttaggtataggcacaacactcctctagtgttgaagggcatcacaataagcatacatggaggagagaagattggagttgtcggcagaactggtagtgggaaatcaacactgatccaggcactgttcagaatagtggagccttctgaggggagaataatcatcgacggtgttgacatctgcactttaggactccatgaccttaggtcacggtttggtatcatacctcaggaacctgttctctttgaagggaccattaggagcaacattgatccgcttgagcagtattccgatgatgaaatctggcaggcattgggccgctgtcagttgaaagaagccgtagcttcaaaacccgaaaagcttgatgcttcagtcgtcgacaatggtgagaactggagtgttggacaacgtcaactgctatgcctgggccgggtgatgctaaagcacagcagaatactgttcatggacgaggccactgcttccgttgattcccagaccgatgctgtgattcagaagatcatccgggaagactttgcagcttgtaccattatcagcattgcgcacagaatacctacggtgatggactgcgacagggtcctggttatagatgcaggactagcaaaggagtttgaccggcctgcaaatctgatcgagaggccatctctgtttggagcattggttcaagagtacgcgaaccgttcgtccgacgtttagcatttcagggtggcataattttttgactcgagatttgggaggaaacaatgattggaaatttctcggtgtggtgaacgagcaatgctgcattcatgctccaaataaaactgcgagccctcaaaatttcgcgaaacgtaattgggtcatgtggaaggccagaggagaagccacgatcggatgaaggagacatcgagatgactaggatagtaagtagttatcgagatgtatttgagcggtttaagctgaaattttaagactgagctgaagacgatgtatgaatctatgtattgttcaactagaatattactgcgcatgcaaattttctgccgactagtgttaaaacaaacatacaacaaa

SEQ ID NO: 149275 - DNA, 1088 bp, Zea Mays
acacgcaggctgcgccgactggccgtgcagtcgtgcaccagccaccaggtcacgcgcattcctgcatttgcattctattccattccatatttccattcatccgctccgctccactccagtcggtcctactagtcctaccctccccgcctccccggcatcccttcgccatagcagcaccagacagcagagcaccaaacccacacttctttcacctcccctgccccctcctccattctccatcgcaatccgccgccgccgatggcgaggccgacgcgcgcgctcctgctcccgctcctcctgctcctggtgctggcccgcgcgtcgggcgacgtgccggcggcggcgtccctcggctgggacctccgcgtggtgggcgcgggagaggacgaggagttcggcttccctggcggggactccgtggcgtgccgggtgctgcagggcggcggctacctcagctacggcgcgctgcgcagggacaacgtgccctgctccgtccggggagcctcctactacaactgccgccccggcgggcaggctaacccctactcgcgcggctgctccgccatcacacgctgccgcggctgatctcggcgtccgccaataggaagaggaggttcatatccgtttatcctgcgccgttgttggctgatacggagaaaatcattcatctccctccctgcccctttaatcgattattggtacatgtacgctactctctctctctctctctcttgttgattgattttgtttctcttgttgattgattttaacgagaatgattgtgttggttgtgggttatgactggagtatctctctctcgctccggtcctgtaaattccatgattttcgagcagctggtgtataaactacaaactgatgatgacgatttccccgtcaacctgtgtgattgtgattgtaagatagccacacggtgacacgggtccgcgtcgcaagtcgcaacaaccagctccatgatttcaagtttctttctttatttttttgtcctcgctgcaagtaattatactgatagcgtagcgattctttgcttggtctgagcaagttgcaattcttctgacatcttgcgtgcc

SEQ ID NO: 149276 - DNA, 3661 bp, Zea Mays
gttcatcgcattgaggaagggaggccggctggtgctactgcttttctagtacctgcccacctgcacttgcatctcctgcttccctgagcggcctcccggctgcgaatccaccagcatttcccgaggcccagcgccgcgtgtgcctgtggggcggagtcaggaaatgctcggagctccattccacggctgaaacttctgggaaggtttaagagagtaaggagaacttgacctcagcgctagagaagaatatggcagccactgaagctgccacggacacaggcagttcaaggaggtcacaagatgacactacaacattagtcccacacagtgggaatttgggagaaccaatccagaagggcgtgaagaccaccagattcaaagatgatgacgaggttgtggaaatcaccattgtacagcgcgattcagtggcaatcgaagatgtcagggtagtcgatgatggtggctcagggcatagtaatgggtttgatggcctgtcacttgtgtcaccttcctcatcaaggagcggcaagctatcatcaaagattaggcaagtgaaaaatggactaaagatgaagaactcaagcactaaggcgccacagacacagttgggaaagaacatgaggaagagattggacagaagcaagagcggggctgctgtagcgctcaagggcttgcagtttgtgactgcaaaagttggtcatgatggctgggctgtagtggagaaacggttcaacgagctacaggttgatggtgtgctgctacgttcaagatttgggaaatgcattgggatggatggatctgatgagtttgcagtgcaattgtttgattcattagcaagaaagagagggataacaaagcaggtgctgactaaagatgagctcaaagatttctgggagcaactcagtgatcagggttttgacaaccgtttacagatattctttgacatggttgataagaatgccgatggaagaatcacagaagaggaggttaaggagattattaccctcagtgcatcagcaaacaaactttccaagctcaaggaacgagctgatgagtacacggcactcataatggaagaacttgaccgtgacagccttggatacattgagcttgaggatctgaaggcacttttgctgcaatcaccttctcaagttgttgcaagatcaacaacgcatagctcgaaacttagcaaagctcttagcatgaagcttgcatcaaacaaggacacaggtccattttaccactactggcaagagttcatgtacttccttgaggagaactggaagcgcatttgggttatgactctctggctctcaatctgcattggcctctttatttggaagttcatccaataccgtaatcgagcagtatttcacatcatgggttattgtgtgaccactgcaaaaggtgctgcagagaccctcaaattcaatatggccctggttctttttcctgtttgccgaaatacaatcacatggattcgatcaaagacaaagatcggtgctgttgtgcccttcaatgacaacataaacttccataaggtaatagcagcaggtgttgcagttggtgttgttttgcatgcaggtgctcacctgacatgtgattttcctctgctgctgcatgcaagtgatgctgcctatgaaccaatgaagcctttctttggagacaaaaggccaccaaattactggtggtttgtaaagggaactgaagggtggacaggtgtggtcatggttgtacttatgactatagctttcgtattggcccagccatggtttcggcgtaataagctcaaggattctaatcccctcaagaaaatgactggcttcaatgccttttggtttactcaccacttatttgttattgtgtatgcactgctcattgtccatgggacctgtttatatctaagcaggaaatggtacaagaaaacgacatggatgtaccttgctgtccctgtgctcttgtatgtaagtgagcgcattcttcggctatttaggagccatgatgctgttaggattcagaaggttgcagtatatccagggaatgttttggctctctatatgtccaagccacctggattcaggtatcggagtgggcagtatatcttcataaaatgcagtgatgtctctccatacgaatggcacccattttcgattacatcagcaccaggagatgattatcttagtgtccacattcgcacaaggggtgattggacttcacgtcttaggactgtcttctctgaggcatgccgccctccatctgatggagaaagtggactccttagagctgacccttccaaggggatcaccgagaccaacgcgaggttcccgaaactcttgattgatggaccatacggtgctccagcgcaagactatcaggaatatgatgtgctcctgctcattggactgggcattggagccacaccattgattagcattgtgaaggatgtacttaaccacatccagcttggaggatctgttgcaggcacggagcctgagggcagtggcaaggccaagaagaggccattcatgacaaagagggcctacttctactgggtgaccagggaagaggggtcctttgaatggttccgaggggtcatgaatgaggtggctgagaaggacaaggatggagtcattgaactccacaaccactgctcgagtgtgcaccaggaaggggatgtacgttctgccctcattgtcatgctccaggagctccagcacgcgaagaagggagtcgacatcttgtctggaactagtgtcaagacgcattttgcacggccgaattggcgaagcgtcttcaaacatgttgcagtgaaccacgagaaccaacgcatcggagttttctactgtggtgagcccgtccttgtgccacagctacggcagctgtcagcggacttcacccacaagacaaatactaagttcgagttccacaaggagaacttctaatggaggaactggagaaaagctctaggcgtggccctctaatggtttcagaatatgtgaattacgatggttgtaacatatatacgagtagaagaataagacgatgggagttgttttgttgtacatgtcaagagtagatgaattgtctttgcaagcatacaaccttaaaagttgtaacacatgtcagctggttttgacaggtctgtttgttttgtctgctcctgttggagtgttgggcatacactgcttctgtcttttaaagcaccaccactacattgaaagccctgaggaaggtattttacggcacaaatgagtcaggttcacttgtgaattgtgatcctcaactcctgatgctgagtaactggttgtgccttccgtaagtttgctcaaaatgtatgttaaattttatgttgcttgatctcttggcacttccaaaaagtttgtgtgataaatgataagaaatgagatttcccctttttttgcagaatgggtaggtgttctgctgtttcattaagttgaaagcatgtgcaatgtgtgcaaggatctgactgcaatactactcggctaaaatgaagaagaaaacgaaaccacaacaccctaccaaaacaaagatgaaagaaaagaaagaaaaggactgaatatagccactgtgactcacatccagcctctacatgctgcatactctgtcgatcactcgaattcttcacaggcaaagcctcaaa

SEQ ID NO: 149277 - DNA, 1022 bp, Zea Mays
aacagttgttcatcgcattgaggaagggaggccggctggtgctactgcttttctagtacctgcccacctgcacttgcatctcctgcttccctgagcggcctcccggctgcgaatccaccagcatttcccgaggcccagcgccgcgtgtgcctgtggttcgtcctccacttactttgtcctttcgctcattctgttccatccctgaaatctgaagggcggagtcaggaaatgctcggagctccattccacggctgaaacttctgggaaggtttaaggttgctgttcctagtaccgagaagtgaatgttcggttcagaaatgttgttgtgggcggttccattctattttatttgagaactgcgcccactagatctgagcacgaggaggaatttttgtgtgggtagtacctcggcgtgcgaatcttttcccccctcgcggcgctgtcagttggaggcttggagcgagtcgctggagtactcgcagttttaatccttttttcctttttgttttaaatttttgtatattatcaggtcccctttggactgtagggaaataaatcctattttctgcatattttctatgaaaacaaactgaatcctgtgacatgaagccttaatctattaattatttctttattttttagatttataagtttgcctagaacaagttacgccaaaataggttagacaacaaaaacttatgtgaataattatgttattagtaaaaattattagataaaatgtgctggaaaattttgtgttgacaaattgttgtgatatgtttgtctgctaacaaccctgaacaaaaattaagttataaaggtatagaaaaattgtcatggtaagtcatctttagaattacgaaaaaagactataaaaatagttatgaattatgataagaaaaactggacataatatttatatctagatacatggtaagaaaaacttgatattctagtaggcctgcttattttaggttgcttttacttcctcccttttcaaaccttgctgatgccatccaggc

SEQ ID NO: 149278 - DNA, 107 bp, Zea Mays
cacacctcacatattttacatgtcaacaattaatcaaacattttaggtttgactaccaaaatatcctacaaaatcaacgatgacagccttattggataatcatttgg

SEQ ID NO: 149279 - DNA, 803 bp, Zea Mays
caatgatcaggcccccattagaatgcaggatgccacccccctccattcttgtgtttttatggaaatgaaccggttcctgtcatcctgtgaatttcctaaacaattcctatgaaatttctgcgttccaaaggggcccctcagtctttatgcatttgtccatcaaaggttgcaaacttatttctcgtttacccaaggtggtatgccaaacaatctctacatcctgacattgttgcccgctacgactacatatttatctgggatgaagatcttggtgtcgaacattttaatgcagaggcgtacattaagcttgttaggaagcatgggcttgagatctcagcctggtttggagcccgataaaggtttgacatggcaaatgactaaacgaagaggtgatcaggaagtccacaaagtaactgaggagagacctggctggtgtagcgaccctcacctgccaccatgtgcagcgtttgttgaaataatggcaactgtattctcaagggatgcatggcgctgtgtatggcatatgattcagaacgacttggtccatggatggggccttgattttgctcttaggaaatgtgtggaggtataatcatcatccatattactctgatgtattgcattttacgtggatactatcttgcatagttgcagcataccttgggttgcttatcgtatagaatcagtttttttaaaactttagttcctttggggatcatggggtggccaggtgtgatgtatcgttagggatggttaggttggtagtagagatgagaggatgttcggtatggtagtatataaac

SEQ ID NO: 149280 - DNA, 535 bp, Zea Mays
ctcacgggctcacggcgacagacccgccctctatgccaccaaggagctcctctccatcccatccccaacatcgccccaacccccatcaccgacagggaacccacctctcacgtcgacgccgccagaggaggagatggtggagatacgggcgttgcgatcagcgaggcagcacgctagagcgacgagagcgtggcgatgtggagatcatgggagtcctacgcagcgtcgcggcgaggcgcccgtcggggaggcagcggacatggagagagcaaagagtgacggcgacaaggggtcccgcctatcgcgcgaaccagggaaatatctacatctcgtctgtgcgccgctgggatttattagggttctactcctagcccgggccgactccacaccaatccaatcctggggcgggcgactgcctccttccctcgatctattccccatcttgtcctcccattgctaaaaataacgaggcagacgcatcttcgatttgacgtgcgcatcctcttcctcgctcgctctcggtcgcagtcgcagg

SEQ ID NO: 149281 - DNA, 1006 bp, Zea Mays
aaaaaaagccccgacggacccgctcccttcaactaacccatcgctgccgccgagcgccttcgactgcggcacctccagcgagaggggggaacccgaggagatgaggctggtcggcctgacgggcgggatcgcgtccgggaagagcactgtctccaacctattcaaggacgccggcgtccccgtcgtcgatgcagacatcgttgctcgggatgtagtgcagaaaggcactggaggtttggaagaagattgtaaaaagccttcgggaatgatattttgttggagggtggagaaattaacagagcttacttaggacaaattgtcttttctgacccatcaaaacgtcaacttctgaaccgtcttctggcgccacatatttcttggggcataatgtgggagatggcaaaactatggatgaaaggatacaaggttatcatcctggacatcccgctgttgtttgagaccaagatagatcgatggacaaatccagtaactgtggtctgggttaacccagaaacccagattcagaggttgatgtcaagagacgggtgttctgaggaacaagctcagaacagggtcaacgcacaacttgcgttggactggaagaggtcggaagccgacatagtgatcaacaactctggatcactggatgacaccagactgcagttccaggatgtcttgaggaaagtttctgagccattaacatggaaggaacgcttgagatcccgagatggcctgatctccgttgtcgtgtgtacggcagtgggcgtattgcttgctcggaagaatctactatgattctgataaggttcaggaagctaagaacagtgatatgtcgttttagagtagaggacgtacacaattaagcttgtctggtgcctgtgcctgacaaggaaattgaacggctgtatgtggagctttgattgatgaaataatttttttgtttgacgtattgttttttgcaatagaaattgccacagtaacacaatgcatatataggttggctgaa

SEQ ID NO: 149282 - DNA, 526 bp, Zea Mays
tattttttaggactgagattgatggatattgtgaaggtgaactaatcaaggtacctttgggaaggccttctattatattatctgagattgatggatatggtgaatcaaatgaacttcataacattggccttcagttaagagatgcctactcactgcctgaaaatcggtgtgcagatcttttagggagtcagcggccttgcaatccccctctacaaccataagaatttttgtgtgctacagatttagtactggtgagtatttgttttttagagttgatggattttctgatagatgataacattggtggaacattcatcacagatgaatccctctatacagttccaaacagctgcacaaatcttaagagagaggtaggaacaacaatggtcgttgttgctgcacaaacaaaggctattgctggtaacttttacttgttatattatttaagcatattatatagactagacatttgctactttgctttctgatcatattatgtttttgatttattcctgcaactgttcaa

SEQ ID NO: 149283 - DNA, 327 bp, Zea Mays
atggcacctgaagatgttcgatggatggttggagcatggagggagagaatcattgtatgcagcggtaagtatggcctcgctcatggcctggtgaaggcattcatggattgtggcgccaaagcagtcatctcatcgtccatcgagcctccggattcccagacaatagtctaccatgggatggatgtcaatggaagcctagagaatgggaagtttgtcatcggggatgaagaagccgatgaatcagagcctgaacctgttagccctgtaagtgactgggaggacaacgacgtggagaaaggtggcaaccatgacatggatgatgagtag

SEQ ID NO: 149284 - DNA, 1716 bp, Zea Mays
gtccgagccgagctgctgcgagcccgagtcagctcgtcgagttccaactttttttttcagcacctaaagtgtgatgtcgtgtcgtggctcgttaaaacatgtggtctcacctgttgtatatctattgctctgctaatagaaatggagcgccttaaaataaatctcctgctgcagggtaatttccaccttcccgaaagccaaagaggaaaaaggaattgcgcctcccgctacgctattaccgccggcggccgctgccatggacgttggcgcgaaggaggaggagatgggtcaagtgtggtggggccaccgcgcgtggtccctcctctccgctgttcgtgcacgggcgccgctagtgcagtgcatcaccaacctcgtctcaatggacatcgccgccaacgtgctcctcgccgcgggcgcctccccggctatggtccactccctccgcgaggtgcccgactttaccccgcgctgcgacgccgtgtatgtcaacgtcggcacgctctcggaggactggctcccctccatgcgcgccgccgcctccgccggccgcccctgggtgctcgaccccgtcgccgccgccgcctccgggttccggatgaaagcctgcctcgagcttctgtcgctctgcccagcagtcgtcagggggaacgcctctgaaattctcgcgctcgcttcccgctcaaccgccgcctcttccaatttcaagggtgtggacagttcacattgctctgttgatgctattgaagctgcaaaagcgttggcactgtccagcagtgctgttgtcgcggtatctggagctgttgatttcgtcactgatgggaagcaggttatcagcgtgagcaacggtgtgcccatgatgcagaagatcaccgcaacagggtgcgctgtgactgctcttattgctgcatttgttgccatggaaccttctgatgccatagttgcagcggcatgcgctcttgccatctttggtctggtgggagagattgggatggagtcagccaaggggcctgcctctcttaggatgcacctcatcgacgctctctactgcctcaatgaagaaacagtcacttctcgggttaggatttccttgcgaccatgatgcgcggacgcatgccatggctactgttttttcaggtaaatatggagtttcgaataataggaaggctgagttcattttctgaaatgtcttgataaccatgaaaatcatagacactcctttaaccttcacgactgtacgaaatacctagatgtgatgcccaagttgtgcctgaattgtcagctgtacatatttaatacagtaaaatggggaaccttgtttctttttttcagtccaagctgaagacatggaggcacgatggaataatgcacgtagctggatttgtgttatatgattataatcatatggtgccatggaaacatagaggcacgttgagatgctaaagccatgcagacactagacacaactgacaccttatgatgataaatagcagtagtaaatagaacaaatgtgattcacttgacgcccaacatttgttctttatcagtccaagttggagacatggagtctccttgtcacgataaagagtggtagccaatagaggaaatacgatttaactgtcactatcaattgcaagttttgtaatgaggtcctgagcctcagaatcataggtgtatgaatcagaaatctcagtaatccactttggattgcatgatgat

SEQ ID NO: 149285 - DNA, 1572 bp, Zea Mays
ttttttttccctgatcttttcttctccgtggacttaagccgattagcacctggatattttctccacgccgtcctcatcctctcttcgatctccagcgcacagccttatcccgcaaccaccctcacctgatttttcccagccgccgctctgggctgtcaaaaatcctgctcgccggcagaagctcccagccgcgcgtatctcccagccaagcttccctgcttcccagccgtcgaagctccctgcacgtcgtgctctcttccatggtgcgtgccgcagtttgcccagtcgcgtcgcagtttgcccagtcgcgtctgctccctgacacgcgctctgtcctcatcccttctccagggccccgcctgctctctggccagccgctcgatccatgctgctgctcacccatggcggctcccttgccatggccgcacgctgccggttccctgctcgattgtgttcccctgcgtcctcccctgcatcgtgccctgcttcctgttctgcgtgccggtcgtctcttcccaacgacgtgtcctcgtcttcccctctgttctctctctctctctcactctctctctgatgcccatctctcatggccggcttggggatcctgctcgcgagcgtgctccttccctttaagcccatggcgctcggctccctgacgttcgtcctggtcgccgcgccttctctctgctcgctgctcgtcggtgccttctttgctcctcaatccatggcgcccggttcagctcatgcccagctccaactcggcgccctccctgctcgatctctgctccagctcggtgcgctccggccctggctctctgctgcgcacctgctccagctcctagccagtcggagctccttctcccttggactagcacgccggctcactgcttggccccctgccccatcgtcctggccgcggtctcgccctgctgctccagcgctgcgacttcccagctcgctgcgtccttctcgctccagcttggattcgcctatcgcggcaaacgtcttatctagcttgttcgtagcagcaactatcgttctatacctgcaagtccctcttcaacctcaataggagctcctgatcatcggaagggtagtagatggcgacggtgggatgcaaggcatgagatcctggcttcttgctggacttctccacgaggatgatcagttgttgctgtgtactgcatgggtggagaaagcctggaggtgtgaagactgagttagatgtaagggaaagtgaggtccgtgtagcatctgtcaagtactcgatgaaatgccgcagcgtggtacaccttggtctgtgcagccccaatcgtgacctcgtcgaaccccgagagaatcccggatgttgggcaaaagcaagcgaggtttgggtgacgcttgtgtatccgatagaaagaccaaagccgaaaccattggtgtgatcgcggacgtcgcgtcgagtttagtcgtggaggtacgctagttgatcgtgacgtgaaggacaagagctggactaatttcaaggtaatgcggatgatgaaatattttaatcacttataaagatgtgtttatgtttacaataaaaaaatg

SEQ ID NO: 149286 - DNA, 732 bp, Zea Mays
cgagaaacagaggcgtgcacagggaagtcggcgcgcaggggacggcaggtccgaaggtcaccatggcgcggtgcagggaggccgagtggaggacggcgttgccggagcgcgcaggccgagcaagaagcttggcgagttgacgatgttgaggggcgtgcgcagggacgagcgagcagggaggagcgccgagcggagctgtggacagaggaactgtagccgggaacgcgacgaggtggccatggtcgagcagagaaagttccggccgggcgcgacgagtagagagaagcggctgccagacgccataggagacgagcgccaagcaagaagaggggacgaggcgcgacgctgggagctccgcgagagatagatgggcgtgcagcggctagcgcgcagggagccatgggagagggagtcgagctggagctggaagaagctccggccatgggggatacaaggggatggggcgagctcggggaggaagaccgtgacgcgcaggaaaactgaacgccgagcaagaacacggcagtgaggagctcggtcgggcgccatggggtgagctcggggaagctccacggcggggttcgcggcgcaggacacaggcgcgcgcgcagagggagatgcgcacggttggcgagcgcagggagcatggctagggcgtggccgagctggcagcagggaggagcagaagagcacggtgtggcagggaaggaggaagccaagcaccctggtgag

SEQ ID NO: 149287 - DNA, 103 bp, Zea Mays
tttttcttattttcttgagttttgctcatggggctcacttagggtttttaatttgggttgcacattcttatcttttaaaagtctcaattgttttgatcatgac

SEQ ID NO: 149288 - DNA, 601 bp, Zea Mays
gagactcgtgaggcctccgagcaagcagcggagagagatggagagagaaagccagatgccgctgctgtgttggccaccaccaccgactggggcaagagagaaggagagaaggaagatgccgtggtgaccggcggtacggatcttcttcacgcgcgaggtattgggatggatgcactcggttcgttggtcgacggcgagcttcgatgcttgcgttgtcgtcggggggcggagaaggacctcgtggccaccagaatttctcacccatgccgctgctccgccgcggaaccactagcgccgtggtcggagaatatcggcatcctcaccattggtacgtgaacctatatctgttgttgggatcttgtctccgtgtagcgctccccggattgggatctagagcacaggaccgccatccagtaggctcaccggcgatgcctcgccgtggcctcaggcagcgccaccgttaccaggcttgggcgatgggggtggaatatgggccgtcaatcccagatgaagggctgggatttgatcccggattctggtttggcctgaactcttctcggtcgtccgatgtggatccggcgcgtgataatcgacctaagga

SEQ ID NO: 149289 - DNA, 80 bp, Zea Mays
tacacctctattatgtgataacttgagtgctatacagattgctcatgatccagtgaagcatgaacttactaaacacatag

SEQ ID NO: 149290 - DNA, 234 bp, Zea Mays
atggccagggtgtgcccaggccagaagagctccatgctcatctacgacgcgtgccagctgcggcactccaacgcgagcttcttcggcgccgtcgacgcgtcggttgtggtctggctgtcgaacgcacagaacgcgacgcagcaggagcagttcacgacgcggctcggcgcgctcatgggcagcgtcacagagaggtcgaactcccgcctcctggccacgtcgaagctcctataa

SEQ ID NO: 149291 - DNA, 1038 bp, Zea Mays
taggcgttgctgtggcaggctgatgttgtttgtggctaaggatttgtacatgtttattttttccacatctgatgcccgaatttcattactaagaaacaacgaaattacaaatttgttcatgtttataatgaatagaatttgaagggattcaagtatagtgaagtgaacaaatgcctaggcatactttctttcttcgttaagtgaaatatcatttaccaatgagtcaatgagtagttgacaaggataacctccattggttgattttttggtagtaggatgtgtcctggaaataattcttttactgggccagttatatgctctggtactaaattggaagtgctttgtttgtaggttcttctttccctcccacacattaagcaggaagatttactagcatttaatgactctttgagtaaaactgctagtcctaaagagcaaaagcaacatatgcgaagcttacttctgctggctacagggaacaaactaagagcccttgctgctcagaagacaactaatgtgattaccaatgttacaacacggaataggagctctactgctcaccatggatcaagtgccgaagaagatggccatattgggttggccacactatcatcgatatgacctgccaaagttttgggcgtgtaaaaaaggttgcatatcattattggcggatgccggattcttgcagcatcattatgtgaggatgaatgcatgcgtagttatacggctatacccttcctgcctgccttcatgagcaactgaccgattctttggtttaggcggtctgtttttctagaatggatgtatgtaccttccgtgtgcgtgtgggttctggtaaatggtgaaagttgggtgtgattacttgtagctcacagttacatattgagggggtactcagggcccgtttggatacatctagctaaattttttaggccccatgtttgaatactagttagaaacattaaatatagtctaaaactaattacacagttaaggacaaagttaagacgagtattaattctatggtccgttcatgtg

SEQ ID NO: 149292 - DNA, 330 bp, Zea Mays
atggaggagcagaggccgaactggagaacggcgctcgcagggaggagcacgcggctggactggagcagggagatgggcgcgcacggagctcagctgcgagcaaagcccgagcacaggggcgagctcggggtagggaggaccgccgcgatgaggagggagaagagcgtggtgtggaggcgagctgccgtgggctgcttcactccccagcttgacgtgctagacccagatgcaccgtgtggcgcggcaggcaagcacgacctgggcgccggaggcgagaggcacgcaaggagaaggctaatagacgcaggtggtgctctgctgcggagatga

SEQ ID NO: 149293 - DNA, 506 bp, Zea Mays
acactgagttcagccgtgacagagaagctgcgccggcaagattaatggcgatttaatggccatgacgaagagcggtgctgcggaaaatggagcacgacacagcagggcgatggtcgggccagcgtcgagctagttgagctccggcgaggctttatgggtacggatcggcgctcgcaacagagcttgtgctcgcagggaggaacctcggttgggcacggatatggaaaacgatgagtgagcggccaccagggaagcttcacgagctggaggccaacgcaaggggctgggcgcgagcacaggagctcggcgtcgtggccatggccgagcaaagggagcagcgcgccatggatggaggagcagaggccgaactggagaacggcgcacgcagggaggagcacgcgactggactggagaagggagatgggcgcgcacatggagctcggctgcgagcaaagcccgagcacagggtggaagaatacggggatttacttattgaagaagaataa

SEQ ID NO: 149294 - DNA, 700 bp, Zea Mays
ttagaacgaatatgtgctggagctcctctcgtgacgctcttctctcccggcgctggagctcccctatcaagtcttgtccgacggcgctccggggcgctcctctccctggtcccggcggtgctcctcttcctgatgttgatgattactcggcccagccagcagtgcttccccgccagcagtgcttccccgccagtgcttcctcgctcctggctgtgcttccccgcgaccggttatcgttccctgagacgctcggtctcgctcccgacctcaacaatggagaccccgccaggagcgatgacgtcggcaccggctgttgtcatccccgatgacaaccatggttcgttcttagttgaacagttaccttgttgttgtgctaaaccctatacattattcattactacacattgtgtcagatgcgtataggtccgtcactattgaagatgttgaccactcattgattaaggcaccaacaacgcttgaggagatcggtgctctgcctcctatggatgttgtaaagcttcgttaatggtcaatggccaatgagagtgttatgtacccaatgagagtgttatgtaccttaaacttgtatttctaagtactataagtgaactttcagtgaacttgttgttttcagtgagctttcagtgaactgttaaccggtattagaatcaatgaactttcattgaactgtgaactaggc

SEQ ID NO: 149295 - DNA, 615 bp, Zea Mays
ttagaacgaatatgtgctggagctcctctcgtgacgctcttctctcccggcgctggagctcccctatcaagtcttgtccgacggcgctccggggcgctcctctccctggtcccggcggtgctcctcttcctgatgttgatgattactcggcccagccagcagtgcttccccgccagcagtgcttccccgccagtgcttcctcgctcctggctgtgcttccccgcgaccggttatcgttccctgagacgctcggtctcgctcccgacctcaacaatggagaccccgccaggagcgatgacgtcggcaccggctgttgtcatccccgatgacaaccatgatgcgtataggtccgtcactattgaagatgttgaccactcattgattaaggcaccaacaacgcttgaggagatcggtgctctgcctcctatggatgttgtaaagcttcgttaatggtcaatggccaatgagagtgttatgtacccaatgagagtgttatgtaccttaaacttgtatttctaagtactataagtgaactttcagtgaacttgttgttttcagtgagctttcagtgaactgttaaccggtattagaatcaatgaactttcattgaactgt

SEQ ID NO: 149296 - DNA, 2149 bp, Zea Mays
acaaatacttgcaaccacaatttgttctgtttgcaagccacaaatatttgcaagccacaagccaagccaagcaaaaccctaagaaacccaccctccctccagtctcctcgacccccgccgccgccgccgccatcacaacccagagcaccccctccccaccccaccctgtcccgatggctgcggacgccgccgctgcggcgatgtccgcgacttccctctgcgacgatctcgagcccgccaccgtgcgcacccgcatccgcgatgtcctggccgcaggtgccgcgcgtgccggggaccgcgtcgtggtcggtgggtgggtccggacgggccgggagcaggggaagggctctttcgccttcctggagctcagcgacgggtcctgcgctgccacgcttcaggccatcgttgacgccgccgtgcacccgctagcgcgcctcaccgccaccggcacctccgtcctcgtcgagggcgtgatcaaggagccgcccgaggggaccaagcagaacgtcgagctgaaggtcagccgcgtgcttgaggtcggcgaggtcgatgccgccgtctacccgctgcccaagggcaaggtcaaactcacgctcgagaagctcagggacgtcgttcatctccgttcgcgcaccaacacgattggagcggttgctaggattaggcaccagttagcctatgcatcacacaggttctttgatgagaatggatttctctatgtacatacaccaataataactacgagtgactgtgaaggtgctggtgagatgtttcaagtgacaactttatttagccaggctgagaaaactgagaaggaattgagagagaacccaaaaccttctgattctgaaattgaggcagctaaagttcttgtcaaggaaaaaggtgatgtggtcgcacagcttaaagctgcaaaagccagcaaacaagagatatcaactgctgtcgatgagcttaatagggcaaaggaaattgtttcaaaactggaggagaggttcaagttaaagcctgggattccacgcaaggatgatggttcaatagcttttgaaaatgacttcttcaaacgtcaagcttttttgacagtgtctggacagcttcaggttgagacatatgcatgtgctcttagtagcgtttatacctttggaccaacattccgggcagagaactcacatacgtcacgacatttggcagagttttggatggttgaaccggaaatcgcatttgcaaacttgcaggatgacatgaactgtgcagaaaaatatgtacagtacctttgcaagtggctgcttgaccattgccaggaagatatggagtttatggtgaaaaattatgataagagtgcaattgaacgcctggagcttgtttcgtcaactccttttgtgcggatttcatacacaaaggctgtggagctcttgaaaaatgttaccgacaagaagtttgacaacaaagttgaatggggaattgatttagcctctgagcatgaaaggtatttaacagaggatatatttaagaagccagttattgtctataactatccgaaaggaataaaggcattttatatgagactcaatgatgatgacaagacggtggctgcaatggatgttcttgtgcctaaggttggtgaattgattggtggaagccaaagggaggaacggttagatgttctgaaacagaggatacttgatgctggcctgcctttggaaccctatgaatggtacttggacctccgtcgctttggatctgtaaagcacagtggttttgggttgggttttgaaaggatgattctatttgcaaccggaatggagaacatcagagatgttatacccttcccaaggtacccaggaagggctgatctgtgatctttggagacattggttaaacagatgcgagttgaattcaacacgcgactagtgattttgatatgttttcaccgttaagtttctacttcctaatttgcacattttaattataaattgtggaactggtacggttgtcaaaaatcatgtaattttctggttgtattttattatatttgtatctctgatcaaacttctgtctttgctagttgtgctcaacaggcaatgtttttttctaaatgaaaaaaacaggtcaaaactgaattgtttaattaattgacatttcagtgtaa

SEQ ID NO: 149297 - DNA, 2318 bp, Zea Mays
acaaatacttgcaaccacaatttgttctgtttgcaagccacaaatatttgcaagccacaagccaagccaagcaaaaccctaagaaacccaccctccctccagtctcctcgacccccgccgccgccgccgccatcacaacccagagcaccccctccccaccccaccctgtcccgatggctgcggacgccgccgctgcggcgatgtccgcgacttccctctgcgacgatctcgagcccgccaccgtgcgcacccgcatccgcgatgtcctggccgcaggtgccgcgcgtgccggggaccgcgtcgtggtcggtgggtgggtccggacgggccgggagcaggggaagggctctttcgccttcctggagctcagcgacgggtcctgcgctgccacgcttcaggccatcgttgacgccgccgtgcacccgctagcgcgcctcaccgccaccggcacctccgtcctcgtcgagggcgtgatcaaggagccgcccgaggggaccaagcagaacgtcgagctgaaggtcagccgcgtgcttgaggtcggcgaggtcgatgccgccgtctacccgctgcccaagggcaaggtcaaactcacgctcgagaagctcagggacgtcgttcatctccgttcgcgcaccaacacgattggagcggttgctaggattaggcaccagttagcctatgcatcacacaggttctttgatgagaatggatttctctatgtacatacaccaataataactacgagtgactgtgaaggtgctggtgagatgtttcaagtgacaactttatttagccaggctgagaaaactgagaaggaattgagagagaacccaaaaccttctgattctgaaattgaggcagctaaagttcttgtcaaggaaaaaggtgatgtggtcgcacagcttaaagctgcaaaagccagcaaacaagagatatcaactgctgtcgatgagcttaatagggcaaaggaaattgtttcaaaactggaggagaggttcaagttaaagcctgggattccacgcaaggatgatggttcaatagcttttgaaaatgacttcttcaaacgtcaagcttttttgacagtgtctggacagcttcaggttgagacatatgcatgtgctcttagtagcgtttatacctttggaccaacattccgggcagagaactcacatacgtcacgacatttggcagagttttggatggttgaaccggaaatcgcatttgcaaacttgcaggatgacatgaactgtgcagaaaaatatgtacagtacctttgcaagtggctgcttgaccattgccaggaagatatggagtttatggtgaaaaattatgataagagtgcaattgaacgcctggagcttgtttcgtcaactccttttgtgcggatttcatacacaaaggctgtggagctcttgaaaaatgttaccgacaagaagtttgacaacaaagttgaatggggaattgatttagcctctgagcatgaaaggtatttaacagaggatatatttaagaagccagttattgtctataactatccgaaaggaataaaggcattttatatgagactcaatgatgatgacaagacggtggctgcaatggatgttcttgtgcctaaggtgtagctaaacttctcatacatcaaacctattgctggtaccagtgctccatgagtggggagcaaatgatttggccagtttttgagtcagtggaatatccgtttatttaactgctgattttacctttttatgtttataatcatttttgtgctggaatgtttatttcaaggttggtgaattgattggtggaagccaaagggaggaacggttagatgttctgaaacagaggatacttgatgctggcctgcctttggaaccctatgaatggtacttggacctccgtcgctttggatctgtaaagcacagtggttttgggttgggttttgaaaggatgattctatttgcaaccggaatggagaacatcagagatgttatacccttcccaaggtacccaggaagggctgatctgtgatctttggagacattggttaaacagatgcgagttgaattcaacacgcgactagtgattttgatatgttttcaccgttaagtttctacttcctaatttgcacattttaattataaattgtggaactggtacggttgtcaaaaatcatgtaattttctggttgtattttattatatttgtatctctgatcaaacttctgtctttgctagttgtgctcaacaggcaatgtttttttctaaatgaaaaaaacaggtcaaaactgaattgtttaattaattgacatttcagtgtaa

SEQ ID NO: 149298 - DNA, 1240 bp, Zea Mays
acggtggaatctagcatattttacttggcagttgataacatgacaaatttacttggcaggatacttgatgctggcctgcctttggaaccctatgaatggtacttggacctccgtcgctttggatctgtaaagcacagtggttttgggttgggttttgaaaggatgattctatttgcaaccggaatggagaacatcagagatgttatacccttcccaaggtacccaggaagggctgatctgtgatctttggagacattggttaaacagatgcgagttgaattcaacacgcgactagtgattttgatatgttttcaccgttaagtttctacttcctaatttgcacattttaattataaattgtggaactggtacggttgtcaaaaatcatgtaattttctggttgtattttattatatttgtatctctgatcaaacttctgtctttgctagttgtgctcaacaggcaatgtttttttctaaatgaaaaaaacaggtcaaaactgaattgtttaattaattgacatttcagtgtaagggatgcgagttctcgctatttaggataaagttaatattttttactgactatattttgaaaatactgtgtttccgatttgaagctctaagaaattctatgctcaaataatgggcaagtaactttgaagtctaagggtgtgttttggttggagagtcaatcgggttgattggttcactgcacgccgcttatccaggctcaccagaagcagtttgtgctagtttggttgtctgaccatcatgcaaaagcgtccgctgggccaggctccgggaaaacgtgagaattggccgtttttgctgagccaggctcgcgcggtgcaaagatgagatgctttaacaagcgtgcaaagaagaaaagactgctaggcccaagatatacatgttaccaatcactgtctccaccagacttgattgtatacatacggaaaccaatcaaaatgtaacgtacctctagagtccggttcccgtcgacctggctctcttgtccgagccaagctcctgatagaagagaaccaatcaggcctaattagaatagagtggttctattctagtttttgagtcactattttttgtttggttgatcgtgctgttccattctttgtttggttggagagccatgagtggaggtgagaagagggagtagagtgctcgcatctgagggagtgctcgcactcgactatagcgagagtactttaactatttatgataaa

SEQ ID NO: 149299 - DNA, 623 bp, Zea Mays
tttagcggtgaccgcggttccctcgggcgtgcaagcggtggagatatcgggggcgggcggcggtggtgccccgaggtgggtgacccacgccgacgctcccgaggcagcgggcaggcagcggtggttctcccctaagactgagtgatggcgacgctccagaggcgggcgggcaagcggcgacggcagtcccgagtcgaacgagtggcggcgtcgcaccctaggctcggtggtaacggtgattgtgcgaggcacgataggcttcggcagtgacggtggtggccatgggacacgcgggtagctccgacgggtgcgtgaggcgcggtcgtctccagcggtggtggccacatgaggcgtggttggctccggtgtccttcgatgaccaactccttcgatctgatggcctcggcggcggcgtcctccgatgacctcctccaattctttgtttatgcatgcggctgttggttgagcccatactaatttttcattaattatgatgtacggtgtaggtgtttatgcaactttatgtaacgatttatgttttgcatgatatcagccatctagcttttgtgtatttgctatgggaacgaaaataccattcaaaatttgtgtgcatgcaatggaaa

SEQ ID NO: 149300 - DNA, 874 bp, Zea Mays
gatctgatggcggcccatggcaaaggagcaggaggtgatggcagccacgggagaaagccgacgctcggcgtgattcccacccgtcgcgagccaagaggttcgaggtcatttttgagccaagaggttcgcggccacgggagcaaccctacagaaccatcaccaccaccgctctctcttcctctgctcttctctgcctgcctgagctcaccgcacctcgcctcctcaccgcggatcctccgttaatccggtagaaaatggccgatgccgaggatatccagcccctcgtctgcgacaacggaactggcatggtcaaggctgggttcgctggcgacgacgccccaagggccgtcttccccagcatcgtggggcgcccgcgccacattggtgtcatggtcgggatggggcagaaggacgcctacgtcggtgacgaggttctgcaaaccgatcatgacaaaaccaaaggtagctttgaagccgcagactctgtctccacaacctgaagcccaagcacctcatgatcctcaaacaccagagcaacaacaaagcgggactggtgtaggcgtgtagctggtgagccgggtagtgaaggaggtgtgtagcaggcctccagtgagcaaatgggcatggtgccagatgcatctgcggccggtggcaggaaggtcgagctggatggggacatgcggtggacatcacaggttggcccctccagtgatccatctcaaacactagccaggtttcctcctttgtcaccctcctttggcagttctcttcctaacgtcgccgtaggttcccttccctgctgtttttgtctcccatagctcttaaaattttaagttccctgtttgcataaaggccacaggaaaaacgttgaatc

SEQ ID NO: 149301 - DNA, 237 bp, Zea Mays
atgtacttttatgtctttagattgcaagattgcgactggtttaagaagcatgatgctgacggttctgttattgtcagtgcaagtgtggttgatgaattgcgggtgcaacgacaagaggaagtgcaagaggatgagacaagcgatgatgaagatgaaactggatggcaatatgctagtgataatgaagaatcaaaaactcttgtcaatgataatgatgatttcagcgataatgagtag

SEQ ID NO: 149302 - DNA, 147 bp, Zea Mays
atgggatggcgtaatcactccggtcaccgctcagagtcgctttgccgctgtgtagattttccggtgaacaatcccagggtcccccggcatcaatccacccggaatgaccacatgatttgcactggagatgtcggcggaatcctgtag

SEQ ID NO: 149303 - DNA, 318 bp, Zea Mays
atgcctcgcgacgggagcagggccagggcgcacgcaggggaggagcgcgggcgcggcacgcgctgggacccggcggagttcgatgctgcaatagagatggaaggcaagggtcgtgcgcgacctggaggcgagctcagcatcgaggtgctggcaccaagggacagtcagctctgtagtgcagcagtgggcgagctagaggcgaggttggccgctgggagcgagcatcgacgaggggaggaggacggcaagaggggcgagcgccgctggcggatatcgcccttatcctctagcttggtcgcgcctggcgtgcgttggtga

SEQ ID NO: 149304 - DNA, 502 bp, Zea Mays
aagggcggaaaatacacccgctttaaggaaggccagttcaatgcaacattcctatgcccaaactgcactgcatctactagacatggaaaccctggaccaagtgaagatttggaaactaagaagacatcaattgccgtcatcatagtagttagtgttcttgcttcagtccttgtcgtcactgccttgttcgggggcttcaggtactggcagaagaagaagagggagcgagaccaggcatggttcctcaagctctttgaagagagagatgaccttgaagatgagctgggcctaagtaatgaattctaaaatagtgcgtgcagtcttacttccgatgttttcagatgtagtttccacgtatgatgtatagaatgtgaatcctgtgaatactgaaatgtaccatttctaagtgccattcgtttcagttttttttgttttttattcgtaagtgccattagttaaatagaattgcgctcggttactaatgaacaaacttgactagtgc

SEQ ID NO: 149305 - DNA, 246 bp, Zea Mays
tttctcttttcaataatcaagatgagctgtggtggtagtgctggtggtggtcaaagttctctgggttatctctttggaagcggtgagccccccaaaccagtagtggcaccagctgcaagtgctccacctgttgagaaaccatctactgcaaagactgatgcgaccatgcaggttgctgctagggttaccagccaaaccaataactaccatagggctgatggttagaacactggtaacttccttacg

SEQ ID NO: 149306 - DNA, 628 bp, Zea Mays
ttcactaaataatagttacttcatcataatagacaacccaaaactatttgtaatgctacatttcctatatatcctcgaaaacaaattcgcaacttagatcaccctcatctcaagcatgaaacatgcaatatacccgctccatgctatgacgtggccatctctagcagaccgtgtaaacgatcgtgcaaagtactgttttgcacttattatagagtggagtttgaaatggtgagacagagtgtgatagggagtctgctggagatagttcttaaatataataacaagcacatctgacactccgagctaggcatatgaaagcatagatcaacactgtgaagccacaatgatagataactgatgagcccatgaagccacatcaatagatgaatgatgagcccatttgcattttgtactttgttttggaagagaaatcaaactagccatcctcaccgccagacaatggatcttgttccagcatatctactagagcacatatggccaaaactttgccaccagcaatgctgcaagttcactaatgacacaaatacaactaaggcaaccgttataccttttctatctcctgaaatggatgttgacaacagttggctgcatataagtctgctgaatc

SEQ ID NO: 149307 - DNA, 1045 bp, Zea Mays
ttacaggccccaacattagcacaaagaacacaatagaccactgatttcacaatgaaaagggagacaatgccttcatggctagaactgttgcttgcaacacaattctttacgacttgtgctaaccatcttcttgctagtcgcaatgaatgtaacctattttgcacccagtgtgagaccaaaccagctgctttctgtaactattgtcgttcaagtgatcattccacccaccgtgtaatccagataaggcgttcatcgtaccatgacgttgtgagggtgtccgagattgaggatatccttgatgtcagcgatgtgcaaacttatgtaatcaatagtgcaaggattgtattcctgaatgagcggccacaactgcgtgcttctagtgtccccatttgtaaggcacccacatcatcaacacatagctgtgagacatgtagccgtgtgctacttgatgcatttcgcttctgctctcttggatgcaatcttagaggcttaaatatggaagctggtatgcaagctatggttggcaacaaccctcggtccaatggtatggatcatgtggctaggattgacaatgttggttcaagtactacaaatgaccaaaacagctgcaatgacaagaactacgaagaaccaccaccaaaaagggttgctcgtcacagacgcaagggaattccccaacgtgcgccattcttctaatctgaacatcatgacaatgtccagtaaatgttgtgggaaataagaagagataatatttgtcatgggtgaaatgaatgaatgaaataaataaaagaatgaatgaatggccccagttctatgtaggattgatttcttcacattgcgagcctttcaaaaaaaattactagagcatctagcgattgttctctcaaagcatgtaattgttataccggaagcacacagttttaatcatagcctttatgacttaagtagttctaaccgtaggtttactttgaatcataaacactacaagacacaagatcattttcggcggccagaagccaccgaaaataagacatacaccgccgaa

SEQ ID NO: 149308 - DNA, 586 bp, Zea Mays
ctccatagaatattgcctggagcacatggatgtcgatttgcgcgctagctctggtgtcgttcctgtggcgctggtggatgacaaccggtgaatgtcgcgcacatcgtggcctcatcacgggcgcttagcgactggagtagccgatgtgcatgcgatccttcgtcgaaacagatgcattgccgtcgggatgttgatcgtcgcgtgcgacgctgtggcatccaaatctaccggctgggctgaccggtccgccgctcgccggggccatgtcgctggcaagcattgcgccggcgaggaagggtctgtgcaccaccatgacactagctggggacgatgatgcgccatggaccgttggatcgattgcggagggcacatattagatctaggcgtataatccttcgggtcgttgatcgttgattcgatggctgcgatcgcgttctggttcggtggtaagaaaatttaatcgtggcccttgatgcaggatccaacggctagaattaactgataccctttcgacctgcgcgttttgcaaaagagacctcctatttaactataaacaacccgcagtccacactgtgggagttctgag

SEQ ID NO: 149309 - DNA, 504 bp, Zea Mays
atggaggcatccaacaagctcgcagtcttgctcctgtggctggtcatggcagctaccactgccgtgcacccttcctactccgagaactcgcctcaagactacctcactccccaaaacagcgcccgtgccgccgtcggtgttggcccggtgatctggagcacgaagctgcagcagttcgcggagaagtacgccgcacagagggccagcgactgccgtctccagcactcgggcgggccctacggggagaacatcttctgggggtccgccggcttcgattggaaggcggcggacgcggtgcgatcgtgggtagacgagaaacagtggtacaaatacgccaccaacagctgcgccgccggcaaggtgtgtggccactacacgcaggtggtgtggcgcgccactacaagcatcggctgcgcgcgcgtcgtgtgccgcgacaaccgtggcgtctttatcatctgcaactacgagccccgcggcaacatcgccgggatgaagccctactga

SEQ ID NO: 149310 - DNA, 637 bp, Zea Mays
gcaggtaagttaggagtttactctgcagatggtgtctgagctctgaaccagtttcagtttctctgtaacctcagatatcgatttctgcttgctccacacgaagatagagtttgcagaagtagccagacatgaacacacagatggcagaagcagccagacatgaacaccctagacggtttcaggctttcagcatgcattcagctctgttgggcggtttcaccagcttctttctgctgccacgcttgtgttgcatttgcattcagcccgctgctcttattgccttgttgtgtgtgatctgggccaaactgacaacattttgggcacaattcattcagccatctacccaggagaaaaaagattccggttctcttcaagtgactcctccccctcacgatgactttgcggacagatgtctcaattctagtggtggagctacgaacaacaatctatgtcttgatcgagagcgatggagctaatgtttgaacttgtgaactaaaaatgtgaactatggatgtgaacttgtgtgaatttgtgaatttatgtatttggacttatgtgaattggtgaacttatgtatttggacttgtgtgaatttgtgatatgaacatatatccatgtgtttgaaatctgtattgta

SEQ ID NO: 149311 - DNA, 705 bp, Zea Mays
ctagaactgaaggttattacataggaagagttacatttcttacaagttctgatatacttaaagtgcataacttattacaaaagtaggaaggtagaaaccctccaaagcttatacataaacctagctagtcctcctccataactggaaatgccctccaaccataggaacacttagagtactcctcatcacctacaacaacatgggttcgaaaaccttgagtacggagtgtacttttgcaagtcttacccgactaaggaaaaagactctcaaggatatgctggttaaataggaatcaaggaaaggcttgagcatgaatcaacttagatacttttgcagaaatatcttactaaagtgagtccttactttcaatattttaacgctagattaaatattaatagactctggttgcatctagtctaatttcatcatctcatcaatacaacattatttatattcataatgtttacatcctggcctaggttgcaggtcagagatcaagtctccattgtccggggatataatggcgatccgaatcgatttactcagctgaggatctctaaccacacgacatatgtagcactcaatccttgcatatgtcaaccgtttccacagatcctccacaatgtgaaccggtccgcactacccgggagcacagtactcctccgtccagcctctagccaagagggtacacactactcccaccat

SEQ ID NO: 149312 - DNA, 1548 bp, Zea Mays
tgttgtctgtctctggctctcaatgactccatatgtccaagactccagctaggatgcccccgcacactgatgagtgatgacagaacccgtatgtgcgatgcatgcatggccgaaaaagattacttattcttgctagcccaaactcagtacttgtacatccggtgctgctgaaacaacaaatcaaagaatgcgacacgactggagctacatttacatgacaccattctttcatcgcccactgcaaaataagtagctactactaagaccgtcgacgacgatcgaatcgatgcctggtttctactttccacgactagggatcgtgcttggttttgatgccccacggacgtcccaacaaacctcgctccctcaccggagcttgcactcggcgggcacgccctgcgggaagcgcttggcgtcggcgcagtagttgtagatcatgaacttgcgctgcacccagcgcatgcggcggtagctcatgtcgctgagctgctggttccaccagccgcggccggagccggcacccgcgacggcggcggcctccatggtgccctcagggcagcgctgcctgccgccgtcccagacgcaggcgtcggcgctgaaaccgcggaaggaggcgacgaagggggccttggaccagtccgccttgacgcgcccgccctgcgtggcccagtcgtcggcgttccacaggctggcgtacagcctcatgggctgcgtcctcgggaacgccaccccgcgcgcctcgtggttcttgaagtcccgcaccggggtgccgtccaccgcgaagatcacgtgctgcgggttccacaggatggagtaggtgtggaaggcagtggtagggtcgaaccagaggcggaactgctgctcccgctggccctgtccgcgcgtgaacacgttggtgtgcagcgtgtagggctccccgctcacgttgcccaggaactcgaagtcgatctcgtcgtgcgcgtcgccctgggacgacaggtagaaggtggtgaccgtgccacggagttgcctggcaccagcttgatctgcatgtcgatcttgccgaacaggtactcgctcttggactggaacccggagccggacgtgcggtccagcgtcaggtccagcccgcgcccgccgtccactaccttgccgcggccatcgccccaggtcatctctgtgtcctggtagaagttgccgccctgcgcggtgcccgccagctccagccaggccacgaccgccgacagaaagacaggagcaaacgacctcatcgtcgcttccgatcctcccttctcagcggcggattgcaggcagctctatacccgccctctagtagagcaactagctagtgacagtgtcgagcgagcgttgctgtgtgtgttggatatggaacttggatagtagattggtgtgggggtggtatttatactggaggtcaggagcgcccggggccagttgcttagccgtggcaggcagccgcggccgggcacggacagctggtggtgaaccaacgggcgagtgccggccgggctggcgcgtccccggcgcggaggagtaaatgtgggagcg

SEQ ID NO: 149313 - DNA, 481 bp, Zea Mays
atgtttatatttgtagctttagttagttccattggtgtagtcgacagtactggagcagctgagaggccagtcaccggtattctccaaggcaaggtacactgttaggtcgtttgggatccggcgcaatgagaagatcgcatgttatgtgacggtgcagggtgagaaggcaatgcagctgctggagagtggcttgaaggtgaaggagaacgagctgctgaggaggaacttcagtgacactggttgctttggatatggtatccaagagcacattgatcttggcatcaacaaattttgtttgatgtgcagtgacacgaccttgacagtcaagatgctctttcaggttattttctcctgaaaccacttcttttgccatctcctaatgttatggtcccagttacatctccattcattgcaggagatggtcccagttactttacatggttctattggacacaatgaagccatccagatatgctattaa

SEQ ID NO: 149314 - DNA, 1078 bp, Zea Mays
aaatagtcaaataccaatataccaactttatcttatttactttatttttcttagaatagacttacgtttagccttagcagtagctttccaatctagtcttcacctccttcacatctacgtcatcttatgatactttgatggtctgattctgaagcaattttagaaccattcatctctgacgagatcccttctaaaaggtgggacctaggtctcgtttgaaatcctcgtcacggacaattcgcagagaggacattaaagctctacatatcacagatattataggataatgcacacattatccaatgcaagaatatgagatattgaacggcgtcatcaacactgggcttttccatttctccaacgtccacgagacgccgccacgccatcggcatgggcagggcagcagcaccacttctaccgcgtcccattattgcccagttccatctccatccccaccatctcgtccaccagtcgtgtcttccctatctccacgctaccgcacctgtcgccgccgcctccgccctctttgctcccggccccacttcaagcccaagcgtccgcgtctcccgcccgcgccgccacgcctcgatgtccgccgccgccgattcctcctcctccattgtagtatcgggtgatgcagcggttagctcgctctcgcccgatagcatcgagcacaacgatctgctcatagttgggcctggcgtgctcggacgaattcgtcgctgagatgtggaaacaggaatatccaggttgcaaggtttatggccagactgcaaccacagatcatcacagtgaattgactgatattggtatcattccctccttgaaggggtccgtaccgggtccaaaatttccatatgttatcttctgtgctcctccatatcgttctgaggattatgctggagatctgaggtaaataattgtaagctttcaatcataattgtctccgttattcatgttctatgccactcatagtctgacatatatgctctgcattttatcttcaacagaaaaaaatattgaaatctctgtagtcaatacttggaagttatgtaagagcatctccaatagttcaaaa

SEQ ID NO: 149315 - DNA, 1060 bp, Zea Mays
aaatagtcaaataccaatataccaactttatcttatttactttatttttcttagaatagacttacgtttagccttagcagtagctttccaatctagtcttcacctccttcacatctacgtcatcttatgatactttgatggtctgattctgaagcaattttagaaccattcatctctgacgagatcccttctaaaaggtgggacctaggtctcgtttgaaatcctcgtcacggacaattcgcagagaggacattaaagctctacatatcacagatattataggataatgcacacattatccaatgcaagaatatgagatattgaacggcgtcatcaacactgggcttttccatttctccaacgtccacgagacgccgccacgccatcggcatgggcagggcagcagcaccacttctaccgcgtcccattattgcccagttccatctccatccccaccatctcgtccaccagtcgtgtcttccctatctccacgctaccgcacctgtcgccgccgcctccgccctctttgctcccggccccacttcaagcccaagcgtccgcgtctcccgcccgcgccgccacgcctcgatgtccgccgccgccgattcctcctcctccattgcggttagctcgctctcgcccgatagcatcgagcacaacgatctgctcatagttgggcctggcgtgctcggacgaattcgtcgctgagatgtggaaacaggaatatccaggttgcaaggtttatggccagactgcaaccacagatcatcacagtgaattgactgatattggtatcattccctccttgaaggggtccgtaccgggtccaaaatttccatatgttatcttctgtgctcctccatatcgttctgaggattatgctggagatctgaggtaaataattgtaagctttcaatcataattgtctccgttattcatgttctatgccactcatagtctgacatatatgctctgcattttatcttcaacagaaaaaaatattgaaatctctgtagtcaatacttggaagttatgtaagagcatctccaatagttcaaaa

SEQ ID NO: 149316 - DNA, 198 bp, Zea Mays
atggtgagcagcggacgtcgatgtcgagctgggagtgatgggaaaaagagtaaagcttgggagtcgagcgtgcgaggcagagggaaacctcggcgctgctgccgctttggccagggctccaccagcgagctggacgaccaggaagccaggcgatctggtgcccgacagcttgagcaagggaccacagccagcacgtag

SEQ ID NO: 149317 - DNA, 1466 bp, Zea Mays
gccgtcccattttgtaagctccccttccccgtctggccgtctcgactgccccagtcctttctcagatccatgtctacccagaatctgctaactggcgcgtgcacgagctccgccccggccccgtccgaggcggaggaaggggacaggacgcctttggctgacgctgcgaacgcggcggaagagctgtaccgcctccgtgacacctttttcccccgggacccttccgagaaagtcgccgcactccgcgcccgcgccgacgccgccctcgcgctcctcgacgccttcccgtccgaacaaaagaagtctcgacaactgcgtggtgtttatgaatttttgaggggaaaaatactggatgtctttcctgattatcataaggaggctgaagatcatttatccaaagcagtaaagttgaacccatctcttgtagatgcatggttatgtttgggtaactgcatttggaagaagggggatctatctgcagcaaagaattgtttttcattagcactaagcaagggttcagataagaaaatactgtgccagatctccatgcttgaaagaagtatggctcaaggtagtgtagaccaggcgcttttagtagaagagagcattaagcatgcaaaagaagctattatgctggatattagagatggcaattcttggtataatatgggcaatgcttatctcactagcttctttgtgggaggagcctgggatcacactaagcttcatcattcagtgaaagcatatcaaaatgctgagaaggataaaactatgaatttaaatccagacctctactataattgggccacagcatgctgaagcagttttctttttagtttgcatttgctggatagggacaattacgatccaaaagattagcatcatttgtgtcatccttgagtggagtcaaattgaaatcatcgcacaagaaagccaccataagcactctatcagtgggtttgaacaaagccgttgctgttttgggaaaagtaattctgttcataagacatgacaatgttgctccgctgtattatttaatatgtgacttggaacggtcatattttatactgtcagtgtatgggctacataatgatgcaattaaagacggtgatcaagtggtattatttgaaccatactaccgaatccttgatgcatcatgtaaagacaagcactatcagttcaaatcaatacgagtggactttccagaacaaattctagttaacgagagagttccagcacctcatcatgttgcacgggcatcaatccatgcacacaacaaatcttgaccggtgaaaatttgggtactgtgtggcgtcaataccgtgagcaactgccagctgggcatatcatgtgtactcgcgtaaatgtgtagtgacatgttaccctatggctcaaaatgtgtaaggaagacttgggaacatattaaccatctcatttctccaattttcgttagttgttttcatcaa

SEQ ID NO: 149318 - DNA, 1513 bp, Zea Mays
gccgtcccattttgtaagctccccttccccgtctggccgtctcgactgccccagtcctttctcagatccatgtctacccagaatctgctaactggcgcgtgcacgagctccgccccggccccgtccgaggcggaggaaggggacaggacgcctttggctgacgctgcgaacgcggcggaagagctgtaccgcctccgtgacacctttttcccccgggacccttccgagaaagtcgccgcactccgcgcccgcgccgacgccgccctcgcgctcctcgacgccttcccgtccgaacaaaagaagtctcgacaactgcgtggtgtttatgaatttttgaggggaaaaatactggatgtctttcctgattatcataaggaggctgaagatcatttatccaaagcagtaaagttgaacccatctcttgtagatgcatggttatgtttgggtaactgcatttggaagaagggggatctatctgcagcaaagaattgtttttcattagcactaagcaagggttcagataagaaaatactgtgccagatctccatgcttgaaagaagtatggctcaaggtagtgtagaccaggcgcttttagtagaagagagcattaagcatgcaaaagaagctattatgctggatattagagatggcaattcttggtataatatgggcaatgcttatctcactagcttctttgtgggaggagcctgggatcacactaagcttcatcattcagtgaaagcatatcaaaatgctgagaaggataaaactatgaatttaaatccagacctctactataattgggccacaggacaattacgatccaaaagattagcatcatttgtgtcatccttgagtggagtcaaattgaaatcatcgcacaagaaagccaccataagcactctatcagtgggtttgaacaaagccgttgctgttttgggaaaagtaattctgttcataagacatgacaatgttgctccgctgtattatttaatatgtgacttggaacggtcatattttatactgtcagtgtatgggctacataatgatgcaattaaagacggtgatcaagtggtattatttgaaccatactaccgaatccttgatgcatcatgtaaagacaagcactatcagttcaaatcaatacgagtggactttccagaacaaattctagttaacgagagagttccagcacctcatcatgttgcacgggcatcaatccatgcacacaacaaatcttgaccggtgaaaatttggtattgtgatttagttggtagccagtacttattttgtttttgatgtttattagacttattacaggaaaaccattctgcaagtttttatcagggtactgtgtggcgtcaataccgtgagcaactgccagctgggcatatcatgtgtactcgcgtaaatgtgtagtgacatgttaccctatggctcaaaatgtgtaaggaagacttgggaacatattaaccatctcatttctccaattttcgttagttgttttcatcaa

SEQ ID NO: 149319 - DNA, 1576 bp, Zea Mays
gccgtcccattttgtaagctccccttccccgtctggccgtctcgactgccccagtcctttctcagatccatgtctacccagaatctgctaactggcgcgtgcacgagctccgccccggccccgtccgaggcggaggaaggggacaggacgcctttggctgacgctgcgaacgcggcggaagagctgtaccgcctccgtgacacctttttcccccgggacccttccgagaaagtcgccgcactccgcgcccgcgccgacgccgccctcgcgctcctcgacgccttcccgtccgaacaaaagaagtctcgacaactgcgtggtgtttatgaatttttgaggggaaaaatactggatgtctttcctgattatcataaggaggctgaagatcatttatccaaagcagtaaagttgaacccatctcttgtagatgcatggttatgtttgggtaactgcatttggaagaagggggatctatctgcagcaaagaattgtttttcattagcactaagcaagggttcagataagaaaatactgtgccagatctccatgcttgaaagaagtatggctcaaggtagtgtagaccaggcgcttttagtagaagagagcattaagcatgcaaaagaagctattatgctggatattagagatggcaattcttggtataatatgggcaatgcttatctcactagcttctttgtgggaggagcctgggatcacactaagcttcatcattcagtgaaagcatatcaaaatgctgagaaggataaaactatgaatttaaatccagacctctactataattgggccacagcagacaaatatttagagaattatgaaagggcccttcgtggttttgaagttgcagctttaaaagatcccgggcttggtgctaatacagaagttcagaagatcatcagtctccttgataagcttgataatgcaatgaagggacaattacgatccaaaagattagcatcatttgtgtcatccttgagtggagtcaaattgaaatcatcgcacaagaaagccaccataagcactctatcagtgggtttgaacaaagccgttgctgttttgggaaaagtaattctgttcataagacatgacaatgttgctccgctgtattatttaatatgtgacttggaacggtcatattttatactgtcagtgtatgggctacataatgatgcaattaaagacggtgatcaagtggtattatttgaaccatactaccgaatccttgatgcatcatgtaaagacaagcactatcagttcaaatcaatacgagtggactttccagaacaaattctagttaacgagagagttccagcacctcatcatgttgcacgggcatcaatccatgcacacaacaaatcttgaccggaaaaccattctgcaagtttttatcagggtactgtgtggcgtcaataccgtgagcaactgccagctgggcatatcatgtgtactcgcgtaaatgtgtagtgacatgttaccctatggctcaaaatgtgtaaggaagacttgggaacatattaaccatctcatttctccaattttcgttagttgttttcatcaa

SEQ ID NO: 149320 - DNA, 1630 bp, Zea Mays
gccgtcccattttgtaagctccccttccccgtctggccgtctcgactgccccagtcctttctcagatccatgtctacccagaatctgctaactggcgcgtgcacgagctccgccccggccccgtccgaggcggaggaaggggacaggacgcctttggctgacgctgcgaacgcggcggaagagctgtaccgcctccgtgacacctttttcccccgggacccttccgagaaagtcgccgcactccgcgcccgcgccgacgccgccctcgcgctcctcgacgccttcccgtccgaacaaaagaagtctcgacaactgcgtggtgtttatgaatttttgaggggaaaaatactggatgtctttcctgattatcataaggaggctgaagatcatttatccaaagcagtaaagttgaacccatctcttgtagatgcatggttatgtttgggtaactgcatttggaagaagggggatctatctgcagcaaagaattgtttttcattagcactaagcaagggttcagataagaaaatactgtgccagatctccatgcttgaaagaagtatggctcaaggtagtgtagaccaggcgcttttagtagaagagagcattaagcatgcaaaagaagctattatgctggatattagagatggcaattcttggtataatatgggcaatgcttatctcactagcttctttgtgggaggagcctgggatcacactaagcttcatcattcagtgaaagcatatcaaaatgctgagaaggataaaactatgaatttaaatccagacctctactataattgggccacaggacaattacgatccaaaagattagcatcatttgtgtcatccttgagtggagtcaaattgaaatcatcgcacaagaaagccaccataagcactctatcagtgggtttgaacaaagccgttgctgttttgggaaaagtaattctgttcataagacatgacaatgttgctccgctgtattatttaatatgtgacttggaacggtcatattttatactgtcagtgtatgggctacataatgatgcagagtacgcaggggagagacaagtggatgagaggaacaggagagagatcgcaaggcgtagggggaagggcaatcatcgtcaccggcctagctgtgatgatcagccaggacgatcgaagattaaagacggtgatcaagtggtattatttgaaccatactaccgaatccttgatgcatcatgtaaagacaagcactatcagttcaaatcaatacgagtggactttccagaacaaattctagttaacgagagagttccagcacctcatcatgttgcacgggcatcaatccatgcacacaacaaatcttgaccggtgaaaatttggtattgtgatttagttggtagccagtacttattttgtttttgatgtttattagacttattacaggaaaaccattctgcaagtttttatcagggtactgtgtggcgtcaataccgtgagcaactgccagctgggcatatcatgtgtactcgcgtaaatgtgtagtgacatgttaccctatggctcaaaatgtgtaaggaagacttgggaacatattaaccatctcatttctccaattttcgttagttgttttcatcaa

SEQ ID NO: 149321 - DNA, 1651 bp, Zea Mays
gccgtcccattttgtaagctccccttccccgtctggccgtctcgactgccccagtcctttctcagatccatgtctacccagaatctgctaactggcgcgtgcacgagctccgccccggccccgtccgaggcggaggaaggggacaggacgcctttggctgacgctgcgaacgcggcggaagagctgtaccgcctccgtgacacctttttcccccgggacccttccgagaaagtcgccgcactccgcgcccgcgccgacgccgccctcgcgctcctcgacgccttcccgtccgaacaaaagaagtctcgacaactgcgtggtgtttatgaatttttgaggggaaaaatactggatgtctttcctgattatcataaggaggctgaagatcatttatccaaagcagtaaagttgaacccatctcttgtagatgcatggttatgtttgggtaactgcatttggaagaagggggatctatctgcagcaaagaattgtttttcattagcactaagcaagggttcagataagaaaatactgtgccagatctccatgcttgaaagaagtatggctcaaggtagtgtagaccaggcgcttttagtagaagagagcattaagcatgcaaaagaagctattatgctggatattagagatggcaattcttggtataatatgggcaatgcttatctcactagcttctttgtgggaggagcctgggatcacactaagcttcatcattcagtgaaagcatatcaaaatgctgagaaggataaaactatgaatttaaatccagacctctactataattgggccacagcagacaaatatttagagaattatgaaagggcccttcgtggttttgaagttgcagctttaaaagatcccgggcttggtgctaatacagaagttcagaagatcatcagtctccttgataagcttgataatgcaatgaagggacaattacgatccaaaagattagcatcatttgtgtcatccttgagtggagtcaaattgaaatcatcgcacaagaaagccaccataagcactctatcagtgggtttgaacaaagccgttgctgttttgggaaaagtaattctgttcataagacatgacaatgttgctccgctgtattatttaatatgtgacttggaacggtcatattttatactgtcagtgtatgggctacataatgatgcaattaaagacggtgatcaagtggtattatttgaaccatactaccgaatccttgatgcatcatgtaaagacaagcactatcagttcaaatcaatacgagtggactttccagaacaaattctagttaacgagagagttccagcacctcatcatgttgcacgggcatcaatccatgcacacaacaaatcttgaccggtgaaaatttggtattgtgatttagttggtagccagtacttattttgtttttgatgtttattagacttattacaggaaaaccattctgcaagtttttatcagggtactgtgtggcgtcaataccgtgagcaactgccagctgggcatatcatgtgtactcgcgtaaatgtgtagtgacatgttaccctatggctcaaaatgtgtaaggaagacttgggaacatattaaccatctcatttctccaattttcgttagttgttttcatcaa

SEQ ID NO: 149322 - DNA, 1693 bp, Zea Mays
gccgtcccattttgtaagctccccttccccgtctggccgtctcgactgccccagtcctttctcagatccatgtctacccagaatctgctaactggcgcgtgcacgagctccgccccggccccgtccgaggcggaggaaggggacaggacgcctttggctgacgctgcgaacgcggcggaagagctgtaccgcctccgtgacacctttttcccccgggacccttccgagaaagtcgccgcactccgcgcccgcgccgacgccgccctcgcgctcctcgacgccttcccgtccgaacaaaagaagtctcgacaactgcgtggtgtttatgaatttttgaggggaaaaatactggatgtctttcctgattatcataaggaggctgaagatcatttatccaaagcagtaaagttgaacccatctcttgtagatgcatggttatgtttgggtaactgcatttggaagaagggggatctatctgcagcaaagaattgtttttcattagcactaagcaagggttcagataagaaaatactgtgccagatctccatgcttgaaagaagtatggctcaaggtagtgtagaccaggcgcttttagtagaagagagcattaagcatgcaaaagaagctattatgctggatattagagatggcaattcttggtataatatgggcaatgcttatctcactagcttctttgtgggaggagcctgggatcacactaagcttcatcattcagtgaaagcatatcaaaatgctgagaaggataaaactatgaatttaaatccagacctctactataattgggccacagcagacaaatatttagagaattatgaaagggcccttcgtggttttgaagttgcagctttaaaagatcccgggcttggtgctaatacagaagttcagaagatcatcagtctccttgataagcttgataatgcaatgaagggacaattacgatccaaaagattagcatcatttgtgtcatccttgagtggagtcaaattgaaatcatcgcacaagaaagccaccataagcactctatcagtgggtttgaacaaagccgttgctgttttgggaaaagtaattctgttcataagacatgacaatgttgctccgctgtattatttaatatgtgacttggaacggtcatattttatactgtcagtgtatgggctacataatgatgcagagtacgcaggggagagacaagtggatgagaggaacaggagagagatcgcaaggcgtagggggaagggcaatcatcgtcaccggcctagctgtgatgatcagccaggacgatcgaagattaaagacggtgatcaagtggtattatttgaaccatactaccgaatccttgatgcatcatgtaaagacaagcactatcagttcaaatcaatacgagtggactttccagaacaaattctagttaacgagagagttccagcacctcatcatgttgcacgggcatcaatccatgcacacaacaaatcttgaccggaaaaccattctgcaagtttttatcagggtactgtgtggcgtcaataccgtgagcaactgccagctgggcatatcatgtgtactcgcgtaaatgtgtagtgacatgttaccctatggctcaaaatgtgtaaggaagacttgggaacatattaaccatctcatttctccaattttcgttagttgttttcatcaa

SEQ ID NO: 149323 - DNA, 1693 bp, Zea Mays
caccatgcccaaatccacaaattatttccattcgataggcttactgtgctgtattcatgacctgactgttttatctaactgtggtttgattagctgctcctgccaagaagggtgatgccaagaccaggccttgaaggttgtcaaggctgtgaagtctgggccaggaaagaagaagaccaagaagattcgcacatccgtgacatttcaccgccccaagaccctgaagaaggctagggaccccaagtacccaagaatcagcactaccagaaggaacaaccttgatcagtaccaaattctcaagtatcccctcaccacagaatcagcgatgaagaagattgaagataacaacactctggtcttcattgtcgacctcaaggcagacaagaagatcaaggctgctgtcaagaagatgtatgacattcaggccaagaaggtcaacaccctgatcaggcctgatggaaagaagaaggcttacgtgaagcttccatgtaagcacccttcggatttcccctccctcccttctatgtctctttcaccagctggatccaaccgtccattccacactcccctggcccctcaccctcgctggtgtctaggcatgggcgtcgcctatgagacgactaagagtggtgtcggcgtcgcctccatgggcgtcatgcgcctcaagcttgtcatgaagtccatcgtcctcatcgtcatggccagagtcctcggcatctatgacctcatcatcgccgccatcatctctgccgggatcaaccccaaggccaagcccaagccctacttcttagacggctacgcacacctctccttcgaactcgcatgcagccttgctggcctcgttgccggcatggccatcagcatcgtcagagacaccagagtcagtgtagcagattgcgagggttacccttacctttttctgtctatctcgattgaatggaatggaggctcggatactatggatgaaattcttgttaggatacaacaactggaagaagcagtagtaaagcgtgagcgagctatggcgtacacgttcaaccatcagtggagagcaaggtctgccacaagtctaggaaacttcagctatgaagtcggtaagggtggctggggctggagctggatggaccgctggatcgtagcacgcccatgggagtcgcgatccatggtccaccctgagaacccgaagaaagcacaggcgaagaaagagaacaccacaaacccattagctctcaagctacaaggctccattaccctaagcaacaatatcaatgaccggaaaaccctgaaaaagaagccattgccttcagcttctcttactgatcagaagaagccatcaccgtcgccttcttccgatcagaagaaaccagtaccgaaggagcagagagcaaaggcagctggcactcctccaaaaccaaaggccaaatatatgaaggggagtcaagagaaaaagccacaaccacaacagagagtgtctcctccgctgagccaagaagcaaaggcgtacgctcaagagaatggtctcttcttcatggaaacttctgccaaaatagctaccaatgtgaacgacgtgttctatgagattggaggaatccaatgggaagcggtgcatatcgaccaagcgcggtggcatggaggacaacccgagaatggtggaaagaagcaggggaaggacaacgcaacgaagcccccctag

SEQ ID NO: 149324 - DNA, 1969 bp, Zea Mays
ttccccttctccttcccacgttttccttcaagcacgcccgtcctaccccgcttccgtgtccgtgatcgcccgtcgacttttgcgctgccgtagcgggttgaagcggagatccatcgcctggcctgccgcggagtcagtcccaccccacctgagatggcttcggaactatctcacggcactaggagagacgtatgcatcgagtccatggcgcggcctatcgccgtggaccaccgcataagcatccactactatttccgcatcgctgacaacctcctccgccaggctaatgtgtatcgagaagagaagaatgttctggacctctacatcctcctcctgagatactcgagcttgttgcttgagaccatacccaaacatcgcgattataatgcatttaaggctagagaaaaggaattcctgaagaaaggcccacacaactctgagaaaattcttggtattgtcaatgagctagagtcccttaagccagttgtgcagcaacaaattgccaccggtaatagcaggggtgcagatgaacctaatggtgtatatggaacctatgctgcaagtagtgagttggagcaccataccccaggcccatatgtgtcgaagtccttgtctggaagccctactagactactgcagaaaccattacctggttcaaagcatcaagcagctatgtcgcagaatgttcaaccttatagacatgctatgaaaccatctaccaacatgctgtatccaaaagaggaaacattatcgagacactcgatactaggacctaatgggcttcaggggaatctgggtcaatgggcaagacctgttactggtatcaggattgagtatccacataatcctgaattaacccaaagtgacatttctagtttaatgccaacaaccttgaaccaagatggtttgcgtggtcccagtacagcatctcagggcaaaagtgacgatatgctgtctgttctatcgcttgatgatggcaggtggtcattaccattagaaccagcctcagtgtctcctggtttggaagcagagttctctcacctgaatattagacaaccttctcccccacctgtcctagctcaagtgcaccctgagcatggtcaaattcctccatcaagagttgctgatccaagaccaggacttgctacatctgcaaccggacgctatcagaatttgcatgtgccagtggcattaatggagtgtttcctgaggctcgctgagttaaataccgcaaagaatttggaaacctgtggaattcttgctggtactctgaaaaagagaaccttttatgtgacaacattgataattcctaagcagaaatcaacatctgattcatgtcaagctacgaatgaagaagaaatatttgaagttcaggacaaaggctcccttttatctcttggttggattcatacacatccaacacagacctgcttcctatcttccattgatcttcataatcattacgcatatcagattatgcttccggaagcgattgcaatagttatggctcctacggatacaacaagaaaacatggcatatttcatctaacggagccatgtggcatgggcgtgatccatgattgtgatgcaactggattccaccctcatgaggagcccctagatggaacaccaatctatgagcattgctcccatgtgtacatgaacccaaatgtcaggtttgagatgacagacctacgtgaagcatgaaaagcgatattgacgactgttgcagattccaaaacccacaatgacttgcacatatctcatctgttccactcctgtgtacacaagttttgttttgaaacggcagtttgttttaatcttgagggaagcgatcattaatttgtagtaatcaatttatcaaaacatgcaacatggtgcttatttgttctcggaccctttaatggttgcttatcttttgttttctttattataatacatgtttgtgtgttgcagttgaagaaaaaaa

SEQ ID NO: 149325 - DNA, 231 bp, Zea Mays
attatattttttatttactaggatttttatttaagaagaaatgttattcaataaccaaaaatcaatcacgcgcaataaaaaaatattccaaatgcaaatacataacaaacacttaaaagaatcaatcatggtcgctaaaaatcatgtttacttgttttaattaatttttagtcactaacatctacaggtatgttcaggctataagatttgatagtgatccttgctctatag

SEQ ID NO: 149326 - DNA, 1709 bp, Zea Mays
aaggaagtatcgacctgatccttgcttccttgacaccgtgtccatatcgcgacatggcgtgtcaccaaggcggtgccgacctggcccttgcccatttagcaccatacctaggttctgatatgacgtgttgctaagagggttacaccccaacagatttttttgggttaactttggctcgccaagcctaacacaacccttctcatttacacatgttcttatgtttagaaaatatttcttggctactctggttacccacttttggtaggtatcaaatgctaatgctaaatctggagcggagctgagattaaaattcatctgacttgtgaatattctgggaaactaaatcagttcttgcatgaagtcgaagcacataagaggccagtgtggtcacgtagaaaaccagaggaaagaggtaaaagtaaaatatccagcagtacaagtggcttctcccacagcaaagtagagagttcatcgacgaatttgcaaactcctatggaacctgtacagactcctcaatatgcactgttccaggatagcaagaagataggagaagttcagcatgctaatcagtttatgtttcctggatatgggtatcctcctgcatatccatttcctaccattccgttagtgtcaaacattcaagctgaaggctatcagacaaaaccagctggcacaagctaccgaacttcggaagattacctaaaacagtcaagttccacagaaatgtcacaagatataccatcaagaccactaacaatgacaccacaagaaaagatagaaaagcttaggcgccggcaacaaatgcaagcactgatagctattcagcaacaacagcaacagtttggtcaacagggtcctggcagtgacacaatggtgtctcaagcatacacccctggtaacaaaaatccggattccttagggagttcaattgtcatagatgaaaacacaaataaggttatttcgcctgagatgattccaactgaccatgaccgggttcacaagagttctgcaatttcagatgatccctttatagaggaaaaaatatattatcagctacaagatgctcttggcaagttggataccaaaactcgactatgcattcgagatagtttgcttcgtttggtccatagtgcaacagagagaaagattgatggtgataggagcactaacaagactaataaagatgaagatgaagcttcggaagacgcatctactaggaaaacaaggtctccaaacaaggaagcagaaacaaccactaatccaattgatcgtatagtggcccatttgctgttccacagacattgctccaaggttgcaaaagcaacaaaagaaataatatcgtcaatccccttgactctagaacctgagccgaaggtacccttgggaactcctagggttccatcaaaagatcaacgagatgagcaagaaattgtgttgcaaccatcacaataatgataaaaagttatgcaaatccagtgatgatggcagtcttatgatcgcctgtggccctggagatcgcttgtgtaatatgtagccatttcaacattgtaggatccttttattttcatcctgtaagaacatctcagattgtataggaacctacgattttgtgccgagccgtaaaaagagcaaaccttggctctggacataaggcgtgtttaggagcaagaggattaaagcaaaccttggctcttggctctggacataag

SEQ ID NO: 149327 - DNA, 1820 bp, Zea Mays
aaggaagtatcgacctgatccttgcttccttgacaccgtgtccatatcgcgacatggcgtgtcaccaaggcggtgccgacctggcccttgcccatttagcaccatacctaggttctgatatgacgtgttgctaagagggttacaccccaacagatttttttgggttaactttggctcgccaagcctaacacaacccttctcatttacacatgttcttatgtttagaaaatatttcttggctactctggttacccacttttggtaggtatcaaatgctaatgctaaatctggagcggagctgagattaaaattcatctgacttgtgaatattctgggaaactaaatcagttcttgcatgaagtcgaagcacataagaggccagtgtggtcacgtagaaaaccagaggaaagaggtaaaagtaaaatatccagcagtacaagtggcttctcccacagcaaagtagagagttcatcgacgaatttgcaaactcctatggaacctgtacagactcctcaatatgcactgttccaggatagcaagaagataggagaagttcagcatgctaatcagtttatgtttcctggatatgggtatcctcctgcatatccatttcctaccattccgttagtgtcaaacattcaagctgaaggctatcagacaaaaccagctggcacaagctaccgaacttcggaagattacctaaaacagtcaagttccacagaaatgtcacaagatataccatcaagaccactaacaatgacaccacaagaaaagatagaaaagcttaggcgccggcaacaaatgcaagcactgatagctattcagcaacaacagcaacagtttggtcaacagggtcctggcagtgacacaatggtgtctcaagcatacacccctggtaacaaaaatccggattccttagggagttcaattgtcatagatgaaaacacaaataaggttatttcgcctgagatgattccaactgaccatgaccgggttcacaagagttctgcaatttcagatgatccctttatagaggaaaaaatatattatcagctacaagatgctcttggcaagttggataccaaaactcgactatgcattcgagatagtttgcttcgtttggtccatagtgcaacagagagaaagattgatggtgataggagcactaacaagactaataaagatgaagatgaagcttcggaagacgcatctactaggaaaacaaggtctccaaacaaggaagcagaaacaaccactaatccaattgatcgtatagtggcccatttgctgttccacagacattgctccaaggttgcaaaagcaacaaaagaaataatatcgtcaatccccttgactctagaacctgagccgaaggtacccttgggaactcctagggttccatcaaaagatcaacgagatgagcaagaaattgtgttgcaaccatcacaataatgtgagatgtgctagaagataaggttttactcaatttgagtaaacttatttgcatttagttagcctatgaatctaatgtcgtccttctaacgagtatacacatgctgattaatcaactgttcaggataaaaagttatgcaaatccagtgatgatggcagtcttatgatcgcctgtggccctggagatcgcttgtgtaatatgtagccatttcaacattgtaggatccttttattttcatcctgtaagaacatctcagattgtataggaacctacgattttgtgccgagccgtaaaaagagcaaaccttggctctggacataaggcgtgtttaggagcaagaggattaaagcaaaccttggctcttggc

SEQ ID NO: 149328 - DNA, 100 bp, Zea Mays
ctcacttctttctggattctaacattctccttctggtctcaaattattgttttggacacgagcatatattggactatactcgctacatatggtagaggac

SEQ ID NO: 149329 - DNA, 239 bp, Zea Mays
cgcattctcccttccctggactattcttggtgggtggagagagccgcagaaggcagctggaagaggagaggaccgcgcgaggctccgtgccggcgagttcgggtgcttttcctgcggtccgagatgcgatcgttgggacccgggagatagcgcagctcgggttcgggttcgggggcggctaccgcgacggcggccgccacctgagcaggatgtttaactggaacgacgagcagcaccag

SEQ ID NO: 149330 - DNA, 843 bp, Zea Mays
cctgctcgctatcgctccgggcaactcattgacctgcccaccttgccaccggcatggtcttactagcggctatagttgaccagcttcgctaagcttaccctgaaactggccttagccctgcggccgtctccggcatggccacatcggaggcagcttcacgtacccggttgtgcccatctccatctgcgcgatacgcatggcgccgaacagcctctcgggcagctcctcctcaggttgggactcgacaaggaaccccatgtcgatggtgaccgacatgatggcgccgagcgcgaggtgcagaacggcttggcgatcgccaagctgccgatgtccacgtcgatctcaaggtagccatcatccctgtggtagcggcaccagcgagtccgtcggctgggatgggcgcttccaccaccaagtagaacacgacgttgtacgcatctggccgacctgatacctatgggatcaaaagaaagaaaagaaatagcatcacgcgcctccttgtatgtccctggtggaatctagatgcggcatggcacgaccaggggtcggggcctggaggtgggggtgcagtgcacctagagattgacggtgaggaggaagtgggtggaggggtccttcccaaggcacacacaacggaatgcggcggtgacgcggttctcttcgcgggcgagtacgtggtcgaggagcacgcgtgagcgaagccatttgatgacggcggggcggagcagctagtccgcggcggacagcgccttgccgcgcttcccgctgccacaggagaagtagccgcgcgcacacaggtggaagatatccctcggcggtgaggcctagccgttggtgccccgg

SEQ ID NO: 149331 - DNA, 150 bp, Zea Mays
atgggatcgaggaacgggaacgtggtacgcggtacgctacaaaaactagaatttaacactactggaacgagattgttcccacgttcccagaacggaacgaatgttcccggaacgaggaacgtggccaagttcctagttcccggttactaa

SEQ ID NO: 149332 - DNA, 1294 bp, Zea Mays
gcgcttcgatcccaattcccacttagacaatacgagtggtctcatagtcatagatagcgctagcagcagtagaaaccgccgccactaggctaggagtggaagcctcgggcccgcggcagcagccatggcggcgttcctggcgcctccctgcacttccttctatcgctcgtccgcattccttaccccctgttcctcgaatcgccggagtacagcgctaagggcggcggccgttcgtgggtcggcggtgacgcgggcccagcggacggtctccgctaggtgggtcccatccaggttagcggtggcgaggccggcggccaggaaggcgtgcctagaggagcttgatacaaccaacatgctccttcgccagcgcatcgtcttcctgggttccccggtggatgatacaagtgctgatctcattatcagccaactcctactattggatgcagaggaccagactaaagatattaaattgtttatcaactcacctggaggctctataacagcagggatgggagtatatgatgctatgaaattttgcaaagctgatgtgtcaactgtttgctttggattggcggcttcaatgggtgcatttttacttgctgctgggacaaagggtaagaggtactgcatgccaaatgcgaggattatgatccatcagccatcaggtggcgctggcgggaaagtcacagagatgggactacagataagagagatgatgtacgaaaagattaagatcaataaaataatgtcgagaattactggaaaatctgaggagcagattgatgaagacacgaagtttgattatttcatgagtccttcggaagccaaggattatgggatagttgacaatatcatagatgaggggaaaccagggttggtagctcccttggcaggatctgttccgcctcccaaatcgcgtgtgtggtacttgtggaaggcttcggggccgaccaggaagatcatgaaacatctaccttcagaggagaaactaattcacaatggtaacggaagtgcaactggagatgatggaaagctcaaggaggcaacggcaacttgaagacattttaggtgataaatagtaggtcgataatagaatggcttagtgcattacctgtattttaaatcattgtttgaatacagattattggaggatgttaatacagtgcagtattttggatgctgcgttttcatggggtgcaaatttagtttcttgtccttgcgatactttaaatcatgttattgaaattagataatgttatttaggaaataaaatgttaagaataatattcaaaat

SEQ ID NO: 149333 - DNA, 101 bp, Zea Mays
ctgaaatctggacatcgcaataccaatgaaataaattgtcagatcgctcttggtattcaccttgttctccttccaagcattgaatcaatacacacttactc

SEQ ID NO: 149334 - DNA, 624 bp, Zea Mays
atggagatggcaggaccgagagcgcagggagcacgacatggacagcggtccgcgtccggcgagctggagaccatggctgggtatgtgcaggaaagggagccgagcaggggcaagtgcgcagcggccatggaagcagggaaggagctcgggcgagctgctcggtgggctggagcagaggagcacggcgcggaggagaaaggagagcggctgggcgctatgaaggggctcggctgggcgcagggaggagcgccgttgagcaggaagcttcgcgcgcgcagggattccacggcgccggaggaacagaggtcgaagcgcgccatggcagggagaactcgagggaaaagaagccgcgacgctgggagatggagctcgaagccgagctcgaggacgcggctgcgcaccatagaacgagcaagggaccgaggcgagcagagcgcagggcgctcgagcgcgcgcagcagggagagaagcagggcggcgcagcttgggagcatgcgcgcggcgctgggcgcggtccgaataggggcgctcgctagggagctccgcgagagagagatgagcgcggcgagctgggagccaagcgccggccatgggaggaccaggggcgcgtggaggggaggctga

SEQ ID NO: 149335 - DNA, 963 bp, Zea Mays
tcaaaaagataagaagcgataatgggacaaagttcaagaactctcaaattgaaggatttcttgactgcttcatttactattttatttaaatgcgttagcactgttcatatataaattgcattttaaattgttattttgaaatcctacttgtatcttatttcaagacctccattctcaccgaactcattttatatcattttagaagaaagaaaaatataaggatgttgaacctagtgcaatagatcttttcaaggagatgcattgcagcaagaagaaatgttttagtgaaatgttcaaaaagctattgttgagatggaagaaatggtagcagcaccagttcaagatggacaacaaccaaaatctcctgtagaagttgtttctaatgtgctaccaggctctagtgtgttcctacgcaatgatcgtcttcagtccacctccaagaaaagctccacaacgacattttatgcaaacattcaacaacttcaggatgaactagagaccgagaagcaagaaaaagatggccttcgggaagaagtggaaaccttgaaggctcaagaacaagcatctcaggagaccattgatagtatgaagaggtcgatggatgaaataacaacctccttcgtcaactattaagctacaatcgaggccaagtgcctccatcttaagtctggttgaccactataagacctgtagccttatggctgctatagtggctagttatagtagctctatacttgaagtcataggatcattttcaattatgcttaatgtttaatactttgagttgaagttattggatttgttttggattttacgttaaaggatttgtagatatatgttttaaagttatattattctctatttgatgaaatatttgtgttgaacaagttcatataatattttggttgtggtgtgtaatattctaggatgatatgaatgcatatgatgtgttccttgcgacga

SEQ ID NO: 149336 - DNA, 1601 bp, Zea Mays
actaggaaaaacctagacacgaagtccaacccaaatctcaatatcccaaccctccgatccccatttccatccactccgacaccaatcctccgctccgaccaccgccggagaaatggggcggcgccgccggttcgcgcagctggacgatgacgacgacgacgacgaagacgtgcccatcaatttcaagccctcgggtggcgcctcctcctcggacgccaaacccaggaagccccagccgccgccgcagcagcgccgcggagtctccgatgacgacgacgaggacgtggaggaagtggaacttgaggaggaggaggacgacgagaaggatctcgaggcaatgcgacgggccgaggaggaggagcgccgcgagcaggaggccgagacgaagactcgccgccgccggggacggcccaagcgccgccgcgacccggggagcgaggatgaggagcccgaggagctagagctgcaaacggaggatccccgtgaggaggagatcacggaggcggtgcccgtagctgtaggggacccggtcaagatcactggcaaggggaagaagcagaagaagcactatgcttccttcgagtacgagggcaacagcttcgagctggaggaccccgtgcttctcacgcctgaggacagcaatcagaagccctatgtcgccatcctcaaggatataacagaaactgatgggagcctatatgtaactggccaatggttttatagaccagaagaggctgacaaaaaggagggtggattctgggtagcacgagatacacgagagctattttacagttttcatactgatgatgtgcctgcagaatcagttatgcacaaatgtgtggtccatttcattcctcagcaaaaacagattcccagtcgaaagcagcatccgggatttattgtccagaaggtctatgatgcagttgagaagaaactgtggaacctaacagacaaggactatgaggataacaagcagcaagagattgatcttctggttaagaaaacaatagaccgtattgggcagcttcctgatctcgaacctgaagagacacctcttgagaacaattatttgtcaaataaacgaggcctgcgtaagaaacctgttaaccctatagatgtaacaagagaacctccagttggcaaatccgagcagtttgcaaaagcagagacacctggaagtgataagatacggaattatgatacccttgttaagtataaagtacttactggacattctcatcgtgataggtggctcgataaattgatagaaagtattccgcttgcatcaaaggagaatgctggaacatctgctgatgctaattctacagccaaaagttcaatcagtggttcacctgcaaaggatgttggttctgctgaaaatgaaaaatcatatggacttgatgttgttgttgagataatgactgcattagaaagatctgcatatgaagctcttggaacagattttgggaaatataaccagaaactgcgacaactacagttcaacatcaagaatatctctaaacttcgcaggaggctgatggacaaggagcttgatcctccagttcttttaaccatgtcccccgatgaattaaaggtgtatt

SEQ ID NO: 149337 - DNA, 1749 bp, Zea Mays
agacacgaagtccaacccaaatctcaatatcccaaccctccgatccccatttccatccactccgacaccaatcctccgctccgaccaccgccggagaaatggggcggcgccgccggttcgcgcagctggacgatgacgacgacgacgacgaagacgtgcccatcaatttcaagccctcgggtggcgcctcctcctcggacgccaaacccaggaagccccagccgccgccgcagcagcgccgcgagcaggaggccgagacgaagactcgccgccgccggggacggcccaagcgccgccgcgacccggggagcgaggatgaggagcccgaggagctagagctgcaaacggaggatccccgtgaggaggagatcacggaggcggtgcccgtagctgtaggggacccggtcaagatcactggcaaggggaagaagcagaagaagcactatgcttccttcgagtacgagggcaacagcttcgagctggaggaccccgtgcttctcacgcctgaggacagcaatcagaagccctatgtcgccatcctcaaggatataacagaaactgatgggagcctatatgtaactggccaatggttttatagaccagaagaggctgacaaaaaggagggtggattctgggtagcacgagatacacgagagctattttacagttttcatactgatgatgtgcctgcagaatcagttatgcacaaatgtgtggtccatttcattcctcagcaaaaacagattcccagtcgaaagcagcatccgggatttattgtccagaaggtctatgatgcagttgagaagaaactgtggaacctaacagacaaggactatgaggataacaagcagcaagagattgatcttctggttaagaaaacaatagaccgtattgggcagcttcctgatctcgaacctgaagagacacctcttgagaacaattatttgtcaaataaacgaggcctgcgtaagaaacctgttaaccctatagatgtaacaagagaacctccagttggcaaatccgagcagtttgcaaaagcagagacacctggaagtgataagatacggaattatgatacccttgttaagtataaagtacttactggacattctcatcgtgataggtggctcgataaattgatagaaagtattccgcttgcatcaaaggagaatgctggaacatctgctgatgctaattctacagccaaaagttcaatcagtggttcacctgcaaaggatgttggttctgctgaaaatgaaaaatcatatggacttgatgttgttgttgagataatgactgcattagaaagatctgcatatgaagctcttggaacagattttgggaaatataaccagaaactgcgacaactacagttcaacatcaaggaatgccttgtgtatcctgtaaactactccctctggtccaaaatgtaaggtgtttttgttttgtcctaagtaaaattccctaaatttggactaataccaaataaatgcactattagaacatattttatggtggatttaattgagtctaatttgatttttttgagctcagttggtcaggggtttggatgatgcccagaccatccaggttcttccagttctcatcgaggcgaatttcagtgcttattttctaaataaaatgccacatagttcctcctaggttggtctagtttttttacttagaaaaactaagacacttaacattttggaacagtgggatgaagtctgaacttgcacttctaaatcg

SEQ ID NO: 149338 - DNA, 203 bp, Zea Mays
tttttgcacaaccatttcacggcgaagatgcagggtgagaaggcggacaagacatggcggctcctggtgaagaaggtgaggagggctagagcgatggccagcttggtcgagaggcaggtgccggaggttgtggctatgtcgtggcctcgtgggcgaagtacaacagcggcagcaaatgggcgcgaaactgagacaaagataca

SEQ ID NO: 149339 - DNA, 657 bp, Zea Mays
ctcagaccctcacggtcaccctcacggcctcacccactcaccctcttggtctctccctctctcctggtttccccaaaaacgaaaccctagcgccgccgccccagtggccgtggacccctggagtagaaaaacagagcaggcgctggtggccatggacctgtggaggagagcaggcgccgccgcgccggtgtgcggcgtcgccgacgtgtgagccaaccactgtccactggtctgctcttgtttattcaatggccacgaaaggatctcatccagccgaggcgagtcatctccgtatagggacgtctgctgaactccctcgatactcatcttttcccccttcttctacctccttccatagctttctccccactatgtgcctcatcggtgcacttgaagaagcgtcattgagcaccgttcggagattccccttgccagcatcatcgccttaccaagtagtaataacgagtaatcctctaagtctcctgtatggcggtacctcttcgagctacgatttcgttaactggagcaatactaggaaccttgccattccatgttactaactattatgtgtaatggaatgaaactgttatgaactataagtctataatggttagctacatgtatttcaatatacaaatttttgtttgtttaagtgaa

SEQ ID NO: 149340 - DNA, 2153 bp, Zea Mays
gtaatcaacaaaaactaattacacagataaaggataaactacgatacgaatttattaaatctaattaaatctatgtttaatatttctaattgatatttaaactttcgatatgacaagataaaactttagtcacacaaaccaaacactgcattagttaccctatgacgtctgaacctgtgcaatgaatacctgtattttttgacgttttgactatacctgtattttttgacgttttgactaggacaacgtggcccggtggcggtcttgctggagtttgtaccacacagtcacacacattggctgattggcactgcacggcatacagttgtggaatttgtagactcgtccaattggatcgcattaaagtcgttgggtggcagcactgccttgcggccttgcctccgttcccataataccctcgacacagcctttaaaaatcatacgctccctcgactctcttttcagctgcactgcacacacgcgcacacacaacaggcccgcgtgcagttgcgaaacccatatacaggataaggcctaaaaggctaggcacgcacggtactgcttgtatcatatcatatagactagtactccccaccacgcagttgcactggcacgatgaacacgctactgcatgtcaagttcctgaagaccatgtaccggctggtcgtcaataacttggtcgccatcgtcgtcttcgccgccaccgccggcgtggtcgcgaggacaagccctgaggaggtacaggcgcgggcgcgcgagatccggccggtccactgcctgctggccctgctccttgccgctgccgtcgccaagctgcgtcgcgtgggccggcccaaggacgtgtacctcgtggagtacggctgcttccggcccaagccctggttccgggcgcctttcgcgacgtgcctggagcacgcgcacctgatgccgtacctggtggacgaggagagcgtcagcttcgccatccgcctgctcgaacgctccgggctcggcgaggagacctgcgttccggatgcgtaccactacatgccgccagaccgcagcctcagcgcctcccgcgacgagaccgagttggtcatcttctccgccgtggacgaggtgttcgccaggacgagcgttaaggccgaggagatcgacgtgctcatcgtcaactgcagcatcttcacgcccacgccggtgttcgccgacatggtcgtcaacaggtacaagcttcgccccgacgtgcagaacgtcaacctgtccgggatggggtgcagcgcggggctcgtctccgtcggcctcgccaagaacctcctgcagacggcacggccgggcacgcacgtcctcatcgtctccacggagatcctctcgtcgcagtactacgtcggcacggagcgcgccatgctgctgcccaactgcctcttccgcatgggcgctgcggccatgatcctttccaactccccggagcgcgcgcggtacaggctcacccgcctggtgcgcaccgtgacggccgctcgggacgccgactaccggtgtgtgttccaggaggaggacgacaagggcaacaccgggatccgcctctccaaggacctcgccgccaccgccggccacgcgctcaagagcaacatcgccgccttcggacccctcgtcctaccagcctcggagcagctcctcgtcgcgctgtccttcctcaagcggaagctcctgctcctcagaggccgcgccaaggtgaggctctaccgtccggacttccgcacggcgttcgagcacatctgcatccacgcaggcggccgcggggtgatcgacgaggttcagcatggcctcggcctgtccgacgaggacgtggaggcgtcgcggatgacgctgcacaggttcgggaacacgtccagcagctccgtgctctacgaactggcctacatcgaggccaagggggcgatgaaaaagggcgaccggatttggatgatctccttcggcgccggcttcgactgcaacagtgttgcgtgggagtgcgtcaagccgccagccgacgccgacgggccgtgggtcgacaccatccaccgctacccggtgcagctcccagaaattgtcaacaaataaaaacaaatctgatgactcctagggcatgcaactaccattttcaggcgtatatttgtacgtacccagcagtatacgta

SEQ ID NO: 149341 - DNA, 1113 bp, Zea Mays
atgagcccctcgtctcccaccccgcgtccagcccccagcccctcgtctcccacacccaacccctcatctcccactcctagcccctcgtctcccctccccagcccagccacctccacccaggacgccaacggccaccaccaccaccccatctcgccggacttcatcatgaaaccggcgaccacctcctcaaacctcccatcccttccggcctctggctcttcagtgcacaccgttttggcttcccagggtgggcaggcaaagtctcaaaggtggaaggacgccagccctgccccttcgagttccagcggctctaggacggtatcccgatcctataaggatgttgtgctcgtccttggtgggagactagaaccttctccaccgattgtggacgtttcttcttctccactgaaggttgcccaccatttcataccggcagagaaggcgggctgtaggcgttcaacagagcagtctggaacgctagtgctcccttctcaatctgaaggtgaatggcaggagtcggccaccggggacgaatatcattcacccctgctgttggcgttgggctccggggaggctgttccaccagttcatcgcagaaagaggaagagacatcaggtgaagcggcgtcagggggcggcaatgcaacagttatcaccaacttctgtatcttccgacgatgtcgttgctctgacagctttggaggagattacaacggtagagcagaaatatgatcagcaaggcaggcctctgttctctcctttatgtgtgctggaattctcggcggagatggcgcgtgaggatgcagctttgcggaaggcactgtttgtcacaatagttggtactaggccagaggtcctaggggctgagatcatcaatgaagttgctcaaagttttaacgtcgatgtgggtgcaatgtccattcaccaggcaatgcctgaggatttcattctgttcttgccggatgaacgaacagcttcaagtgtattcaatgatggaaatatttttagaggaccaaagtttgaccttgtgtttaagaggtggacgcgttgtgcaaatgcggctgcgacatcgctcccgaccttgattaatgtggagatcaggggcatttactga

SEQ ID NO: 149342 - DNA, 354 bp, Zea Mays
cagatgctgttgatttctttggggaatgtatgaatagtccccgaaatggtcgtactccgcttgcaaatgagatatatgagcaaatggttgcagagaaggaaagagagctagaagaaggagaagcacaaaagtcaccctccaagattgttgctgatagtctcagccagatcagtcactcatccaccttccttccaaacattggtgtctgtttgaatgcttcaaacctttgtggtggaacctttgtatgtttgaacctctgttgtggaagaactagtgtgctggaattgtgtatgacttgtgatgaaaatgttgtgtatgatggcttttctgtgtattatgattctgtgagctatc

SEQ ID NO: 149343 - DNA, 117 bp, Zea Mays
gaaataaagaaggttagattcagaaatccttgtggatcagaaataacaggtgcaactacaactacaattctccagttgggtacaacaatttatgcgtaatcaaatgagtaaataaaa

SEQ ID NO: 149344 - DNA, 462 bp, Zea Mays
atgggggcagtgaacgacggggtcggtgaaggagacgttgccatcgtgaattccggcgccatcattgatgagagggcgtacgatggaattggcgatggtgatggtggcatagagatgaggcatggtgccgtcggggcaccgggtgggcagatcgagcctggaagggggagcggggctgatgccggtggcgtcggcaatgcatgtagcggtggcggaagggtggtatgggacatgtgccctggcggtggaaaattggaggagaggaaggcggtgatggctgccacggaacgaccgagatcggcaaccgcctgtgctacgacttccagggtgaggatcggcgttgtcgccggtgacgcgagggcaggggctgaggcggccggtggtggcgcagaggacgccggaggcgaggtggtggtgggtggagggactgacatctctgataccagattgttatggatctag

SEQ ID NO: 149345 - DNA, 246 bp, Zea Mays
atgacagtgatattgtctttgctgccccgctccgcagcctccgtggccaacctcttcgagcacattccaggctctttaaccgtgtccttgattattgacagcacgtcctggttgcttaccacatcccataggccatcactagccatcaccaggaactcatcatcagctgataaagcagtttcaataacctcaggttgtgctgtgacagctggcttgaggtcatcatcaccaattgaccttgtaacc

SEQ ID NO: 149346 - DNA, 325 bp, Zea Mays
ctaatttatatcaaggcacacttaagcatagtcacacaatagatgatgtgatggctacgtagtcatgccatcacttcaccacacaatcccaagtaacaaaacaactctaaccgaacttgccatttagccgatcgatttctaacccatttttttataccaccactacactacatatgcccaaacaattaaaccacaccgatcgaacttcttatcgagtaaaacctatacctccaatctactcacttcatccccaattataactagtcggctctccgattaacacacatgcgtaccaatttctcctctatgaacctttaatctacgc

SEQ ID NO: 149347 - DNA, 1291 bp, Zea Mays
ccgagaaggaaagcgcgaattaaagcagcacgggcaacacgccgagcaaaacagcgaaatcctcaaatccccaccccggctggtgacggcgccgcccccgctgctgcctgcggtcctgcttctgctaatagtaataggtattcagattcgagcagagcactcccgtgctgcaggcaagggaggacgcaccaccatggattgggatgctccggcattgacgagcttcgtcgccgacttgtccttccgccacctctgctgctacggggccggaatcgcagggaacgccttcgccttcgtgctcttcgtctccccgctccccacattcaagaggatcgtccgcaacggatccacggagcagttctcgtgcacgccgtacatctactcgctgctcaactgcctcatctgcatgtggtacggcctccccttcgtctcctacggcgtcgtcctcgtcgccaccgtcaactccatcggcgccgtgttccagctcgcctacaccgccgtgttcatcgccttcgccgacgccaagcagaggctcaaggtctctgctctcctggccgctgtcttcctggtgttcggactgattgtgtttgttagtctggctttgttggatcacaaagcccggcaggtgttcgtcggatatctcagcgtcgcgtccctcgtatgcatgttcgcgtcccccatgtcaatcgtcaatctggtcatccggacgaagagcgtggaatacatgcccttctacttgtcattatccatgtttctgatgagtgcatccttcgtcatatacggagtgctgcttggtgatggcttcatatatattccaaatggcattggaaccatattgggtatcgtacagttgctgctgtatgcctacatcagaaagggatcaagcgaggaagccaagctgcccttactaatcacacatacatgagcatgccaaaagggaaaaaaaacaaggttcgctgataggctttcccgaaatcctgtctctggtcaaacttccaggtcgatgtacttgtccgaattgttttgctcctgtgaaaaaagcatgccgttctttcgttttgtttacacgcgacggggatcgtagtttcgctgtatattccatggtagatgctccaagttgttgctggagtcattcgtttatgagtgagcgaagctttgtatataatatagtagtagtaatgtggttccgtgaacttcatcaacagagaggaccagctgtatacacaaagaaaagcaataaaaggatgttactatatcattatcaataaataaagttttgtttcgccatatt

SEQ ID NO: 149348 - DNA, 424 bp, Zea Mays
ggggatattgggccggcctacagacatcaggcagctctcccgagcatgacatcgtttctgttcacaactcttccgagcatgccgtcgtctcctttgtcatcatcatcagctcagatctagcaacttcgccttctcagagtgttaagtggaagcaacatatgaagctgacatggaaaaggaagatggaacgacactccacatgaagcttgtaaaaaaggagtcaaactcaatttagtctagtgtcaaagtttataatgaagggacttgtactctgtttctatgttatattatctatttgtacgtgtgaatggagatgatcttatgtgtgggatgatggatagattaactttgatggatattagatgatatttaagttaaactttatcggatattagatgatcaagtctggtgcatgttttttaga

SEQ ID NO: 149349 - DNA, 176 bp, Zea Mays
gatttagtttcgagtttgttagagttcctaatatataggatatgattgtaacgtataagtaccatattaggggcccgtttggcaaagctccagctcctgcttctttagctctagatcctgatcctcgtgaggagctgatcctcctgattctcctagaaaatcagaatcatttttaa

SEQ ID NO: 149350 - DNA, 214 bp, Zea Mays
acacacaggagttgggaatgggggtcacatgcgcgggacacagttgggaatgggaatgaaaacacacaggagttgggaatgggaatggcagaaccaggaatggcagcctaccccttgcgttcttaatagtagtaaagatttcttctttgttttctatatagaaccatatataatcatgaatgctcatgtaatgcttatgaaaatgcaaagataa

SEQ ID NO: 149351 - DNA, 1226 bp, Zea Mays
cacgatctgcaaagtgcaacggaaaattttaattccaagaatatattaggtcaaggaggttttggaattgtgtataaaggctgtttgagaaatggaactttagtggcagtgaagagattaaaagatcctgatgttaccggtgaagtccagtttcagacagaagttgagttgattggacttgctgtgcacatgaatcacttgcgtttgtatggatttttcatgacctctaaaaaacggttgcttgttcttcatatggaataactatgacgcagattccacaatatacaagttaaaggaattgaccattgtatccatgttgttaatttctatagggaataatgtatggaatgatttgtgggttgtttattagaagatgatgaagaaagggagtgagaataaataaaggagagaaagggtaatctgcatatgtgttgtatatgtctaagtaagtttacaaattctataggccatgtacttcttaaatggatagagtactgctttactccattttctcatccaaaatcctctctcagttgcaatgaatgattatttgctccccacctttctgacactgaagttttcttgttgcattgcttaagctgagactgaccacacacattttttctgatagttttgacatttcactgaagataacttttttttactttgtttcagtcttgcaggaaatcggttccattgcaattcctcagttatacatggttgttcagatgtgatagcaatgactaatggtaattactttcccagatggcatatcttttacatatctattctttagaaaccggaacttaactgtacattaatggcagggacaatgtcgagacaggtccaaaaggccaagaaccaccatcaattagctctcgcaatttctctaagtgtcacctgttccacaatattagttttggtgttcgtgtattggctaagttattgcagatggtgcttgccttttgcttcagctggtaattatctaagccttcgcagtattagctctttgcaagttaaatatacatgatctgacttttttatgtgtagatcaagatctagaattcgaattgggccatgtgaagcatttcgcatttcacgatctgcaaagtgcaatgaacaattttaattccaagaatatattaggtcaaggtggttttggaattgtatataaaggctgtttgagaaatggaactttagtggcagtgaagagattaaaagatcct

SEQ ID NO: 149352 - DNA, 505 bp, Zea Mays
ttggacaacaggcatcctcatatgtggtacccgaaagcccgagaaaagaagcgtaatgtgtttttacatgttggccctacaaatagtgggaaaacttagggggtgtttggtttctagggactaatttttagtccctacattttattccactttagttacaaattatcaaatatagaaactaaaactctattttagtttctatatttatcaatttatatactaaaatggaacaaaatgaagggactaaacattagtccctagaaaccaaacacccacttatagtgctctcaagaggctagaagcaagctcttcaggtgtgtactgtggacctctgagattgttagcaagagaggtagcccaaaggttaaataaagttaatgtcccttgtaaccttattactggacaagaaaggaatgaaattgaaggtgcaaaacatagctcagtgacagttgagatggctgatatgacaactaactatcaatgtgctgttattgatgaaattcag

SEQ ID NO: 149353 - DNA, 1242 bp, Zea Mays
atgtctttagcaaaagataatatatggaaactattggccccactggtggtgatgggtgtcatgtttcttatccctgtccccgacggtatgccgcgcaggcatggcattacttcgctgtgtttgtggcaatgattgtcggcatgatcctcgagccaattccggcaacagcgatcagttttattgcggttactatttgcgttattggcagtaattacctgctctttgatgccaaagaattagctgacccagcgtttaatgcgcaaaaacaggcgctgaaatggggcctggctggtttttccagcaccacggtatggctggtatttggcgcatttatttttgcattagggtatgaagtttccgggttaggtcgtcgcattgcccttttcctggtgaaattcatgggcaaacgcacgctgacgttgggttatgcgattgtcattatcgacattctgctggcaccgtttacaccttccaacaccgcgcgtaccgggggtacggtttttccggtcattaaaaacctgccgccgttgtttaaatcattcccgaacgatccgtccgcgcgtcgtattggcggctatttgatgtggatgatggtcattagtaccagtctgagttcgtccatgtttgtcaccggtgcggcaccaaacgtgctgggtctggagttcgtcagcaaaattgccggtatccagattagctggttgcagtggttcctctgcttcctgccggttggggttatcttgcttatcattgcgccgtggctttcctacgtgctgtacaaaccggaaatcacacacagtgaagaagtggcaacctgggcgggtgatgaactgaaaaccatgggtgcgctgacacgcagagagtggacactgattggccttgtattgctcagcttaggtttgtgggtatttggcagtgaagtcattaatgctactgcggttggtctgctggcagtttcgctaatgctggccctgcacgttgtgccttggaaagacattacccgctataacagcgcatggaacacactggtcaacctggcaactctggttgtgatggctaacggcctgactcgttctggttttattgactggttcgccggtaccatgagtacgcacctggaaggattctcaccaaacgcaacggtgattgtactggttctggtgttctactttgcacactacctgtttgccagcctgtctgcactcaccgcaaccatgctgccggttattctggccgtcggtaaag

SEQ ID NO: 149354 - DNA, 2448 bp, Zea Mays
atgtcttccgctacgatgcagcaacgtgaaattcgctgccgccgcatcatgttttttgtgcatgttgccaatgcctcgatggtcagcaactccttcatctatccgactgatgccctgatgtttgacctcgaagactccgtagcatgcgtgaaaaagacaccgcccgccgcatggtttatcacgcgctgcaacatacgctgtatcgcgatattgaaaccattgtgcgtgtcaacgcgctggattccgaatggggtgttaacgacctggaagccgtcgttcgcggtggtgcggacgttgtgcgtctgccgaaaaccgataccgctcaggatgttctggatattgaaaaagagatcctgcgtatcgaaaaagcctgtggtcgtgaacccggcagcaccggcctgctggcggcgattgaatctccgctggggattacccgcgcagtggaaatcgctcacgcttccgagcgtttgatcggtatcgccctcggtgcagaagactatgtgcgcaacctgcgtacagaacgctccccggaaggaactgaactgctgttcgcacgctgttccattttgcaggccgcgcgctctgcgggtattcaggcgttcgataccgtctattccgacgctaacaacgaagccggatttctgcaagaagccgcccacatcaaacagctgggctttgacggcaaatcgctgatcaacccgcgtcagattgatctgctgcacaacctctacgcaccgacccagaaagaagtggatcacgcccgccgcgtcgtagaagccgctgaagccgccgctcgcgaaggcctcggcgtggtttccctgaacggcaagatggtggacggtccggttatcgatcgcgcccgtctggtgctctcccgtgcagaactttccggcatccgcgaagaataaggcaatcaaaatgacgcagaaaattgaacaatctcaacgacaagaacgggtagcggcctggaatcgtcgcgctgaatgcgatcttgccgctttccagaactcgccaaagcaaacctaccaggctgaaaaagcgcgcgatcgcaaactgtgcgccaacctggaagaagcgattcgtcgctctggtttacaggacggcatgacggtttccttccatcacgctttccgtggcggtgacctgaccgtcaatatggtgatggacgtcatcgcgaagatgggctttaaaaacctgaccctggcgtccagctccctgagtgattgccatgcgccgctggtagaacacattcgccagggcgtggttacccgcatttatacctccggcctgcgtggtccactggcggaagagatctcccgtggtctgctggcagaaccggtgcagatccactctcacggcggtcgtgtgcatctggtacagagcggcgaactgaatatcgacgtggctttcctcggcgtcccgtcctgtgatgaattcggtaatgccaacggctacaccggtaaagcctgctgcggctccctcggctatgcaatagttgatgccgacaacgcaaaacaggtcgtgatgcttaccgaagaactgctgccttatccgcataatccggcaagcattgagcaagatcaggttgatttgatcgtcaaagttgaccgcgttggcgatgctgcaaaaatcggcgctggcgcgacccgtatgaccactaacccgcgcgaactgcttattgcccgtagcgctgcggatgtgattgtcaactctggctacttcaaagaaggtttctccatgcaaaccggcaccggcggcgcatcgctggcggtaacccgtttcctggaagacaaaatgcgtagccgcgatattcgcgccgacttcgcccttggcggtattaccgcgacgatggttgacctgcacgaaaaaggtctgatccgcaaactgctggatgtgcagagctttgacagccatgctgcgcaatcgctggcccgtaaccccaatcacatcgaaatcagcgccaaccagtacgctaactggggttcgaaaggcgcatcggttgatcgtctcgacgtggtggtactgagcgcgctggaaattgacacccagttcaacgttaacgtgctgaccggctctgacggcgtactgcgtggtgcttccggtggtcactgcgataccgcgattgcctctgcgctttccatcatcgtcgcgccgctggtacgcggtcgtattccgactctggtggataacgtactgacctgcatcaccccaggctccagtgtcgatattctggtcacagaccacggtatcgcagttaacccggcacgtccggaactggcagaacgtctgcaggaagcgggcattaaagtggtttccattgagtggctgcgcgaacgtgcgcgtctgctgaccggtgaaccacagccgattgaattcacagaccgcgtcgttgccgttgtgcgttaccgcgatggctcggtgatcgatgttgtgcatcagtgaaaggaa

SEQ ID NO: 149355 - DNA, 277 bp, Zea Mays
attgtgtttcgcacgcaagtcctgggtgccatcgttgcttggatttgggtgcaaccagctccggccgccgccattaacatgaagggcgaggtcgctggggagtacgcgcgaagcattgccgcacggcaacctggaagcgagggtctcggcgtaattgtaccgcggtggggatttcacagcgcacgccaggcggacgaactgtggacgggtgcggtcggcatctcaccggaccgagccttcatcgccaaatcgagccgagcgtcgggaattctggtga

SEQ ID NO: 149356 - DNA, 1008 bp, Zea Mays
cagccggccagtaggtgatgccgcccgcggtggctaatcgggtgccagcagcttcatgttaaatcaaccagccgccgctcccttcttccatttcctggccgccaagcttccaacgtacgcagcctgctcgtcttccacctccggccatcttcctccctctaccgagcttccctccccacagcagcagaccaccggcgctccctgttcttcttccccgtgggcgcccccccttcatccaggcagcagacgacacacgcacgccaggaacgcccgagctctccatctctaatccagcgcgcagggcatttctcagggtccgagctcgagcagccctccccaaccaagcttctcccatggcgctgctacctccaggatggagctcgacaccccaaaggttggaatccgaccctctctctgttcccctcaatttcaagctcccctggcgtttctttttgccctgcagaaattccccctgggcgctggaggcgccaagctcgcgccggtgagcacctcccatggcgtggccatctccctgctgttgccagggccgacgagtccaagtcttgtctctagccttccttgccgactatggctgcccagcagctcgtcacctccctctctagtgcatgccccggctgtcatttccccacgccgagcgtgccctctcgccatcctttgccttgctgctcgcagctgagtttcctactcgtcgcagctcgcgcaccacctgttcgacgttatgcacagtagctgcatgtctcagattatcgcagcagcgagctccttcgccggcgcctgtccacaacagcagtcccgacgcgacactgtgacccttggtgaggcaccttgctgtcctagccgctggatcgagctttgtcccagcccgcagcttgctatcgtcgagtattgggcttgccgtcgatgtcgtgcttgtcatgcgcagcaagaaccacagcgccacgacttgttccagctcgacgagagcagccacatcgtcgtcgacccgtg

SEQ ID NO: 149357 - DNA, 1017 bp, Zea Mays
cagccggccagtaggtgatgccgcccgcggtggctaatcgggtgccagcagcttcatgttaaatcaaccagccgccgctcccttcttccatttcctggccgccaagcttccaacgtacgcagcctgctcgtcttccacctccggccatcttcctccctctaccgagcttccctccccacagcagcagaccaccggcgctccctgttcttcttccccgtgggcgcccccccttcatccaggcagcagacgacacacgcacgccaggaacgcccgagctctccatctctaatccagcgcgcagggcatttctcagggtccgagctcgagcaggtccggcagccctccccaaccaagcttctcccatggcgctgctacctccaggatggagctcgacaccccaaaggttggaatccgaccctctctctgttcccctcaatttcaagctcccctggcgtttctttttgccctgcagaaattccccctgggcgctggaggcgccaagctcgcgccggtgagcacctcccatggcgtggccatctccctgctgttgccagggccgacgagtccaagtcttgtctctagccttccttgccgactatggctgcccagcagctcgtcacctccctctctagtgcatgccccggctgtcatttccccacgccgagcgtgccctctcgccatcctttgccttgctgctcgcagctgagtttcctactcgtcgcagctcgcgcaccacctgttcgacgttatgcacagtagctgcatgtctcagattatcgcagcagcgagctccttcgccggcgcctgtccacaacagcagtcccgacgcgacactgtgacccttggtgaggcaccttgctgtcctagccgctggatcgagctttgtcccagcccgcagcttgctatcgtcgagtattgggcttgccgtcgatgtcgtgcttgtcatgcgcagcaagaaccacagcgccacgacttgttccagctcgacgagagcagccacatcgtcgtcgacccgtg

SEQ ID NO: 149358 - DNA, 656 bp, Zea Mays
cagccggccagtaggtgatgccgcccgcggtggctaatcgggtgccagcagcttcatgttaaatcaaccagccgccgctcccttcttccatttcctggccgccaagcttccaacgtacgcagcctgctcgtcttccacctccggccatcttcctccctctaccgagcttccctccccacagcagcagaccaccggcgctccctgttcttcttccccgtgggcgcccccccttcatccaggcagcagacgacacacgcacgccaggaacgcccgagctctccatctctaatccagcgcgcagggcatttctcagggtccgagctcgagcaggtccggcagccctccccaaccaagcttctcccatggcgctgctacctccaggatggagctcgacaccccaaagaaattccccctgggcgctggaggcgccaagctcgcgccggtgagcacctcccatggcgtggccatctccctgctgttgccagggccgacgagtccaagtcttgtctctagccttccttgccgactatggctgcccagcagctcgtcacctccctctctagtgcatgccccggctgtcatttccccacgccgagcgtgccctctcgccatcctttgccttgctgctcgcagctgagtttcctactcgtcgcagc

SEQ ID NO: 149359 - DNA, 1206 bp, Zea Mays
agtttgacacacacaattctcggccccgcacaatggcccactcgctgcacgcgcacgcagacgtatcaatagatgccgcactcgccgcatcacgagatgtcgccgccggctgccaacacagtggatcgtccgccgctgaagatgagggaggtatcacggcgcgtcacgcctacacctcggcccactcgctgtcgtcggctgcctacacagggagcccccgccgccgaagaggagggaggtcttgcggcacgggactcggcgacggcgccccctaacacatcgactgggaggtctgcctcactgctgccacactcatcgccagctcgtattggatatgaagaaaagaccatgtacatggttgcatatgattggaggttatctttccagaacactgaggttcgtgatcaaactttgagcagaataaagagcaatattgaactcatagtagcgacaaatggtggaaatagggtggtggtgatcccacactccatgggggtcctctattttctgcattttacgaaatgggtcgaagcacctcctcccgtggggggcagtggtggtccgaactggtgtgagaaccatattaaagctgtaatgaatattggaggatctttcttaggagttcctaaggctgttgctgggcttttctcatctgaagccaaagatgttgccgttgctaggtataaggctcccaagccatcttctggacctcacaagtccagggagtgcctgcctctgatcctcatcatcaggaacaggctcaagtatgcaccgacgtaccgtgaggtcatttctatcctgatgcaacaccatgtacttgttgatggcaagatgtcatttccatccctaagacaaacgagaactacaggctgctttcgtcttcacccaatcagggatgaggatgccaagttcaagctctacaaggtgaggtctgttcagtttggccagaaagacatcccctatctgaacacctacgacgaccgcaccatccgctaccccgacccgctcatcaaggccaacgacaccatcaagatcgatctggagaccaacaagatcatggacttcatcatgtttgacgtcggcaacgtggtcatggtgatcggcaggaggaataccgggcgtgtaggagtgatcaagataagggagaagcataagggcaacttcgagaccatccacgtgctgcttggagctttttgctatgtctag

SEQ ID NO: 149360 - DNA, 752 bp, Zea Mays
agtttgacacacacaattctcggccccgcacaatggcccactcgctgcacgcgcacgcagacgtatcaatagatgccgcactcgccgcatcacgagatgtcgccgccggctgccaacacagtggatcgtccgccgctgaagatgagggaggtatcacggcgcgtcacgcctacacctcggcccactcgctgtcgtcggctgcctacacagggagcccccgccgccgaagaggagggaggtcttgcggcacgggactcggcgacggcgccccctaacacatcgactgggaggtctgcctcactgctgccacactcatcgccagacctctatgctgggttgaacatatgtcgttggacaatgaaactggattagacaaacctggaataagggtcaggtcagtcacaggccttgttgcagcaaactattttgtccctagatattttgtttgggctgtcttaattgccaatttagctcgtattggatatgaagaaaagaccatgtacatggttgcatatgattggaggttatctttccagaacactgaggtactcttcttggatggccttatacaagtaaattttagtcagaagtcaccacggattagctatttggttatgaacttttgatgcttagtgatagttcccagttcccaccgtgtagatggttctggtataaaatgtattgccatatttgtaacacagattactatatacaggttcgtgatcaaactttgagcagaataaagagcaata

SEQ ID NO: 149361 - DNA, 815 bp, Zea Mays
acggcatcgttgtccacgccgagtcgccgactgatcacttctcttccagcgagtacacacatcacacagcgaagggcagcgcatcgtgctgcggcggccggaggtgatcgacaagcacctctctaggaataataaataatggcgcagttggtggacaaggcgaaggggttcgtcgccgacaagctggccaacatccagaagccggaggcggagctggccgacgtcacggtggggcacgtgggccgcgatggcgccacgctggcggggcgcgtggacgtgcgcaacccgtactcgcacgccatcccggtgtgtgaggtgacctacacgctgcggagcgccgggcggacggtggcgtcagggacggtgcccgacccggggtcgctcgccggcgacggggctaccacgcgcctcgacgtgcccgtcaaggtgccctacgacttcctggttagcctcgccaaggacgccggcagggactgggacatcgactatgagatgcgtgtcgggctcaccgttgacctccccgtcgtcggcaaactcacgctgccgctcaccaagtccggcgagctcaagctccccaccctctccagcatcttctgatcgatcgatctgcgtgctgctcgctcgatccgtaactgcggccttgcgtgttcatgactgatctgcctactcgataatatgtaaaccgctctcttgagtgttgttgttgtgctgcttgagtagtacgagacctaataataataaactacagtgatgtgtattatgcaagtttcagaccaataaataataatacgaaaaagacgcgtctgcacattcaa

SEQ ID NO: 149362 - DNA, 1490 bp, Zea Mays
agcccctcgattccgaacccaaaacctaacgccttattcgcgggcaagtggacccactggtcaggcacggagcataaaacccaccggtgcttgtctattctacctttcgcgtgctccgccgtcacgacccaaattattgagagcccaggaagtgagagatgagcctgcagattccggtgagatcaggcgccctgcgccgccttctccttctaggtggcgccgagggtctactgcgcacctactccaccggcgaccggcgccggcgggtgatccgcgaggcaaggcaagaggaggaggacgaagcgttcctccgcaccctcaacttcggcgctgaccccgagaacaaccctcttcccccgccgccgaggcatggcagaggattatccgacgcctcagccgggaagcagcagcagcagcccgagcgaagcgcgcagaaggtcgtcggggagacgctgctggagaagcttaagctgggcgatggtccctccgccgccgctgctataggaggcggcgatgagccacggcagtctgaggacgagcctgcgcccgcgcagccggtggacgtggacgagatcttccgaaagatgaaggaaaccgggttgatcccaaacgccgtggccatgctcgacgggctgtgcaagaacggcctggtgcaggacgccatgaagctgtttggtctaatgcgagagaagggagccatcccggaggtggttatctacacagctgtcgtcgaggcattctgcaaggtggctaagctagacgacgccgtgagaattttcaggaagatgcaagggaatggagtcatccccaatgcattcagctattggctcctgatacaggggctgtacaaggggggcaggctggatgatgctgtcgggttctgtgtggagatgtttgaggctgggcttgcaccgaatgcggagacgtttgtaggcttgcttgatgcagtgtgcaagacaaaaggtgtggatgaaggcgagaatcttgtgaggagcttccaggacagaaacttcgctattgatgagaaatcaatcagggatcacctggacaagaaaggcccattctcaccagtagtgtgggaggtgatctttggcaagagaaaatcagaccgaccattctaatctctaccagaaagtagtatgtgcacactctcatcattttgttagccttgtagttattatttctcaagagtttgcttgctttcatggttaaacaaatggctaccatgtcttcttttatggaatctataattatggcgatctgtatgcacttttgtcatatgcaattcacctccatctattcaactgccccaattaggacatacttgctgcattcaccttgagctattcaatcgtcccaattagaacaactttctttgttattatgtttctgttatgaagggttgctacttgcactgtattttgattattggcaatttaagtgcaagatgatcaattcacacacgaatacataatttgtgctcagataca

SEQ ID NO: 149363 - DNA, 1531 bp, Zea Mays
ccctaccaactacacagccgccgcctcagcgaagctgtggaagaccagcagcaagggccccttcagccttcgccgcctctgtcccttctcttccttccggtcgaccagatggcctgccgcgcgaaggtggtaggacaggtggagcgggtcgacggagagtcgctatcctacgcggagttcgtccgccgcttcatggcgcccaaccgccccgtcgttctcacgggtctcacctcatcctggcgggcccacaaggactggactctctccgggtctggtgaccttcgccgccctaatctcggcttcttcacccaaaacttcccttcctctctcgttcaggtcgacgactgctcctcgagtgatttcacggaccagaagcggcttgagatgtccatgcaggagttcatagaccactgggttgggggtcctcattgtggttcaagtgatggagatcgtgatggttctctgttgtatctgaaagactggcacttcgttaaggaacctggactcctctgcatgctgatgtttttaggtcatacagctggtcagcaaatgtttgtgggcaaaaacagtggttgtttctaccaccatcacaaagtcattgtatatttgataggaacatgagatcttcggtctataacttacatgatgtttctgaaaagcagtttcctgagtttaacagaatggctagaatgcattcaagagcagaatgaaatcatatttgttcccagtggatggtatcaccaagtccataacctggaggacactatatctataaatcataattggtgtaatgcctacaacctacactgggtgtggaacttgctttatgaagactacaaagttgcaaaagaatatattgaagacattcgagatatatgtgatgattttgaaggactttgtcaacggaatttggcagctaatacaggcatgaacttctatgatttctttgttttcatagtgaggtttgccttagccaatgtagttgagctttaccatcttcagcagccagaggttgcaaccttgtcaacagaaaccgcacaccatttggtctataatctgatgtcaattcgtaatgttgcatcaaaaatgacaactacagaggcttttactactgagaatcgtctttgtagtgtctcggaagataaccgcagtgctttctctaatatcaaacaaatattagaagaggagagtttcagaaggctatcgatgacactgtcaaaggcatatgaccacatagacagagggcaaagaagtctcaaatcttcgatctcgtatcggaagggctgttcgtcagtgatctgcttgaaatctgattgcaatgttgttgactacattacttctttggttgatgaaatttgtggacccgaggatttgacgagactaattgatagtgctctctctcatggataattttagtgtatctagcattgtaaacctatgcttgcatgaatccttattcatcagatatgatgggatacttaggtagtgtttggttttagagtatggttttatggagccatttcgttttcaa

SEQ ID NO: 149364 - DNA, 1694 bp, Zea Mays
ccctaccaactacacagccgccgcctcagcgaagctgtggaagaccagcagcaagggccccttcagccttcgccgcctctgtcccttctcttccttccggtcgaccagatggcctgccgcgcgaaggtggtaggacaggtggagcgggtcgacggagagtcgctatcctacgcggagttcgtccgccgcttcatggcgcccaaccgccccgtcgttctcacgggtctcacctcatcctggcgggcccacaaggactggactctctccgggtctggtgaccttcgccgccctaatctcggcttcttcacccaaaacttcccttcctctctcgttcaggtcgacgactgctcctcgagtgatttcacggaccagaagcggcttgagatgtccatgcaggagttcatagaccactgggttgggggtcctcattgtggttcaagtgatggagatcgtgatggttctctgttgtatctgaaagactggcacttcgttaaggagtaccctgattatattgcatataccacaccaaccttctttgttgatgattggctcaacatgtatcttgacagtcaccctatacatagagattctgacattgccaatcataaaaatgaaataaactgttctgattatcggtttgtttacatgggggcaaaaggaacctggactcctctgcatgctgatgtttttaggtcatacagctggtcagcaaatgtttgtgggcaaaaacagtggttgtttctaccaccatcacaaagtcattgtatatttgataggaacatgagatcttcggtctataacttacatgatgtttctgaaaagcagtttcctgagtttaacagaatggctagaatgcattcaagagcagaatgaaatcatatttgttcccagtggatggtatcaccaagtccataacctggaggacactatatctataaatcataattggtgtaatgcctacaacctacactgggtgtggaacttgctttatgaagactacaaagttgcaaaagaatatattgaagacattcgagatatatgtgatgattttgaaggactttgtcaacggaatttggcagctaatacaggcatgaacttctatgatttctttgttttcatagtgaggtttgccttagccaatgtagttgagctttaccatcttcagcagccagaggttgcaaccttgtcaacagaaaccgcacaccatttggtctataatctgatgtcaattcgtaatgttgcatcaaaaatgacaactacagaggcttttactactgagaatcgtctttgtagtgtctcggaagataaccgcagtgctttctctaatatcaaacaaatattagaagaggagagtttcagaaggctatcgatgacactgtcaaaggcatatgaccacatagacagagggcaaagaagtctcaaatcttcgatctcgtatcggaagggctgttcgtcagtgatctgcttgaaatctgattgcaatgttgttgactacattacttctttggttgatgaaatttgtggacccgaggatttgacgagactaattgatagtgctctctctcatggataattttagtgtatctagcattgtaaacctatgcttgcatgaatccttattcatcagatatgatgggatacttaggtagtgtttggttttagagtatggttttatggagccatttcgttttcaa

SEQ ID NO: 149365 - DNA, 1775 bp, Zea Mays
ccctaccaactacacagccgccgcctcagcgaagctgtggaagaccagcagcaagggccccttcagccttcgccgcctctgtcccttctcttccttccggtcgaccagatggcctgccgcgcgaaggtggtaggacaggtggagcgggtcgacggagagtcgctatcctacgcggagttcgtccgccgcttcatggcgcccaaccgccccgtcgttctcacgggtctcacctcatcctggcgggcccacaaggactggactctctccgggtctggtgaccttcgccgccctaatctcggcttcttcacccaaaacttcccttcctctctcgttcaggtatctcctcatccatgctgacgacccgtggtacttgctgcgcgaatggaggaccccctaagcagcggtatcattgcgcaggtcgacgactgctcctcgagtgatttcacggaccagaagcggcttgagatgtccatgcaggagttcatagaccactgggttgggggtcctcattgtggttcaagtgatggagatcgtgatggttctctgttgtatctgaaagactggcacttcgttaaggagtaccctgattatattgcatataccacaccaaccttctttgttgatgattggctcaacatgtatcttgacagtcaccctatacatagagattctgacattgccaatcataaaaatgaaataaactgttctgattatcggtttgtttacatgggggcaaaaggaacctggactcctctgcatgctgatgtttttaggtcatacagctggtcagcaaatgtttgtgggcaaaaacagtggttgtttctaccaccatcacaaagtcattgtatatttgataggaacatgagatcttcggtctataacttacatgatgtttctgaaaagcagtttcctgagtttaacagaatggctagaatgcattcaagagcagaatgaaatcatatttgttcccagtggatggtatcaccaagtccataacctggaggacactatatctataaatcataattggtgtaatgcctacaacctacactgggtgtggaacttgctttatgaagactacaaagttgcaaaagaatatattgaagacattcgagatatatgtgatgattttgaaggactttgtcaacggaatttggcagctaatacaggcatgaacttctatgatttctttgttttcatagtgaggtttgccttagccaatgtagttgagctttaccatcttcagcagccagaggttgcaaccttgtcaacagaaaccgcacaccatttggtctataatctgatgtcaattcgtaatgttgcatcaaaaatgacaactacagaggcttttactactgagaatcgtctttgtagtgtctcggaagataaccgcagtgctttctctaatatcaaacaaatattagaagaggagagtttcagaaggctatcgatgacactgtcaaaggcatatgaccacatagacagagggcaaagaagtctcaaatcttcgatctcgtatcggaagggctgttcgtcagtgatctgcttgaaatctgattgcaatgttgttgactacattacttctttggttgatgaaatttgtggacccgaggatttgacgagactaattgatagtgctctctctcatggataattttagtgtatctagcattgtaaacctatgcttgcatgaatccttattcatcagatatgatgggatacttaggtagtgtttggttttagagtatggttttatggagccatttcgttttcaa

SEQ ID NO: 149366 - DNA, 865 bp, Zea Mays
ctacccggcgttgtcatcaacggggaggcctcacccacccctgtctcctgcgatgcgaaactacgcatcggcggcggcgtgggagggcccgatggccgcagagctcaagacaacgggggtcgaggtgattgccgacggcgtgcatgtgaaggggtgggtcatctagtcccacaaaggccccatcctcaacgccgcctctctcagacggtgcgagcccccggcgtagccgtcggtgggcaagccttatcggcccatgtggtcctgcctcctcactgagttctgccatagaggtggacactggtggtggtgtcctcctccttctagctgtggttgcctccgctcgtcgccgtcgggggcggtagcttcagatccccagcacagcttcaagctggccctcccttggatgaaatgtctattccatacattccgaggaacttgttacacgcaattgagtatctacattctgagggactagtttggaatcgagggccacaagttaaagcatcaggtcaatggtcccgccaacaattaaaccagatggcggattggagcttgatgttgggatgatgcatgcacctttcaagtttcagaatgttgtcctcaaatgcagcttgtggttgttgaacctattctacttgtttttggatttaagttatagtttattaaacatgtttgatgtttaatacttgtgtcggatgatttatgcttcaattatgtggatgctagaaaaaaattgtatatactcatgttgtttcatgaaattgtatgcacgatttggtttgaattcagttgaatgcagtttttttggtttgaattcagatgaatgcagtttttataattaatgatgaactaaaaacataacaaa

SEQ ID NO: 149367 - DNA, 322 bp, Zea Mays
ttttttctcttcttttccatgtacttactcatatgtgttctatgttctctgatgtagttaaagcatcaggtcaatggtcccgccaacaattaaaccagatggcggattggagcttgatgttgggatgatgcatgcacctttcaagtttcagaatgttgtcctcaaatgcagcttgtggttgttgaacctattctacttgtttttggatttaagttatagtttattaaacatgtttgatgtttaatacttgtgtcggatgatttatgcttcaattatgtggatgctagaaaaaaattgtatatactcatgttgtttcatgaaa

SEQ ID NO: 149368 - DNA, 652 bp, Zea Mays
aacgcccagaggcacacgcgcgatacgaaccagcaggcaaccaactgccgagggagaatcggagccctagctagcggaataggagacggcggcgcgctaccctcctccatctctggcgcctcctccatctccggtgcggcgacatcgtcccgctcggcccctcctccatctccggcgcggcggcgccagcagccggcgtgcaggagtaattttgacaccttctgtaaagaaggtaacaggggccaaaaggaaaaatgacatcactataatgatagagaagagattaaggttgtccaaggattcctgtggaaagagagcatatgaagtgcattaggaattagagatggaagtggacaattgcacatggacatgacagaagttcctgttgcaatagcaaatattatctcaaccgacccaaccactaagatgagttgtaacaaaaaatcaacattgaaccaaggttctacagcagcagcaggaagaggaggtggaagcaaggatcagattgcttgaagtgtgaaaaaatgattactcgcatgcatgctagctgttggcgtaacatccagccgatggagagattttagtttgctagatgtatatttatacttctgcatgtaatagaaatgaaagatcacttcaaaaatttaggaaa

SEQ ID NO: 149369 - DNA, 1878 bp, Zea Mays
gaaaacccaaccagcgaaaagaaatcgggtgtcgagtcgtcgcacggtgttgctcgccatatccccttcccccctcctccctgcgtcccccggctccggcgatccgccgcacctgaacccttctccacgtcgcctcgccggttgggttgaggtgagccgatcagatccgatcggggccggtccttgcgccactgctgcgtgagctcatctcggtcgcccgcctgctcggctcgatcggccggggacggcggcggccagatctgcaatggagggcaacaaggacgacgcggccaagtgcctgcgcatcggcaagggcgcgctcgacgccggcgaccgcgcgcgcgccatcaagttcctgtccaaggcaaagcgcctggacccctcgctgcccatcgacgacctcctcacctcccttctcaaccccgaaggcgactcccaggcttcttcgcccccgccgtcttcaccaccgcaaactgccgcagcaggggcatcggaggcagttgaggctgatgggctgagagagaggaagcacaagggcaagaatagggaggaggaggcgactcctgctgccagggagtacaccgcagagcaactcgaggtcgtgcgccaggtcaaaaagcacaccagggactactaccagatcctcggcctggaaaaggactgcagtgtcgaggacgtgcgcaaggcctaccggaagctctcgctcaaggtgcaccccgataagaacaaggcccctggcgcagaggacgccttcaaggccgtctccaaggccttccagtgcctgacagatgctgagagccgcaaacgttacgaccttgttggctcggatgagccagtaacacaccacaggagggcctccactgcccgtgcatacaatgagttctacgaggatgactttgacccagatgaggtattcagaaacttcttctttggtggtatggcgcctgccaccaccaggcagtttggacagtttagaactttccatttcaggactggtgggatgcatgcccacggcacacaaagcactggtggctcacctgtcaggatgcttattcagctgttgcctgtcctactgctgctgttgctcaactttctgccatcctcggagcctgtctactcgctctctcgttcctacccttatgagcataagttccaaaccccccgtggagttccatactatgtcaagatgtctaattttgaggagcagtatccacaccaaagcactgagcgagcaacagtggagcggcatgttgagagggattattattccataatcacacagaattgtagggtcgagctgcagcgtcgccaatggggcttgtcataccagacaccacattgtgatatgcttcaaaagtttgaggcaacagcacagtaataattcatccaatggtggaaggttgacagggagaagagaatgctggcctcatgaaaaggtgctgccttagctgccagcctcatgaaaaggtgcaataagtaacttggatgattatacaccactgcccagatgatctcttagtagtgttaaggggcgcatcacgacatcacgtagctacttcaaaaggaggaggatatgtaagcttcataggagatgatcgcatgcaaaccagtgtatgtatatggagtatatcgatctaatgctttagggctcgttcgttggcggttccagctaaattttgtattaacattgattagctagaacagtttctagcctcagcccaagctaaatttgaagtgaagactttaggtaaaacagaaatgcaactataacacaactgggttaattttacattcgctcggatgctgagatgtccaattttcaatagtgatgtaagtaaagagcaccgataatctttttccataaaaattctctagaaa

SEQ ID NO: 149370 - DNA, 1858 bp, Zea Mays
gaaaacccaaccagcgaaaagaaatcgggtgtcgagtcgtcgcacggtgttgctcgccatatccccttcccccctcctccctgcgtcccccggctccggcgatccgccgcacctgaacccttctccacgtcgcctcgccggtaatcgactacgttctctttctttaggcagtcggttcgtaccccaaactcggattcctctttctgatcctcctatacacgccgcgtcgattgtatcgtcttaggttgggttgaggtgagccgatcagatccgatcggggccggtccttgcgccactgctgcgtgagctcatctcggtcgcccgcctgctcggctcgatcggccggggacggcggcggccagatctgcaatggagggcaacaaggacgacgcggccaagtgcctgcgcatcggcaagggcgcgctcgacgccggcgaccgcgcgcgcgccatcaagttcctgtccaaggcaaagcgcctggacccctcgctgcccatcgacgacctcctcacctcccttctcaaccccgaaggcgactcccaggcttcttcgcccccgccgtcttcaccaccgcaaactgccgcagcaggggcatcggaggcagttgaggctgatgggctgagagagaggaagcacaagggcaagaatagggaggaggaggcgactcctgctgccagggagtacaccgcagagcaactcgaggtcgtgcgccaggtcaaaaagcacaccagggactactaccagatcctcggcctggaaaaggactgcagtgtcgaggacgtgcgcaaggcctaccggaagctctcgctcaaggtgcaccccgataagaacaaggcccctggcgcagaggacgccttcaaggccgtctccaaggccttccagtgcctgacagatgctgagagccgcaaacgttacgaccttgttggctcggatgagccagtaacacaccacaggagggcctccactgcccgtgcatacaatgagttctacgaggatgactttgacccagatgaggtattcagaaacttcttctttggtggtatggcgcctgccaccaccaggcagtttggacagtttagaactttccatttcaggactggtgggatgcatgcccacggcacacaaagcactggtggctcacctgtcaggatgcttattcagctgttgcctgtcctactgctgctgttgctcaactttctgccatcctcggagcctgtctactcgctctctcgttcctacccttatgagcataagttccaaaccccccgtggagttccatactatgtcaagatgtctaattttgaggagcagtatccacaccaaagcactgagcgagcaacagtggagcggcatgttgagagggattattattccataatcacacagaattgtagggtcgagctgcagcgtcgccaatggggcttgtcataccagacaccacattgtgatatgcttcaaaagtttgaggcaacagcacagtaataattcatccaatggtggaaggtgaatagctgtatagcattgcaggcaagtcatgctttgcatttggctttgtttgtgaattagaggaagttcaagctgtcatttttatatctgtttcctctagagtgtttcgtaactagagaatgatgaaaaattagtttgatcaatgatgcacatgcatggcgttttcctttcctgtctttctcatgctgctgagggttgtctcaatagtttcttttaatgtaactagttagtggagatgcatggctgcatgcctgacacactagataagtgatatatcctttcctagaggcatgttgaagtgcagcacacaaatgaaatattggaattaccagttggctacataaataacaca

SEQ ID NO: 149371 - DNA, 536 bp, Zea Mays
tacgtggaccttcagttggtgtaatcagaagcaatatccaagatattcatcatgcacttctacaaaatgtaatgtaatcctaagtgttcatccttttatttttcttgagtgaatgaaatgttactaaaattattcgttttccagatatttaccatgtgccatattcttttttttatatatggcccttggttcacactaatcctctcacataccagttagccatgtgttctgtttgacaaggagaaggaagcaggaacaaggtcggaggagaaaagaaactcaactccagctaatgacaagcccatgtgtgcattgtgatagcactgctccggggtctgtttatgcgcaacagcagtttatgagaggagatgtggcccccatctgtggccgcaaaggagcttggccaactgcgacaacgacatcctgtctctggttgtaattgtagtatttgttggtaaataattttatcaaatattttgtatgtcgttgcaaaacacgggcatataactagtaaagtaataagagtttaagttcct

SEQ ID NO: 149372 - DNA, 612 bp, Zea Mays
atggattccaggatctccttcctctgcgccctcgtcctcgcctcctccctcctgcactacgccagatccgacggcaatgatgcagctcctcaagggcatcaacagctacaggtcctcgctcaaggtcccggcgctgtccgagaacaagaacgcggcgaacggttttctgagattgttggaagtccttattacatggctccagaggtgctaaagagaaactatggcccagaggttgatgtttggagtgtaggagtgattctgtacattcttctttgcggtgtccccccattctgggcagaaacggaacagggtgctgctcaggcaatcattcgatctgtcattgatttcaaaagagatccatggccaaggagtagccgcaagaatttcattgcttccaacttcagtgtctggaagctacaggtttttagctgtatgaggcctataacacatcaaaatgcaaagatagattacaggatgaagaagacatgggctaatctggcagggaggcccaagcccccaccccaactgctggagcaccatggagagcaagaagagaggggagagggaagaagaggggccagggtgctggaggaagggaagacgaatctttag

SEQ ID NO: 149373 - DNA, 170 bp, Zea Mays
gaaagtttcatttattggtttttatttttggagtccaacctatttaaataatagaatttacctcaaaataatttattttatgagaagatattttatttatattactattgtttttggatttatcattatatatatatatccatttacttaataaaaaaaagaaaaaaaga

SEQ ID NO: 149374 - DNA, 743 bp, Zea Mays
tcagaaatctgctaattgtagattggttctatatatgtcactgaggaccagcagtctcctagctttaagctaattatggggtggcactaaattatgagctggccgatgggaaatacgtagcgaataggccagactgtgaacgtgaggccccaaccctccgccgctcgcctataaacacgcgctctcaccgcctccgacctcactcactctcattcgcaatttccctacgagctcgagctcacggctcaccgcagctcaaaagccagcacaggcaaacccccgtcatggcctcctccaagatactgcgcgccgccgtcgtcgtcgtggccgtcgccgtgtcctccttcgccggcgccgccctcgccgccgaggcccccgcgccgagcccggcctccggcgccgcggccgtctcctcgtcgctcttggccgccgccctctgcccggccgtcgcgctcctcctcggcaacctgcgccactgatgacgcctgcctgcctgtccgacgagagccgccgtgtgctgtcgcgtgatgttattgtcctctgtatgtgtgtgtgtgtgttcctgacctgtgcgtgccttgtaccgccaccccgcgcgtggattggaactctatcgatcgttcggagattcagcgcgtttgtttctgtagcagcattggttcagacttcagagtgaacgtcgcccagattttctgatgttttttttggaagcacgaacattaaacataattcgtctgattatg

SEQ ID NO: 149375 - DNA, 827 bp, Zea Mays
ctctttatttagtattacttctaacattatgtgttcgtttgtaagatatttgttctgttgtgttgcttgaatggtcctgtgccggtttctcttgttaggtagattctcttctcttttatatttttgggttccattgctagtgcatggtttagctgtgatgagccataacttttaagaaaaccaaccgatcaattggttccttcaatgaaatataagctgatacgcttggcttctgagctgaccttgcaggatatttaagtcttgtatcattggtttcctgcttttcgtttagaatgaacactaataatgtacagtgcttcggtttctaatttgccttttgtttgtgctgcaggttggcgacaactattacaggcctgatctgaccaagtcggcccttggtaggctgagctctgtgtaccgcagcctccaggttgccaagtctggtgtcaagaagaagaacaggcagcctacgcactaagcctgtgttctgtcgttggtgcccatagtctcagcttatatttatccaatgtctccaacagttttgagacttgttagaactagagcaaatcgtgttaagatgttgccgtttgtcattctatagcaagaattccatgacaaagattgcttggcacttgattgctgctttgtttgcaagctggctggccgggattacccctgatttttgttgggttctggaacatgtatgtctagcttcttattgggtgcttttggttgcctgtggactgtggttgcctgcatattgtctggcgaggctcacgttctggttggttgcctatcagcctcttcagcgttctggttggttgcct

SEQ ID NO: 149376 - DNA, 1427 bp, Zea Mays
aggaagcgcttgcggacctagggtttacgaggacgcccccagtataaaataggcgaggggctgcatcccacagccgccactgcaaccccggaacagagcgaggcgacgccgaggcacctcatctccggtaagtgagatcccttctcttgtggcattcgacgatgttttgttgggtccagtatcttgctgtcggctgtattttttgtggtaaagttagggcggttcaagctgatgctgattagcgttcaaatcccagtgctcagtacttcactagtcgatgcgtttgaatgattcgactggtgatttgcggggcgtactccgcatgattcgtcgttggttaggtagctgtggcattctcgcattttatttttcacttgttctgtgttaaaggttaattgcagccttgttcttagctcagttacatctggtagcgaaatggtgcgtagggctatccatcttagaaaaaccgacccaaatgttcagctttagataagagttgttgcatattgcttcctcatgcaacaagcaaccgtaactattccccagatggtcaggtgatcagttttctccctgtttaatgttgcaagggaatctcacatttgccagttgatattttcgactatttaggcgaagggaaatggcgaccgttccaggggatctgatctggcagattgtgaggaagaacaactccttcctggtgaagcagtttggcaacggcaatgccaaggtgcagttcaccaaggagcccaacaacctctacaatgtacactcctacaagtactctggcttagcaaacaagaaaactgtaacgatccagccagctgctggaaaggactcggctgtggtcctctctactaccaagaccaagaagcagaacacacccgcgaagctcagccacaagtctgtaatgcgcaaggagttccgcaagatggccaaggctgtgaaaaaccaggttggcgacaactattacaggcctgatctgaccaagtcggcccttggtaggctgagctctgtgtaccgcagcctccaggttgccaagtctggtgtcaagaagaagaacaggcagcctacgcactaagcctgtgttctgtcgttggtgcccatagtctcagcttatatttatccaatgtctccaacagttttgagacttgttagaactagagcaaatcgtgttaagatgttgccgtttgtcattctatagcaagaattccatgacaaagattgcttggcacttgattgctgctttgtttgcaagctggctggccgggattacccctgatttttgttgggttctggaacatgtatgtctagcttcttattgggtgcttttggttgcctgtggactgtggttgcctgcatattgtctggcgaggctcacgttctggttggttgcctatcagcctcttcagcgttctggttggttgcct

SEQ ID NO: 149377 - DNA, 1012 bp, Zea Mays
aggaagcgcttgcggacctagggtttacgaggacgcccccagtataaaataggcgaggggctgcatcccacagccgccactgcaaccccggaacagagcgaggcgacgccgaggcacctcatctccgtgctcagtacttcactagtcgatgcgtttgaatgattcgactggtgatttgcggggcgtactccgcatgattcgtcgttggttaggcgaagggaaatggcgaccgttccaggggatctgatctggcagattgtgaggaagaacaactccttcctggtgaagcagtttggcaacggcaatgccaaggtgcagttcaccaaggagcccaacaacctctacaatgtacactcctacaagtactctggcttagcaaacaagaaaactgtaacgatccagccagctgctggaaaggactcggctgtggtcctctctactaccaagaccaagaagcagaacacacccgcgaagctcagccacaagtctgtaatgcgcaaggagttccgcaagatggccaaggctgtgaaaaaccaggttggcgacaactattacaggcctgatctgaccaagtcggcccttggtaggctgagctctgtgtaccgcagcctccaggttgccaagtctggtgtcaagaagaagaacaggcagcctacgcactaagcctgtgttctgtcgttggtgcccatagtctcagcttatatttatccaatgtctccaacagttttgagacttgttagaactagagcaaatcgtgttaagatgttgccgtttgtcattctatagcaagaattccatgacaaagattgcttggcacttgattgctgctttgtttgcaagctggctggccgggattacccctgatttttgttgggttctggaacatgtatgtctagcttcttattgggtgcttttggttgcctgtggactgtggttgcctgcatattgtctggcgaggctcacgttctggttggttgcctatcagcctcttcagcgttctggttggttgcct

SEQ ID NO: 149378 - DNA, 948 bp, Zea Mays
aggaagcgcttgcggacctagggtttacgaggacgcccccagtataaaataggcgaggggctgcatcccacagccgccactgcaaccccggaacagagcgaggcgacgccgaggcacctcatctccgttgatattttcgactatttaggcgaagggaaatggcgaccgttccaggggatctgatctggcagattgtgaggaagaacaactccttcctggtgaagcagtttggcaacggcaatgccaaggtgcagttcaccaaggagcccaacaacctctacaatgtacactcctacaagtactctggcttagcaaacaagaaaactgtaacgatccagccagctgctggaaaggactcggctgtggtcctctctactaccaagaccaagaagcagaacacacccgcgaagctcagccacaagtctgtaatgcgcaaggagttccgcaagatggccaaggctgtgaaaaaccaggttggcgacaactattacaggcctgatctgaccaagtcggcccttggtaggctgagctctgtgtaccgcagcctccaggttgccaagtctggtgtcaagaagaagaacaggcagcctacgcactaagcctgtgttctgtcgttggtgcccatagtctcagcttatatttatccaatgtctccaacagttttgagacttgttagaactagagcaaatcgtgttaagatgttgccgtttgtcattctatagcaagaattccatgacaaagattgcttggcacttgattgctgctttgtttgcaagctggctggccgggattacccctgatttttgttgggttctggaacatgtatgtctagcttcttattgggtgcttttggttgcctgtggactgtggttgcctgcatattgtctggcgaggctcacgttctggttggttgcctatcagcctcttcagcgttctggttggttgcct

SEQ ID NO: 149379 - DNA, 927 bp, Zea Mays
aggaagcgcttgcggacctagggtttacgaggacgcccccagtataaaataggcgaggggctgcatcccacagccgccactgcaaccccggaacagagcgaggcgacgccgaggcacctcatctccggcgaagggaaatggcgaccgttccaggggatctgatctggcagattgtgaggaagaacaactccttcctggtgaagcagtttggcaacggcaatgccaaggtgcagttcaccaaggagcccaacaacctctacaatgtacactcctacaagtactctggcttagcaaacaagaaaactgtaacgatccagccagctgctggaaaggactcggctgtggtcctctctactaccaagaccaagaagcagaacacacccgcgaagctcagccacaagtctgtaatgcgcaaggagttccgcaagatggccaaggctgtgaaaaaccaggttggcgacaactattacaggcctgatctgaccaagtcggcccttggtaggctgagctctgtgtaccgcagcctccaggttgccaagtctggtgtcaagaagaagaacaggcagcctacgcactaagcctgtgttctgtcgttggtgcccatagtctcagcttatatttatccaatgtctccaacagttttgagacttgttagaactagagcaaatcgtgttaagatgttgccgtttgtcattctatagcaagaattccatgacaaagattgcttggcacttgattgctgctttgtttgcaagctggctggccgggattacccctgatttttgttgggttctggaacatgtatgtctagcttcttattgggtgcttttggttgcctgtggactgtggttgcctgcatattgtctggcgaggctcacgttctggttggttgcctatcagcctcttcagcgttctggttggttgcct

SEQ ID NO: 149380 - DNA, 890 bp, Zea Mays
aggaagcgcttgcggacctagggtttacgaggacgcccccagtataaaataggcgaggggctgcatcccacagccgccactgcaaccccggaacagagcgaggcgacgccgaggcacctcatctccggtaagtgagatcccttctcttgtggcattcgacgatgttttgttgggtccagtatcttgctgtcggctgtattttttgtggtaaagttagggcggttcaagctgatgctgattagcgttcaaatcccagtgctcagtacttcactagtcgatgcgtttgaatgattcgactggtgatttgcggggcgtactccgcatgattcgtcgttggttaggtagctgtggcattctcgcattttatttttcacttgttctgtgttaaaggttaattgcagccttgttcttagctcagttacatctggtagcgaaatggtgcgtagggctatccatcttagaaaaaccgacccaaatgttcagctttagataagagttgttgcatattgcttcctcatgcaacaagcaaccgtaactattccccagatggtcaggtgatcagttttctccctgtttaatgttgcaagggaatctcacatttgccagttgatattttcgactatttaggcgaagggaaatggcgaccgttccaggggatctgatctggcagattgtgaggaagaacaactccttcctggtgaagcagtttggcaacggcaatgccaaggtgcagttcaccaaggagcccaacaacctctacaatgtacactcctacaagtactctggtatgctgctctcctcagtttctggattgatctgcctacagaacaccttatgtgatcttagtaataaacaataaatgattttgtgttgaccgttttgcctgtttt

SEQ ID NO: 149381 - DNA, 749 bp, Zea Mays
atgtaaatgggctaggcgtcgaagcctctccgcataagacacgggcctacgtccagtcgtccacagatcggaggagagagcactgactcgtctcccttctcgtctccagcgacggcgaaggcgaagcggaggagcgggagcagaaacagaagaggcagccatggccgtgatggagaagctcaagatcttcgttgtgaaggagcctgttgtcgcagcttcctgtctcatcgccggattcggtctctttcttccagcagttgtccggccaatcctggattcatgggagaccgcagaaaaagttcctccaccacctctaaatgatgtggttgcgggtgtcaccggcaagaaaaagtagtgaacttgcattgttttctcatgtcgatgctgtcccacattttcttccccatgtttttctggcgtccagattggaaggctctccaaagtcacggtctccaaagtgacagcttgcttgattttaaacagtatcgacagtgttttgtctctacacagattgcagatatagcggtttaaacagttcgctttaatccgaaacgaacaggctattttacctgaatcatatactgcaatgtgtcagttttagaattttccccctaaaacaaaggttgatagaatgtcatcagcaccttttgaattgtgttcttcgttaccaacttaccataattctcagaagctattaaggggtgattgtttcaacttaaatttggatattggccgtgagaacagccaaa

SEQ ID NO: 149382 - DNA, 1917 bp, Zea Mays
gggccggccggtttgactcggcggcggacggcgacgcgccgacgtgtctccgccgccccgctcacatccgcccccgcgccatccgtccacgtgttcgcgcctctggaacggactcccccgcctgcaccttcttttccctcgcgccgcggcgcccgttctttccgagtcccgcggatataactacaaccagccgcccccttcctccgcagctccgctccccttcccccctcgtttttcctctgcgcactttttctcgtttccagccttccaggcagccacgcctcgcccgttctcggatcccctccaaaacggtcaaagccaaaccagccaaatcgcgcgcggcggcggcggcgacgagaacgagacggacgcgcgcgcgctagctgaatcaggtcaggaaggaggagagccgccggcgagcacagcagcaatgccttactgcgaggtgggcaggtacgcggacggcgacaagtgggagggcgtccgcgtctactaccgccgctacggccgcggcgccaccaaggtgctcctcatcatcgggttggcggggacgcacgactcgtggggcccgcagattaaggggctgacggggtcgctggagccggccgacgacgaggccctgcggccggacgaggaggccgccggcggcgacggcgacggcatcgaggtctgctgcttcgacaaccgcggcgccggccgcagctccgtgcccccgaacaaatcctactactcgacggcaatcatggcgacggatgccttggccttgatggatcatttggggtggaagaaagctcacgtctttggccactccatgggtgccatgattgcttgcaagcttgcggcgattgcgcctcacaggctatgttcgctggcattgcttaatgtcactggaggtggctttcagtgcttcccaaaggtagatgggcagatgctttctcttgcattccgtttcttaagggcaaaaacaccagaggaaagagcccttgtggacttggaaacgcattatacgaaggaataccttgaggagactgttgggtcgtgtaccagaagaatggtcctctatcaagaatatgtgaagggcatatcgtcgacagggatgcaatctaattgtggttttgaagggcaaatcaatgcatgttggactcacaacatgactactaaggagctagatacaatacgatctgccggctttctagtttcagttattcatggaaggtacgatatcattgcgcaattgtgccatgcaaaacgtctagcagaaagccttcttcctgttgcaagaatggtagaacttcatggtgcacatctagtgagccatgaaagaccagacgaggtgaacaatgcacttatggatctgataaaggccaccggatctgcgatgaaacctgaagagtggtcagcccagcctgagaacacatcggagaccggggcactcatttccgcgaggcccattaccgtcacgatgcgaacagatgaaggggtgatagtcatggggtttgagcacatcaggaacattgtaaggataatgaagccagcaagggttgcaccaattgactcgtgaggaccaaaatacgtgtaaattattctttgagaccttgttgtgggagtcgagatgatactttttcacttctcccccatacctggagatgatgattttagagtagcatctccaacacatgtgaaactcttcggaggaaaggcctgctcatagtggcagaataatccgacacggataacactgaacaaacagtgcccgcctggacagaagtgtctgggccacggttggtgtatgcacatgtacctgtataaagagtatctgtaacttgctgcttctatttcacggccacatgctgtgctggtgctgtccaccatgcttctgtaccatactgaaatttcaaaaccattctttgttgctca

SEQ ID NO: 149383 - DNA, 1248 bp, Zea Mays
gatagaatctatcgatctgcttattttcttaaactgttgtatagtggtgcaaaatcccaaaaattatggccaacaacgaagataacatcaaaaacagtgtctgtctgcaagcttctcctgagaaatttaagctttctaatgctcaagttttgtctaccaaactaggaagaagaattgagtgagaaaaatctgctgcacttttgtcatatatactgagcgaacttagatgacatcagacgttgcagttatctgaaagcatcattggtcacctaaccaaatgttactcttggagatagttgttccccattactaggtctagcagagaataacggaattatacgacacaataggttactaaaagtcgtatttgggatcaagttgcctcaagtatctaggcatgtggcttagcacgcactcagcacaatactttctggtgtttgcttctctcgcttggtcacagtctatcatgaaaagttcagtaggaactcatgtaaccttctacgaattgcaggtgaacaatgcacttatggatctgataaaggccaccggatctgcgatgaaacctgaagagtggtcagcccagcctgagaacacatcgggtaagcttaagaagactaaacacctccgatttctcttcaaggctaactgttctggatcaaatctcttacgctgcgtcctcatcagagaccggggcactcatttccgcgaggcccattaccgtcacgatgcgaacagatgaaggtgcaaatgctgccgtagcagtctataacttgcttggcaagctgcaactaagctttctttatctcataggggtgatagtcatggggtttgagcacatcaggaacattgtaaggataatgaagccagcaagggttgcaccaattgactcgtgaggaccaaaatacgtgtaaattattctttgagaccttgttgtgggagtcgagatgatactttttcacttctcccccatacctggagatgatgattttagagtagcatctccaacacatgtgaaactcttcggaggaaaggcctgctcatagtggcagaataatccgacacggataacactgaacaaacagtgcccgcctggacagaagtgtctgggccacggttggtgtatgcacatgtacctgtataaagagtatctgtaacttgctgcttctatttcacggccacatgctgtgctggtgctgtccaccatgcttctgtaccatactgaaatttcaaaaccattctttgttgctc

SEQ ID NO: 149384 - DNA, 1746 bp, Zea Mays
ctccgctccccttcccccctcgtttttcctctgcgcactttttctcgtttccagccttccaggcagccacgcctcgcccgttctcggatcccctccaaaacggtcaaagccaaaccagccaaatcgcgcgcggcggcggcggcgacgagaacgagacggacgcgcgcgcgctagctgaatcaggtcaggaaggaggagagccgccggcgagcacagcagcaatgccttactgcgaggtgggcaggtacgcggacggcgacaagtgggagggcgtccgcgtctactaccgccgctacggccgcggcgccaccaaggtgctcctcatcatcgggttggcggggacgcacgactcgtggggcccgcagattaaggggctgacggggtcgctggagccggccgacgacgaggccctgcggccggacgaggaggccgccggcggcgacggcgacggcatcgaggtctgctgcttcgacaaccgcggcgccggccgcagctccgtgcccccgaacaaatcctactactcgacggcaatcatggcgacggatgccttggccttgatggatcatttggggtggaagaaagctcacgtctttggccactccatgggtgccatgattgcttgcaagcttgcggcgattgcgcctcacaggctatgttcgctggcattgcttaatgtcactggaggtggctttcagtgcttcccaaaggtagatgggcagatgctttctcttgcattccgtttcttaagggcaaaaacaccagaggaaagagcccttgtggacttggaaacgcattatacgaaggaataccttgaggagactgttgggtcgtgtaccagaagaatggtcctctatcaagaatatgtgaagggcatatcgtcgacagggatgcaatctaattgtggttttgaagggcaaatcaatgcatgttggactcacaacatgactactaaggagctagatacaatacgatctgccggctttctagtttcagttattcatggaaggtacgatatcattgcgcaattgtgccatgcaaaacgtctagcagaaagccttcttcctgttgcaagaatggtagaacttcatggtgcacatctagtgagccatgaaagaccagacgaggtgaacaatgcacttatggatctgataaaggccaccggatctgcgatgaaacctgaagagtggtcagcccagcctgagaacacatcggagaccggggcactcatttccgcgaggcccattaccgtcacgatgcgaacagatgaaggtgcaaatgctgccgtagcagtctataacttgcttggcaagctgcaactaagctttctttatctcataggggtgatagtcatggggtttgagcacatcaggaacattgtaaggataatgaagccagaccaaaatacgtgtaaattattctttgagaccttgttgtgggagtcgagatgatactttttcacttctcccccatacctggagatgatgattttagagtagcatctccaacacatgtgaaactcttcggaggaaaggcctgctcatagtggcagaataatccgacacggataacactgaacaaacagtgcccgcctggacagaagtgtctgggccacggttggtgtatgcacatgtacctgtataaagagtatctgtaacttgctgcttctatttcacggccacatgctgtgctggtgctgtccaccatgcttctgtaccatactgaaatttcaaaaccattctttgttgc

SEQ ID NO: 149385 - DNA, 660 bp, Zea Mays
atgccatgtcgtgagccattgctggtgcaacccactcttattggcaggaagcaagttttgtcaaatagcggtattgcaagtatctcggttgtgttgatagcattagtcattagagggatagataggtgtttggattcaaaagagtcaactcttgttattgctcttattgatggtgttatcggacattatgcttgctgcaatggagatacatggtcatctgagctcgacattctttgtaaagctgagccacgaattatcacaacattcaagctaatccagacaaattcatttggccttgcaaatgacaacgagattcacgtagttacaaggcttgagtgcggagctgtggctggaaccattggccagactgttgcataccctcttgatgtcatcagtagaagaatgcatatggttggttggagccatgctgactctattgttattggacaagtcaaagaagcactccagtacaatggcatgatcgatgcattcaagaagaccgttcgccatggagttggtgctctatacaagggtcttgtgccgaactcagtcaagagttctgtgcttgatgttcatacagagcgttttttgagatatctgttcgcgcctgagaagaaacctgacataatcaatggtctagctgataagaatcgtccctag

SEQ ID NO: 149386 - DNA, 143 bp, Zea Mays
gtgattttataattttttgtgagaggagaaaccaagggcttcatatgcattgtgcagccataaaactactagatgagctaactttttataagtggaaggatgatgaccctcaatttgaattcaactgtctttcttgtgttaag

SEQ ID NO: 149387 - DNA, 222 bp, Zea Mays
ttttcttctaggctgtatacaagactgacttcttcccagtacgggccagtggctagtttagcattatttaaagttatgagaaattgttgtagtttgctcatccttttcatggttgctaatctgcggaaactgttccatgtcgaaagccttgagaagactatccaggatgattttcagaagctttcctctgtcgtgtaccttcaagtcagcacaatcagtcat

SEQ ID NO: 149388 - DNA, 439 bp, Zea Mays
ataataagagtttaaaccttagtccttttggctctcgacattcactcacctaactaatcagaacacatgcatgcatgtatttttccaaacgcagagacgcagtgggaaggttctgacgtacgttcaggactacgactacggcgggtccaaccccaaacatgacccacgcaggaagccagggagcggacaccctccataggtagccaaggataaacgtccggtgacgctccagccactggactctgctggtacctagctagtcttgctgagttgttcctgtaatgagtagaaagaatcagaacggtttggtcccgtccacgcccacgtcactttgttagctacgtagtagtataataaggtagtcttttagatgatgatgaaataaagatccagaatgttctgtcagtcgagacaccagactttaagtcctatttcttta

SEQ ID NO: 149389 - DNA, 527 bp, Zea Mays
ctcacagaactaacagttctgagatcgagctgcacaaggaaggaaagaaggagacacacaatcgtcgcctgcttaaccagagcgacaatgcccaagctcaggctcatcttcaccgttattcttgtggtgtctctactgttcagtggtgtgtcttcaggacaaactgcagctacacaagccagcgatgcagatctttctgaagcggttgaggttgagagacgcagtgggaaggttctgacgtacgttcaggactacgactacggcgggtccaaccccaaacatgacccacgcaggaagccagggagcggacaccctccataggtagccaaggataaacgtccggtgacgctccagccactggactctgctggtacctagctagtcttgctgagttgttcctgtaatgagtagaaagaatcagaacggtttggtcccgtccacgcccacgtcactttgttagctacgtagtagtataataaggtagtcttttagatgatgatgaaataaagatccagaatgttctgtca

SEQ ID NO: 149390 - DNA, 635 bp, Zea Mays
acacgggaaaatttatgaccgggcagactcatcgtttctgttcgatttaaatgaccaggtgcttcttgtcccaccggccgttctggcactccgcgagaccagtaccttcaggatctcgtgacccagttccagaacgccacaaatgaagaatctaaggagaagattgttgctaacctggcaaattttgcttatgacccttttaattatgccttcatgcgccaggttgttcttgagttattcttggactgcattacagagccaaatgaaaagcttgtcgagttcggcattggtggaatatgtaactcctgtgaagatcctgcaaattctttaatcattactcagtgtggtggaatcccgttggttgtacaatgcttatggagcctagtgcggaatactataagcatttctgaagatatagtgatcagctcttgagcagctagagtgatgtagttgtgggcttttgaacaatagctagagtgatatgaaacattagtgatgtagttgtggtgcttttgtgactgatcatctctggagcttttgtgaatgatctagctagctatccgtaaatgatctagttgtgaatgatattataattgtgatgcttttgtgaatatataattgtggtgcttttgtgt

SEQ ID NO: 149391 - DNA, 126 bp, Zea Mays
atgaaattccaccccttgtttttccaggcacctgatcctaattcgatcggttgggaatccagaaagttagggcagttgatgcggttgcaaacatggctcgacgaggggcccacttcaatgctgtaa

SEQ ID NO: 149392 - DNA, 1453 bp, Zea Mays
gagatgattccgaattactacttacttttacattatacgaagaaaaacacttctgatgcataactgctgtccaatgacaggcaagtgtaaccgtgggctctctgtggtcgacagctacaagctgctcaagggcgctgatgctctgggcgaggaggaaacgttccttgcttgcaccctcggctggtgcattgaatggcttcaggctttctttcttgtgcttgatgatatcatggatgactctcacactcgtcgcggccagccttgctggttcagggtgcctcaggttggcttaattgctgcgaatgacgggatcatccttcgcaaccatatctcacggatccttcggcgccactttaagggcaaaccttactatgctgatctccttgatttgttcaatgaggttgagttcaagacagcttcaggtcagctgctggaccttatcactacccatgagggagaaaaagatctaacaaagtataacataacagttcacggtcgaattgttcaatacaagacagcctattattcattttatctgccggttgcatgtgccctgctgctctctggcgagaatttggacaattatggtgatgtagagaacatccttgttgaaatgggaacatactttcaagtccaggatgactatctggattgttatggtgatcctgaatttatcggcaagattggaacggacattgaagattacaagtgctcatggctagttgtgcaagcccttgagcgtgctgatgagagccaaaagcgcattctatttgaaaattatggcaagaaagatccagcctgtgtggcaaaagtgaagaacctctacaaagaacttgacctagaggcggtatttcaggagtacgagaatgagagctacaagaagctgattgcagacattgaagcccagccaagcattgcggttcagaaagtgctgaaatccttcttgcacaagatctacaagaggcagaagtagggtgctcttggataaacgagctcaggagtcgttactccttcgcatgcttgacataaccggacttcctcacctggttgctctagtatgatgtggagcgtctagttaaaaaaaatcgatgtagtatgaagcaccttgctgctctgaatattaacaggcaattaaggcaaggtgctgtttcggtttggtggaccgcatgttgcagataataaattagttgttttgtcatttgcgtctctatcgactttgctagtttgcttcttttggccaccgcccaactagtcgctttcaagagaatttctagcgtgtcacttctttgcttctctctctctctggccacccctactagtcgctttcaagttttttgcttttctctgaaaatgctcgcatcctctatgacttcgtggtacaatcttttgggaacaaaagtgccaagacatgatagaagaatattccaaaacctaaatttcaggagcttgagta

SEQ ID NO: 149393 - DNA, 1783 bp, Zea Mays
cttcgtgccgtgcccgtgcgagccgctgccaacccgctccagctttgcccgttgccgtggccgtcccgtccggccgtccctagaaaaggccgcgtcccacgttgccttggttcccccaccctgctgtctccctccctccttccttccttccccgccactgcgcagcgcgagtgcggcgacagccagtcacacactcacactccctcgaccgctctcggccccgtccgcgtcgccgcagggcgaggaggcaatggcggcgggcgggaatggcgccggcggggacaccagggcggccttcgcgcggatctacaagacgctcaaggaggagctgctcaccgacccggccttcgagttcaccgaggagtcacgccagtggatcgaccgcatggttgactacaatgtactcggaggcaagtgtaaccgtgggctctctgtggtcgacagctacaagctgctcaagggcgctgatgctctgggcgaggaggaaacgttccttgcttgcaccctcggctggtgcattgaatggcttcaggctttctttcttgtgcttgatgatatcatggatgactctcacactcgtcgcggccagccttgctggttcagggtgcctcaggttggcttaattgctgcgaatgacgggatcatccttcgcaaccatatctcacggatccttcggcgccactttaagggcaaaccttactatgctgatctccttgatttgttcaatgaggttgagttcaagacagcttcaggtcagctgctggaccttatcactacccatgagggagaaaaagatctaacaaagtataacataacagttcacggtcgaattgttcaatacaagacagcctattattcattttatctgccggttgcatgtgccctgctgctctctggcgagaatttggacaattatggtgatgtagagaacatccttgttgaaatgggaacatactttcaagtccaggatgactatctggattgttatggtgatcctgaatttatcggcaagattggaacggacattgaagattacaagtgctcatggctagttgtgcaagcccttgagcgtgctgatgagagccaaaagcgcattctatttgaaaattatggcaagaaagatccagcctgtgtggcaaaagtgaagaacctctacaaagaacttgacctagaggcggtatttcaggagtacgagaatgagagctacaagaagctgattgcagacattgaagcccagccaagcattgcggttcagaaagtgctgaaatccttcttgcacaagatctacaagaggcagaagtagggtgctcttggataaacgagctcaggagtcgttactccttcgcatgcttgacataaccggacttcctcacctggttgctctagtatgatgtggagcgtctagttaaaaaaaatcgatgtagtatgaagcaccttgctgctctgaatattaacaggcaattaaggcaaggtgctgtttcggtttggtggaccgcatgttgcagataataaattagttgttttgtcatttgcgtctctatcgactttgctagtttgcttcttttggccaccgcccaactagtcgctttcaagagaatttctagcgtgtcacttctttgcttctctctctctctggccacccctactagtcgctttcaagttttttgcttttctctgaaaatgctcgcatcctctatgacttcgtggtacaatcttttgggaacaaaagtgccaagacatgatagaagaatattccaaaacctaaatttcaggagcttgagta

SEQ ID NO: 149394 - DNA, 1780 bp, Zea Mays
aggaaccgctgtcggcctgctccacctccacggctccacctgtctgctctctgtctgtcccgcgtcctcctccgcagcacgacgaccgcatcgcgttctacgttctccgccctctccgctccccctactctgcttggtttcccagaagatttgattggtttccccaaatccggtgactccattcctgttgttcttcacgtcgaccccgggaacctcccagaaggctctagcgaccccggcggtatcggcctctccctctccctctccaagatccgtcccttcttccccgtcgattagcgtctgcctcctccattgccgcttgcatttttaatacccgtctcttggtgcatgtagctctgagtgctgtgctgccggcggcgagatccaggagctgcctgccatggtgaaggacagcgcctactacgacgtcctaggggtcagcgtcgacgcgtcctccgccgagatcaagaaggcgtattacatcaaggcgaagctggtgcatccggacaagaatcccgggaaccctgacgccgcactcaagttccaggaacttggagaggcctatcaagttcttagtgatcctgggaaaaaggaggcttatgataagtatggaaaggagggtattccccaggataacatggtggatcctgctgctgtctttgggatgatttttggaagtgactattttgaagattacgttggccagcttgctctagcatctatagcctcagtagaggttgatgaaaactcaaacagtcaagaagcaagagcaaaggttcaagaaaagataaaagagttacaaagagagagagaacaaaagcttacccagagcctgaaagaccgacttcaaccatatgtagatgagagaaaggatgaatttgtgagctacgcaagcacagaagctaggcgtttatctgaagcagcatttggtgaggctatgcttcacactattgggtatatttacgtgcggcaagcagcaagagaacttgggaaaagtagaatttatatgggtgtaccgtttatagctgagtgggttagagacaaaggacaccacattaaatcacaggttaatgctgcttcaggtgctatttctctaatacaacttcaagaagggatgaaaaagatggaaggaagcgagaacagtgaagagcaacttatgaagagttttgaggagaaaaaagatgccatgcttagctcgctatggaaaattaatgtggttgatattgagtcaacactttcacgtgtctgccaagcagttctgagagataacacggtctccaaagatgtcctgaagctgcgagcgaaagcgttgaaaaagctcggaacgatattccaaggcgcaaaatctatgtaccgtcgtgaaaacagcctgcgcgttgaaacgagcacaaatcagcaagctaacccgtcacactgaagcccatggaccaccgtgtagcaagggatcggatttggtgatttttttttgtggttttggcctttgttaatttgtttgtctgctaacgatagcattcggaaaatgcaaatccggtctacactagtacccctctattaattttctgtagatgtgagcatttaacacgaagctgtgaattgcgcttgatgcagcactataatctgtagctgtgtttttcttccaggattttaagcattgtatttgtatacttatgtgccaagtatgtcttgcttcatttcactctgaatcgctgatgtcctggccgttctgcaccttttcagggcacgggaattttccctgtataatttcaaagaaaaatcaaaa

SEQ ID NO: 149395 - DNA, 1696 bp, Zea Mays
ctctagtgtagtgttgccacggccggaagaggaaccgctgtcggcctgctccacctccacggctccacctgtctgctctctgtctgtcccgcgtcctcctccgcagcacgacgaccgcatcgcgttctacgttctccgccctctccgctccccctactctgcttggtttcccagaagatttgattggtttccccaaatccggtgactccattcctgttgttcttcacgtcgaccccgggaacctcccagaaggctctagcgaccccggcgctctgagtgctgtgctgccggcggcgagatccaggagctgcctgccatggtgaaggacagcgcctactacgacgtcctaggggtcagcgtcgacgcgtcctccgccgagatcaagaaggcgtattacatcaaggcgaagctggtgcatccggacaagaatcccgggaaccctgacgccgcactcaagttccaggaacttggagaggcctatcaagttcttagtgatcctgggaaaaaggaggcttatgataagtatggaaaggagggtattccccaggataacatggtggatcctgctgctgtctttgggatgatttttggaagtgactattttgaagattacgttggccagcttgctctagcatctatagcctcagtagaggttgatgaaaactcaaacagtcaagaagcaagagcaaaggttcaagaaaagataaaagagttacaaagagagagagaacaaaagcttacccagagcctgaaagaccgacttcaaccatatgtagatgagagaaaggatgaatttgtgagctacgcaagcacagaagctaggcgtttatctgaagcagcatttggtgaggctatgcttcacactattgggtatatttacgtgcggcaagcagcaagagaacttgggaaaagtagaatttatatgggtgtaccgtttatagctgagtgggttagagacaaaggacaccacattaaatcacaggttaatgctgcttcaggtgctatttctctaatacaacttcaagaagggatgaaaaagatggaaggaagcgagaacagtgaagagcaacttatgaagagttttgaggagaaaaaagatgccatgcttagctcgctatggaaaattaatgtggttgatattgagtcaacactttcacgtgtctgccaagcagttctgagagataacacggtctccaaagatgtcctgaagctgcgagcgaaagcgttgaaaaagctcggaacgatattccaaggcgcaaaatctatgtaccgtcgtgaaaacagcctgcgcgttgaaacgagcacaaatcagcaagctaacccgtcacactgaagcccatggaccaccgtgtagcaagggatcggatttggtgatttttttttgtggttttggcctttgttaatttgtttgtctgctaacgatagcattcggaaaatgcaaatccggtctacactagtacccctctattaattttctgtagatgtgagcatttaacacgaagctgtgaattgcgcttgatgcagcactataatctgtagctgtgtttttcttccaggattttaagcattgtatttgtatacttatgtgccaagtatgtcttgcttcatttcactctgaatcgctgatgtcctggccgttctgcaccttttcagggcacgggaattttccctgtataatttcaaagaaaaatcaaaa

SEQ ID NO: 149396 - DNA, 1192 bp, Zea Mays
atggtgaaggacagcgcctactacgacgtcctaggggtcagcgtcgacgcgtcctccgccgagatcaagaaggcgtattacatcaaggcgaagctggtgcatccggacaagaatcccgggaaccctgacgccgcactcaagttccaggaacttggagaggcctatcaagttcttagtgatcctgggaaaaaggaggcttatgataagtatggaaaggagggtattccccaggataacatggtggatcctgctgctgtctttgggatgatttttggaagtgactattttgaagattacgttggccagcttgctctagcatctatagcctcagtagaggttgatgaaaactcaaacagtcaagaagcaagagcaaaggttcaagaaaagataaaagagttacaaagagagagagaacaaaagcttacccagagcctgaaagaccgacttcaaccatatgtagatgagagaaaggatgaatttgtgagctacgcaagcacagaagctaggcgtttatctgaagcagcatttggtgaggctatgcttcacactattgggtatatttacgtgcggcaagcagcaagagaacttgggaaaagtagaatttatatgggtgtaccgtttatagctgagtgggttagagacaaaggacaccacattaaatcacaggttaatgctgcttcaggtgctatttctctaatacaacttcaagaagggatgaaaaagatggaaggaagcgagaacagtgaagagcaacttatgaagagttttgaggagaaaaaagatgccatgcttagctcgctatggaaaattaatgtggttgatattgagtcaacactttcacgtgtctgccaagcagttctgagagataacacggtctccaaagatgtcctgaagctgcgagcgaaagcgttgaaaaagctcggaacgatattccaaggcgcaaaatctatgtaccgtcgtgaaaacagcctgcgcgttgaaacgagcacaaatcagcaagctaacccgtcacactgaagcccatggaccaccgtgtagcaagggatcggatttgatgtgagcatttaacacgaagctgtgaattgcgcttgatgcagcactataatctgtagctgtgtttttcttccaggattttaagcattgtatttgtatacttatgtgccaagtatgtcttgcttcatttcactctgaa

SEQ ID NO: 149397 - DNA, 565 bp, Zea Mays
agggaaaagcctaggaaagccaccgctcaccttctccggagcacccccaccaccaaacacagctaacagcttggtgggatggggggaaaaggcttccctttggcttgcctgtgagtgggatctcttcttcctcccccagagcccctgccctcttccgccgacagcgagaaagcacgcggcgcacagcaacacgtccctgccgttccttttgactccggggatccctctcctccttgcctgccgaggaacccactagcttcctactacttcccctccgtcctctcgatccctctccccgttcccttgaccacccgagcatcaagtggcggggagggaacgcggcggcgcgggcgaggaccgatggagaaggggagcgcgccggcgatggccctggcgctcgccatgcttctcgcctgctccagcatcgctgccgtcacggcgcaggagaccgagcggatcgaaggaagcgctggtgatgtgttagaagataaccctgttgggaggctcaaggtctttgtctatgatctccccagcaaatacaacaagaagctgctgaagaaggatc

SEQ ID NO: 149398 - DNA, 195 bp, Zea Mays
atggctggagcaccagcgagcacaaaccgagagcagggtgcggcggattctaggcagggtcgaggagatgctggggaggagccgagcaccagtcaccggagcaaggagaagctaccgccagagactgagaacgagcgcttggaagccatggctactactccgacggctagagaagaacaccagggcgatgcgtag

SEQ ID NO: 149399 - DNA, 1035 bp, Zea Mays
gggggcgattcggcgccggcacgcgggaggggaagtcgaggaatgcggtgagtcggcgggggtccggcgtttgtgaactcgtggatggctcggattggcgcgccatggacgacggcgacgccgcggtgagtggcacgcatttcgggggatggggggttgggggaattctatgagtagcaggagggttttctcccagtggtttgttcgttactgaaggtgttttcgtgtgtgtgccttttgggtttggtttatctgcgcgcgtgcaaagaattcggggaagcatgtggccgggcaggtgtgccagatctacggcgacggcgtgggcaccgcggcggacgacgacctcttcaccgcctgcgacgtatgcggcttccccgtgtgccgcccctgctacgagtacgagcgcaaggacggcacccaggcgtgcccgcagtgcaagaccaagtacaagcgccacaaaggtatgaccaaccgccgccatttccaccgatttccatgtacttcaggttaagtgcagcaggctaggctgcaatagccactgaaatcaagcaggtacgttgatgtttttttgctacattggtgtctttcaagcatcagtattcaataatctattgcatgggaatcaaggttctgaggctcaaatatatttggcagtttgaggaaggaaaattttctcctgttactgaaattacaccgcctctcattcctgaggaccttaaaactgcaatcaagaatgggaaggtccgagctcctacccacatcatctccactatttctgacgacagaggcgatgaaccatgctatgctggtgtccctatgtctacaattattgaacagggttatggagttggtgatgttatttctcttttgtggttcaagcgcagccttcctcgctattgcactcagtttattgagatatgcgtcatgctttgtgctgaccatggtccctgtgtatctggtgctcataactctatagttactgctagggctggaaaggacctcgtttccagcttggtgtctgtgacatttttgtga

SEQ ID NO: 149400 - DNA, 2366 bp, Zea Mays
ccatcaagtgtcgcctctgcctttgtatcaaatgcagcagcaccacaagctattatcaactcagatgatgtagcttgggctcattgtttttgcccagatgcaaacaagaaacattggctgaagtgcaagtactgtgacaagctatgcaaagctgggattacaagaattaagtggcaccttactggtattaaagggaataatgttacaaagtgtttgaaggttccaagtgatgtgaaagaagatatgattgctttgcttacaaagaagacagaagaaaaggaccataaagcaaaagaaaaagaaagagagagagagatgaaattaacttagacatctcagaagatgaaagttgtgagcaagtggatattgatcttgggaatgaagtccttgtggtgaagcaaaagccaacaaaaggttctagtagccttagctgtagaacagtggtacgtggtggcactattgacagattttataaaccttctactattgaagaatctattcagatgatgcataaaggaattaaccttagcaacaaggttcaaacaacgttgtcaactcagaaagggaagagataagggataaggattgtgagtacatatgccagtttttctatgaagctagtattgcacataacacagtcacccttcctagctttgcacttatgcttgaggccattgggcaatttggtaaaggtttgagagggcctagtccttatgagatgagtggaccattcttgcagaaaaggaaacaaaaggtattggatggtttcaagaaccacaaggaatcatgggagcaaacaggatgtacaatcatgacagatgcacggacagataggaagggtaggggagtgatgaatttagtttgtccatagtgctcatggagtttacttcttagattcagtggactgctcgggtgagagaaaagatggtaagtacatatttgaccttgtggacagatgcatagaggagattggggaggcaaatgttatccaagtggtgactgataatgctagtgtcaatatagcagcagcaagcctattgacaacaaagaggccctcaatattttggaatggatgtgctgctcattgcctagatctcatgctagaggaccttgggaagcttgagccagtggagcaaactatcacaagtgcaaggcagatcactaatttcttgtatgctcacacaagggtgttagatttgatgagaaagtttctgaagaaagacttggtgagatctaggattactagatttgctactgcctacttgaacttgaaaagcttgcttgataacaagaaagaattgataaggttgttcatatcagatgaacttaatgagttgggttacttgaaaaaggacaagggacagaaagccaataaagttgtgagatctgaaaccttttggaaaaaatgttgatatagttgtaaatttttttgaaccattggcaaatgtgttgaggagactggatagtgatgtaccagcaatggtattctttcatggattaatgcttgaggcaaagaaagaaatttctgagaggtttgacaatgatgagagccgctacaaagttgcttgcgatattattgataagtggtgggatagcaagctcaaaacttcgcttcacttagttgggtactacttgaatccttacttttattatccaaagaagtctgaaattgagcatgatggatcctttagagctggagtgattaattgcattacaaagaagattggtgttgaagaaaacaagacaaaataattgaagaactctacatgtaccaagatcaacaagggacatttggacatgaaattgccataaggcaaaggagaaacaagaactttaattcagcaaagtggtggctaaaccatggcacaaacacacctaatctgaggatattggcttcaaaaattctaaacctaacttgtagttcctcagcttgtgagagaaattggtccgtatttgaacaggttcatacaaaaaggagaaacatactacttcatgataggatgagagaccttgtgtttgttaaatttaactccaagctaaggtgaaaggagagaacggacagatatcctttagagagggaagtagatgatgttgtttgtgatgatgacaatgaattcattactggtattgtacctcttccgaatgatgttgttgaaccagcgcaagatggaagatcacagggagaacaaacatcacaagcacaagttcaagtacaagcaaaaagaaagaggtctatgaagcctagaaagaagttaagaagcatgcagtctctaatgcgtgatgttcaagttcaagtgcagcagtcctcatcggactcagaagatggtgacattgcaatggaatcctctgaatctgataagtctcca

SEQ ID NO: 149401 - DNA, 207 bp, Zea Mays
gatggagacgaggttaacgaagtttgcgaaggcgaaggcgaggagggcgacggcgagggggaagttgccgcctcctccgcccgcgccgatagcgcccgtgcccccggctccagcaaccaggtccgcggccgcggccgcccccgaggagaccgtggacggggccgtgccggcgccccccgcggcggtcaacatctcgctgcccctcat

SEQ ID NO: 149402 - DNA, 1311 bp, Zea Mays
atgccagccaccgccacggtacagcgccgactccgccgcccgaagaagtttccgtacaggccaaagcccccgccggagccgcatcctttcctcctccacctcaagtcccttccttcgcccgtggccgccgcggcctcgctcctctctgcgccgcgccacctccacgaccaccctttcgcggcgtgtgtactgtaccgcgtcgcacgcgcgcgcctcttcccgctcctccccccgctcctcgccgcgctccgttccctccgcgtcccgctgcagcccaccgcgttcgccgcgctcatcgaccacctcggcgccgcctcccggcccgacgccgcgctactcgtcttccgcgccgtcccagccttctgctcgcactccaacgccacgttccacgccctcctccactcccttgtctgcaacggccgtgtggacgccgcgcgggacatgctcccggaggctcctaagctaggcgtccggaccaacgcggtctcctacaacatcatcctcaagggtgtttgccaccgggacgggttctcgggcgcccgtgtggtgctcgacgaaatgctcgcccgcggcgtgcgccccacggtggtgacgttcaacacgctggtggggtcggcgtgccgggaaggggagctggccgcggcggagcggctcgtggacgagatgacgcgccggggtgtggcaccgaacgccgtgacttacgccctgttaatgcaggggctctgcgacgccgggcggtacgacgacgccaagaagctcttgttcgacatggagtaccgggattgccagcccgatgtggcgaactacggcgtgctgatgagcgcgtgcgcggcgtgtggggacgccgacggcgttaaggggctgatctccgacatgcgcaagcggaagatgaagcccgacgacgcgagctacaacgtcctgatcaggtgcctctgcgacgccggcagggtcgacgaggcacatagggcgctggtcgagatgcagctcaaggatggaacagcgccgagcgccgccacctaccgcgtcctcctcgacgggtgctgcgaagcgcgcgacttcgacctgggtctgcgagtttttaacgcgatgcttgcaagcggccactgctctctgccccccacgttcaggcggctggtgagagggctcggcgaggacggcaaggcggaggaggcctgcttcgtcttggagcagatggggcagagggggatgcggctggatgcacaagggtggcagtctgtcgctgcatgcgtttgcagcagcatcagcgcaagtgagatgaagctcgtcgatcacctgatgtcgtcgtcttga

SEQ ID NO: 149403 - DNA, 1295 bp, Zea Mays
ataatgtatgaggaagcaagtcaagtcgcaactgaagcagttggtagcatcagaacggtagcatctttttgtgccgagaagagagtgatggacaaatacgatcagaaatgccaagcttctagggaccagggaattcgaactggaatagttggaggccttggttttggtttctcatatctgatgctgtactccagttctgctctttgctactacgttggtgcaaagtttgttagtcagggcaaaagcacttttggtgatgtcttcaaggcttattttgctttagttatggccatgattggagtgtcacaaacaaatgctatggcttctgactcagccaaggcaaatgattctgctatttccatattctcaatattagatagaaaatccttgattgattccagcagtgaagaaggttccaccttggagaatgtcaagggtgacattgattttaagcatgtcggcttcaaatacccatcccgtcctgatgttcaaattttcactgacttcaccttaaccattccctctggaaagacagttgcactcgttggtcaaagtggttgtgggaagtccacagtcatatctttgttagagcgcttctatgaacctgacaatggttcgattttattagatagagtggaaattagtagcctaaaggtcagctggttgagggaccagatgggattggtaagccaagaaccagtacttttcagtggaacaatccgtgacaatatagcttacgggaagcatgaagaggtaacagaagaagatattgtaacagctgctagagcagccaatgcccatgaattcatctcaagcatgccacaagggtacaatacaactgttggagagagaggaacacaactgtcaggtggccaaaaacagcgaatagctatcgcgagggcaatcttgaaggacccaaggatacttcttctggacgaggcaacaagcgcattagatgctgaatcagagcgcattgtgcaggatgcactaaatggtgctatggttggcaggaccactgtcattgtggcacaccgcctctcaacaatccaaggagctgatatgattgcagtcctaaaggacggcacaattgtggaaaaaggaagccatgagatgctgatgggaattgcaggtggagcctatgcttcacttgtggaacttcgcaccatgtaatctataatatacagttctgagctatgcaattgatggcaattttcttgtaaagatttaacagtttatgaaagaatttttggtgaacacctataagtttgctttgctagaggtaaggcagagtaccc

SEQ ID NO: 149404 - DNA, 100 bp, Zea Mays
ccgccacgtcgctatttgcctacctaggattcaaattaatttttctttgctaaagatacttgatattatcacttgtcaatacatgcattatacatctctc

SEQ ID NO: 149405 - DNA, 923 bp, Zea Mays
cttgcagccgtataagctgagagtatgctccattaggatcctttactaagtcatcatgatgtcctgcatttataagaataaatataaaatcattgaagaagatgcaaggttcatgtgcttaccttttcaccaatagcaccctggattagggtcatgtcggcagatatgctggagactacttgtccagtagtcatttctacatcaaagaatggcatatcctgtctgaggaccgacttgagatacaatgatcgaatacgagtagcctgcctctccccagtcattgtccaacatgatatctctggacttgcagactatatatagcttgcatagggggcagtaccttgctgactcggggaacaatggtgtccggggtggcgcccccaaaggcatcgaccatctgcccgaagatgatcgtcatgaccaccatcgacatgccgttgcccagcgccccaaccatgccggccagcatcagcagaacgtccgttctgtcggcacacttaaacatgctgtggaacggaaccttagccattgtcaccatcttctcgccactctcctccactttcccacccttcactgcatcgccagcggaagcttttacgacgctttcttctgccatgtcgtgcttggctgcctagcaccggctgggttctccctgctgcatatggctccggctgctctgctctatggagagttccttttgtagtgccgttctacaagcaacttgctttgcaggagctgtttgcctgttttctcgctttttctttatgttagctggatttgcaagaacgataatggcacagacaagcgtccaaactgactgacagaggtgctgggttcactgtggagtatcccgttgtaccgtagttgcttgcaagcattttttttaaaattaataatgtcgtgatctgttatccttagcttca

SEQ ID NO: 149406 - DNA, 3822 bp, Zea Mays
ggagagagagggatggcctcaccagcaccagaagccctggaggaggaagagaagggagtggtgggtctgcaccggctgttccggttcgcggacggcgtggacgcggcgctcatggccgtgggggccgcgggggctgtcgccagcggcgtggcgcagccgctcatgacgctcgtcttcggcgaggtcgtcgacgccttcggctctgcgtcccgccatgacgtactgcaccgcgtctccggggtgtgcctgaagttcttctatttggccattgggtcatggtttgtttgcttcctacaggttgcatgttggatgatcactggagaaagacaagcagctcgcatacgaggtctctatcttaaagctctattgagacaagacattgcattttttgacaaggaaatgaccactggacaattggttgagagtatgtccggagatacaatacttatccaggatgcaattggcgaaaaggttgggaagtttatacagcttactgccacatttgttggagggtttgcggttgctttctctaaaggatggcttttagctgctgttatgatgtcaagcgtccctcctatagtagttgctggagcagctatttcatggactgtatcgaaactggcgagccagggtcaagctaagtacaatgaagcaggcattgttgtggaacagacaattggagccatcagaacagttgcttccttcaatggtgagaatcgggccattgcgctgtacaataaatatatcaggaatgcatatgtagctgctgtccaagaaggaacggttactggcctgggcttcggttttgttatgcttattctgttctgtgcctatggtctaacagcatggtatggggcaaaactgattattgataaaggatatgaaggaggtcaggttgtaagtgtctggatggcattcatggcaggtgcaatgtcattaggtgaggcaacaccatgcgtgactgcttttgcttctggccgggctgctgggtatagaatgatgcagataatccaaaggaagccacaaattgatcctaatggaacagatgggatcgtgctagcaaacatgaagggtgatatagagctaagggatgtgtacttttcgtacccatctagacgtgatcaattggtatttgatggcttctcgctgcatgtaataagtgggaaaacaatggctatagtgggagagagtggcagtggaaagtccacagtgattaatcttgtggagagattctatgaccctcaggctggtgaagtttcaatagatggtgttaacataaaaagcctgaggcttggatggctaagggaaactattggtcttgttagtcaagaaccactgttgtttgccactagtattcgggagaacattgcctatgggaaagaagatgcaacagctgaggagataatggctgcaacaaagcttgctaatgcagcaaatttcatcgataagttaccatatggcctagacacaatggtcggtgagcatggagcacaattgtcaggagggcaaaaacaaagaattgcaatcacaagggcaatactgaaaaaccccaagatcttgctgcttgatgaagcaacaagtgcacttgatgtggagtctgagagagtggttcaggaggcccttaacagaattatggaaggcaagaccacgatcatagttgcccatcggttgagcactataaaagatgccgacactatatcagtcgtacatcgtggaaaagtagttgaactaggcacacacactgaactacttcaggaccccaatggtgcgtattcccagcttatccagctgcaggatagaactggagaaccagatacgtctgacatagattatcaaaggtctacttcagctgtcagaaatgtcgagtccttgagcaaatctatgcatactccatctctcaagaggtcaataattggtggcgcttcatttgggagtaccagtgcgcacttggtcgcaattgccaacacgattgtcccggagaacacagatactgaaccgctgcctaaagaatcggatgaaggtgaagaatgcaggaaggttgccctctgtcgtcttatttctctgaacaaacctgagatgccagtccttctgttaggtacagtggttgcagccatatcaggtgttttctttccaatgctaggtttattgatctccagttccatcaattcattttacgagcctcctcatcaactcaagaaagattcacggttctggacattgatgtacgtagcattaggagttggttcgtttattttcctgccggtggaacatttcctttttggagtagctggtggaaaattggttgaacgcgttcgctcgttatgttttcaaaggattgtttgccaagaaatcagctggtttgacaggccctcaaatgctagcggaaatgttggtgcaaggctgtctgttgatgcttcaaatatacgacgccttgtaggcgattcattggcattgatggttcgaagcacggttacagttattgctggatttgtcatcgcgatggctgcaaattggaggcttgcccttgttgccacggtagtgcttcctttggggggtctccagggattcctccaagtaaagttcttggagggattcagtgcagatgccaaggcaatgtatgaagaagcaacccaagtggcaaacgacgctgtcagtggtattcgaacaattgcttctttctgcgcggagcctaaggtaatgaagacctactatggaaaatgcaaagctccagtgcggcaggggatccgtcaaggcgttgtcagtggcttgggatttggcttgtcattcttcgtgctttactccacatatgccctctgcttctacgttggagcaaattttatgcttgatggcaaggccacgttcaccgatgtgttcagagtgttctttgctctgctcatggcgaccataggcgtttcacagacaagcgcgttaggtccaaactctgccaaggccaaagcatcagcatcaacaatatttgcactcattgacagtaaatcgaatatcgatcctagtagcgatgagggcatggtcttggctgacgtcactggcgaactcgagctccgccacatctgtttctcatacccatcccgccctggtacgcagatattcagagatctcaacttaagaataccatccgggaagacggttgtgcttgtcggggagagcggctgcggcaaatccaccgtcatcgctctcctggagaggttttacgaccctgattccggcacgatcacattggacggcgtggacatcaaagacctcaagacgggttggctgcggcggcagatggggctggtgagccaagagccggtcctgttcaacgacaccatccgcgcaaacatagcctacgggagagaaggcgaggcgacggaagaagagatcgtcgccgccgcggaggccgccaacgcgcacgagttcgtttcggcgctgccgcagggctacggcaccttggctggcgagaggggcgcccagctgtccggcgggcagaagcagcgggtggccatcgcgagggccgtgctgagggaccccaagatcctgctactcgacgaggcgacgagcgcgctggacgccgagtcggagcgcgccgtccaggaggcgctggaccgggcagcggtcggcaggaccacggtcgtggtggcgcaccggctgtccacgatcaggggcgccgacgtgatcgccgtgctcgggaacggcgaggtcgtcgcccagggcacgcacgagcagctcatggcggccagggccggcgtgtacgcgtcgctggtggagctccgcatgacttccgagcgcgccggagcttcctcctcgtcagcccccgatgtctga

SEQ ID NO: 149407 - DNA, 1204 bp, Zea Mays
atctttttttctattcccatttccattctcgcaccgcatccaccgcgccgccgcgagagagggtgagtactgaggaggagggtttccgatggagaacggcgaggatacgttcgcctcccccaccgccgccgccgcggacttctccaccaacggcggggacggcacgcccaagctccacgacgcggcggacgagatcgagtccctccgcgcggcgaagcgcgacctggaggagaagctcgatgccgtgcgccacgagaaccagttcctgtcctccgagtcccgccgccttgaggttctcgtgtcccaggcccgcgaggaggtcgccgccgccgagcaaggtgctgccaccaacgagagcgaggccgccacgctccgcagcgaggtcgagcgcctccaggatctcctcgccgcggagaaggctagccatgaggaggagatgcgcaggggtgcacggctcggggaccagctgcagaccgcgtaccaggagaaggccgccctcgaggaggagatcgagaccctgaagggttccgccactgccgagggcaagggcgtggaagagggatgtgattctattgctgccagggccgggacgcctaaggatcagggcgtggtgcctcccgcactggtggctgccgcggctgctggagcagctgccacggctggcatcgcagtggtcttgttcaacctcaagaggtaatctggtggtccgttgcgcggaagttttgatctgctgctatggcctatatgagaatgggttaaccgttttgttagtgtcactggagtcgtagtagtagtatctttactatcagctggataatagactagatgaacatgtatggcacgtacctttactttctgaagttttcaatgataataagagtcgtgaacacaaacatgagggataattgagttcttgtctggtcttttgagttgcacctgattccagactttgaattattatgacttggatggtttgtactgttagaggaaagatggtgctactttgtttagttgatgcctgagatgtttttttattgcaaatttgaaatatgcatgattgtttgcatgtatctcacagcttgatgcttgtagagatgtttgttggatgatatgctgactgctaggctatatcgctagtaattgaagatgtgttgatctgaatggattatcaaacgaatatattgtgtgcatctatgaatttgtt

SEQ ID NO: 149408 - DNA, 643 bp, Zea Mays
gcgtcgtacagagctaccagtaaagcggcacacgagcctcctccgctctccctctctatctgtcctcactcactcactcactccacagcttaattgctctcatttctcctcctccgcggtttggagcctgcttcctctctcgctgctcctttggaagccccaagcccgccagggcgcctgcaaggagagacgacgccagcaatgccggtggtagacaagggaggcgaggccgccgagttgcccccggacatccgtgggctcggcggggagaccagcaggccgtcgcaactccacggtggttctggctcgccaccgatgtagtccaatccaaggcgtccaccaccgccaagcgccgccgcgagacttggggctccaagtcggtgcgcgcgtctggaggtggtgtggatgcggcggtgcgtggaggtggaaggacaaggatgccatggtcagtcgcagcgaagcgagcagggagggaatgaagccgtacggtccgggagctgctgtcgtcgtatacatgcatgcataaatacatatatatattttttcgtgtaccagtaattgggtaactggttaattgttagcaacggtccatttgaggctatggtttctgttgcaattgcaatgcaatccattcactcgtgct

SEQ ID NO: 149409 - DNA, 2011 bp, Zea Mays
atggagagtaaaatggagcagaactcgggagagatcaggtcgggagaggccatgagcatttttggccagagcatcgatgtgaggaggccggggaggagcaggagaagagccgccaacaagaaattctcacccgcgactgcgagcgaatcacaatcacccaccctggagcggctgctggaccagcgcagggccgtcgtcacggagcgggagcgcggccgtgccgagtccgagctgtcaagggcgactggcatggcccaggaactggagcggcaggtcgagcaggccaacgccgccacggcgagggcttctcacaggccggagctccaaagaacacgtgccagcggcagcaggaggaagaagacggggttggtggtggacgccgccgaccatcctcgggatcagagcagcacgctgctcgtcgaggtgatgcaggagctggaccgcgtcaagagggagctccggcagctgcagcgcgaggtgaagtccgcgagggaggccgaggccgaggccgagggagtcgcggagacgccgacgcccagagcgacgagccccgcgacggcagcgcggcaggctgcggaggccgagctggaggagcccatgaaagaagagggagcccgcgcgttcgccggctccgtagaacgcacccgcggggagacggccgaggagatcgaccggctcgccgagcaggaggtacgagccagcgcgcaggtgagccagctgaacgccaggcttgtcacggccaggtcccggctggacgccgccacggccgtggacgagcgggccgaggcggtgctggccgagctgtcggccgcgctgcggcggctgggcgaggagaccgaggcagcggagaaggagagggcgctgacggagctggacagccagagcgtgacagaggacgcggacgccgtcggcgccgagatcgcggcggtcgagcagagggtcagggagtcgatcaaggagctcgaggcggcgagggcgtcggaggccgcggccacggcgaggctcagggccgccgtcgaggacgcggcgctggccgggactgcgccgcaggcgtccggcgggaacgtgacggtcgcaaggttcgagtacgagtacctggccgcccgccccgaggtcgtccgggccctcgccgagaagaaggcggccgcggcggaggcgtgggcggaggcgctgcgcgccggcgagaaggagattgcgatgcgggtcgagatggtcgagagggaggtggcagagacgaaggccggtgaagcggacgccacggatagcccgagtgaagaggagcgtgaaccgcggcgcgttggcgtgcagcagcgcgcgcagacaaggaggcggccggcgccgagggagggcgtggagccggagacgtcaaggacgaccggcacaccgtcgtcgtcgtcggtggtggtgcggaagcaaaggtcgccgttggttagcaggaagacgaggacggtggcgtccaagtacctgaagctcgtcaccgggaaatgtggtggatgaatcatgctcgatagcacttgatacacctcagacaggaactcatgaagcagcagcagatgcatggaaggactgacgcagtccgactgccatgcctactcgatagaccatggaggagaaaaaaaatgtaaattatatacgtacgtaaattaatacttggatagtgttcttgtattgtacaagcgtgtatgcggacggctgtacaacgagtcaacaagaaaagaactaaccctttgcattacaatttgattaatcttaatcatactcaacggaagcgtagagtgtggaggtcttggagacagcagtcttgcaaaccgggcaagcgttcttccgagaaagccactgcttaatgcactgcacatggtagccgtggccgcagctcaccttcccattcttctcgtctgcttcaaactcttactgcaaaaaatgaaacggcatcacatcaggtgccgagcaaaggcgaggagaagaagaaacagaagggacattacattaactgacagatgctacatctcct

SEQ ID NO: 149410 - DNA, 3168 bp, Zea Mays
atgaagagcggcaccgcctccgcgcccagcggcggcggcggcggcctggcgatcaccgagcggcagaagccggcgccgtcgcgcgtggcggcgctgttccagatgttcgccaagaggaagctcttctcctcgtcctccaagaagagcaagctgctgcccccagtgcgcgcgcacaagttctctcctgggagaccgctggccggcggcgacaagacgaggccccttctgattgattctgcagattactcaagaagcagaactgaatgcaacggcaccagtcactacccacagccacaacctggccaagacagaaactgcagcgagaatggaatgcgtgctcccggggtggttgcccggctgatgggtctgagctcgatgccggctgctgcgagccatcaacggcagaccagagccaccacaaactcccctgaacccggtgaccactggaattcaggccgtcaagatcggtctggttcgtctcgtggcatatacacatcacctcagcagcagcagcagcagaagacaaggcagcagcccgtagacgatcggcaccatggcaatgcaggtcagttcagtgctccagatacacggccattgtggccacgaaggcatgcacacagagcagcctcgcctgtcaagagcccaaggtcattgtcaagcaggaacagggctcggctgatcgaagcagcggtcagggttctggagcctggtttgcagtccaggaaccgccgtctctctaagaggcatgcgtatctggaatacccatgcagcaacggtgatggtgcgcccagttctgctgctgctgctgctgtccgacataatgtctccgatcagttcttgagaaatatttgtgatgctgacataccggcatcaggtgctcacaatctaggagctgcctctctgcacaactctatttctaatcggaggactgaagaagatacttgtaagaagagcattccaccgagtaggaggtcagaccagagcacatcatgtcagttgcaacctgagtacttgctcatcggctcaactgagaaggccgctggattcgctgatacaaaccaagacgcaccgagagaacagctgaagagcaacatatcccgggacagtgctcctcgtggccctctcaagcaaaacaacctgaagcagaatgcactgcccgcggcagatccagggtgtgtgatacaaagcaagaagcatggaagcggggagcgaaacgtgagaaacagaacccaggacttcgtttctctgaacaaaaggatggatggcagtgcgtctttgaggtcgaaaagaaaggcgcttgatagattcggcgagccacgttgtagtgcagaggacaggaacatgatgagcacgaaaggttgccgagccagcagccttcatggtggaacctctaacaagctggagctgaggactggaacaccaaaagctatggtaactgcaaaaggagcagggttaatcagcgagaagccgaagcctgccagtccaaaccgtgcaagaagtggtttacagagacagacagtgccacacaacgtttcaagggctaacaaagaaccaggcaccatctctctcacttccggttcaccggtgaaagctgcgcgtggtgacagtgctagtggaactggagctggtaccgctgttcaagttgatagttgccctgagagacgctctcgtagagactgtcagaagacgtgtcctcaaggagagatagttttctgggaagatttgaagcgcacatcaaatccgtcgcacactgaacccgggttctccagccaagatgaagtgaagaatagagtgattcttggtggtacagcagcctcttctttgtctgggaagaagagtggtggccaagttacagaggaatccttaagtgagggactgctcaggcagcgcaactcgctggactgtgcggtttacgacaacaaagacccttatgaagtggctagcttgcgtggaactcgtaagaagaaacatgcggctggtgcaaaaggtagcaagccatctccatctccatgtatatccagtcctacatctactcctcactctggacatgctggtgatgcctgcgttcctggtattccacgccgtactgcagcagaagctacctccaccaccagccatccatggcaagatacagctgccgagagaaaccccagaggcggcgatcctaacaactctggccaacatggcgtccaatttcagacatctgaaccccacgctggggaggctacgatcacaacatctgtcgaactgctgctagcaaacgtccgcgcgtccactactccacgtaaaccagaggaatcacccaaggcgttccttctccggacgaccgagcgcgctctcgccgccttgacggccggctccaagcagggcttcggcagcaccgccatcgagggcaagggagcgagcccgctgaggaacctcgcgctcgactgcgtctgggactgcctggactcgacgtgctctcggctctgcgactccggctacaggtcgttctcggagctgctcgctctggtctgcaccgagaagaggcttgcggacagggtcgggaaggaggtcgcgaggtgctgtggcgcggctgggaagggcttagacgagctggccgtgggcgaggtggagcgcgccgtggaggccggcatgggttcttccatgctcgaagcggttcagatcggggcccagattgagcaggatctggtccaggacctaatagatgaaattggagcagatgtgttcaggcgttggtgactaaatatatttctgtaacagtgtaacatgaagacatataaatctggtaaaattggatccataccattaaaagatcccatctatagctatgtaccatcaaaagattgatgtattgaaatataccattaaaagatagcacttcatagctgtttaccatctctgttatctctcagttatctgtgaccatttccttggtgagaaaaagtaaatatagctacaatccataatcattccagcagtaatatagatgcgttgcaactctcatttcagcaacattacagaaataaagaggacatgatttcagcaggatatgcccaggatataacataacatttcagtacatatataactgaactttgttgtcatttcagtacctaaattgcagcttacagttcttgcaattttgacaacagaagtaccacaaac

SEQ ID NO: 149411 - DNA, 1145 bp, Zea Mays
gcggtctcaaaaccttctcgcctcctcctacccctcggccggcctcgcctcacacgctcgctctcgccgcctcgtcggcgacgcacgcacccgaccgccgccgcgagctggagtgacggccatggcggcgacggcagatccgcgggcgaagcctacggcagcggcggcgcaccacctagccgttccgtgggcgcatcaggcgtcgccagccgcacaccgcatgccgccgcccgtcttagccgcggccgcgggcggcggtggctgcggcgcccgcgatcgccaccggtcgtcgtcggcccaccgccaagtccaggccgtcggggaggacaacccgtacgacggtgggatcgaggcgctccgggccaagctcatgggccacctgcgcgacgcggcggaccggctccgcgtgccccagcctctctggagcctcgccgcctcgcgcccgccttatcctcgccctccgccgcccaaggctgctaccgcgagctcgccgccgccgcccggtacggactccgagcccgagctcagggcgccgcctccgcttcggcctcctacacctgcgcccccgcaagcggaagctgccgtcgcgactgcgaccgggaggccgtggaacctgcgggagcgcacgcggcggcgccccgcctccaccaggtcgtgggccgcgtccccgccgcctccgtcgtcgtcgtcgcggaggcggcgcaagcgcgccccgttctccgtgtccctgaaggcggaggagatcgaggaggacatctacgcgctcaccggctcccggccgcggcggcggcctcggaagcggccgcgcgccgtgcagcggcacgtcgattcgctgttcccggggctgtggctgaccgagatcaccgctgacgcgtaccgagtgccggacgagtagctccacgagtgacgagtccagcactccagcttgatgctgctgccccagccaaccggccagcagagcgcgcaagctccaacttgatccagggcatcgtccagcgagccaactagcatcctcccgagctttgtttgtttttttcctcccctcgcccttccctctcctcagtcctcactcgtcgtctggtctctgcttgctgcctctactgtggtctgtacagtgaagtgtttgtgattacaactagtgctaa

SEQ ID NO: 149412 - DNA, 1124 bp, Zea Mays
tcagcccaaccacactgatccaccaccctccctctagttgagatactgccgccgccgccgccccgcccaacgccaggtgccgaggccttcgccggcgaagagcgccgaccggtacgagatcgaggaagacggccatgttctcatccgcccgccttgccctacgccgagctgcctctcttggggcgggcctctgccgcgccgcggaggatcccttttcgcgaaggtttctccatgggcagctcctcccacgttcctttgcctcagatgcatcgggacacaacaggggtttcccaccttctgggtctggagttgttgcagatacggatccacgtcagaattttaacagatctggttttgtgtctcaagatattcgtgctaagacacaggtcaacttcaacaacacagataatggagcggcgatgtctgggacaccccgtggccagaaccctttcagctcaagggagggcttcacagtcaacctccgcacctttgccatggaccacgaacagtattccaagaagagagctttcgtccacgtcctactgaagagaaagaagaccttcgtgacggtgacagactccagcgggaacaaaaagacgggtgcctccgccggctgcttggaggacaggaaaggacggtcccgtctctcccgatacgcttccgaagcggtcgcggagcaggtcggacggtccgccaggaagatggggttgagctccatcgtcatgaaggtgaaaggggcttcgttcttcaagaagaagaagaaggtgatcctgagcttcagagaagggttccgaggcgaaagggtgagggaccaatctcctatcatgtacatccacgacgtgacccagcttcctcacaatgggtgccggctccccaagcagcgccgggtgtagtttcggagtggactggaactagagctgggtttaaagaaagaaccggggaagtgtcggaggtgattttcggaaacttaacgtaatcgttgtgttgttggcctagttgatgtaataatatggacatgtgttttgggcaaatctacccttgttcttgtattgtatggaagcaacttactcgctcgatgagttatagacaattctgcgtaataatgctgttgagttctgaaatgt

SEQ ID NO: 149413 - DNA, 1260 bp, Zea Mays
cccggttgggcttcaactagaaaataaaaaataacccatctcatctcagcccaaccacactgatccaccaccctccctctagttgagatactgccgccgccgccgccccgcccaacgccaggtgccgaggccttcgccggcgaagagcgccgaccgggtattcacacccccttctcttccctggctgctatgcaaaagaccgagcgcctactagcttacttctaattttgttcttcttgtgtctgaagtacgagatcgaggaagacggccatgttctcatccgcccgccttgccctacgccgagctgcctctcttggggcgggcctctgccgcgccgcggaggatcccttttcgcgaaggtttctccatgggcagctcctcccacgttcctttgcctcagatgcatcgggacacaacaggggtttcccaccttctgggtctggagttgttgcagatacggatccacgtcagaattttaacagatctggttttgtgtctcaagatattcgtgctaagacacaggtcaacttcaacaacacagataatggagcggcgatgtctgggacaccccgtggccagaaccctttcagctcaagggagggcttcacagtcaacctccgcacctttgccatggaccacgaacagtattccaagaagagagctttcgtccacgtcctactgaagagaaagaagaccttcgtgacggtgacagactccagcgggaacaaaaagacgggtgcctccgccggctgcttggaggacaggaaaggacggtcccgtctctcccgatacgcttccgaagcggtcgcggagcaggtcggacggtccgccaggaagatggggttgagctccatcgtcatgaaggtgaaaggggcttcgttcttcaagaagaagaagaaggtgatcctgagcttcagagaagggttccgaggcgaaagggtgagggaccaatctcctatcatgtacatccacgacgtgacccagcttcctcacaatgggtgccggctccccaagcagcgccgggtgtagtttcggagtggactggaactagagctgggtttaaagaaagaaccggggaagtgtcggaggtgattttcggaaacttaacgtaatcgttgtgttgttggcctagttgatgtaataatatggacatgtgttttgggcaaatctacccttgttcttgtattgtatggaagcaacttactcgctcgatgagttatagacaattctgcgtaataatgctgttgagttctgaaatgt

SEQ ID NO: 149414 - DNA, 117 bp, Zea Mays
ttttatgtgaaccaaagtaagcatgagcatcaaaataacttaagtactaaaggattcaccaagtatatacttaaaagtatcatgatcaaaacaattgagtctttaaaaaaagataag

SEQ ID NO: 149415 - DNA, 122 bp, Zea Mays
gatctggtctccctattatctcatcacctaaagattataatcatgagcaagtaaaaaaactgattgccaaaatgatcatagttcatgaatacccatttagaatggttgagcacacatggttt

SEQ ID NO: 149416 - DNA, 2053 bp, Zea Mays
caaaaactctctcacttacatttgcgggcccattgaacgtgcggcccactttcattgagagacgaacacgcgagtagagaatttctcctgcctgctcacgaccgccctctcgccggtcgccggtcgccgctcgcaacgcaagtcggaagaggaatctctccaagctccaatcctccgatcctgccccaacccaagtcccctccaccaggccgcacacctccgccgcccggcgcgaccttgcatccaccagcctgccctctccttcgcgtgaggcggccccggcgaccgcgtcggcagtgcaagaccagaccgaggcttctcccgttggaaggttccagccatggcgagcgccgatctgctgcggaaggaggaggagttctactcctccctctttgattccgcaaaaggcgacggcgtcaagtcgcgctcgcaggtgattgagaggaagattgaatccctcgaggacatggccaccaaggtcagcaaccggagatcaagaagatggttgaacgaccgcttgctgattgagcttgtcccacgccttcatgttgaagaaatcaaaggcctctttgctcctccaccatggggtgaggagctgcccttgtcagcattctgcaggacaagtgttagtgactgggaggccttcaggagcatcgacatggatgctgaggcaagattgatgcaacacatgaaacgatcatccgaaaaacaaaggactcatgtcgacgaagatgaattgattgctctgaatgcttggcgtcgtataggtcgccaaacaagagaagctattaagaaaaaatttctacctgatctacttcaaatatatgaagtattgccttctttgctttagtttaaccccctctttttccataaaaaccaggctcattctcttcatctcctccacaattgattgaagtgataatatttgatgaaagctaatctgtttttcttgcaaacaagacatgagagttcttggttatgtatttatatatatctgaatctgctatctttctcgcacatgctaattcatcatgcataccacatctaatttgttatttgtagtttcaagcctcaatattatgcgaagtctatgagacaggataaattttattgaatagctttctaaatttacagtatcgacaatatcaatttagtgctatgcttataaaagcaaagatgtcgttgttatgacttatatctgtatgatgcctaggttttgtttggaaaataatgttcagaaaaggtgcattgtgggtctctttgtctgctgcccttgtttccaccttgtgtaaatatttttcctgtcttcaaaagttggcatcagttttgcagttttcttatgccactgctaacaacttctcttccagtctatttgacttggcgtgtcagttgtttatactatcagcttttgcgtttcatgtttgcaggaacaggttagggccttcattgaaggtactggtgacagcgacgtgcttgtgctgaatgtccaggacccgttccagaggctgcttctgcacggtgtttgtgagttctataacgtaacctcaatgaccacaagcagtgtaagggacgggaagccatggaagagcaccaccatcaagaagaggcatgtcaccggtcttcctccgagaatcacattagttagcttcctgaggatgaggaagaattagtcgtcccagtaacatgtggatgtgagggtcctacactaattcgcctggatgtgtactaaaaagacaaatttgttgctttaggtcgcatctagcatgtaatcaaatgtaaaatatccatgtcaaatgtaaaatacattgcaagaccttgttccagatgaagaaactcaaaagtgtaagcccctacttctatcactgagtctatgaaagaggcttaagccaaaatatctgttgcgtagcattttatgccatattccacctatctatcatgtggtcaggaagcggtagaaaattaaggccttgcaaaattgcaatcctatccacttgctggaatctgaatctaaaaaaaaaggtttctgaatgcttgtcctcattttttttctttt

SEQ ID NO: 149417 - DNA, 1536 bp, Zea Mays
cacgagtgacggcagcataggctgatccgcaacagatccgcatatccttcctcccttccgtatccgccgatcaaccggccacaaaaactctctcacttacatttgcgggcccattgaacgtgcggcccactttcattgagagacgaacacgcgagtagagaatttctcctgcctgctcacgaccgccctctcgccggtcgccggtcgccgctcgcaacgcaagtcggaagaggaatctctccaagctccaatcctccgatcctgccccaacccaagtcccctccaccaggccgcacacctccgccgcccggcgcgaccttgcatccaccagcctgccctctccttcgcgtgaggcggccccggcgaccgcgtcggcagtgcaagaccagaccgaggcttctcccgttggaaggttccagccatggcgagcgccgatctgctgcggaaggaggaggagttctactcctccctctttgattccgcaaaaggcgacggcgtcaagtcgcgctcgcaggtgattgagaggaagattgaatccctcgaggacatggccaccaaggtcagcaaccggagatcaagaagatggttgaacgaccgcttgctgattgagcttgtcccacgccttcatgttgaagaaatcaaaggcctctttgctcctccaccatggggtgaggagctgcccttgtcagcattctgcaggacaagtgttagtgactgggaggccttcaggagcatcgacatggatgctgaggcaagattgatgcaacacatgaaacgatcatccgaaaaacaaaggactcatgtcgacgaagatgaattgattgctctgaatgcttggcgtcgtataggtcgccaaacaagagaagctattaagaaaaaatttctacctgatctacttcaaatatatgaagaacaggttagggccttcattgaaggtactggtgacagcgacgtgcttgtgctgaatgtccaggacccgttccagaggctgcttctgcacggtgtttgtgagttctataacgtaacctcaatgaccacaagcagtgtaagggacgggaagccatggaagagcaccaccatcaagaagaggcatgtcaccggtcttcctccgagaatcacattagttagcttcctgaggatgaggaagaattagtcgtcccagtaacatgtggatgtgagggtcctacactaattcgcctggatgtgtactaaaaagacaaatttgttgctttaggtcgcatctagcatgtaatcaaatgtaaaatatccatgtcaaatgtaaaatacattgcaagaccttgttccagatgaagaaactcaaaagtgtaagcccctacttctatcactgagtctatgaaagaggcttaagccaaaatatctgttgcgtagcattttatgccatattccacctatctatcatgtggtcaggaagcggtagaaaattaaggccttgcaaaattgcaatcctatccacttgctggaatctgaatctaaaaaaaaaggtttctgaatgcttgtcctcattttttttctttt

SEQ ID NO: 149418 - DNA, 897 bp, Zea Mays
gtgtgttaggggtctgcaggtcaatgctttacacattgcaatgttatatcactcaggtcagcaaccggagatcaagaagatggttgaacgaccgcttgctgattgagcttgtcccacgccttcatgttgaagaaatcaaaggcctctttgctcctccaccatggggtgaggagctgcccttgtcagcattctgcaggacaagtgttagtgactgggaggccttcaggagcatcgacatggatgctgaggcaagattgatgcaacacatgaaacgatcatccgaaaaacaaaggactcatgtcgacgaagatgaattgattgctctgaatgcttggcgtcgtataggtcgccaaacaagagaagctattaagaaaaaatttctacctgatctacttcaaatatatgaagaacaggttagggccttcattgaaggtactggtgacagcgacgtgcttgtgctgaatgtccaggacccgttccagaggctgcttctgcacggtgtttgtgagttctataacgtaacctcaatgaccacaagcagtgtaagggacgggaagccatggaagagcaccaccatcaagaagaggcatgtcaccggtcttcctccgagaatcacattagttagcttcctgaggatgaggaagaattagtcgtcccagtaacatgtggatgtgagggtcctacactaattcgcctggatgtgtactaaaaagacaaatttgttgctttaggtcgcatctagcatgtaatcaaatgtaaaatatccatgtcaaatgtaaaatacattgcaagaccttgttccagatgaagaaactcaaaagtgtaagcccctacttctatcactgagtctatgaaagaggcttaagccaaaatatctgttgcgtagcattttatgcc

SEQ ID NO: 149419 - DNA, 262 bp, Zea Mays
gatgaagaaggaaatcatcaacaccgaccccggaattgatgacacgatggccatcttcctggcgctgcggtcgccggagctggaggtgctgggcctcaccactaccttcggcaacgtccacaccgccctcgccacgcgcaacgcgctccacctgctggaggctgttggcaggactgacatccctgtggcagagggatcccatccaacgatcaagaaagccaccaagctgaggatcgcaagctttgtccacggttcagacggc

SEQ ID NO: 149420 - DNA, 1050 bp, Zea Mays
atggatactcacgtcgtctacatccgttacctctccatcggcatcgcggccgtgcgtgacccgcccgtgctcatcctcgacgagcccacctccggcctcgacagcgcctccgcgctccacatcgtcggcgcgctccgcgccatggccgaggcgcgcggacgcaccgtgctgctcagcatccaccagccgggagcgcgcatcgtcaagatgttcgactccgtcctcctgctagccgtcggcttcgtcctccatcatggcaccgtcgaccagctccgcgccctgctcggggacgcgggcctccacctgcccccgcacgtctccgtggacgcgctccgccgccacgccagtagcagcctgcaggcgccgtcctccggagaccgagagggtcggtgcacgctgcagcgtctgttccagctgcacggcaagcaggtggcggacgcccctgtggccgtgaccatgatggctagccgctacgccaactcgcgggcgcgggaggtggcggtgctgtcgcagcgcttcttcaagaacgtggcgcggacgcggcagctcttcgcgtgccgcaccgtgtgcatgctggtggcgggccttgcgctgggctccatcttctacgacctcgggcaggacaaggtggtggagcgcgtgggtctcttcgccttcctgctcaccttcctcctgtcatccacaacggaggcgctgcccatcttcctgcaggagcgcgacatcctggccagggagacggcgtcgggggcgtaccacgtgtcgtcgtacgcggtggccaacgcggtcgtgttcctgcccttccagctggcgctggccgtcatgttcgcggcgccggtgtactggctggcgggtctccgtcgaacggcgaccgcgttcggctacttcctgctggtgatatggctgatcctgtacacagcgtactcggtggtggtgtgcttcgcggcggcgacgccggacttcgtggtggggggggatgttggcgggaacaacttccgtgggaggaatgttggcgggaacaacttccgtggagagaagggtaacgggatgtag

SEQ ID NO: 149421 - DNA, 354 bp, Zea Mays
gattcacacttttggtcaggtctaatgaatattaaggatcaatttcttagatgaggtcactttcaagtgaggaatggtcatgctaccagattctggaaggatatatggttaatcagtcgacctcttagtgagcaattcccgaacctttttaatatagtgcgtaacaaatcggccttggttgtagacgtcttttcagattcaaatcttaatttatcttttcgccgaacaattaggggaattaaaatggtggaatggcacaacttgttaaacttgctaactacggttactctgaatccggctagggacaattttgtttgggatggtcataagaatggaattttctctgtccaatcg

SEQ ID NO: 149422 - DNA, 998 bp, Zea Mays
ggcctaagcccagatccaaacttccaaacgcatcttcctctcccatgctgcatcccgcagccagaaccctagcctcgtcgccatggcctcctccttgctccgctccggctacggcctcttccttcgccgccctcgcctttccgccgcattctccaccgctgctgccgaggagctcatcgacgtccgcaagctccccaccgactacgacccctccaccttcgacccgtcctccccgtcccgcccgccgccgtccgaccgcgtgtggcgcctcgtcgaggaggtctcctctctcaccctcgcggagactgcttctctgtcctctctcctcctccgccgcctcgacatcccctccgcgccacccatcgccatcctcaactccgccacggggctgggcggcggtggcgccacggccggcgcggcgggtgagaaggcggcggcggcagctgagaagacggtcttcgagctgcggctggaggcctacgatgctgcgagcaagatcaaggtgatcaaggagatccggtcattcactgacctggggctgaaggaggccaaggagctggtggagaaggcgcctgcggtgatcaagggaggcctatccaaggaggaggctcaggcgattgtcgagcgaatgaaggcagttggcgccaaggtcattattgactgattagaacaagccttttcagtggtgaggtcctgcaaatttatgcttcgtttcggatcaacttttaagtgcaaggatggatgagtggcttgtggagaattctcctctatgaacttgtggagaattgatgtggcattgcacaaataggttttcaagcgcgttaatcaaatgaacttgtagagtattgtatcaatgatcaatcactcatcattatgttgtcggatgtgacattagttgtggggctttgggatggaaatggactattatattgttatttgctatgaagattttgtgacctttgaattacaaagtaaaaatgagttacttcatttccaaa

SEQ ID NO: 149423 - DNA, 1805 bp, Zea Mays
attccaaacgtccctgataacacagtccggaaggaccttttctcgtttttttctctcgctagcaccttgcctccttgcgatttgcgagcgccgcatcgacccccaccgccgacgaacgccgcgccgccgacgtcctgccttctcctcgccggcgagcgccgttccgctgtaccctccgtgattccgccccaacctctgcgtccgaatctcccgcgaaacagtcacggcgatggcggcggccggtggcgtttcaactgacgatgtcccgatcctgcaggcagagaacctcaccagcaacgtcaagtccgtctactacagtcgaacattcttgtcaatcattggtggagttgttgctggaatctggggattcacaggcttgatggggtttgtcttctactttctgataatgatggttgcatctattgggctcttagcgaagtcaaagttttcagtccaggcgtacttcgatagttggaccaggatttcaattgaaggagtttttggtggcctgatgtcattcgtgctgttttggacgtatcctttttcgttgacaatttaaaaacagtactattcatactttatttctgttcttcttgtgcttatatagattatttgattagataggctgaagattgcaaccggctgggatggtaaaccaacatgttcatactccactggttgtagattgggtaacatgctgctattatcgagggactgaacgcctaccaacgaatatttcagatttgtgtttactgctgccatatattttgtcattgtggaatataaataaaaattcaacattttagacaatcatagaaaacaatcagtgaaccagcaaagcagtttatttttttctaaactcaaaacatgtttatgcgtctttcctatctatattcatctgttttcagtgttggtccgtttctgcatgagttcatccttgacgacgtatatagatttgcttatgacattgttcacatcttctgacggacatagaaagagctacactccggaggaaacacggaatcgtcgacgatgaacattcccaattggctttttgtacactcaatttttgtattggtaattgatatagtctgtagtgagactatatcggtgtagacctaagcaaagctcatgaactttgcatttccttggatgatccgtagcagttgcaatttttcatttcaagtgatggatatgaactttgatgttttctggcacaatgttttgtaccctcgagttttctggcacttcgattgatgtacacacttctcaatgcttcaactgatcgagtcactgttaactagccatgtgcgtcttttggaggaactacccatgttatttccaaatcaaaatgcgtccgtgatctaagaagcttcagcactgctaactgaacccatctcttcttatcaggccgaaattttatacacgggcctaagcccagatccaaacttccaaacgcatcttcctctcccatgctgcatcccgcagccagaaccctagcctcgtcgccatggcctcctccttgctccgctcaggcgattgtcgagcgaatgaaggcagttggcgccaaggtcattattgactgattagaacaagccttttcagtggtgaggtcctgcaaatttatgcttcgtttcggatcaacttttaagtgcaaggatggatgagtggcttgtggagaattctcctctatgaacttgtggagaattgatgtggcattgcacaaataggttttcaagcgcgttaatcaaatgaacttgtagagtattgtatcaatgatcaatcactcatcattatgttgtcgg

SEQ ID NO: 149424 - DNA, 1386 bp, Zea Mays
attccaaacgtccctgataacacagtccggaaggaccttttctcgtttttttctctcgctagcaccttgcctccttgcgatttgcgagcgccgcatcgacccccaccgccgacgaacgccgcgccgccgacgtcctgccttctcctcgccggcgagcgccgttccgctgtaccctccgtgattccgccccaacctctgcgtccgaatctcccgcgaaacagtcacggcgatggcggcggccggtggcgtttcaactgacgatgtcccgatcctgcaggcagagaacctcaccagcaacgtcaagtccgtctactacagtcgaacattcttgtcaatcattggtggagttgttgctggaatctggggattcacaggcttgatggggtttgtcttctactttctgataatgatggttgcatctattgggctcttagcgaagtcaaagttttcagtccaggcgtacttcgatagttggaccaggatttcaattgaaggagtttttggtggcctgatgtcattcgtgctgttttggacatttgcttatgacattgttcacatcttctgacggacatagaaagagctacactccggaggaaacacggaatcgtcgacgatgaacattcccaattggctttttgtacactcaatttttgtattggtaattgatatagtctgtagtgagactatatcggtgtagacctaagcaaagctcatgaactttgcatttccttggatgatccgtagcagttgcaatttttcatttcaagtgatggatatgaactttgatgttttctggcacaatgttttgtaccctcgagttttctggcacttcgattgatgtacacacttctcaatgcttcaactgatcgagtcactgttaactagccatgtgcgtcttttggaggaactacccatgttatttccaaatcaaaatgcgtccgtgatctaagaagcttcagcactgctaactgaacccatctcttcttatcaggccgaaattttatacacgggcctaagcccagatccaaacttccaaacgcatcttcctctcccatgctgcatcccgcagccagaaccctagcctcgtcgccatggcctcctccttgctccgctcaggcgattgtcgagcgaatgaaggcagttggcgccaaggtcattattgactgattagaacaagccttttcagtggtgaggtcctgcaaatttatgcttcgtttcggatcaacttttaagtgcaaggatggatgagtggcttgtggagaattctcctctatgaacttgtggagaattgatgtggcattgcacaaataggttttcaagcgcgttaatcaaatgaacttgtagagtattgtatcaatgatcaatcactcatcattatgttgtcgg

SEQ ID NO: 149425 - DNA, 1313 bp, Zea Mays
attccaaacgtccctgataacacagtccggaaggaccttttctcgtttttttctctcgctagcaccttgcctccttgcgatttgcgagcgccgcatcgacccccaccgccgacgaacgccgcgccgccgacgtcctgccttctcctcgccggcgagcgccgttccgctgtaccctccgtgattccgccccaacctctgcgtccgaatctcccgcgaaacagtcacggcgatggcggcggccggtggcgtttcaactgacgatgtcccgatcctgcaggcagagaacctcaccagcaacgtcaagtccgtctactacagtcgaacattcttgtcaatcattggtggagttgttgctggaatctggggattcacaggcttgatggggcgtacttcgatagttggaccaggatttcaattgaaggagtttttggtggcctgatgtcattcgtgctgttttggacatttgcttatgacattgttcacatcttctgacggacatagaaagagctacactccggaggaaacacggaatcgtcgacgatgaacattcccaattggctttttgtacactcaatttttgtattggtaattgatatagtctgtagtgagactatatcggtgtagacctaagcaaagctcatgaactttgcatttccttggatgatccgtagcagttgcaatttttcatttcaagtgatggatatgaactttgatgttttctggcacaatgttttgtaccctcgagttttctggcacttcgattgatgtacacacttctcaatgcttcaactgatcgagtcactgttaactagccatgtgcgtcttttggaggaactacccatgttatttccaaatcaaaatgcgtccgtgatctaagaagcttcagcactgctaactgaacccatctcttcttatcaggccgaaattttatacacgggcctaagcccagatccaaacttccaaacgcatcttcctctcccatgctgcatcccgcagccagaaccctagcctcgtcgccatggcctcctccttgctccgctcaggcgattgtcgagcgaatgaaggcagttggcgccaaggtcattattgactgattagaacaagccttttcagtggtgaggtcctgcaaatttatgcttcgtttcggatcaacttttaagtgcaaggatggatgagtggcttgtggagaattctcctctatgaacttgtggagaattgatgtggcattgcacaaataggttttcaagcgcgttaatcaaatgaacttgtagagtattgtatcaatgatcaatcactcatcattatgttgtcgg

SEQ ID NO: 149426 - DNA, 574 bp, Zea Mays
atcactttgcactacccttttatctagtcgctgcagggccagggcagtgaagtctcttctcgttcttgagttctagcgagagtgcatcgtgtgagtgttgtggttcatgttcacgtcggtgtttactctccccggccatcagtgtctcattgggaacgccgcggtgccgccggtgaacgccgctgggaatgatctcgacatggcagaccttgtttggggccggttgcgtgcgtgatctagggttggtctgctctatgagctcccaaaataaagagtgaagatttaagataaagtggttgctggagaggagtctactccagtgcctgttcatcaagtggatggagccatctaactgatcatcgtgttagaagtatctagaacctcttctctgcaacaaaggcaagccccggtgcatttgccccttccttgtgttttaaatgctttatcaccttaaatgatgcattaggtgataggagttgtgtgatgaacaattgatgcattaccattccttggaatttgaatactataccttgatccctgatttataaaaagaactgatagtgcttaaccctgc

SEQ ID NO: 149427 - DNA, 2560 bp, Zea Mays
acgccggtacgccagacgccacgcccatttcttctccacgaagcctttgaagtcccaaatcaactcccgcagacgcctccaaacacccagaccagaccaccgtcggccgtcgctagcctgcgcaacatctccaggtccagggtccaggccacagctcgagcccgacgaccgacgcctagacgcggctgggcggtcggcctcgcctcgtctcccccctccacgcctcctttctcctgctccgcgtctcgatctcgcctcccccgccgcgtggcgcgacccggccaggtatcgcccaccctgcgctgcggccatggataacttgatcaccctcgtcaacaagctgcagagggcctgcacggctctcggagaccacggagaggagagtgcactcccgacgctctgggactcgctgccggccatcgccgtcgttggaggacagagctctggtaaatcctctgtgttggagagcgtggttgggaaggatttcttaccgaggggttcaggcattgtaacccggcggccgctggtactgcagctccacagaattgatggtgacagggaatacgccgagtttatgcaccttccaagaaagagatttacagattttgctgccgtgaggaaggagatagctgatgaaaccgacagagaaacaggccgttcaaagcaaatatcacctgtccctatccatttaagcatattttctccatatgttgtgaatcttactcttattgatcttcctgggcttactaaagtagccgttgagggccaaccggagaatattgttcaggacattgaaaacatggttcgctcatatattgaaaagccaaattgtataattctggctgtttccccagccaatcaggaccttgctacttctgatgcaatcaagatatcacgggaagttgatcccaaaggtgaaaggacctttggtgttctcacaaaaattgatctgatggacaagggtaccgatgctgttgatatactggaaggaagatcttaccgtctccaaacaccatgggttggtgttgttaatcgatcccaacaagatatcaacaagaatgtggacatgattgctgctaggcgtagagagcgagagtattttgcaactacaccagaatataagcacatggcttctaggatgggatctgaatatttaggaaagatgctttcaaagcatttggaacaagttatcaaatcaaggatcccggggatccaatctcttataacaaagacaattgcagagctggaaactgaacttaatcgacttggaaaacccattgctaatgatgctggggggaagctgtacacgatcatggaaatttgtcgtatgtttgacagtatctacaaagagcatctggacggagtgcgccctggcggagaaaaagtttaccacgtcttcgacaatcaatttcctgtagctattaaacggttgcagtttgataagcaactctctatggaaaatgtaaagaagcttataacagaagctgatggataccagcctcacttaatagctccagaacaaggatatcgacgccttatagaatcttgtcttattagtatcagaggtcctgccgaggcagctgttgatgcggtacatgcaattctgaaggacctcgtccgcaaggctatcaatgaaacacatgagctgaagcagtttcccacccttcgtgtggaagtaggcaatgcagcttttgagtcattggatagaatgagggatgaaagcaagaaaaatacattaaagctagttgacatggaatgcagctacttgacagtagatttcttcaggaagcttccccaggatgttgagaggggtggaaatccaagccactctatttttgatagatataatgactcttatcttagacgaattggacaaactgttctgtcatatgttaatatggtgtgttcgaccttgaggaactccatcccaaaatctattgtttattgccaagtgcgagaggccaagcgctcgctgctcgatcacttcttcactgaactgggagcaagagagatgaagcaactttccaagcttctcgacgaagatccagcagtcatggaacgcagaactaaccttgcaaagaggctggagctgtaccggagtgcccaatcggaaatcgatgcagtcgcatggtccaaatagccctgatggctaagatatctgttcttacatgttctttatccctcgtctggcgattgtctcccctattctggggcatatatagctgatttttgtctgttgtaggtcaggtcattctatagattaccgcagctgtacggtgtcgtttagttgtgcttttgttccttgtacttgagggtctaggggacaccaggctgctgtacgcttgcatcacggacaagttcataaattgtgtttttgttaccatgcattcttttattccatctatgtgcagctatatgaagcatgttcttctgtcagtatgttcaaagtcttgataggccttgatcggttgcaagaggaacgaggggattgagcaattttaattagcaagggatgtaatctctccaatctccttcaatccatccttaactgaacaagctt

SEQ ID NO: 149428 - DNA, 663 bp, Zea Mays
atggcgacgcatgcggaacctaccatagaattcatgtgtcataataggggtcatgaagttttgtacatggacgccgcacgcaccctagatgtggagactggcagacgtccgctatctggacgaggggtcgggctcccgcggggtgaaaaatctgggcgcgctgttgtcccgtcgctggcgacttcgatccatctcggcgagggggcctcgcggcgctgctcgtcggcggagcgggccaagctgggctccaagaggccgtggtcgagcgggtccggcggcggaccgctctcggtggttggaggcaaggaggtggccgacgatgagacaaagatcgaaggctcgggtgcaaccgtcggtgttcgtcgtcgtcgaaccgccatcgcaaagaagctgagaagatccacggctccgacgaaggaaggtgcggagaaacgcaagcgcatctcgtcgccgccatcgtcatcgtcttcgagtcggtcgggtgctccagatctgaagagaaaaaggtacacctttcagatccattgtgctttctatgattctagtaattcaaatgctacaactcgtccagatctagggtttaaggttgagccaacatacattcgatggttgtacgattcattgagcactaggttttctcttgataattgttgttcacagtaa

SEQ ID NO: 149429 - DNA, 3077 bp, Zea Mays
tcctcccccgtcgcccgtcggcacgagatccttgcccgaacaaaaaccagaagatgggcgaggggagggggagacgagatctcactccccgcttcctctccacctctcaaatggcgccaccgagtgctaaccgtagccaccagcagctcgtcgtcctaccggtcctgctcctactcctgatccggatccccgcatccgcggtagcggcggcagatacctccctgtccaccttatcctactcccaccactgccccaacctcccgtccgcgctcgacctgcccggcggcgaagtttcggcgctcgggcccgacgcccgtgtccccgtccccgaggtctccaccgggtacttcgtcggcggggaccgcatcttcggccccgacccctcctcccagccgcgctccttctcgttgctcccctcctccgtcgcccgcaccaccaacgcctcgctcctccacgtctccgccactctcaccgtctccggcgggcggcgcccgttccgcgaccgcggcggccggaacctcttcgagtacgacggccgcgcgcgccacttccgcccgcgcctcccgcgcttcacggggcggcgcggctccatcaccttcggcctggagggctactactccaccgggtccggggacctctgcatggtcggcaccgggtccgggcgcgccgccgacggctcgcccgtgcacttcctccccgtcgtgctccgtctcggctttcccagccccgccaacgtgacgcggcccttcgtcaccggtcgcctcgagaacgttgacaccatcagccccatcgagcccatctcactcgtcgcctacacccaggagggctacgcgtacggggagagcgcctcctgcccgccgccgcctgcggggaggcttgatgcgctccaggtgttcgagaataggaatttctcgtgcgcccatctcagttccatgctcaaatcgccgttcaggttggactacccgagtggcagcgagtcgaccgcatcttcactcgggattcaccaaagctacatgtatgtcaaccggatgcactgcaacgatgacggcgctgtccgtgcttatgtggcgttcactaaccagacagagttatcaaggtactacttcatgctgggcgagaaggccgtcgtggtggatggattctgggatcagaagagcagccggctttgcctcaaagggtgtcacgtggtgaagtcggggccatcccgtgcagatttggcagtaggtgagtgtggaattgggatgagcttctggttcccggcagtgtggtcgttacagcaacggagcttttctgctggtctggtctggaatgcaagtctgaaaagtggtgaggccgtcgctgccggttctagtgcaatcactcccaactataggggcaatctttctggtttgaagtataattacacaaaggtggacgaggctatgaaatactatgagaaatctggattgaacaagaacaggaaagggaagttcccagatagcaattcataccaggacttggtgttccgttttttcgtgaagagaggaggcggctctggatatgcctcacctgtcacaattgggtcaatgttgtttgatggtaactctttggtggttcaagatcccttttctcgccatgtcacagccgagatgaagcaaaggctgcttaatgtcagctatgatatctactatgttgggaaatggtctctagaatcattccatcgtcgacatatctctgccgagggtgtttatgatactaagacaggttccctttgcatgatcgcttgtcgcgagcttaatgtctcgtcagattgtgaaatcctggtgactgctcagttttcttctttagatgcaaaagttgcacagcatgtgaaaggggcgatcaaaagcttgaggaagaagactgaccctcttttctttgaaacgctggacattgcttcatatgggatgtacgtagagcaagtggatgcatcaatctggagaatggacatagaaagcaccatgaccttgatctctatgacactggcgtgcgtcttcattgctgtgcagctatttcatgtcaacaaggtccctgaagcacttcccgccatgtcgatcaccatgctggtcgttctggctttgggttacatgatccctctcgtgctgaactttgacgctctcttcaagaacagcaacaagcagaccgttccactctcaggtggcggatggcttgaggtgaacgaagtcatggtgcggatcattaccatggtaacctttctgctgcagctgcggcttcttcagcaggcctggtccgcacggtccgtggatgcaagcaaagccgagtcatgggctgccgagaagaaagtgctctggatatgcctgccactgtacatcattggcggagctattacttgggttgttcacatgaggtcaaaccacagccgaagaatgctaaggcaggttgtacacttgaagccagttgagcagcatgcgttctgggaggaccttgtgtcttattgtggactgatactcgatgggttcctgctccctcaagtgatcctaaacgtgttctcagactccaaagttagagccctctccccagggttctacatcggaagcaccttgatccgtgtcctgcctcatgtgtacgatgtgttcaggagacagcactttgttccaagcctgagaccatcttacatgtatgcaggccctcgtgacgacctcttcagcctcgcttgggacatcgtcataccttgcggagcactgctactgtcggcgctcctcttcttccagcagtggcgcggaggagctttcttcctctgttcgaagaacaggaggacgagagagtacgaaatggtttccgtggccagctcttaagaaaaatcgagtggatatgaaatgcttttatagccggttcttgacatcgttattgcaagggaaatgtagaggaggtttacttatagactttttaaaaaatagctattccatttttcggatccatgtttctttttgcaaatgtgcttggttgcagcgaaaaccaccgtgcatgtatacgaaagacgatactaaacaagttgggcaaagtattggggttttgatttaggattcttgttacctttt

SEQ ID NO: 149430 - DNA, 366 bp, Zea Mays
atggcgtacggcaaccgcgtcaccaccttcgaggactccgagaaggagagcgagtacgactatgtccgcaaggacatgaagcattggcccctcatagctcccctgccgtcctacgggagaggaagggacgagcctggcgcaaggtacaacaatttcattggaggatccaatctcactgacgtcatcatcacaggcaaaaatggaacgatcaacgggaaggggaaggtctggtgggacaagttccacgccaaggagctcaagttcatccgcggccacctcctcgagctcctctactctgagaacatcatcatctccaatgtcaccttcgtcaacgcgccgtactggaacctccacctaaatgattag

SEQ ID NO: 149431 - DNA, 2129 bp, Zea Mays
tcagtttccaccgccgcactcctccacccagaccctcctccctcacggccccacccacctcgcgtcctcgccggaaccctaacggtgaccgcctgccgtgcccatcggcggcgatcgcgttgctgcgcccccgatgagttacctctgcgcgggcagttcgtcgttcgatgaccccgacgtggttgaggtgtcttcggccaccgccgcggctgcggggtgggcctccggccaccacaagaggaagcggagccaggttgtccctcaagaagtaattgaaattgatgatgatgatcctgatggagtcataattattggtgataaagcaccattggacaagaataagcaaactgttgtatgccctatggattggccaaagcatgccaagagtggttgggttcaggacatcgctggcccaagcacatatgcttcaaaatatatcgattcctgtgttgacctgaaagtgtttcaagatgaggcagtttacaactattctgatgactgtccctatgcgggatttgaagactatatgtatgatgaagatgagtttgaggttgatggttatgatgctctgcttattgaaagtgagtttaaatttggtttgtctgccaagtttgataacctccatgctccacctgttctggaggtttctttaccatggatgcagaagactgctattgatattgcaaataagaccaaacccactaaggttgtagatgataaaatcgaagaaaaatacaaggccttcaaacgatttgatactgttgatgatcatagtgatcattattattcaaagccaacgtcgagaaaggttcaggtggtaaaaaagccatcaaaagactgggtgaaacgtatacagcatgagtggaaagtcctagagagagatttgccagatactatatttgtgagggcatatgaggatagaatggacctgcttagaggtgtcattatgggaccggctgggactccttaccatgacgggctcttcttctttgacatatactttcctcctcggtatccaaatgtcccaccgatggtgaattaccgtgctggtggtttgcggcttaatccaaacctgtatgattgcgggaaggtgtgccttagcctcctcaacacctgggacggcagcggatgtgagaagtggaatccggccaattcaactatgctgcaggtcctggtctctatccaggctttggttttgaacgcaaagccctttttcaacgagcctggctacgctatgcatgctaacacggctcacggggagaagaaatcgctggcatataacgaggacacgttcctgctatcctgcaggacgatgttgtattctcttcgaaatccaccaaaggttcttgggaaggttggtttggtgttgatgaatcagttcgtatcaaagaacttcgaggatttcgttgctggccatttccgccagcatgggcgcaacatccttgtcgcttgcagagcctacctggacggtgcccaggttggatgcctatcgggcgatggagtgcaggacgttgatgaaggcgacacgagctgctcggtgaggttcaagcagtcactgaagaaactcgttgaggagctgttgacggagttcactgtgaagggcgcggactgcggcaagttcctcaccgaggagaaggcaaagaggtcgtctggagcttgctccacatggacagcggacaccacattgaggctgtaaggcggagtcggcttgctttaagagtttgaagttatacagtagaaacttactattcaggctacggctccattccggccctcagtcgattgtggggtgccacatcgccatatagcatctaactgctttgtgtaggtagtctattttggtgtttgaatgcactagagcctagttagctgctaaaattagctgaagacaaccaaacattatatctgttcagctattagctaattttagcaatttagctaacaattagctagttatttgttagttagctaattttagtagcattttttagccaacaaactattggttctagtgcattcaaacaccccctatctctagctcttctggtaaaaacatatttggcgctcagggacaacattctaccgtagcatgtataaaattcgtcttggtcaggtgtatcgtatgtatc

SEQ ID NO: 149432 - DNA, 2081 bp, Zea Mays
tcagtttccaccgccgcactcctccacccagaccctcctccctcacggccccacccacctcgcgtcctcgccggaaccctaacggtgaccgcctgccgtgcccatcggcggcgatcgcgttgctgcgcccccgatgagttacctctgcgcgggcagttcgtcgttcgatgaccccgacgtggttgaggtgtcttcggccaccgccgcggctgcggggtgggcctccggccaccacaagaggaagcggagccaggttgtccctcaagaagtaattgaaattgatgatgatgatcctgatggagtcataattattggtgataaagcaccattggacaagaataagcaaactgttgtatgccctatggattggccaaagcatgccaagagtggttgggttcaggacatcgctggcccaagcacatatgcttcaaaatatatcgattcctgtgttgacctgaaagtgtttcaagatgaggcagtttacaactattctgatgactgtccctatgcgggatttgaagactatatgtatgatgaagatgagtttgaggttgatggttatgatgctctgcttattgaaagtgagtttaaatttggtttgtctgccaagtttgataacctccatgctccacctgttctggaggtttctttaccatggatgcagaagactgctattgatattgcaaataagaccaaacccactaaggttgtagatgataaaatcgaagaaaaatacaaggccttcaaacgatttgatactgttgatgatcatagtgatcattattattcaaagccaacgtcgagaaaggttcaggtggtaaaaaagccatcaaaagactgggtgaaacgtatacagcatgagtggaaagtcctagagagagatttgccagatactatatttgtgagggcatatgaggatagaatggacctgcttagaggtgtcattatgggaccggctgggactccttaccatgacgggctcttcttctttgacatatactttcctcctcggtatccaaatgtcccaccgatggtgaattaccgtgctggtggtttgcggcttaatccaaacctgtatgattgcgggaaggtgtgccttagcctcctcaacacctgggacggcagcggatgtgagaagtggaatccggccaattcaactatgctgcaggtcctggtctctatccaggctttggttttgaacgcaaagccctttttcaacgagcctggctacgctatgcatgctaacacggctcacggggagaagaaatcgctggcatataacgaggacacgttcctgctatcctgcaggacgatgttgtattctcttcgaaatccaccaaagaacttcgaggatttcgttgctggccatttccgccagcatgggcgcaacatccttgtcgcttgcagagcctacctggacggtgcccaggttggatgcctatcgggcgatggagtgcaggacgttgatgaaggcgacacgagctgctcggtgaggttcaagcagtcactgaagaaactcgttgaggagctgttgacggagttcactgtgaagggcgcggactgcggcaagttcctcaccgaggagaaggcaaagaggtcgtctggagcttgctccacatggacagcggacaccacattgaggctgtaaggcggagtcggcttgctttaagagtttgaagttatacagtagaaacttactattcaggctacggctccattccggccctcagtcgattgtggggtgccacatcgccatatagcatctaactgctttgtgtaggtagtctattttggtgtttgaatgcactagagcctagttagctgctaaaattagctgaagacaaccaaacattatatctgttcagctattagctaattttagcaatttagctaacaattagctagttatttgttagttagctaattttagtagcattttttagccaacaaactattggttctagtgcattcaaacaccccctatctctagctcttctggtaaaaacatatttggcgctcagggacaacattctaccgtagcatgtataaaattcgtcttggtcaggtgtatcgtatgtatc

SEQ ID NO: 149433 - DNA, 1438 bp, Zea Mays
tcagtttccaccgccgcactcctccacccagaccctcctccctcacggccccacccacctcgcgtcctcgccggaaccctaacggtgaccgcctgccgtgcccatcggcggcgatcgcgttgctgcgcccccgatgagttacctctgcgcgggcagttcgtcgttcgatgaccccgacgtggttgaggtgtcttcggccaccgccgcggctgcggggtgggcctccggccaccacaagaggaagcggagccaggttgtccctcaagaagtaattgaaattgatgatgatgatcctgatggagtcataattattggtgataaagcaccattggacaagaataagcaaactgttgtatgccctatggattggccaaagcatgccaagagtggttgggttcaggacatcgctggcccaagcacatatgcttcaaaatatatcgattcctgtgttgacctgaaagtgtttcaagatgaggcagtttacaactattctgatgactgtccctatgcgggatttgaagactatatgtatgatgaagatgagtttgaggttgatggttatgatgctctgcttattgaaagtgagtttaaatttggtttgtctgccaagtttgataacctccatgctccacctgttctggaggtttctttaccatggatgcagaagactgctattgatattgcaaataagaccaaacccactaaggttgtagatgataaaatcgaagaaaaatacaaggccttcaaacgatttgatactgttgatgatcatagtgatcattattattcaaagccaacgtcgagaaaggttcaggtggtaaaaaagccatcaaaagactgggtgaaacgtatacagcatgagtggaaagtcctagagagagatttgccagatactatatttgtgagggcatatgaggatagaatggacctgcttagaggtgtcattatgggaccggctgggactccttaccatgacgggctcttcttctttgacatatactttcctcctcggtatccaaatgtcccaccgatggtgaattaccgtgctggtggtttgcggcttaatccaaacctgtatgattgcgggaaggtgtgccttagcctcctcaacacctgggacggcagcggatgtgagaagtggaatccggccaattcaactatgctgcaggtcctggtctctatccaggctttggttttgaacgcaaagccctttttcaacgagcctggctacgctatgcatgctaacacggctcacggggagaagaaatcgctggcatataacgaggacacgttcctgctatcctgcaggacgatgttgtattctcttcgaaatccaccaaaggtatatgcccatgttattgttctagttatgggggaaatactacttgcttttcgaagcccaatataacaatggcaaactgggggcagctgcttgctt

SEQ ID NO: 149434 - DNA, 112 bp, Zea Mays
cttgattttaataatgtcatgtcaattacatcttttaaatgctaagactatcacaataaattacaaacttatacaaatcttcagaaaataccacaaagtcttacaactcaaa

SEQ ID NO: 149435 - DNA, 1431 bp, Zea Mays
ggattggacatggctctcattggacgcctttaatcgggattgtctgatctgtcactgtgttatgtgtagtctgatctatcactgtgtagtctcgtcaaaaccgctgtcaccgagtatttccatttctacactttcgtgccctccgttcccctgcctccgccgtcgccgcagccatggcgtcgcggcgctgcctcctccgcctactctcgagccgcctcgtccctcagagatctcaaccttttgcaccgggctcgatcgcgacaagaaccctgaccacttcgtccgaggccctcggccccccagctcccggggccctcccctcccctcggctgtactacctctcgcgctgccacttcgcgacccgctcctccggcgacgaggacgacgaatatgaagacgaagaagaacactacgacgaggaggatagcgagggggaatggggggacgatgaggaggcggtggcggcgaagaaaccgagcgggaagacggaagaggagaaggtagcggaggcggcggagatcggctacaaggtgctcgcaccgctcggggctgacgagaaacccttcaagccctacgagcccgtcttcgccatcgtacagatcggctcgcatcaattcaaggtgagcaatggcgactcaatcttcacggagaggttgaagttctgtgatgtgaacgacaagttgttcttgaaccgagttctcatgcttggttcacaaactcaaacagttattgggaggccaatactacctgatgctgctgttcatgctgttgtggaagagcatgccttagatgcaaaagtgatcatattcaagaagaaacggagaaaaaattaccgccggacaaagggccatcgtcaggagttgacaaaactgagaataatcaacattgaaggaatagataagccagagactgctgctgttgctgcctaaattcatgggaaagagaaaattagcagcataccagttaaatgtcggtcagtcagatttcgatagttgataccagtgaaatgtcgcttcttttcttgttaattcaaacgttagaggctgtcagcattatgactcgggtaaagtacctgacatgaagcctatgtaccgagcagtttgggtggtgtggatcagctgatgtagtttacctagtgacacatatttttcatttttggttagcttttctgtgcacatcctttatatatgtgtactcagcctgttcgcctgactttaatttgtactgacttctaattctacagtgtttttgtctctatgcattgaagttgtagcagtccaaatagtcgactttaattttaagcgaacagccccgagcttctactgcttagttccacgttagactgctagagtgtaatagtgaaaccgcccttcggttccatgttagaaagagttaataatgaaaccgcggtgcttcgtttctccctggttc

SEQ ID NO: 149436 - DNA, 1764 bp, Zea Mays
gtctaagcacgttccgttcccagcggttcccaccgcgcatcaatcaaaccctaaaccctgctctcgcgccgccgcccgcccgcccgctatgtcgctgccacacccggtgccccgagagacggtggccagcgccgtcgcctccctcacgatgtggatgaagaagcgcacagcgcagacgcgcccaaacctcctcgccgacgagcgcgacgacctcgtcgtcctccagctctcgctccgccgtatccccgcctcgtccagcgccaggccgcgcctcctcccgctcccgcatcccgtcatcggacacgacggcgcctccgtctgcgtaatctcggacgaccgccccaagtcgcggtccccttccgcctccgatctcctccacgcgtcgaagtcgctccaccgcctcccagtctctgacgtcatcccgctctccacgctccgcacggactaccgcccctacgagtcgcggcgccgcctcgcagcctcccacgacctcttcatcgccgaccgcgccattgtcccccttctgccgcgcgtcctcgggaaggcgttctacgccaccaagaaggctccgattggagtcgatttcagccgcgtcggatggccggagcaggtccgcaaggtccttggctctgcttttctgtacctgcggtcggggacctgctcggggatcaaggtgggtaggctggacatggaggaagaggtgatcgtggacaatgtgatggccgcagtggaggaggctgtcgagaaggtgccaaagaagtgggccaacgttagggcactgcatctgaaggctgtggattcagttgctctaccaatttaccaggttgtaccagagttgggtatgaaaatcgaggtgcctgaaattattggatctggggaggttattgatgccgcagaagcggagacttgtgggaagaagattgacaagaagggggatgctggtgcccgtggaagagaggtatttgccaatgtgagtgccaagaggaagaggaataagaaggggcaggttgaggatgatgttgcgatgcaggaagaagtccaggtggagatagagaaaaagaagaggaaaagcattgtgatttctgctaatgacagccagatggctggcaagaagggtgaaaagaagggcaaacgtggtttggaaaataaggtgaacgaagccagtttggacaacaagaaggttaagatggggaagactgagcagaggaagaagaagagcatgaacggtgatggtgaagtcggtactgaggaaatgcagggagataagaagatcaaggtggagaaatcagatgtcaagatcaagaagttgaggaccaggataagagtataaggttgcagttgatatcactgttggaggtgcctcttaaaatattcagttctgcgtatttgtaggctggatatccaaatcatcgatgaattgagttagtcaattgttatcagctggaagaactatatcatctgttaaagttccaagattttccatcaatcagatatacctcaaaacttggtcccttaggtttcttctgaatttgtttcttcaggttttgcgagcttggtagctcaaacctattggttatagaagtatggcagaattgtttcttgctaaagctatgtacttcgcttgactcacaacgattgtgtgttgatcttctaagaatatgcttatgttgtcattgttgtcttggcttctcggaagtatccctcacgatgtacctccccttaataatgatggttctatccggcattttaggctgcattatttgc

SEQ ID NO: 149437 - DNA, 1211 bp, Zea Mays
actatctgtttatttctgaaggcattccatggcttccactagttgagtccccatgattaccaatccttgttatatcatattgtttgttagctattctcgaaacattttttgtccttattgcttcagtatactgttgctcataataaatgctttttaactcttcatcgttctattattttttcttacttttacttaaccatttttcagctgggaacatgcttccatcttattatcgaagcatgtatctcgagaaagttgatcgatacatctgcttatttatggcctggttatgttgtaccatctgcgactttaaaagatacaacttttccctaagaatccccttggttaaactttatgtaagggtctcgactttcaggaccccttattgatgctctggtcgcatctcctgcttcaaggtgtgtatgtgtatagttgagcatgatgatcttggtagctgtgtgaggttgctgttttcattagtagatctgtgtaccttatccttgctatactgtccatatatgttgtgtgcatgaaagtcttgcattgaaaatgtcatgtgctacaatcgttaggactattaatagatgttgctctgtctatctatacagttacatcgctgaaaattcccatgccctttcatagtacgcctgtgaaatgctcacttcttttctattggtttgtgtgcagttcaagctctgcaaggtgaggtctgttcagtttggccagaaaggcatcccctacctgaacacctacgacggccgcaccatccgctaccctgacccgctcatcaaggccaacgacaccatcaagatcgatctagagaccaacaagatcatggacttcttcaagtttgacgtcggcaatgtggtcatggtgaccggcgggaggaacaccgggcgtgtaggagtgatcaagaactgggagaagcacaagggcagcttcgaggtcatcgacgtgctgcttggagctttttgcatgctatgtctagttttattctatttgttgtacaggaaaaaatagaatggaattcaaatttggtggtcgcaaaagtgtggagacttgaattcatataaagttaggcttaacattagtgcaaacagttgtattttagtttagatttagagtacacttatgtatgccttgtttgacaatacttatttatgatatattgaatggtacttatttatattatattaattataatgttgttc

SEQ ID NO: 149438 - DNA, 639 bp, Zea Mays
tgtcaacgggtagcactctaaggttgttagtggactgaccagagtgtgagattatgcttatgcaaccatgtcagtcgacttgtggtgtgcaggtgtggagcacaggaacggtggtcgacggctgaggtgaaggttatgcgagctcgtgctgatggaccggtagcagtgaagggtgagtgttgggtcttgactaacggatcagagcagccaggtgaccaaacgtggtggctgacacctaggacacacacttgtgcgaggacatggtggggtggaccgtgttgccggcgtggtcgaggactggcgggatacgcgtctgatcgtggaggacgtgcacgaggtgcggtgctgcatgacaggtttagtggtttgggcctcaaaaccacccagcgctacgaatggctggttttgctgagtttgggcctcaaaactcggcgttgcggttccagagggaaccgatggcggcacgcggcgtgatcgtggagggtgcgtcaaggcaaagcaactccatgtgaaggacgtggtcgtcggatcgaaaacctaggagttggtccatttcgcccccagtggagtggataggctctatgtaaatatgggtagtttaggaagtcggaataaccctctataaatagaggggatggc

SEQ ID NO: 149439 - DNA, 1823 bp, Zea Mays
gggcttgggtagttgagatccaaatttccgccttcaggctcgacaaaaaaaaggctcgggtgacagggacaccgcgggtgcaggcctccaggggcacggcgatgggacagcacgactctcttctctgagaaaacccaacaaaaaccctcgctcgcctcacttgttcgctcacctcggtgcggcgcgtcgttcggacacggagatacagcggcgattccggcgatggagtacgtgaaccccctcaccggcttccgcgtcgacggccgccgccccaacgagatgcggcaactcaagggcgaggtcggcgtcgttgcgcgcgcagacgggtcggcgctgttcgagatgggcaacaccagagtcatcgccgccgtctacggcccgcgagaggttcagaacaaaggtcagcaagtaaacagcaaggaggctttggttcgttgtgagtacaggatggcagagtttagtacaggagatcggaggagaaaaccgaagggtgacaggcgatcaacagaaatttctcttgttattcgacagacaatggaggcaagcatattaacacatttaatgccacactcacagattgatatatatgtccaagttcttcaagctgatggtggaacaaggtcagcttgcataaatgctgcaacactagctcttgcagatgctgggattccaatgcgagacattgccacatcatgtagtgctggttatctgtgttctactcctttgctcgatctgaattacctcgaagacagtgctgggggttctgatgtcactgttggcattcttgcaaagatggacaaagtgactttgcttcagatggatgcaaaattaccaattgatacatttgaaaatgtaatgggacttgcaatagaagggtgcaaagcaattgcaacttacatccgagaggtgctattggagaatacaaagaagcttgagtgtcagcgtggttaaccttaggagtgcaggcaggttgatgacctgaacctacccaacaacggacatcacacagcccattaaaaggcttactggttgtggttgtgggtggctggctctagtgcagtgcacaggaacttccaacggagtatgtgcaagtcgtcagaagttgttcaaggcagcttgtttgtcatcatcaccagggatacaagacatgcttcctcatgcctgtaaaagggcctacaaaacccctcccttgctagttcacagccaccttgtgcttatccttggatctggagtcctcaagacttctgtctctgatcagtgtcactctttggccgctgctttcctcgcctccgggagctggaccttgccggcgctggaaaagaatagcgacgccactaggcccgactgttacaagtgcaaagcatcaaatacaacaagcggcgacgtggggcagaagaccaaggcggctgcgaccaccggcatgaggaaggtgaaagagggaatgtcgcaggggttccaatggatcaaggacaagtgccatcacggcggcggcaagaagcagcagggctccgaggcccctaggtactactgacccctgtccttatcgcattagcattgttgctcggcttcaacacgctgtctgctgcttccggtagacagcaaattctttttttggtgcttgctattggtatgaatagtatactgcatataggttgtgggccggtgatccgatattggtggtgttgcagttgtagagtaagtttcttcgtacctgatgtgtgtcgtagctactgaattgaccacttcaatgtatataaaatgatatttatgcacttatatttctctgctcatatttttcatctaaatgaaggacgatacttata

SEQ ID NO: 149440 - DNA, 1561 bp, Zea Mays
gcgggtgcaggcctccaggggcacggcgatgggacagcacgactctcttctctgagaaaacccaacaaaaaccctcgctcgcctcacttgttcgctcacctcggtgcggcgcgtcgttcggacacggagatacagcggcgattccggcgatggagtacgtgaaccccctcaccggcttccgcgtcgacggccgccgccccaacgagatgcggcaactcaagggcgaggtcggcgtcgttgcgcgcgcagacgggtcggcgctgttcgagatgggcaacaccagagtcatcgccgccgtctacggcccgcgagaggttcagaacaaaggtcagcaagtaaacagcaaggaggctttggttcgttgtgagtacaggatggcagagtttagtacaggagatcggaggagaaaaccgaagggtgacaggcgatcaacagaaatttctcttgttattcgacagacaatggaggcaagcatattaacacatttaatgccacactcacagattgatatatatgtccaagttcttcaagctgatggtggaacaaggtcagcttgcataaatgctgcaacactagctcttgcagatgctgggattccaatgcgagacattgccacatcatgtagtgctggttatctgtgttctactcctttgctcgatctgaattacctcgaagacagtgctgggggttctgatgtcactgttggcattcttgcaaagatggacaaagtgactttgcttcagatggatgcaaaattaccaattgatacatttgaaaatgtaatgggacttgcaatagaagggtgcaaagcaattgcaacttacatccgagaggtgctattggagaatacaaagaagcttgagtgtcagcgtggttaaccttaggaggcaggttgatgacctgaacctacccaacaacggacatcacacagcccattaaaaggcttactggttgtggttgtgggtggctggctctagtgcagtgcacaggaacttccaacggagtatgtgcaagtcgtcagaagttgttcaaggcagcttgtttgtcatcatcaccagggatacaagacatgcttcctcagtaaggtgttatcggaatttttcggttcctgtaaactgatataaatcgatggtggaactgtactgataatcttccgtatggtgttattggaatttgtgtgacagttcctgtaaactaatgcagagagagagatccagcggggctcctgcctcctaaatcactccctcccagattgtggggtttttgtagaagcatttgcgggcgtgccgtagtgctacactacttcgttattgcctccacccccaaacagcaccaacgaaaacacggggagatccgagaccctactgaaactgataaattgaaggcgacgatgtattgctaactctccgtaagctgttactagattttttttttttgtgtggcagtgcctgtaaaagggcctacaaaacccctcccttgctagttcacagccaccttgtgcttatccttggatctggagtcctcaagacttctgtctctgatcagtgtcactctttggccg

SEQ ID NO: 149441 - DNA, 1580 bp, Zea Mays
cagggacaccgcgggtgcaggcctccaggggcacggcgatgggacagcacgactctcttctctgagaaaacccaacaaaaaccctcgctcgcctcacttgttcgctcacctcggtgcggcgcgtcgttcggacacggagatacagcggcgattccggcgatggagtacgtgaaccccctcaccggcttccgcgtcgacggccgccgccccaacgagatgcggcaactcaagggcgaggtcggcgtcgttgcgcgcgcagacgggtcggcgctgttcgagatgggcaacaccagagtcatcgccgccgtctacggcccgcgagaggttcagaacaaaggtcagcaagtaaacagcaaggaggctttggttcgttgtgagtacaggatggcagagtttagtacaggagatcggaggagaaaaccgaagggtgacaggcgatcaacagaaatttctcttgttattcgacagacaatggaggcaagcatattaacacatttaatgccacactcacagattgatatatatgtccaagttcttcaagctgatggtggaacaaggtcagcttgcataaatgctgcaacactagctcttgcagatgctgggattccaatgcgagacattgccacatcatgtagtgctggttatctgtgttctactcctttgctcgatctgaattacctcgaagacagtgctgggggttctgatgtcactgttggcattcttgcaaagatggacaaagtgactttgcttcagatggatgcaaaattaccaattgatacatttgaaaatgtaatgggacttgcaatagaagggtgcaaagcaattgcaacttacatccgagaggtgctattggagaatacaaagaagcttgagtgtcagcgtggttaaccttaggaggcagtgcaggcaggttgatgacctgaacctacccaacaacggacatcacacagcccattaaaaggcttactggttgtggttgtgggtggctggctctagtgcagtgcacaggaacttccaacggagtatgtgcaagtcgtcagaagttgttcaaggcagcttgtttgtcatcatcaccagggatacaagacatgcttcctcagtaaggtgttatcggaatttttcggttcctgtaaactgatataaatcgatggtggaactgtactgataatcttccgtatggtgttattggaatttgtgtgacagttcctgtaaactaatgcagagagagagatccagcggggctcctgcctcctaaatcactccctcccagattgtggggtttttgtagaagcatttgcgggcgtgccgtagtgctacactacttcgttattgcctccacccccaaacagcaccaacgaaaacacggggagatccgagaccctactgaaactgataaattgaaggcgacgatgtattgctaactctccgtaagctgttactagattttttttttttgtgtggcagtgcctgtaaaagggcctacaaaacccctcccttgctagttcacagccaccttgtgcttatccttggatctggagtcctcaagacttctgtctctgatcagtgtcactctttggccg

SEQ ID NO: 149442 - DNA, 1558 bp, Zea Mays
cagggacaccgcgggtgcaggcctccaggggcacggcgatgggacagcacgactctcttctctgagaaaacccaacaaaaaccctcgctcgcctcacttgttcgctcacctcggtgcggcgcgtcgttcggacacggagatacagcggcgattccggcgatggagtacgtgaaccccctcaccggcttccgcgtcgacggccgccgccccaacgagatgcggcaactcaagggcgaggtcggcgtcgttgcgcgcgcagacgggtcggcgctgttcgagatgggcaacaccagagtcatcgccgccgtctacggcccgcgagaggttcagaacaaaggtcagcaagtaaacagcaaggaggctttggttcgttgtgagtacaggatggcagagtttagtacaggagatcggaggagaaaaccgaagggtgacaggcgatcaacagaaatttctcttgttattcgacagacaatggaggcaagcatattaacacatttaatgccacactcacagattgatatatatgtccaagttcttaggtcagcttgcataaatgctgcaacactagctcttgcagatgctgggattccaatgcgagacattgccacatcatgtagtgctggttatctgtgttctactcctttgctcgatctgaattacctcgaagacagtgctgggggttctgatgtcactgttggcattcttgcaaagatggacaaagtgactttgcttcagatggatgcaaaattaccaattgatacatttgaaaatgtaatgggacttgcaatagaagggtgcaaagcaattgcaacttacatccgagaggtgctattggagaatacaaagaagcttgagtgtcagcgtggttaaccttaggagtgcaggcaggttgatgacctgaacctacccaacaacggacatcacacagcccattaaaaggcttactggttgtggttgtgggtggctggctctagtgcagtgcacaggaacttccaacggagtatgtgcaagtcgtcagaagttgttcaaggcagcttgtttgtcatcatcaccagggatacaagacatgcttcctcagtaaggtgttatcggaatttttcggttcctgtaaactgatataaatcgatggtggaactgtactgataatcttccgtatggtgttattggaatttgtgtgacagttcctgtaaactaatgcagagagagagatccagcggggctcctgcctcctaaatcactccctcccagattgtggggtttttgtagaagcatttgcgggcgtgccgtagtgctacactacttcgttattgcctccacccccaaacagcaccaacgaaaacacggggagatccgagaccctactgaaactgataaattgaaggcgacgatgtattgctaactctccgtaagctgttactagattttttttttttgtgtggcagtgcctgtaaaagggcctacaaaacccctcccttgctagttcacagccaccttgtgcttatccttggatctggagtcctcaagacttctgtctctgatcagtgtcactctttggccg

SEQ ID NO: 149443 - DNA, 1546 bp, Zea Mays
ggacaccgcgggtgcaggcctccaggggcacggcgatgggacagcacgactctcttctctgagaaaacccaacaaaaaccctcgctcgcctcacttgttcgctcacctcggtgcggcgcgtcgttcggacacggagatacagcggcgattccggcgatggagtacgtgaaccccctcaccggcttccgcgtcgacggccgccgccccaacgagatgcggcaactcaagggcgaggtcggcgtcgttgcgcgcgcagacgggtcggcgctgttcgagatgggcaacaccagagtcatcgccgccgtctacggcccgcgagaggttcagaacaaaggtcagcaagtaaacagcaaggaggctttggttcgttgtgagtacaggatggcagagtttagtacaggagatcggaggagaaaaccgaagggtgacaggcgatcaacagaaatttctcttgttattcgacagacaatggaggcaagcatattaacacatttaatgccacactcacagattgatatatatgtccaagttcttcaagctgatggtggaacaaggtcagcttgcataaatgctgcaacactagctcttgcagatgctgggattccaatgcgagacattgccacatcatgtagtgctggttatctgtgttctactcctttgctcgatctgaattacctcgaagacagtgctgggggttctgatgtcactgttggcattcttgcaaagatggacaaagtgactttgcttcagatggatgcaaaattaccaattgatacatttgaaaatgtaatgggacttgcaatagaagggtgcaaagcaattgcaacttacatccgagaggtgctattggagaatacaaagaagcttgagtgtcagcgtggttaaccttaggaggtgaatcccacttgcccagtctgttctacgcttgaagtctggctggcggggtaaaactaactgtattgttctacggtttatctccgtacaaggcagtgcaggcaggttgatgacctgaacctacccaacaacggacatcacacagcccattaaaaggcttactggttgtggttgtgggtggctggctctagtgcagtgcacaggaacttccaacggagtatgtgcaagtcgtcagaagttgttcaaggcagcttgtttgtcatcatcaccagggatacaagacatgcttcctcagtaaggtgttatcggaatttttcggttcctgtaaactgatataaatcgatggtggaactgtactgataatcttccgtatggtgttattggaatttgtgtgacagttcctgtaaactaatgcagagagagagatccagcggggctcctgcctcctaaatcactccctcccagattgtggggtttttgtagaagcatttgcgggcgtgccgtagtgctacactacttcgttattgcctccacccccaaacagcaccaacgaaaacacggggagatccgagaccctactgaaactgataaattgaaggcgacgatgtattgctaactctccgtaagctgttactagattttttttttttgt

SEQ ID NO: 149444 - DNA, 1067 bp, Zea Mays
cacacacgtctatgccatccacggaccatggtgtgccctctacttatcctcctctcggctacctccaccattcctctgctcagctcgaacgaacaaaaaggactcacctcggccctctcctcttgtgcttctgcttccccaccgagtctcctcaaccccaggcactcgccctctgtcccctcccttcctcgcctccgatgccgccgccgccgccgctcctcgagccgcgcgactacctcggcgccggcgccacctcgtcgtgctgctcgtcgtgctgctcctccggccgcgagggcgcggggccccacctcgcgctgcggctcgggcttccggggtccgacgactcccccggccgcggcgcggacacggagcacgcccgcgcccacgtcgacgccgcgctcaccctcggccccggccccggccccgcgcctcccaggggcagcgccaagcgcgggttcgccgactccctcgaccggtccgcgaagctggacggcgttgccgcggatgacgctgctgggggcgtcacgcgggtagctggagctgctgccggagctccgcccgctgccaaggcacaagttgttggatggccgcctgttaggagctaccggaagaataccctagctgccagtgccacaaagacaaatgggggagatgaaggtaggagtgaggcgggatgctgttatgtcaaggtcagcatggatggagccccatacctaaggaaggtggacctcaagacctattcaagctatgaggatctctcgcttggtctggagaaaatgttcagttgcttcatcactggtaagtgcttctgttttctgttagtttttttctgccacaattacaaatacacttgttccccatctggttatttacccatgttgttgtgatgtaatgagttacagtgacaccagtacatgtacaattaggtatactgttttctgcataaagtcttgaggagtcaattaatagtacttgtaaagaagtattgactgatcattgtgtctaatcaccatactattgccttactaactattgactagcattagttgggacattctcttaaaaag

SEQ ID NO: 149445 - DNA, 273 bp, Zea Mays
atgtggaagcttcagccttgtggcatgtggatgtatacttggcctgtgtgtgagagggcaccaatgcccttctattcgtctcttttcccctttgccggtttcccttctctcggaagcattgtagctctatataactggaatcagctctcattgaagactcaacaatcagagcacgaaacacgagggcagcaaccttggggcatctttgtgcatatcggggttgtgaatctcaagagtaggctgtggtttgcaggcattgtaaatttcgactga

SEQ ID NO: 149446 - DNA, 844 bp, Zea Mays
gaccttgaaagggaaaaggctgccagggcagaaattgagaaaacatcttcccgtgaagcgcctaaagctccacttcccgatcaaacaagaaatgcccctctcagaaagctgtctagttctggcagtataaatagtctagaagaaagccattttcttcaagcatcgttggatttatctgacaatgcttcattagagaggcgaatgtcttcagaaagtaatatgtcgtattatctgaagaccatgactccaagtgcttttgaatcagcacttcgtcaaaaagatggagagctggcttcttacatgtcacgcttggcctcattggaatctattcggaattcactagcagaggagttggtaaaactgacagaacaatgtgaaaagttacggactgaagccactgctgtgcctggcttaagggctgaattggaagctctgaaacaaaggcactttcaagctctagaactcatgggggaacgtgatgaagagctccagtcattgggtgctcgtgtatagcgctgcctgcgctggtatgaatttgtcataccatctaattctcgtccagtgcatcgcggccaggccaagataccaggtccgtgacttgagcatgttttgtttcaaattttgtaacaccatacaacggcactgaatgttttcgtttgtatacatcggaacacagttgttgggtttaggaggatacgttgttgtatactagtaggttgagtagtttcacagctttacgtgtattctttgtgatttgtttccgttgaaatgtatcaaatttgaatccatttgcaagtgtacctcagaggaatgcaatcaataatatcgagagctccttttgtcc

SEQ ID NO: 149447 - DNA, 695 bp, Zea Mays
aagggttggagacccatatttatagccctagaggctgcactaccacaccttctcacacacactacacaacagaattgtcctctagatgctaaagagactacagaggacagtcaaaagtgactgttgtcctctagatgctaaagcgactacagaggacagtcaaaaagcgactgttgtcctctagatgctaaagagactagaggacagtcaagctgtcctctagatgctaaaggactacagaggacagtcaaaagcgactgttgtcctctagatgctcaagacttattccatcactttctcccagtcttagcgtagccatcaaaaggaccgaggaggagagggatctgtgggtgttaggaagggggcaaaaagcctagacctcctaacagccccaattccaggtctttagattagagtagttcctggtaccccatgggtgtctttttgtttctttgttttcggccgccgtaatggggccttttttctgtctccctgtattgatcctttatggatcttcttcctactcttcttaatgaaatgatgcacatgcctcttgcgcgttcgagagaaaaagtattcagacctgatgcctctccaaacagcttcaaaatattgagcacaaactgaatatcactttctcttgggtgcaagaaaaggaccacatcatcagcatacaaggatattctatgatgtag

SEQ ID NO: 149448 - DNA, 1799 bp, Zea Mays
cactgctcactgcaccgagccgagcgcaggttaggcgggcgcgcgatcaccgaagccgacgcggcgcccgcacgcgccaacggccgaacgcactctctctctctctctctctctctctctctctcccctctccgttgtgctccccgacccaaccctacgcgctcctgccgcccccccgcaggccgcagctacatctctcctcccacctcgccagtcgccaccgcgcggtgggagctcgctgaagtgcttccccccgctttgcggcagcgtcagctcagaccccttgcccgcgctctcgttgtctggcgggctcagctggtttggtcagcgtggcgaggttgtcctggccagatcctgctcccgcccgcgcacgactgggtgtgggcggtggattggctgcgcgggtcatcagatctatgccggagatctagggcgccaggtgccgaggtggaggccgtgagccggtggcgatcggagggccgaggacagggatggcgtggtggtccgggaaggtgtcgctcggcggcctgcaggacatcgctggagccgtcaacaagatcagcgagagcgtgaagaacatcgaaaagaacttcgacagcgcgctcggcctagaggagaagcgtgacgatgaagatgcatcaggatcacagacatccaactctgatagaataggattcttcaatcctgtcatggctttcatgggacacaatggtgaggaggatggcactgaagtatcagaaaagccacaatctctgaagaatctgtcagcagaggaaggaattaatagcacaccaactaagaaacatatatctgaggtagatccttcggaagtatcaggaacaacatctccaaaactgccttcaaaatcggaagaagttcatagtatttccaatgggtcacctgtttctaaggcagatgtttctgagcaatccataacaccacaaactccaacacatccttcagtagcagaagaaaagcttgatagctctactgaggcacctgcatctaaggtgggtgatgctgaagcatcagaaacatcacaatctgcaggacatccttcaacagtggaagaaaaccagcaccatcaagttagcaaacattctgatcctagtgatgaagcagagccgaatcagcttagagagtctgttcgagacttacctgatggtagtgcatcttcttcgcctactaaaatacatcaatcaggtgacaccgaaacaggggaatctattcacacaggaaaggaagatacgtctgataggaacatcttgcagtcacaaccagcagagtctgcgctagctagttcagatgatataacggaagctgaggacaatattgctcaagaatatgatgccccaaaagaacttagtggcccacaggagagtagtgatatggtagacaaaggtactcatcttgaagttaaattacatgatagcaatattaatactgaaaaaagtgaggaagaaagcaataagatggagtcaggggaatcatctgttgttgtacaggaggataatgcaatggagcaacctcaagacttaacgttgaagtccttaactgcagagcatgactcaaattcgcagaacgagtcagtgatcaattcgactgatatacctgttggactaggtgaaggtcctccaaatgattttacaaaagaagaaaagattctagaatctgttagaggcacagattctcagactctggactctgttgtttctgtcgatgagctagagaaattaagacgtgaattgaagatgatggaagctgcattgcaaggtgctgcaagacagtcacaggtatga

SEQ ID NO: 149449 - DNA, 332 bp, Zea Mays
tcctcttctgtgtggtttggtggggaggcagccggagcgctgcgaggccgatgctgctcccaccgctccagtcgtggcgcggccggcgcgcggcctccgcttgcgaggtaagggcgggcctgcacgggctcgactccgtcagcgggccccaccttcaggccgcgctggagcgcgccgaggcggcgctatacacactcgctgacgccgcggtcgccgcggcggacgccgccgcgggcgcgggggccaacgcaggccgggctgcggcggtccaaaagaacagcggctggttcggcttcatctccgaggccctcgaggtcgtgctcaaggtaatg

SEQ ID NO: 149450 - DNA, 3225 bp, Zea Mays
aaacacgagcagcaaccgtagcctgccagaagatcgcacgcccgtcgccaagcttcgtttctcccccttcccctcacctccgccgttccctctcctggacccccaaacacagcgtcccgaaatctagcctgactcctctctccctgcctgccaagaaagaaaaggcgccacgttgacatcgcggatgccgtagcgggtgggcgggcgcgcgcgcgtgccagccatgcgctcgtgatggcccggccgttccagaagatcggccacggcctcgaaaggttctcgttcaggcgccggaggtcggcgtcgtcgccgccgttgccaccactggcctcggacggcacggacgcctcctcgatggaggcgcaggcgcaggcgcaggtgcaggcgccgcctttcagcaagagggcgctgtcgaggagctgcgggtccaaggggagccgcctgtccgtggacctcccgccgccgctcgccggcggcccttcggacaggggtgcggccgggacctcgtcctcgtcctcgctcgcggtgccgcccaagcctgtccggcacgagggcccgccctcagatgcggacatcgtgagggagaagttctccaagctgctgctcggggaggacatgtccggcaccgggaaaggggtcacatccgcccttgccctgtccaacgccatcactaatcttgcagcttctgtgtttggtgagcagcgccggctgcagcccatggccgccgagcagaaatcgcgttggaagaaggagatctactggcttttgtccgtcgctgaccacattgtcgaattcgttccttcgcagcaggtcgccgagaacgggacctgcatggagataatggtaacccagcagcgccaagatctgaaaatgaacatccccgcgctgcgcaagctcgacgcgatgctcctcgaatacctcgacagcttcgagggcgagcaggagttctggtacgcgtcgaaagatgcggacgaaccggggaagggcaacgtgccgaggcaggacgacagatggtggctcccgaccgtcagagtccctcccagtggcctgtcatacgcgtacaggaaatggcttcagaaccacaaggacctcgttgcgcaggtgctcaaggcagcgatggcgatcaacgccaacattcttatggagatggaggtccctgaatcgtacatggagtccctcccaaagaatggcaagtcaacgcttggagattcagcgtacaagcttataaccgacgactgtttcgacgccgaagaacttctgcgctccgtggacttgtcggacgagcacagcatcgtcgatctgaagaaccgggtcgaagcctcggtggtcatctggcagaagaagatgacccacaaggacagcaagctgtcgtgggggcacaacgccaggcacgagaagaggggcatgttcgaagggcgggcggaaaacgtgcttctcctcatcaagcacaggttccccggcatcgcccagtcggctctggacatcagcaagatccaatgcaacaaggatgttggccttgccattctggagagctactccagggctctggagagcttggccttcacggtcatgtctcggatcgaagatgttctcggcgcggacctggccactcgagacgaccccaagaacgcagcagggttgatgaggatcgccagtttaccttgttcggacgacaccgacaaggtcgtctcggacgccaaggccgaggtggagaggatgaggaggatggagccggtcccgccggcgccgatgctgtacgacttcgtcggcccacgggaccaggacctcggtccaagggtgacgaagatctcgtcggttgcgaccaagaggttctcgtaccttgagaatttgggtgggacgagaagcccgatagctagacactagctcctatagctatatgggtgtgagtgaggctagatggatcttggattggatcatgccgccacagagactttgtaaatagcacagatgtccacaggatcatgcatggcattcgggattgagggtgccgatgtgaggtcttggcatgtttccatgaactgatcgtgagaccatagctcatgaactggttggtgttcaacgatgggcctgtgggatttgtacttgtgtaatatatttcaaaagatgagaggaaaagattgtatattttttctctagtagcgccttgttacaaattttagtcctgcaccaaaataataatagtaataatagcagatcgtttctggccagatgacacgggatgaacattaatcacatcagcatcagcaactaatttacaaaaaacacagcgaacgtttgcctaaggatgatgtaacaactgacagactaataaaagcaaaagttcaaaatattcttgacgtcgaccagctgttgctttctttgcgtatatataaagaccctagacgtcgtcagattgcgttacacaagttgctgtcttgctgacatacgcgaagaaaaaggcacaaagattccaaaccagcattctgcaagattcaaacacaagttacatcatcaggaagaggaagaccgaaacacgaactcctgtaatgtaccaacgctattccatctcacagctcctgcatacgattggagtgtgcctacaaagaggatcttggagttcaaacagagtacaggctcataatcacatatctagagcacaatctggcaatatgatcctcatatacggtagaggctactctttgccctacagattactctaatgacagctcggatccaatgcacactaggctacatgaactatgaaatcaccctgcatactagtaccatattagtgcagctgtcttgccaatgcactgcgccgtgatagaacgccgttggcatcccttaaactccgtgtcctcctgtactcgatctctgcatccgagcaagaatggccaggaagcgatttctttcttacttctatgggttttagggatatttcatctgctgtctttctgaaaagatgaccatctttcctgatacactcgtcctcagactgatgacctccttttgttcctgccaggtgaaaaaagaaacacagtaagaaattgcggaaacacaaaagacaacaatagtaggggcatatcaaatttgttcctattataatctgtctacaaatcagcctacagtatgtatttcaagccagcagattattgtttcctgtagtagcaagaaaattctaatgttacctttgaacacgtccaaacgcagaactttgtttggaga

SEQ ID NO: 149451 - DNA, 1993 bp, Zea Mays
gccaagcttcgtttctcccccttcccctcacctccgccgttccctctcctggacccccaaacacagcgtcccgaaatctagcctgactcctctctccctgcctgccaagaaagaaaaggcgccacgttgacatcgcggatgccgtagcgggtgggcgggcgcgcgcgcgtgccagccatgcgctcgtgatggcccggccgttccagaagatcggccacggcctcgaaaggttctcgttcaggcgccggaggtcggcgtcgtcgccgccgttgccaccactggcctcggacggcacggacgcctcctcgatggaggcgcaggcgcaggcgcaggtgcaggcgccgcctttcagcaagagggcgctgtcgaggagctgcgggtccaaggggagccgcctgtccgtggacctcccgccgccgctcgccggcggcccttcggacaggggtgcggccgggacctcgtcctcgtcctcgctcgcggtgccgcccaagcctgtccggcacgagggcccgccctcaggtgacggtcgttcttggaccatctaatacgctgcgagtcttgctggagaaatgattcgcgttgctgggtcgcagatgcggacatcgtgagggagaagttctccaagctgctgctcggggaggacatgtccggcaccgggaaaggggtcacatccgcccttgccctgtccaacgccatcactaatcttgcagcttctgtgtttggtgagcagcgccggctgcagcccatggccgccgagcagaaatcgcgttggaagaaggagatctactggcttttgtccgtcgctgaccacattgtcgaattcgttccttcgcagcaggtcgccgagaacgggacctgcatggagataatggtaacccagcagcgccaagatctgaaaatgaacatccccgcgctgcgcaagctcgacgcgatgctcctcgaatacctcgacagcttcgagggcgagcaggagttctggtacgcgtcgaaagatgcggacgaaccggggaagggcaacgtgccgaggcaggacgacagatggtggctcccgaccgtcagagtccctcccagtggcctgtcatacgcgtacaggaaatggcttcagaaccacaaggacctcgttgcgcaggtgctcaaggcagcgatggcgatcaacgccaacattcttatggagatggaggtccctgaatcgtacatggagtccctcccaaagaatggcaagtcaacgcttggagattcagcgtacaagcttataaccgacgactgtttcgacgccgaagaacttctgcgctccgtggacttgtcggacgagcacagcatcgtcgatctgaagaaccgggtcgaagcctcggtggtcatctggcagaagaagatgacccacaaggacagcaagctgtcgtgggggcacaacgccaggcacgagaagaggggcatgttcgaagggcgggcggaaaacgtgcttctcctcatcaagcacaggttccccggcatcgcccagtcggctctggacatcagcaagatccaatgcaacaagacacgccacattgcctcactgacgaatgccctgcatcatgcgtacctcccttctaccatgcatcttcttctttttcgtcaggatgttggccttgccattctggagagctactccagggctctggagagcttggccttcacggtcatgtctcggatcgaagatgttctcggcgcggacctggccactcgagacgaccccaagaacgcagcagggttgatgaggatcgccagtttaccttgttcggacgacaccgacaaggtcgtctcggacgccaaggccgaggtggagaggatgaggaggatggagccggtcccgccggcgccgatgctgtacgacttcgtcggcccacgggaccaggacctcggtccaagggtgacgaagatctcgtcggttgcgaccaagaggttctcgtaccttgagaatttgggtgggacgagaagcccgatagctagacactag

SEQ ID NO: 149452 - DNA, 312 bp, Zea Mays
atgattggagctttttgttttttaccccattgcaacatttcacaaatttgcgcacaccaagcaagaggggtgttcaatcgaccccaaactatggaagtgttgttacatctggaacaacacttggctgtcatgccccacttgtgtacaggcgagtccactccttcgctgtctcaacagcttcagcttcgttggatttccagtgtttcgcaatgttgtctgagagaggatcatctgggtttggggcgctcagaagtgcctgaatgctcagtagaactgtacgtatctgaagagctggactccatttgtccttaa

SEQ ID NO: 149453 - DNA, 1432 bp, Zea Mays
ggcgcgactcctcaactgaaactgtgtcattgtctgtcagtgctcgccgcgcggatctagggggaggggggccgtgcccggcgcggacgccgggatgccgatctgcgcgccgtcgtccgactcctcggcctcggcctcgtcgggcttgggcgcccgcgtctgggtgctccacgggctagcgctcggcgcggcggccgcggccgctgccgttgcgtacctgtaccggcggccgaccgggttccgcagccgcgcggtggggatcatacccgcgcgcttcgcctccacgcgcttcgagggcaagccgctcgttcccatcctcggcaagcccatgatccagagaacatgggaaagagttatgctagcttcttcgttggaccatgttgttgtggcaacggatgatgagagaattgcagaatgctgtcgaggatttggagctgatgttataatgacatcagcatcttgcaaaaacggatctgaacgctgctgtgaggcactaaagaagcttgataagcactatgatattgttgtcaatattcaaggagatgagcctctcattgaaccagagataatagatggtgtagttatgtcactgcagcgagctcctgatgcagtcttcagcacagctgttacttcactgaaaccagaagatgcattcgatacaaacagggtgaagtgtgttgtggataatctgggctacgcaatatacttttcaagagggctgattccattcaataaatcagggaacgccaatccaaaatatccatatcttcttcatcttggaatcgcgggctttgattcaaaatttttgaagatatatccagaacttccaccaacaccattacaaatggaagaggacctagagcaactaaaagttcttgaaaatggctataggatgaaggtgatcaaagtggaccatgatgcccatggtgtggatgcacccgaggacgttgagaaaatcgaagcactgatgcgaacgagaaacattcagtagaaaacgaagagaaagcaagtgctttgcattgctatcggcgttggcttggtgggatacttttggttgtgctttcccgtcttctgaatagcatgataccaagtgaagttggtgcatcacttcttgaagttttgtgcttgctaaaacgttcagtgattggatatgtcacttgcattagtcctcaatcagcagttcagcgcgcaggtggattgtatctgtacttcagtagttagtagcattactttcagtcttctttacattgaaaaacaaatcgtttctggagatgaagcaattggacagtgtaaaacaaaaggctaaagacccatccatgccgcgaggcgtgattgatataaggccagactcatcggaactttcattagacttccatttacatgtaataagttttcatatatacaatgttgatgatgtatacaattttaatga

SEQ ID NO: 149454 - DNA, 2130 bp, Zea Mays
tttactgaactatctcttatattatgaaatgtgtatgtatatgtacaacttgcttgaaacaatataatattgttacaacttataatacacccttttatcttacaactacttcaaacactggaacctggtttcctttgctttgctcttatatgtttatttactctcaaacatatatacaatcattatacattatactatgctgctaaacggatcgatacccaggcatgggcgggcgccatacactagtagtactactgtagcagttaaaatctattgaatctgtatgagatattttgaactggattttcagtatcccattggatccaaacggcgccgaagctgtctgtgcagtgtgcacatccgtctcacgtcacttgaagagtcgtgggagctcctgccccttccagaagcttccgcactcgtcgccagaccgggctcgtcgcctccaggcctcctctatccagacgcttctcacttccccttttgtctcctcccgtctcctcccccgtaccaaacaaacctcaccgagtcgcaactcgcaaggacagtgaaaacgcccaaacgagcgcgggcacgccaaccaaagcggcgaagcgcgaaggaaggaaggaaggaagcaagcaaagcagcagccatggggcttgactactacaagatcctgggcgtcgacaagggcgccaccgacgacgacctcaagaaggcctaccgcaagctcgccatgaagtggcaccccgacaagaaccccaataacaagaaggaggccgagaacaagttcaagcagatctcggaggcatacgatgtcctcagcgacccgcagaagcgcgcggtgtacgaccagtacggcgaggaggggctcaaggggcaggtgccgccgccgggcgccggcggggcgggctcaaccttcttctccaccggcggcgacgggccgacggtgttccggtttaacccgcgcaacgcggatgacatcttcgccgagttcttcggcggctccagccccttcggcggcatgggcgggagtgggatgcccggcatgcgggccggcgggtcgaggttctcctcgtccattttcggggacgatatgttcggctctgcgttcggcggcggcggcccggacgggcacggcatgcacaccggcggacgtgccgtgaaggcgccggccatcgagcggaagctgccgtgcagcctggaggagctgtacaagggcaccaccaagaagatgaagatttccagggaaattgctgacgccagtgggaagacgatgccagtggaagagatcctaacgatcgacgtgaagcccgggtggaagaagggcaccaagatcacgttcccggagaagggcaatgagacgccccacacgatcccggcggacctcgtcttcatcatcgacgagaagccgcacccggtgttcacccgcgacggcaacgacctggtggtgacccagaaggtcccgctggcggaggctctgacggggcacaccgcgcgcctggcgacgttggacgggcgcatcctgacggtgcccatcagctccgtgatccacccggggtacgaggaggtggtgcgcggcgagggcatgcccgtccccaaggacccgtccaggaagggcaacctccggataaagttcgacatcaagttcccggcgaggctctcggcggaccagaagtccggcgtcaagaggctgctcgggcagtagagcgcctcgtgttctggtgtgctgtgtgtcagacattttcgtgttggttgatcttgaactgggggatgctgccatttgcagcgtccgtgacgacgacgacgaggaggcaggccaccgagcgctgagtacagaacaagctagtggtggtatatggttgagaccttgagatgcacagcataggattccttgtgcaatcttccagacgggtggtgcttgtctgttcaccggtccatgtcgttccagccttgcaaaggtcggatggaataattattgagcacatacacgtacgttctttgtatttagtgtgagaaatagttattgcaatagcaattgtactccctccataaaaaaaaactctccttcccctaaaatatacttctttcgaggtcactgtttttatttccacattcaaataataatgaatatagtttatttccaca

SEQ ID NO: 149455 - DNA, 3423 bp, Zea Mays
atgttccagatgctgggcctccgcggggggagccccagcgctggcgaggcgacccccgtcatgagcggggacggcggcgcggtcgcgggtcccgcgcggccgctgcgcctggcgtactgcgacgagaagggcaggttcgtgatggaccccgaggcggcggcggcgctgcagctcgtgaagggccccgtcggggtcgtctccgtctgcggccgcgcgcgccagggcaagagcttcatcctcaaccagcttcttgggcgaagcagcggttttcaagtggcttcaacacatcgtccttgcacaaagggactttggatgtggagtacgcctttgaagagaactggtttggatggaactgaatacagtcttgtgttgttggatactgaaggaattgatgcttatgaccaaacggggacctatagcatccaaatattttccttggctgttctgctgtcgagcatgttcatctacaaccagatgggaggtatagatgaagctgcattggatcgtctctcactggtcacggagatgacaaaacacatacgtgtcagggcctcaggtggaaggtccactgcatctgaacttgggcaattctctcctgtctttgtttggttgttgcgagacttctacctggatttgacagaagacaacagaaaaattactccaagggattacctagaactagcactaaggccagttcaaggtggaggaagggacatatctgcaaagaatgcgataagggagtccatccgtgcccttttcccagatagggaatgctttactcttgtgcgacctgtgaacaatgagaaagatctccaacgcctggatcaactttctctgagtaatttccgaccagagttcagatcgggtctggatactttcacgaaatttgttcttgaccgaacaagaccaaaacaacttggagctagtacaatgacaggacccatcctcgctggactgacacaatcatttcttgatgccattaatagcggtgctgtccctacgatatcttcatcatggcagagtgtggaggaggcagaatgtcggagggcatttgattctgctgtgggcacttacaattcttcttttgaccataaaacatatatagaagaggactctttgagagaagcacatgaagatgccatgaggaaggctatcagtgtttttaatgcttctgctgttggtgctgggtcagctcgtttaaaattcgaaaagcttcttcacagttctctcaaaaaggccttcgaggactacaaaaggaatgcttttctggaggctgacttgcaatgttcaaatagagtacagaacatggaatcaaaggtgcgagcagcatgtaaccgtccggatgcaaagttagatgacataatcaggctccttgatggcctgctcacagagtatgagtcaaaggcctatggtcctggaaaatggaaaatgcttgtcacattcttacagcaatgtatcgctggccctgtcctggactttttcaaaagacagttggagcatatagatgctgaaaggaatgccctgagattgaaatgcaattcaagcgatgataagttggcattgctcaggaagcaacttgaagcaagcgagggtcacagagctgagtatgtgaggcgctatgaggaagttctgaatgataaacagaaaatttcgaaggattactctactcgtataactgaacttcagatcaagagtagcaagttggaagaacggtctttgagcttgtcttcttctcttgaaaccgccaaacgggaatccaatgattggaagagcaaatatgatcatggtattttgcagcaaaaggcagatgagagcaaattaaaatcccaaattgcttctctggaatctagggtgaatatcagcgagggcaggttgtcggcaacacgtgaacaagctgattctgctcaagaggaagcatcagagtggaaacgtaaatatgaagttgctgttagtgaggccaaaacagctctgcagagagcggctgtagcacaggaacgcacaaataagaaagtgcaagagagggaagatgctttgaggtcagagcttgctaaccagctatctgagaaggaagaggaaatcgccagattacatgcaaaacttagtcaaacggaaattcatgctaccagtttgatctcgaggcttgaggccaccgaagcaaagttgaagagccacgagtcggattcgttggctttgaaggaggagatcagattattgactgataacctggagtctgttagaagtgaagcgatgtcgcgtgagaaggaagtcaggatcctggaacaggaaaagaaccatcttgaggagaagtatctgtcacagtgcaaaaagtttgatgagatagatattagatgcaaggaagctgaaagggaagcgagacgagcaacagaattggctgatgtagctcgtacagaagcttcttctgctcaaaaggataagggggaagctcaacggctcgcaatggagaggcttgcactgatagaaagaattgagcgacaggttgaagctctagaaagagacaaggctaagatggtggaagagatcgagagacttcatcagtcagagaaggatgctgtgtccaaggtcgcattgctcgaaagaagcgtcgatgagcgggaaaaagagattgatgagatgttgaagcggaataaccagcaaagatccagcacggttcaagtgcttgagagtctgctggcaacagaacgtgaagcatgcgctgaagccaataagagggcagaggacttgtcattgatgttgcaagcaactcaaggcaaactggacatgctccaacaagaaaccacacttgatagcaagctcaagacctctgcaaggcgcttaaggggtgaaggtacagagtctgtacatgatatggatatcgacgaagacaatggtaggcgccggaaacgatcaaaaagcacaacaagccctttgaagagcaatcacacagaggatggtggatctgtatttattggcgaagatacttgcaacgggagtcagcaagggacagaaacagaagactacaccaaatttacagtgctgaaactgaagcaggagctgaccaagcgcgggtttggtgcccaactcctccagttgaaaaatcccaacaagaaggatattgttgccctgtatgaaaagcatgtcgtcggcaagtagtacttgtatgctttctagacttccatgtagtgttcaaacatgaatttacacgatcgtgattgaagcgaaacaatgcatgtaacttaatttaaatctcctgtatctgtatttctccaatggcgcagttcattttaacacatcggcgaatacctgtatcattttagcacatcggcgaatgacataactactgtagagtacagatggctggtcagactgaacctcttctttttcgtatatgtgggtggtttgagtgtcgagtaacaaaaaaaaaaa

SEQ ID NO: 149456 - DNA, 254 bp, Zea Mays
atttaaaatactatttttctaaaaataaggaaaaccatatgagtgcttttcatatttcaaacatctaccaaacaaataaatcaattaaaataaatatatatctattgcttcataatcgattttgagtatgtattaaaaatttgatctcctaaactttatcttggatttggattttaaaatttgtaaatcaagagaggatgagaattgggatttaacccaaaggtacaattttagaatttaagaaaagagaaaaa

SEQ ID NO: 149457 - DNA, 564 bp, Zea Mays
gattacggactcaatagcgccatgagacaatactgagagcagggggaaatcgagtgattcctggtaagaaagagaaacccgttgtccccattgacggtcgctgctccactgtgttccttccatttctcgccggaattagagcttaaccgtggaacaacatgccgccgtttgggcgaggcctctgcgcactccaagctctactccggggatgacagcctcgtcatgctcgtcatcgacacaaaccacttcttctgggctgccacggcgctccccttcaccgactccttcgcgcgctcgaactccctcctgctgttggaccacgtcaaccgtgtggttatctcgtggcgggagtcaactcgtgtgcttgcaccctggattctagcgacgccagccctccggtggtgtggccatcttggacaccttcgccaggacaagccgcaaggcggagttctttgctctggatgcgcgcgccagtcgaggtaccgacgacggaggtggcggctgttgccgcaacggactctgtggctgttagattcactttggcggccacgatttgaggtgagg

SEQ ID NO: 149458 - DNA, 474 bp, Zea Mays
atgaggaagagcctggggctcaccgcccacgacgtggagccatccgggatgacgcttcaccggtgggggaacacgtccgcgagcagcctctggtacatgctctcctacatggaggcgaagtggaggctcaagcgcggggacaggatgctcatggtcaccttcggctccagcttcaagtgcaacagctgctactgggaggtgaccagggacctcgccgacgccggcgcgtgggaggactgcatcgaccagtacccgccggagacgctcgtcaacccctacatggataagagagacgaggaagacgacggccagggaagggagaatggaagacgctcgaagacggcggccagagaagtaacagagcgaacggagcgagggcacgacgggcacacgaaaaatgctaatgaccatcaatgcagcgcgatgccattttttaaaacggtcgagattataatgccacggattcaattatga

SEQ ID NO: 149459 - DNA, 277 bp, Zea Mays
gggctttgaactgacttccaagttggaaatactataattcggatggagaagttccttagcctattatgaaatactctctggacatcaagggcaagcactattatgagatggctcgactttctgacgagaaatctgctagggagactatcaagcctaagaaaacagagtcaaaaatgaattttgccttgacctgcgcaaacaagatgcaggaaatgtatctaatctcttgagactccatgttaaacagttggtaaatattccatgtaaaatattggtt

SEQ ID NO: 149460 - DNA, 1173 bp, Zea Mays
gaaacatggtattaaaatgaactcgtctctagcattgatccaagaaaaaaaaaacacgcacccgcgtccgcgtgctctctgccccctgcccccctcccatctgcgccgccctcctcatccaccgcccgtcccgccgccgccagcccaaggccaggcatccgccagcctctcgcaccacgcgtatcgcgtgcccgcccgaccggctcgtggcgatggcgtaccgggcggacgacgactacgactacctattcaaggtggtgctcatcggggactccggcgtcggcaagtccaacctgctctcgcgcttcacgcgcaacgagttcagcctcgagtccaagtccaccatcggcgtcgagttcgccacccgcagcatccacgtcgacgacaaggtcgtcaaggcccagatctgggacaccgccggtcaggaaagataccgtgctatcacgagcgcgtactaccgcggagcagtaggggcgctcgtcgttctacgacgtcacgcggcacgtcaccttcgagaacgtggagaggtggatgagggagctcagggaccacacggacgccaacatcgtgatcatgctggttgggaacaaggcggacctgcgccacctcagggctgtcccgaccgaggacgccaaggcctttgccgagagggagaacgccttcttcatggagacgtcggccctggaggcgatgaacgtggagggcgccttcaccgaggtgctcacccagatctaccacgtcgtgagcaagaaggccctcgacatcggcgatgaccccgcagcgcctcccaggggccagaccatcagtgtcggcggcaaggacgatgtgtccgcagtgaagaagtctgcctgctgttcgtcttagcttggaagggggtaggacatgtacttgggttggttggttacttgtgcagtagagagcgcaggacgttatttgcagtcatggtccttgagctgtattcatgtgttaccagctgtctcgttgatttttgccatttgatacatttaattcattcaggaattcagcctgcgggtatagcttagggacatggaagtgtgcggctatcgtatttttttcatataacagagccttctctgcattgttgctttcatttcttgtgtatatctgtatgatgtcgcttctctttatcaacctagctgcattgcttcaaca

SEQ ID NO: 149461 - DNA, 1158 bp, Zea Mays
gaaacatggtattaaaatgaactcgtctctagcattgatccaagaaaaaaaaaacacgcacccgcgtccgcgtgctctctgccccctgcccccctcccatctgcgccgccctcctcatccaccgcccgtcccgccgccgccagcccaaggccaggcatccgccagcctctcgcaccacgcgtatcgcgtgcccgcccgaccggctcgtggcgatggcgtaccgggcggacgacgactacgactacctattcaaggtggtgctcatcggggactccggcgtcggcaagtccaacctgctctcgcgcttcacgcgcaacgagttcagcctcgagtccaagtccaccatcggcgtcgagttcgccacccgcagcatccacgtcgacgacaaggtcgtcaaggcccagatctgggacaccgccgataccgtgctatcacgagcgcgtactaccgcggagcagtaggggcgctcgtcgttctacgacgtcacgcggcacgtcaccttcgagaacgtggagaggtggatgagggagctcagggaccacacggacgccaacatcgtgatcatgctggttgggaacaaggcggacctgcgccacctcagggctgtcccgaccgaggacgccaaggcctttgccgagagggagaacgccttcttcatggagacgtcggccctggaggcgatgaacgtggagggcgccttcaccgaggtgctcacccagatctaccacgtcgtgagcaagaaggccctcgacatcggcgatgaccccgcagcgcctcccaggggccagaccatcagtgtcggcggcaaggacgatgtgtccgcagtgaagaagtctgcctgctgttcgtcttagcttggaagggggtaggacatgtacttgggttggttggttacttgtgcagtagagagcgcaggacgttatttgcagtcatggtccttgagctgtattcatgtgttaccagctgtctcgttgatttttgccatttgatacatttaattcattcaggaattcagcctgcgggtatagcttagggacatggaagtgtgcggctatcgtatttttttcatataacagagccttctctgcattgttgctttcatttcttgtgtatatctgtatgatgtcgcttctctttatcaacctagctgcattgctt

SEQ ID NO: 149462 - DNA, 709 bp, Zea Mays
gaaacatggtattaaaatgaactcgtctctagcattgatccaagaaaaaaaaaacacgcacccgcgtccgcgtgctctctgccccctgcccccctcccatctgcgccgccctcctcatccaccgcccgtcccgccgccgccagcccaaggccaggcatccgccagcctctcgcaccacgcgtatcgcgtgcccgcccgaccggctcgtggcgatggcgtaccgggcggacgacgactacgactacctattcaaggtggtgctcatcggggactccggcgtcggcaagtccaacctgctctcgcgcttcacgcgcaacgagttcagcctcgagtccaagtccaccatcggcgtcgagttcgccacccgcagcatccacgtcgacgacaaggtcgtcaaggcccagatctgggacaccgccggtcaggaaaggtacgacccccaatcccccatcccccagatccacctgtgctctgcgaggcgcgtcgacccctttatttcccggtatctcatctctgatcgagtccactcgttaccgactgccatgtctgcgtcctagtatggatttctgtagcttagtttggtcggtgccccctcttaacctaattgctgttggcctggtccattgcacatggacgcaaattaactgcctcgatcaccattagaagaaaaaatggaaagaatctgcgctcgttcaattcaattcacatc

SEQ ID NO: 149463 - DNA, 696 bp, Zea Mays
ggccccacccctgttgactattcatcttcttaacggttcctcctgccgttcgttcttcctcccgtccagatcgtgcacgtcgcgtttccttcggcaaaaccgccagcccgctcccttcggcgcccacgtcgcgcacctgcggagccgctagctcccttctctcctgtctcacgccacctcccctctccatcttctccccatggacaccagcagcgggagcctttccccatggagccaacacctctccctggtgtgttcttccacccccagcaccaggagtggccccatgcatggcgtccctcctctccctggttggatgcgcgcaacaccttcttcctccctttctcttccccacacctgcgtctcgcctcgcagccgcccggatcgccatcgtccttcgtgtcggcctcgtcgtgccctaccgtcgacgtcgttcgcttcctcgacgcgcccaccgttcatgctcgtcttgctgtccaccggtgcacggtcgtccggctcggctgcccagcgcggccaacccagcgtggtggccgacgtagctcgcctggcgcggcggcgtggccggcctgcctgcacggcgtgcagcctgcgcggctagcccagcgtggcggccggcgtggctcgcctgcgcggccccggctcagcctcgtcgcgagctcgcctcgccatctgtcgtcgtcggaaggtgagaat

SEQ ID NO: 149464 - DNA, 675 bp, Zea Mays
atgaacagggcaccaaaaacttgcacaggaagaatccttatctctcgggcgctcaagacacagaacacgggtacgatatacctctcacatgaaaaggttgggcctggaagccttgaaagtggtccggagcttcctggtaggcggcctgaccttgcggtacacaagcgggaacttgatctcggagttgtggaactgcttggtgttgtccctcttgcacagcttgaagtggaccgtcgctgtcttgatgatctgtatgcagggggacctcacgcggtggcgggaggccatctcgttgtacatctgctccactgcgccgttcagggtggtgtcgcggtactccttgtacatgttgtggtaaccagtcctgctctggtagcgcagccagatgccatagttcttgatggtggtcgggttgcgctcaaagatctcgttgatggcaagcatctggccattgctcttcttcaccttcttgagctttctcaggaagtacctgaacttggacttggcgcgaacctcgttggtggcccagagcttcatgcggtagatcttggggtgctcatcggttggggtcggcagcgcgcgacccaccacctggtactgatggaacctgtgggcgaccatttcggcgagctcgcgtggccggagggacgccgaaggtctcctggtagaacctaa

SEQ ID NO: 149465 - DNA, 1355 bp, Zea Mays
gtttttggattcatgcaagaaattgcgatcacggagagtgggacccagcgagtttcttgtttgtttatgcacatcactgtcgctgtcccgttgaaaaaaaaaagaaagcaacggcgggatatcttgcaatccaaccaaccaaccaaaatcgtggctgcggctgtggacaatcggcagcttgcgagtagctccggtacggaggggatcatggaggaggggcggcaactggaagcggcggcgttcggttttccggcgccggtgcagccgggggccacgcgcgtggggtggatcggcatcggcgtcatgggcggcgccatggccaagcgcctcctcgcggcagggtacgcggtcaccgcgtacgctcgcacgccgtccagggcggagagcctcgtcgcggcgggcgcgagcctcgcggactcgccggccgccgtggccgccgcgtccgacgtggtgttcaccatggtcgggaaccccggcgacgtccgcgcggtggtcctggacccggccgccggggccctcgcgggcctccgccgcggcggcgtgctggtggactgcacgagctcctccccgtccctcgcgcgcgaggtcgccgcggccgcggccgcggcgggctgccacgccgtcgacgcgccggtctccggaggcgacgtgggcgcgcgggacggcacgctggccgtcttcgccggcggcgacgaggccgtcgtcgcctggctcgcgccgctcttcgccagcctcggcagggcgacccgcatgggcgcgccgggcagcggccagagcagcaagatcgccaaccaggtcgcggtggccggcgcggtggtgggcctcggcgaggccgtgtccttcgcccgcgcggcggggctcgacgcgccgctgttcctcggcgcggtgtccaggggcgcggcctggtcgcgcgtcatggacgtcttcggcggccgcttgctccgccgcgagttcgcgtccgggggcagcgtgcggtacatcgtcaaggacctcggcatggcgctggaggtcggagacggcggggaggaggaggtcaacgtgctgcctggagcggcgctgtaccggcagatgttctcggccatggtggccaatggcgacggggacctgagcttgcagggactgatcaccgttatcgagcgcctgaacggcattgcaaagtagcgaaggctgcagcaggcaaggtgctgcttttttgttgatggagactgcaggaaaggtgttcgccggaatgcaacactggacccgaagacgcctgagcttgtgacatggacttgttttttgtattcaaaacactgtttcgagcttgatttgcgtttgtaatttcgcccctaaataaaactttgctttcaacgtgt

SEQ ID NO: 149466 - DNA, 714 bp, Zea Mays
tcgcgtcgcccaccacccccacgtcctccctgtctctctcccccgtcttaccaaccaccagtccaccacccgatcgcaacgtttccagccaaaccaacgcacggacgccctctcccgcaccagggcagcggcagcggagcggcggccaatggccatcgaggcggacacggcggcggcgagggcgggctcggtttcggagacggcgcccatatccccgaccgatgcggtggcgcctgcgggtccggcgcgctcgcgcgggtggctgaggaagctcgtctccagggactacaacctgccccggagcggccggcgctggaggctggccgtcccatccgccgccggcgcgtccaggctcgcgtcgtcgctctcgcgctccctcaggtggaagcgccggctcccgggtctcccctccctcaccctgcgcagcggctccgcggccgccgtggtcgacgccgtcgcgttccgcgtcatgtacgtcgtcgaggccgtcgtgctgggcctcgcgctctcctgcttcttcctctgctgcggctgccacctctaattgagctgcccgcttttatttctcccgtctcttcacttcacttcaccgctcggccttggcgtgtaccaaatgcccatcgttttgttttcccctttcgatgttcttcctgtacatctcctgcttctggaacaaagcaatatgaaaacttgcggtgcctatcgggtgttgat

SEQ ID NO: 149467 - DNA, 1740 bp, Zea Mays
atggagtccttcagcgacgccgacagatacataccccaagagatcatcggcagaggcagctacggggtcgtttgctcagctattgaccggcgcaccggcgagaaggtcgcgatcaagaaaataggaggcgtcttcgatgacctgtccgacgccgccaggaccctccgggagatcaagctgctccggctgttacgacaccctgacattgtcgagatcaagcatgtcatgttgcctccggctaggagggactacaaagacatttatgtcgtgtttgaattgatggaggccgaccttcaccaggttatcaaggctaaccctgacctgacgacagagcaccaccagtactttctctatcagatgctgcgtgcgttgaagtatatgcatgctgctaatgtttatcattgggatttaaagccaaaaaatatattattaaatgctgactgcaaactcaaaatatgtgactttgggctagcaagggtcgcgtttgatgactctccaaccacagttttctgcacggactacattgctactagatggtacagggctcctgagctatgtggatctttcttcagcaagtattcaccggctattgatatgtggagcattggctgcatttttgcagagattttgactggggagcccttattccctggtaaaaatgtgtttcaccagttcactttgatgactaatctcctgggcacaccatcaacagatactatttcacagattcaaaatgagaaagcaaggaagtttctgagctgcatgaggaaacaaccaatacccttttcagagaagttccctggtgcagatccttcggctctcaagctcttacaaaggcttctagcatttgatcctaaggaccgaccaacggctgaagaggcgttggccgatccctattttgaaggcattggggaagtggagagggaaccatcctgtcagccaattccgaaaatggaatttgagtttgaagaaaagtttaccgaagaggacgtcaaggaacttatattcctggagatactgcagtaccatcctcaacttctgaaggattacaagaatagctctgaaaaaacgagctttctatatcccagtgctgttgacaagtttcataggcaattcactagcctagaggaaaatagagggagtaatgtcatgcttgtcaggaagaatgcttctcttccaaggacaacaaccgttcactccactccaattcctgcaaaggaaggtccaacagcaacctcccaggctgctcaaaggattccagcagccagaccaggaagagtggtaggcccagtactaccattcgagagcgcaagcgtcactgatcaacacatcgcgcgacaggtggcaaggaacccagccgttcctccagcaaccaacacctcgtcagcctactgctaccacctgaaaccggacagcgccgacaggcaggagcaacagctagagcttgaggaagaccatatgcagtataggacagggcagcatcccatggatgccaaggggcttgcccaaagcgacctaacagacagggccaacctccataggagcccgctgcacggcgttgctcccttcaaaggcgtcgcagcggtcgctggtgttcttcaccgaaagagcgaaggatgcccgatgactggtatgttggatgagctgcagcagatctgcaacgggatggtgaaactggttcagttaacgctaggcctcgagctcatgtttctgaactcgaaggaatttttggaagcttaa

SEQ ID NO: 149468 - DNA, 2163 bp, Zea Mays
atgtggctctacgtaggaaaaaataattcaatcgagtctcatttcataaaaaaaatttggtcaaaaaattatacaccatctcgctcaagtgactcaaatatactaaacggtactgagctgtcttataatataaatttgatttactgttagaatatgatgttttatgagtgcactaaattctataaaatatatttatttttaaattataagatatttttataggtctgctcttagagagagctaaaaaagagagaggctgtctgaagaaaaatccataaccaacgcaaaatcccgggcgcccaatcagccttctccgcggagattcctagcctcagccagagctacctcatctgcgtgaggctccggtggcgccaagtgttccggcatcccggacgcaccaatggcatccgagcaacagatcttttctgcaacaacgcttcgcgtcgcggcggtgtttccctccatctgctctgctctttaaatacctccgtcgtctcctcgtctccacagcatctcaagtcttcacactcctcgccatcacataaaaccagtgcaagcagaagcagcgcaatggcgagcagcaccatggccctctcctccacagccttcgccggcaaggcagtgaacgtgccgtcgtctctcttcggcgaggcccgcgtgacgatgcgcaagacggcggcgaaggcaaagccggcggcgagctccggcagcccgtggtacggccccgaccgcgtgctctacctgggcccgctgtccggcgcgcccccgagctacctgacgggcgagttcccgggcgactacggctgggacaccgcggggctgtcggcggacccggagacgttcgccaagaaccgggagctggaggtcatccactcccgctgggccatgctgggcgcgttgggctgcgtgttcccggagctgctcgcccgcaacggcgtcaagttcggcgaggccgtgtggttcaaggccgggtcgcagatcttcagcgagggtgggctggactacctcggcaacccgagcctgatccacgcgcagagcatcctcgccatctgggcctgccaggtcgtgctcatgggcgccatcgaggggtaccgcgtcgccggcggcccgctcggagaggtcgtcgacccgctctaccccggcggcagcttcgacccgctcggcctcgccgacgaccctgaggccttcgcggagctcaaggtgaaggagctcaagaacggccgcctcgccatgttctccatgttcgggttcttcgtccaggccatcgtcaccggcaagggcccgctcgagaacctcgccgaccacctcgccgaccccgtcaacaacaacgcatgggcctatgccaccaactttgtgcccggcaagtgagggggtggaggcgccaccgcccaccggccaccgctgcggatatctaggtgttcggatgcacgtgagcgcgcactggttccagtttgtaccatgatgtaaattacttaccgtaccagggttcaatcggcaaggaagaattgttgtgttcactgtcttgggcagtctcttggtccaatatgaatcaacttacacagcatctccaaaaacttctaaaattactagctgaatgcccgtgcgttgcaacgggaatatataataccagtatactacgataacttatatacaaaatgtatgttatatcgttatgagaaaatgtttcataaccaatttatgattctggtcatacataaattttgttatttatagtctatctgtttcaccactacattgcaaccatcagtatcatgcagacttcgatatatgttacgatttgtatggtctcattattggagagcacgttccacacataccggaagaaattttctcgtacatcgttagtcatcagacacgtaccaccatacacttttgcttaaacaaaaatgcaagtgtgtgtttgcgaagagaattaaaggcaagtcgacacaaaagctaccccaacggtggcgaggatgacgaactggtcatttttgtcggtcctcccctgcgtcacctctggcgccaagatgacgccatagtcctcgatatagtaatcgtcgaacgcgcgcgacataccgagtactgatgactcttggctgggctgtaaaacgaagtgcaccccgggctcatcagcaaggtagtacccctggtcgttgcact

SEQ ID NO: 149469 - DNA, 1676 bp, Zea Mays
ataaccaacgcaaaatcccgggcgcccaatcagccttctccgcggagattcctagcctcagccagagctacctcatctgcgtgaggctccggtggcgccaagtgttccggcatcccggacgcaccaatggcatccgagcaacagatcttttctgcaacaacgcttcgcgtcgcggcgcatctcaagtcttcacactcctcgccatcacataaaaccagtgcaagcagaagcagcgcaatggcgagcagcaccatggccctctcctccacagccttcgccggcaaggcagtgaacgtgccgtcgtctctcttcggcgaggcccgcgtgacgatgcgcaagacggcggcgaaggcaaagccggcggcgagctccggcagcccgtggtacggccccgaccgcgtgctctacctgggcccgctgtccggcgcgcccccgagctacctgacgggcgagttcccgggcgactacggctgggacaccgcggggctgtcggcggacccggagacgttcgccaagaaccgggagctggaggtcatccactcccgctgggccatgctgggcgcgttgggctgcgtgttcccggagctgctcgcccgcaacggcgtcaagttcggcgaggccgtgtggttcaaggccgggtcgcagatcttcagcgagggtgggctggactacctcggcaacccgagcctgatccacgcgcagagcatcctcgccatctgggcctgccaggtcgtgctcatgggcgccatcgaggggtaccgcgtcgccggcggcccgctcggagaggtcgtcgacccgctctaccccggcggcagcttcgacccgctcggcctcgccgacgaccctgaggccttcgcggagctcaaggtgaaggagctcaagaacggccgcctcgccatgttctccatgttcgggttcttcgtccaggccatcgtcaccggcaagggcccgctcgagaacctcgccgaccacctcgccgaccccgtcaacaacaacgcatgggcctatgccaccaactttgtgcccggcaagtgagggggtggaggcgccaccgcccaccggccaccgctgcggatatctaggtgttcggatgcacgtgagcgcgcactggttccagtttgtaccatgatgtaaattacttaccgtaccagggttcaatcggcaaggaagaattgttgtgttcactgtcttgggcagtctcttggtccaatatgaatcaacttacacagcatctccaaaaacttctaaaattactagctgaatgcccgtgcgttgcaacgggaatatataataccagtatactacgataacttatatacaaaatgtatgttatatcgttatgagaaaatgtttcataaccaatttatgattctggtcatacataaattttgttatttatagtctatctgtttcaccactacattgcaaccatcagtatcatgcagacttcgatatatgttacgatttgtatggtctcattattggagagcacgttccacacataccggaagaaattttctcgtacatcgttagtcatcagacacgtaccaccatacacttttgcttaaacaaaaatgcaagtgtgtgtttgcgaagagaattaaaggcaagtcgacacaaaagctaccccaacggtggcgaggatgacgaactggtcatttttgtcggtcctcccc

SEQ ID NO: 149470 - DNA, 1186 bp, Zea Mays
atcccgggcgcccaatcagccttctccgcggagattcctagcctcagccagagctacctcatctgcgtgaggctccggtggcgccaagtgttccggcatcccggacgcaccaatggcatccgagcaacagatcttttctgcaacaacgcttcgcgtcgcggcggtgtttccctccatctgctctgctctttaaatacctccgtcgtctcctcgtctccacagcatctcaagtcttcacactcctcgccatcacataaaaccagtgcaagcagaagcagcgcaatggcgagcagcaccatggccctctcctccacagccttcgccggcaaggcagtgaacgtgccgtcgtctctcttcggcgaggcccgcgtgacgatgcgcaagacggcggcgaaggcaaagccggcggcgagctccggcagcccgtggtacggccccgaccgcgtgctctacctgggcccgctgtccggcgcgcccccgagctacctgacgggcgagttcccgggcgactacggctgggacaccgcggggctgtcggcggacccggagacgttcgccaagaaccgggagctggaggtcatccactcccgctgggccatgctgggcgcgttgggctgcgtgttcccggagctgctcgcccgcaacggcgtcaagttcggcgaggccgtgtggttcaaggccgggtcgcagatcttcagcgagggtgggctggactacctcggcaacccgagcctgatccacgcgcagagcatcctcgccatctgggcctgccaggtcgtgctcatgggcgccatcgaggggtaccgcgtcgccggcggcccgctcggagaggtcgtcgacccgctctaccccggcggcagcttcgacccgctcggcctcgccgacgaccctgaggccttcgcggagctcaaggtgaaggagctcaagaacggccgcctcgccatgttctccatgttcgggttcttcgtccaggccatcgtcaccggcaagggcccgctcgagaacctcgccgaccacctcgccgaccccgtcaacaacaacgcatgggcctatgccaccaactttgtgcccggcaagtgagggggtgttcggatgcacgtgagcgcgcactggttccagtttgtaccatgatgtaaattacttaccgtaccagggttcaatcggcaaggaagaattgttgtgttca

SEQ ID NO: 149471 - DNA, 109 bp, Zea Mays
gaagttattattataccaacttctagtgtttccattgaattcaaggagtcataatcaagcccaaaaaagaaagctactgcaaaatgtcgtcatcattcctgaatgctgg

SEQ ID NO: 149472 - DNA, 1972 bp, Zea Mays
acatcactgctcactctgcactctcgcgggatggagcttggcctagcgctccggctcgtcgcgccgccaccgctgctgccgtgtctctcccgtagagctctttccctaccaccggattttgtttcctcgcgtgtgcttcgaggaagacgcatccatgcctcgagactgaagcatggagctggggttgtgtgcaatgcgattatgacctattcaggagtggaagaggaggagatggtggaagaagaaatggaagaggaggctgaaccggcggtgagcacaaggccgcgcctggagctcatcgagaagccggaccggagcctggcgctgctggatgagtacgagtcggaggaactgggcacctctctttgcgccaatcatcgtagcggttatgttgctgtattggggaagccaaatgttggcaagagcacacttattaaccaaatggttggtcagaaactttcaattgtaacagataaaccgcaaacgacaagacatcgcattcttggtatatgttctgaaccagagtaccagattatactttatgacactcctggtgttattaaaaaggagatgcataagctggacagtatgatgatgaagaatgttaggagcgctatcggcagtgcggactgtgtgcttgttgttgctgatgcttgcaaaactcctgaaaagattgatgaaatgcttgaagaaggtgttggaaacaaagatattggacttcctgtactgctggtattgaacaagaaagatctcataaaacccggagaaatcgcaaagaaacttgagtggtaccaaaaatttactaatgttgatgatgttataccaataagtgctaaatttggtcatggagtggatgatatcaaggagtggatattgtcaaagctccctctgggtcctgcttactaccccaaggatatagctagcgaacaccctgagagattttttgttggtgaaatagtgagggaaaagatttttgttcagtacaggcaggaaattccttattcatgccaggttaatgttgtcagttacaaaagtcggcctgctgccaaggacttcattcaagttgagatacttgtggagaaagaatcacaaagaggcattatactagggaaggatggcaaaagcataaagatgctggcaaccgcatcgaggcttgacatcgaggactttctacagaagaaagtctaccttgaggtggaggtcaaagtgaaggaaaactggcggcaggacgagcgactcctgaagcggtatggctacggcggcgagatccaagcgctgtgactgtgactgtgactatgaccggtgcgctctagctcactgtcagctgccgcgagcgtggaatgacctggttttttttcaattcctctcgtgtgttgttgttgtcgatgcgaatgagtagcagttatttaacctggtgtcgaactcaactagcagctcagttgtgttaattagtcagcaagttatgtgctctgatcctgctgttgttgtcagcggaactggttttgccgcagacaagtcagcatggttgcgctctctgtagcagtctgtgtgaatagaatcacgggggagttcagacatcagagggactgaacagccgagccaagccacaagtgcatgtacaagtcgtgtccttcgggcggcggcgggtccaggtggaggcgcgccgtgtgccggtgccctgcgccggccgtcgtggatacggtgtggcatagcgagcacgaccggttggggctgactgaccgtgggaggcggtggagtatgctgatacacgtcgggtctgccgcagcattgacttggctaccttgagcagctcctctgttgtccaaacaaaaaaactcaacttctccacagaccacatgacagctgggatggttaaccgagtgactgacgtatttataagccggaccggccctaccgaatagccgccatatgtgtgcactgcagattttttttatttacgtacattttgtct

SEQ ID NO: 149473 - DNA, 2011 bp, Zea Mays
cttcttatccccaatggcggacgcacgtcgacacatcactgctcactctgcactctcgcgggatggagcttggcctagcgctccggctcgtcgcgccgccaccgctgctgccgtgtctctcccgtagagctctttccctaccaccggattttgtttcctcgcgtgtgcttcgaggaagacgcatccatgcctcgagactgaagcatggagctggggttgtgtgcaatgcgattatgacctattcaggagtggaagaggaggagatggtggaagaagaaatggaagaggaggctgaaccggcggtgagcacaaggccgcgcctggagctcatcgagaagccggaccggagcctggcgctgctggatgagtacgagtcggaggaactgggcacctctctttgcgccaatcatcgtagcggttatgttgctgtattggggaagccaaatgttggcaagagcacacttattaaccaaatggttggtcagaaactttcaattgtaacagataaaccgcaaacgacaagacatcgcattcttggtatatgttctgaaccagagtaccagtttgcagattatactttatgacactcctggtgttattaaaaaggagatgcataagctggacagtatgatgatgaagaatgttaggagcgctatcggcagtgcggactgtgtgcttgttgttgctgatgcttgcaaaactcctgaaaagattgatgaaatgcttgaagaaggtgttggaaacaaagatattggacttcctgtactgctggtattgaacaagaaagatctcataaaacccggagaaatcgcaaagaaacttgagtggtaccaaaaatttactaatgttgatgatgttataccaataagtgctaaatttggtcatggagtggatgatatcaaggagtggatattgtcaaagctccctctgggtcctgcttactaccccaaggatatagctagcgaacaccctgagagattttttgttggtgaaatagtgagggaaaagatttttgttcagtacaggcaggaaattccttattcatgccaggttaatgttgtcagttacaaaagtcggcctgctgccaaggacttcattcaagttgagatacttgtggagaaagaatcacaaagaggcattatactagggaaggatggcaaaagcataaagatgctggcaaccgcatcgaggcttgacatcgaggactttctacagaagaaagtctaccttgaggtggaggtcaaagtgaaggaaaactggcggcaggacgagcgactcctgaagcggtatggctacggcggcgagatccaagcgctgtgactgtgactgtgactatgaccggtgcgctctagctcactgtcagctgccgcgagcgtggaatgacctggttttttttcaattcctctcgtgtgttgttgttgtcgatgcgaatgagtagcagttatttaacctggtgtcgaactcaactagcagctcagttgtgttaattagtcagcaagttatgtgctctgatcctgctgttgttgtcagcggaactggttttgccgcagacaagtcagcatggttgcgctctctgtagcagtctgtgtgaatagaatcacgggggagttcagacatcagagggactgaacagccgagccaagccacaagtgcatgtacaagtcgtgtccttcgggcggcggcgggtccaggtggaggcgcgccgtgtgccggtgccctgcgccggccgtcgtggatacggtgtggcatagcgagcacgaccggttggggctgactgaccgtgggaggcggtggagtatgctgatacacgtcgggtctgccgcagcattgacttggctaccttgagcagctcctctgttgtccaaacaaaaaaactcaacttctccacagaccacatgacagctgggatggttaaccgagtgactgacgtatttataagccggaccggccctaccgaatagccgccatatgtgtgcactgcagattttttttatttacgtacattttgtct

SEQ ID NO: 149474 - DNA, 574 bp, Zea Mays
gagcgccgcgccgccgcctttcttcgctgttgttccccaaagcccatggggctgccggcggagcagtggtactgctaccacgaggagggcggcgcgtcgccgtacggcgcagccagcaaccccgatcgactgcacgctgtcgctcggcacgccgtccacgcgccgggccgaatcagccggcgtcggcgtcgccgccgccttgatggaggagccccgccaaggctctccgccccggcggtgcgccaactgcgacaccacgtcgacgccgctgtggcggaacggcccgcggggacccaagtcgctgtgcaacgcctgcgggatccggtacaagaaggaggagcgccggcgacgtacgagtgcggcgggtacgctcgaccgccgcgcgccgccgcagcagcagtggggatgctacggcccgggcgcggggaagtcggcggcgtcctacgggatgtacgatggcgacgtcggcgtcgtggccgtggacgggccctgcctgtcgtggatgctcgaagtcgtaccctcctcgccggcgttcgccgcccgggagaggcgcactctgtccccgtactactag

SEQ ID NO: 149475 - DNA, 119 bp, Zea Mays
ttttttttttgaccaaaagggcagtgccccctatttcattaaaaaatagaacgatagagtttttacaaccaacacagatcacgaggcccgccactcaacaaggatggcacatggctaca

SEQ ID NO: 149476 - DNA, 2338 bp, Zea Mays
ctttgcaaaaatcccaggaagaaataaactaacggagcacaagagcccaatcccgcgcctcgtcgcgcaccccccttgccattatttatcccatctccgtctccgtctccctctccctctccgcaatagcccgtccccgccgccggattcgatcccgtctccggccgacgcgaccatttcccgcaccgccagatcctctcggctcggcccggccgccgcgcacctcccgcgattacagcgaccgcaataccagcaacgcctcctccacaaacggggccggggagggaggatccattcagccagtagtccacgcctttgactcgcactccgcttccagatctaggcgggcgggccgaggaacgatggacggagtctccgccccgccgccccaccggcggctgccggacttcctccagagcgtgaacctcaagtacgtgaagctggggtaccactacctcatcacccacctgctgacgctgacgctgctgccgctgatcgccgtgatcctgctggaggccgggcgcaccgacccggacgacctgcgccagctctggctccacctccagtacaacctcgtgtccgtgctggtcctctccgccgtgctcgtgttcggcgccaccgtctacgcgctcacccgcccgcgccccgtctacctggtggacttcgcctgctaccgcccgcccgcgcacctccgggtccgcttcgaccagttcatgcgccactcccgcctctgcggcttctccgacgacgcgctggagttccagcgcaagatcctggagcgctcgggcctcagcgaggagacgtacgtccccgaggccatgcacgcgctcccgccccagcccaccatggccaacgcccgcgccgaggccgaggccgtcatgttcggcgcgctcgacgccctcttccgctccacgggcgtcaagcccaaggacgtcggcgtgctcgtcgtcaactgcagcctcttcaacccgacgccgtctctgtcggccatggtcgtcaacaggtacaggctccgcgggaacgtccgcagcttcaacctcggcgggatggggtgcagcgcgggcgtcatcgccgtcgacctggcgcgcgacatgctgcaggtgcaccgcgccacctacgccgtggtggtcagcacggagaacatcacccagaactggtacttcgggaaccgcaagtccatgctcatccccaactgcctgttccgcgtgggcggcgcggcggtgctgctgtccaaccgcggcgcggaccggcgccgcgccaagtacgtcctcaggcacgtggtgcgcacgcacaagggcgccgacgacagggccttcggctgcgtgtaccaggagcaggacggcgagggcaagaccggcgtgtcgctgtccaaggacctgatggccatcgcgggcggcgcgctcaagaccaacatcacgacgctgggcccgctcgtgctgcccgtcagcgagcagctcctcttcttcgccacgctcgtcgccaagaagctgctcagcgccaagacgaagccctacatcccggacttcaagctggcgttcgagcacttctgcatccacgcgggcgggcgcgccgtcatcgacgagctggagaagaacctgcagctgagcccggcccacgtggaggcgtcccggatgacgctccaccgcttcggcaacacctccagcagctccatctggtacgagctcgcctacatggaggccaagggccgcgtccgccgcggccaccgcgtctggcagatcgccttcggcagcgggttcaagtgcaacagcgccgtctggcacgcactgcgcaacgtcaagccgtcgcccgatagcccctgggaggactgcattgaccgctacccggtggagctcgtcgacggcttccccacgcagcaatagtaccttcttttctctatattcccctcccacccgtccgtcccccagcttgtcgtcgctgcacctgcacctgaaccagaaccagaacctgcggtaagtttgagtagtcctgatgatgattgctgtactatttgtctgttcagccatattgctgccagacgattgtcatttagtggtggtccaggcggaggaagggggccgttccttctcactcttactaccagaaaggtcatgcatgctgatgacgaggaagggagtgccttactctagcgcgcgtgtgtgtgtgtgccgatggacggatccatgcatctagtctctgtttgtagtgttcatttggaaaccttgctcttgctcttgctcttttttaactatatatacatacggacataccgcatgcctgcctttgatgagcttgtcgtatgtatgcaccatggttcgttcgttgctgttttccttcgtca

SEQ ID NO: 149477 - DNA, 2810 bp, Zea Mays
cgcgagctatcccgacagtaggaagcgagacggggccagtaggaagcgccaagcagcaacgcagcgcatccactcgtcatcggcaaaccaacacccccggcccggccgcgggcggctgcgctcacactccactcccctgacggcctgaccccgcgcgcacaagcaacagcagcccgatggccgcaccgtcctccgccgccacagcctgcttcgtctccccgctcccgccgcctcgccgcccgcgtcatttcctcaggcacctcgcgcgcgccgccgccgccgagcccacgcccgcctccgcctcctcgttcgccctcccgtcgccatggccgtgggcgcggcggctccgcgacctggtccccgccgaggccgcgggccggctgctgtcgtcggccgcgggctccctcatcgtcgcgctcgcctccgcgtcgctcgtcctcggcgacgccggcgcggcctccgcgttcgtcgtatccacgccgcggaagctgcaggcggacgagctcgccaccgtgcgcctcttccaggagaacacaccctccgtcgtctacatcaccaacctcgccgtcaggcaggacgcgttcacgctcgacgtgctcgaggtgccgcaggggtccgggtccggctttgtctgggataagagcggccacatcgtcaccaatttccatgtcatccgtggcgcgtcagaccttaggttggtcgggactccggagggcttcatgctttccttctacgttttcttagccgtttggttgtgctcaaatcgaagcttgtcgattcttgtattaatggttagggtcgctggtgtttcattaaaatatggtctagccttccaataatttcaagtggacagagcggggagaaaggagttgtggtgcttcaatgtgttgttggtaagctggggcaaagcagttactgatcggccccagcaaactacaaacagggcccattagtaatgcttcattgtcaatttggctctccctacaagacctagtcggagcaaaattagtatgtccaaaagggcttatattttagtgcagcagaagcaacatgacacttgttctacagcttcactatctggctgttagaagttatgggatgcatctgcattaccgaaaggtttagaaaagatactgcttgctctacaagttccttgcatcccaatttcgagtagtaaatacctaatgctacacttggatatttcaatgcaaaagatctaattattcaagttaacaacgcagaatgttcttatttatgctaaccaaatctttgtgtggtaatgctctgcggttgtgcccgtctcactgctaatgtctaatgatctcgactgggatcagacacaattgtaaaacatccatacatgtttctttctttttttcaatggcttttgtatgttgatgatgcctagatatgtatagtggcaaagcgaagatacaactgatagttttatgcagggtcacacttgctgatcagtcagtgtatgaagcacaagttgttggatttgaccaggacaaggatgttgctgttttgcgtatcgaagcaccaaaggataaactaagacctatacctgttggtgtgtcagcagacctactggttggtcagaaagtatatgccattggaaacccatttggccttgaccacactcttacaacaggtgttatcagtggattgcgccgagaaatcagttcagctgccacaggacgtcctatacaagatgtgatacagactgatgctgctatcaaccctggtaacagtggtggtccactccttgatagttctggaaacttgataggtgtaaacacagctatatactcgccctcgggagcatcatctggtgttgggttttccattccggtcgatacagtatgcacatttttagactctgttttctaaaaaaatctgttgacagtagcagttcactaaggccagttcctatattcagtttattagttcgtttccacccttccttgcggttaactcgcaacacatgccttgacgacagcacgaataataactgttttcaggttgggggcattgtggaccaacttataaggtttggcaaggtgacaaggcctattttgggagtaaaatttgcccccgatcaatctgtggagcagcttggattaagtggagtgcttgtcctggatgctcctccaaacggaccagccggcaaagcgggtctgcagccaaccaaacgagatccctatggtcggcttatcctgggtgacataattacctctgtgaatggcacaaaggtgacaaacggaagcgacctgtaccggatactggatcagtgtaaagtcggggaaacggtgaccgtggaagtcctgcgtggcgatcataaggagaagatccccgtggtcctcgagccgaaggccgacgaatcatagcgaacccaggttcttctgtaccatagcctgatcagtttgtcactttgggacaagacaagaggcgggcgtcttaagcattttcgcctggtgtattttctgcagcagacgcgcaaatacacaagggcgcgtgtcctagcattttcgccttcgttcgctgtacataattcctgctggtctgctggagaagaaggggggtactatccaggtcgccgcccgtaatgccgtctcagcattttctgtgtgtgtgcgtgtgtgctgtagcatgtcggcatcctacagtgctttagagtttatagatagatggcctacccttattaatacgagatgttgatcagatgaccatccatccagggaagggaaactgcgggtagaggaccaatgagcttactgatatcacggatcacctaaacctttttgacc

SEQ ID NO: 149478 - DNA, 1939 bp, Zea Mays
ctccgttctgttccgccccgccccgccccgaagcagcgcgaaacgacacacgcgagctatcccgacagtaggaagcgagacggggccagtaggaagcgccaagcagcaacgcagcgcatccactcgtcatcggcaaaccaacacccccggcccggccgcgggcggctgcgctcacactccactcccctgacggcctgaccccgcgcgcacaagcaacagcagcccgatggccgcaccgtcctccgccgccacagcctgcttcgtctccccgctcccgccgcctcgccgcccgcgtcatttcctcaggcacctcgcgcgcgccgccgccgccgagcccacgcccgcctccgcctcctcgttcgccctcccgtcgccatggccgtgggcgcggcggctccgcgacctggtccccgccgaggccgcgggccggctgctgtcgtcggccgcgggctccctcatcgtcgcgctcgcctccgcgtcgctcgtcctcggcgacgccggcgcggcctccgcgttcgtcgtatccacgccgcggaagctgcaggcggacgagctcgccaccgtgcgcctcttccaggagaacacaccctccgtcgtctacatcaccaacctcgccgtcaggcaggacgcgttcacgctcgacgtgctcgaggtgccgcaggggtccgggtccggctttgtctgggataagagcggccacatcgtcaccaatttccatgtcatccgtggcgcgtcagaccttagggtcacacttgctgatcagtcagtgtatgaagcacaagttgttggatttgaccaggacaaggatgttgctgttttgcgtatcgaagcaccaaaggataaactaagacctatacctgttggtgtgtcagcagacctactggttggtcagaaagtatatgccattggaaacccatttggccttgaccacactcttacaacaggtgttatcagtggattgcgccgagaaatcagttcagctgccacaggacgtcctatacaagatgtgatacagactgatgctgctatcaaccctggtaacagtggtggtccactccttgatagttctggaaacttgataggtgtaaacacagctatatactcgccctcgggagcatcatctggtgttgggttttccattccggtcgatacagttgggggcattgtggaccaacttataaggtttggcaaggtgacaaggcctattttgggagtaaaatttgcccccgatcaatctgtggagcagcttggattaagtggagtgcttgtcctggatgctcctccaaacggaccagccggcaaagcgggtctgcagccaaccaaacgagatccctatggtcggcttatcctgggtgacataattacctctgtgaatggcacaaaggtgacaaacggaagcgacctgtaccggatactggatcagtgtaaagtcggggaaacggtgaccgtggaagtcctgcgtggcgatcataaggagaagatccccgtggtcctcgagccgaaggccgacgaatcatagcgaacccaggttcttctgtaccatagcctgatcagtttgtcactttgggacaagacaagaggcgggcgtcttaagcattttcgcctggtgtattttctgcagcagacgcgcaaatacacaagggcgcgtgtcctagcattttcgccttcgttcgctgtacataattcctgctggtctgctggagaagaaggggggtactatccaggtcgccgcccgtaatgccgtctcagcattttctgtgtgtgtgcgtgtgtgctgtagcatgtcggcatcctacagtgctttagagtttatagatagatggcctacccttattaatacgagatgttgatcagatgaccatccatccagggaagggaaactgcgggtagaggaccaatgagcttactgatatcacggatcacctaaacctttttgacc

SEQ ID NO: 149479 - DNA, 267 bp, Zea Mays
atggccacccgatcagacggttatcgggccttgtgcagatggtgggcttcccctgagtttcgtgccatttccgaaaggaataggggaaaccgtgggactgagtcgttccacaactacggcggtgatggtcatgtgcgcttgactaagcgaatggaagtcaaatccggccgtacgcccatggatgtggaggtgtatatgcaagggcataggggttctgatcctcagaatcctgatgtgttatgcactcagacggccaccgaccgtcta

SEQ ID NO: 149480 - DNA, 660 bp, Zea Mays
gaggacttaagaggttgatgcgcccccttcgccgcgagggcctcaaccttcaccgtatttttagcaacatatgcgctgacaaaatcgacacaatcagaagcatcagataggtgtgagaaataaggaaataagcaaacaaccacgaagcaggaagagcacgccttggcgactacactcctccatgactaggagactccagcagctggcgcaggagaaggtggaggaggcacgatcggtgacaagatctccttgcgacgcatcaccggatcaattgtttcagaggaggcgacactatcttgcaccttgccaacacgatgggagtataagacgacctagccgcccccaatatctcttcgcgaggccccatcagcatggtcgtcggggcagcgggcgccgcggcggcgttttctctccaagggggcgctagagcttgcctcaacatcatcggggcaggaggggacgcccacggacgaagggttcctcgctccaccagaggctgtagaggtcagggtcctctatatccgttgacggggtgatgctctccgtatccgtggacggggtgatgctcgcctcaacatcattggagcttgctttttctccttgtttctcttatgatggctcttcaagcacgccgccgcctcccgcttttgcttctccgcc

SEQ ID NO: 149481 - DNA, 4231 bp, Zea Mays
gcgggcgccgcgcggtttgcgcagggtaggtttggtgcgatggaaggggcggcggcggcggaggtgggcggcggcggcgaggatgtgcagatcaagggcgccaaggagagtgggcagcccgcggcggcggcgcagcagccgccgccgctgccgtccggcagcgaggcgctggagatgccggccacgccgcttccgcgggacatggactggtccgagcacttctccttcttcacctcgccgggcgggttcgcgggcagctcggacggcgcgaggggcctcgccagcgtcggcctgtccaactccgagtccaggccggacagcgtgacgcagcgcggcgtggaccacggcgcggaagagagggtggaggagctcacattgaagaactgcattagcgctgatgctgcccagcccgaagcctctgctggtgggagcacgagcggtggggataggcctgctgttattaagggcctgtggggtaacttcacacggatggcccggagaaccagctatttggccagcagggaaaacgccgcactgagctatggcgacattgcaagctcgagggctggtgatgcttctagcagggaaaatctggcgacgagccttgccaacaatatcatctcaaggaacaacgatgtgtctggcaatgaggcacctacgagtcgtgtcggatatgtgaataatgagttcaagacgccatttcacagccagcagattctcttgtccccttggtctaatcaggacaacgctcttaaagtaagcagcttctcgaataggattcttgatcagatgagaagtaagactgtggcacccccatctggggttctagggtcaccgcttaaaagcaaatcaaaaggtaaaggggttgcataccaacgtgcacgggaggagatccgagtgcaagctaatgcaagacccagagaccctctggacaagatcccgacaattcctacctcaattcatgattctgtggccagagtggacatgcttttcagtactagtggagatgtttcaaaatcccactctgagggaactagcctgagggaactgattaagcctgggcggcaaacgatgtccaagtttgagaaattgcatttgtttaagcagatccttgatcttgtggataactgtcatgcacagggttttactttacaacatttgcgaccatcatattttacgatcctatcttcaaatcaagttaaatatatcggttcttataccacacaagatttgccaacatcaatcaaacaagagtttgctagagaagatcttgtgagtagaaaaagagcttttggccatagaattgattaccaagactctaatggccatggaaatttgatgctgaagcatcaaaaggttggtgagcaaggcttagttgctgtcaggcggctggcaaatacatttttgactgacaaaatacgcgacaatcaaattgaagataacgatccaggtatttcaaggcaagaaaattttagttacactaccagagaacattttaagttcgtcgaatcatatggcagcaatatgtccagtgctcagcatgtatctagttctggaacccaacaaccagcatttgaattgaggaatattgaggaaagctggtacaaaagcccagaggagctcagtcaatttaaaggcacacccccatcaaacatctatagccttggggttcttctatttgagctcttttgctgttctgagacatgggagatgcactgtgctgcaatgtcaaatcttcgccaacgcatccttcctccaaattttctttcagaaagtcccaaggaggctggcttctgcctttggttactgcatccagatccttgttcaagaccaaaagcaaaagagattcttggatgtgacttgataaatgagggtcgggatttgtccttgttagataagtcaccagtttccatcagtgaagatgacactgaatctagtttgctacttaacttcctttctcaattgaaagaagaaaaggagatgcaggctgccaagttatcggcagagcttggaagcttacaaacagatatcacagagattgacagaagacactcagcaggaatgagattgagtttagaggatatggatgtactgccaagttctagtttgccaggagcttctgtgagtgccctacagggtgcattgctgtcaggtttgctaccggcatcgtgcaagtcgagcatatatgaggagagggtaatgaggaatttggtgcagcttgaaaatgcttactactccatgaggtcctctgtggacacctgtgaaactaatgtaatcaaacgtccagataacgaggctttgagggtccgtgaaaatttccatcagcgtcacagtgattctgatgcaaagggagagaaaacagaccgtcttggatgcttttttgatggtttatgcaaatatgcccggcacaataggtttgaagtacgaggaattttgaagaatgcagatgtacttagctctccaaatgtcatctgttcattgagttttgatagggatgaagaatattttgctgctgctggagtttcaaagaaaataaaaatatttgaatttgatgcactcttaaatgatcgtgttgatattcattacccactggtagaaatgcctagcaagtccaagctgagctgtgtctgttggaacagctatataaagaactacctggcatcaacagactatgatggtactgttcagctatgggatgctggctctggtcaaggattcacacagtttacagagcaccgcaaaagggcttggtctgtgagtttttcacaagtcgaccctactaagttggcaagtggcagtgatgattgttgcgtgaaagtatggagtattaatcagaaaaactctattgatacaatccgaaacgtggccaatgtatgctgtgtacaattctctccatactcctcccgcatgctagcttttggttcagctgattacaaaatatactgttatgatctgaggaacacaaggataccttggtgtactatttcgggacatggaaaggctgtcagttatgtaaggttcttggatccagaaacacttatctctgcatcaaccgacaacacattgaagatatgggatcttaaccagactaattgcagtggattatctgctgattcttgcagcctgactctgaatggtcatagcaacgagaagaattttgtagggctatctgttcatgatggatacataacttgtggctctgaaaccaatgaagtgttttcttactacaaagatttccccatgccaataacttctcataggtttggttccattgacccgataactggacaagtgacaaatgaagacaaccagcagtttgtgtcgagtgtttgctggagagggaagtcaaacatggtagtggctgccaactccagtggcagcatcaaagtgcttgagcttgtgtgaatgatccaacgagagtgtcatattggagagaagaaggttctagggttgccatgcgggcctgtgatgctctcgtgccctcggtgatgctccaatggccctgcttatccggtgtctgcatcctcaatggaagcactaagcgaactgggtacctcttctaggtctgcatttcactgttttgccagggcactaaaagatgcgactgctctgtgcaagcaacctacagcaccgatcattggtcattattggaagctttgcttgaaactcccaagcgaaccaaagaaaaataaaataaaatcaagagtatgttgtgtttggaaatctctggcattttggcacggtaccttattcatcatcgtaaggagggccccaggtctgtacagaattagggggccatggggctgatgaaatagaacatgtgatgcatgcaaacttcttttgggctagagaggctgacggacgccgtggcgccttactgaatcagttgggaatttaactcagttttgatgtgcgccggacttgccatgactgttaagagcgaacgatggagagaaagaaatgatcctgtagctcgaagaagttaatcgtgccgtgtgaatgtttcaaggagaatgtgtgtagtaattttctttctacctcccttcattattgtacatatgtttagggctgcctaatggaaggccttgtaactagagtagagatgctcaaaagactcggtcatgagttcagtataatgaatgatcttctcaaaagattaattactggcagatttatacatgtgtatggttactattattctgttgttgctggaacaaatggactggttact

SEQ ID NO: 149482 - DNA, 1132 bp, Zea Mays
cctgcctctgccttctcttcttgccttcttggggaagtagcttagcttagctgaggggagcggaggacagcatggacggcggcggtgacaagagcgcgctggcctcggagctggcgcaggtgctggccatggttcgcgagctggaggcgcgcatggaccaggacccgctcccggcggccgccagggagctctgcgccgggctggcctcgtccgtcgaccggtccatccgcatcgctaggtcctgctgcgccgacttgccggacggcaatgccgccgcccagtccaagaggaggaaggggacgccgtgcgtgaggaggcagctgcgggcggcgtcgctgcaggacgcggcggcgctggacgacgggctcagctggaggaagtacgggcagaaggacatcctgggcgccaagtaccccagggcctacttccggtgcacgcaccgccactcgcagggctgcctcgccaccaagcacgtgcagcgcgccgacggggacccgctgctgcacgacgtggtgtaccacggcgcgcacacctgcgtccaggccgcgcaccccggcgccaaccagctgcggcaggagctacagctgcagcacgggcacagcgcccaggacaaggaccagggagcctgctccccgctcgcgctggccaccgggctgctagagcccatgacgccctactcgttcgcctcaggcgccgacttcccgctcttctcgccgacgggcttggacgggcagctgagaagcagccacggggccggcatcggcgtggagttcgagaccctgttcgaggagctgttcaccaatgctacggagcccttccaatgggacctctatgccgccaattagatagatggaatgggctatgtatgctatctatgcaaccatacatgtatgtacacgtgtccggcaacagaattagcttcggactagactagagtatagtcttcaactactatcaacagctcggtgtactgttccgccctgtccatgcagagttgcaaaccatggaatcccagtggaaaaaaaacgttgtgcccaggctatctgaatgaatctaatgataggagccaagattcagaccaagcaatcacgttgaagcactcagaatcccagtgaacccaagtcgtagtacc

SEQ ID NO: 149483 - DNA, 515 bp, Zea Mays
cctgcctctgccttctcttcttgccttcttggggaagtagcttagcttagctgaggggagcggaggacagcatggacggcggcggtgacaagagcgcgctggcctcggagctggcgcaggtgctggccatggttcgcgagctggaggcgcgcatggaccaggacccgctcccggcggccgccagggagctctgcgccgggctggcctcgtccgtcgaccggtccatccgcatcgctaggtcctgctgcgccgacttgccggacggcaatgccgccgcccagtccaagaggaggcaagtcgatcatcggtcggtctcggacgatcgatcttgtttgtttcgccggagtagtgctgtgcctgtaacaagcattatctatgcgagcagcagagcatgacctgacaatttcggtctgtgtgtgtgtgcgtgccgcgcaggaaggggacgccgtgcgtgaggaggcagctgcgggcggcgtcgctgcaggacgcggcggcgctggacgacgggctcagct

SEQ ID NO: 149484 - DNA, 881 bp, Zea Mays
ccagcccatcccatggacgcgagcctccgcacgctgcccccggccggcagcagcttccgtggcgaggtccgctccgccgtgtcctcgctgctgctctcctcccggggcaccagcgccctagactccagcttcttctcgcacctcccgccgctcggctccagcgtctactaccgccagtgcgagctcctccgcaacttcgccgcctcgcagacgcagcagtccgccgccgccgcatgctcgccttcctcctcgtcctccggcctccagctccagacacccgtgccgcacgacgacgccacggcggcggcggcggctacgctgctgcggcagaagctgtaccgcggcgtgcggcagcggcagtggggcaagtgggtggccgagatccggctgccgcagaaccgggtgcgcgtgtggctcggcacctacgactcccccgagacggccgcgcacgcctacgaccgtgccgcccacaggctccgcggcgagtacgcgcgcctcaacttccccggcgtcatggacgggcctccgggcgcggattgccccgaccacctgcgccggctccgcgccgccgtcgacgccaagatccaggccatccgcgcgcgcaggcagcagcgcaacaagagggagagcgcccgctccggcgccaacgccaagctacccaccgcgcgcccaatcgcctcggagacgtcgacgacgccggacggggtgctgtccgttagccccgcctcggccgacggcggctgcccgctggatcggatgccgtcgttcgactcggagctcatctgggagatgcttagcttgtagccggctaaaccgcatggaacgaaccgatcagcgggacgccgccatggacagcaaccaagaccaacacaacgtcaagg

SEQ ID NO: 149485 - DNA, 108 bp, Zea Mays
agaggatcagcagaggaccagtttaggagggagctcggcggcacgtcgtcattggatgaggaggcaaggtgggacggcggcgaacaacctcttggcggcggcgaatag

SEQ ID NO: 149486 - DNA, 1440 bp, Zea Mays
cgccgtcgctttgcgagtgtggacgggacggatacatgagggagaacggcgccgccagggacgagggccccgccttgtgcaaggccgctgcggcggacgggggcggggatgtgggcgccgcctccgcccgccgccgccgccggctcgggcgtgccacggaggggcctgctccgacgaagagaatccggtcggggtcgcagaggtcgccgtacgactcgtctctggagacggcgacggacggctgctgctggccggcgcgcctatcgcatggcgccgtgtcggtgatcgggcggcggagggagatggaggacgcgttcgccgtcgcgctctcgttcctggcctcggaggcggtgggcggcgagcaggagcaggagctggacttcttcgccgtgtacgatggccacggcggtgcaagggtggcggaggcgtgccgggagcggatgcacgtggtgctggccgaggaggtcggcctgcgccgccgccgcagcggcagcgacgacctgcgctgggaggaggccatggcggccagcttcgcccgagtggacggcgaggtgaccggcggcttgtcgtccccgcaccatgacgacgccggcagcagcttgccctaccgcaccgtcgggtccaccgccgtcgtcgccgtcgtgggccggcgccgcatcgtcgtcggcaactgtggcgactcccgcgccgtgctctcacgcggcggcgtcgcggtgcctctctccagcgatcacaagccggaccgtccggacgagatgcagagggtggaagcagccggcggcagagtcgtcaactggaacggctaccgcgtgctgggagtcctggcaacctccaggtccatcggcgactactacctgaagccgtacgtgagcgcggagccggaggtgacggtggtggagcggacggagcgggacgagttcctcatcctggccagcgacgggctgtgggacgtggtctccaacgaggcggcgtgcaagatcgccaggagctgcctgagcgggcgcgcggcctccaggttccccgggtccgtggccggccgcaccgccgcggacgccgccgcgctgctcgcggagctggccttgtcccgcggcagcagggacaacatcagcgtcgtcgtggtcgagctgcggcggctccagacggaccagatgacgagggtttagtttgctgagactgagttgagttgagttgagagcgtaccgagtagtagatgatgatgacattgttaagtatttgagcagcgtgtgctgagaagctgtggggggattaagagagtctccctcccgccttcagcacttggttcatggttcgaattgaacgggcacggtgatgcgttgttgtacatagggagcgtttgtcggatgtttgcttctgtcggtgtactaattaattagtagtagcattatgcaattttatattgccttggacagtgtttgtgct

SEQ ID NO: 149487 - DNA, 824 bp, Zea Mays
ggcctcgtttcttcgccgtcgctttgcgagtgtggacgggacggatacatgagggagaacggcgccgccagggacgagggccccgccttgtgcaaggccgctgcggcggacgggggcggggatgtgggcgccgcctccgcccgccgccgccgccggctcgggcgtgccacggaggggcctgctccgacgaagagaatccggtcggggtcgcagaggtcgccgtacgactcgtctctggagacggcgacggacggctgctgctggccggcgcgcctatcgcatggcgccgtgtcggtgatcgggcggcggagggagatggaggacgcgttcgccgtcgcgctctcgttcctggcctcggaggcggtgggcggcgagcaggagcaggagctggacttcttcgccgtgtacgatggccacggcggtgcaagggtggcggaggcgtgccgggagcggatgcacgtggtgctggccgaggaggtcggcctgcgccgccgccgcagcggcagcgacgacctgcgctgggaggaggccatggcggccagcttcgcccgagtggacggcgaggtgaccggcggcttgtcgtccccgcaccatgacgacgccggcagcagcttgccctaccgcaccgtcgggtccaccgccgtcgtcgccgtcgtgggccggcgccgcatcgtcgtcggcaactgtggcgactcccgcgccgtgctctcacgcggcggcgtcgcggtgcctctctccagcgatcacaaggtacgtacgtcgcacgggaggcgactacgaatgcataataataaattaaaacacggctgctgtcgtctgggtta

SEQ ID NO: 149488 - DNA, 111 bp, Zea Mays
atggcgaccgaggacaggacgcgagagcgtggacgggccgtccgcctgcgccacccgcccacccctacggcgctccgcaaccggtggtgccgctgccgcgcggcggcgtag

SEQ ID NO: 149489 - DNA, 993 bp, Zea Mays
atgcggcgaggcgctgcgctgctcctggtggccgtcttcgccgtggtcgccgtagcgaagggtcgtgctgataccccaccagctgaaacaaatagtgatagctctactgcacagccaggccttgggaaattggagcagcatgagcaggcaaatcctaataaggagcatgtgacccaccaggaaggaggagtcagcaatgatattggtgacaacaacaagaaggataactcaacagaagtaaccaacatcagaagagatggctccatacagcagccaaagcacaaagatagcatcatgacaaagtcttcacaaccactagatttcttggaagattctcttatcaaggagtgtgatccatcacatagatgtatcattgaaaacaagaaattcatcgcctgcttaaaagtttctggagaagactcattggctctgtcacttctgatggacaacagaggcataaacccactagatgttagcatcatggctccagattatgtcactttagctgaagattccatccatgttgaagcaaatggtcacaatgagacacaagtgagagtttctgtcaatgatgatgcaaatagcacgacaatagtcatcaaagttgcagaaaaatcctgcaacatcagcattcacagtgcaatcacaagggagacggctggcagtggcagagtcataaggatgccacttacgccaacatacacgctactgccagtcttccttctcctcgttgcggtggcagtgtgcatcgtggtccggaggtggcgcaaccaggacggcgaccctgcgtatcagaagctagacatgtcagacttgccggtttcggttggaggcaagaaagaacatgacgatcggtctgacaagtgggacgacaactggggagatgactgggacgacgaggaagctccggtgacgccatccaagcctctgcccaacccttcgtccaaaggtctcgccccgaggcgatcggcgaaagatggttggaaagattag

SEQ ID NO: 149490 - DNA, 747 bp, Zea Mays
atggcgcctccccgccggccgagcatggggcggcagaagatcgagatccggcgcatagagagcgacgaggcgcggcaggtgtgcttctcgaagcgccgcgcggggctgttcaagaaggccagcgagctgtccatcctctgcggcgccgacgtggccgccgtcgtcttctcccccgccggcaaggccttctccttcggccacccgtccgtggagtccgtcgtcgagcgcttcctcgcctcgtcgtccccctcgcctgccggtgccggtgccggccactccgccagcggcggcgaggaccgcgcggtctcggagctgaaccgccagcacggcgagctgcgcgcgcagctggacgccgtgaaggcgaggcaggagcgcgcggacgaggcgatccggaaggagcgcgaggcggggagcccggcgatggcgtggatcgacgcggaactgagcgggggcgcgatggggcacgacgacctggtcgcgttctgggccgcgcttgcgggcgtgcaggccgccgtggcggccagcgccgaccggctgctgcgcgacgcgctgctcgtcgggcgcaggggccggcagcagcagcagccggcccagcttgccgggggtggtggcgtggcctttgacgtcggcgcgtttggcggcgttggcgtgcaggtgcagccgcctccgggattcgccggcgtcgtcgacctgcaggggttcggggggcaggctgcggccatcctcggcgccggcggtccctcatga

SEQ ID NO: 149491 - DNA, 711 bp, Zea Mays
atgcagaatgctgcaacaacaggaaatctcttccgtctaaggaggaggtgccgacaatgtggtgctagacggttattggtcgccaccgacgctgcattctggaggatggtcttccatggcgatgggagattgaatggcatcagctttggaacgaggctgccgcgagtgaacagaaggagatgtatggagatgggaggtcacggagagatctatggagaggggagcaaggtcacgaagttctgcaaggcgataggtggacttcaatcgcttaaaggcatggcagtggacgagagtctgattaattatgatgtcctcctgcatgtgcaccagtgctgcccagactttgtggggctgaaggtgtctgcactgtacgtggatgaagagatggcctcagtcatctgcaactctcttcctcgtctgaaaaagttggagataccaagttgtgacatgtcttccgctacgattataaggttccttgattgcctagagcagctcgagcacctggacatctcaggttacgagacatcagccatctcaagcccggttcttgagaaagcttcgcggctcaaggtcttcctctggaattcgaaatttgagcttggggagttcgtggactgctccaattgtggagagcacaacattaaccctcaagaaccctgcaagtgcatgatggagcacaaggtcatggactggctggctggaccttcataa

SEQ ID NO: 149492 - DNA, 1908 bp, Zea Mays
atgaagtacgtgctggtgaccggcggcgtggtgagcgggctcgggaagggcgtgacggccagcagcatcggcgtcgtgctcaaggcctgcggcctccgcgtcacgtctatcaagatcgatccatacctcaacaccgatgccggaaccatgtccccattcgagcacggcgaagtgtttgttttggacgatggtggtgaggtggacttggaccttggaaactatgagagatttctggacatcaagttgactcgtgacaacaacataaccacggggaagatataccagtctgttattgacaaggaacgtagaggagattacctaggaaaaactgttcaggtcgtgccacacatcacagatgaaatacaagattggattcaacgtgtggcaatgaatccagttgatgacaccgaagagccagctgatgtttgtgtcatagaacttggtgggactataggggacattgaatcaatgcctttcatagaagcactaggccaattttcataccgtgtagggcctggaaacttttgcttggtgcatgttagtcttgtaccagttctaaatgtagttggtgagcagaaaacaaagcccacccaacatagtgttcgcggacttcgaggacttggactcatgcctgatattttggcatgtcgcagtacacagccacttgaagaacacgtgaaagtgaagctcgcacaattttgtcatgtcccgataccaaatatcattaatctccatgatgtcaccaacatttggcacattcctttgttgctcagagatcagaaggcccatgaagctattttgaaggtgttagaccttcagtgcgcgagtaaagttgctcgagaaccccaattgtctgaatggactgaaagagtcagcagatgtgacagattgaaatctccggttaggattgcaatggttggaaagtatactggcctgtcagactcctacctatctgttataaaggctcttttgcatgcgtcggttgctttggacaggaaacttgtggtggactgggttccttcctgtgatcttgaagattctacagcaaaagagactcctgacgcctatgaaaaggcatgggagtcgttgaaggtaagaatagaatgccttcttgactgtgatactccactaaccaccagacagcaatctgaacgagtttttgcacctcagggtgcagatggtgtgttggtgccaggaggttttggagacagaggagtccaagggaaaattctggctgcaaaatacgcgcgagaaaacaacgttccatatcttggcatttgcttgggcatgcaaattgcagtgattgagtttgcacgctctgtcatgaagttgcacggtgctaacagcacagagtttgatccaaccacaaaaacaccatgtgttgttttcatgccagaggggtccaaaactcatatgggagcaacaatgcgccttggttcaaggaggacctttttccaggccactaactgcaaatctgctaaactgtacggcaatgcttgctacgttgacgaaagacaccgccacagatacgaggtgaatcctgacatggtcccagaatttgagaaggcagggctttctttcgttggcagggatgagagtggcgaacgcatggagattatcgaactaccaactcataggtttttcgtcggagcacagtttcaccctgaattcaagtcaaggcccggcaagccatctccgcttttcttaggattggtagcagcgtcatcaggccagcttgaccacttgctccaacgtggccttaccagttcagcaggcagagacatctgcggcaaagggggagcgcagaaaccaaaagcttgccagaacgggcatgtcatgaagccactgaatggcctggtgcacgggcactattcagcgactcgctgcaatggcgtcattcccatctag

SEQ ID NO: 149493 - DNA, 1025 bp, Zea Mays
gcgttgagctgtatgaagaggtgaacaaccgtgggctctgcgctattgcccaggctgagtcgtatgttataaggttctcggtggactcgccatgagaaggttacgctcttagttaccccaggcctgtgttcgaaggttcaatgttttaactcccgtagcaacgcacgagcacatacctatattattgaatccactatagactttctggagctggctcttcagtttggcatgatcatgatgtttgcctgtgcatttccattgatattctgctttgcagctctgaacaatgttactgaaatcagagcagatgcattgaagttgttagtcatgttgaaaagacctgagccgcgtgctgcagctacaattggagcatggttgaacatattccagttcttggttgtgatggcaatatgcaccaactgcttgcttctcgtttgtctatatgacgaggaggggaaatggaggattgagccaggactagcagcaatcctcataatggagcatgctctcctcttaatcaagtttggtttctcacactttgtgcctaaggagcctgcgtgggtgaaagcaaaccgtgtgcgatatgtagctcaggcacaaaacgtctgctctaaacaacttttgaggagtatttcaaaatttgacggaaaactggattgagaaacaccatgcacagcttagcggttatcgctggttttgtagtttaggtagagcggttttgtatagtacaaagatgtacaaatctaggggtgtaatatcttgatgcatatgacagttaagtgtagatattaggtgatcgccacctatcttaccagcaaatggtaaagaatgccctcaagtgtaagtcagtttttcccctctttcattttaatggtctgttgaattgaacggaaactcacattctgcaccatgtaatgtgctgtgggtgatttcgaagagtaagatggcaccctagccaaaagatatcaattagggcatgttcgtttcaatcctgatccatatggattaggaattgagtgggttta

SEQ ID NO: 149494 - DNA, 658 bp, Zea Mays
gttgctatgttcctgaggatctatggatatctgctttcctgttggtactaaggtttgctcccatccctgccttcttttataccatgtttgcaaagaattaccattttacctgctatttttgtttgtgttcttacggaagccaataggaaattttggactgctacctggattaatgctcgagaaaaaaggtgcatgacatcaatattgctattctatttgttctatagaaccttatgtggaaacgtgcattacacagtcccagcctcctagagactatagacatggtatgcagtccctagggaccgagcctcagagctagaggaagttattcgtgtacatggatatggaggaaaccctgaccgccttgcatcgctggcagtgcttggggagaagacaacattgatgtctccagatgttcttgtagcccgtggtgtgccctgctgtaggttagtacagtatcctggagagtttgtggtgacattcccaagggcataccacattgggtttagtcatgggcgtccacaggctacaccatgcctccacctccgcagatcacgcctaccctgccccgcccgcgacagcctgcaagcattaatgaagttgtctgttttgcaataactatgtggagcggtttgatcatcactgtccatgggtcggt

SEQ ID NO: 149495 - DNA, 1104 bp, Zea Mays
aggttgcgtggtgcgacaaaccgacaagccaacaatggcgtcgtcagctgctacgaccgcgaagctgatcgcgctcccgccggcgccaacacgcggcggctgctgctgctggaggacacgcaggcccgcgatccccgcggcggcggcgcgcctcaaggtctccgcctccgccgcctcgtcggacgtgccggacttcctctcgtccaattggcttgaaacccgcaagagaaagcccttcggtcccaggttgaattttagtgcagaagaagcagtcgaataccagcttgagtccttaaagtacaatgatctgccccgcccagattatgggatagaggtcatgtaccggtttgcaggctttgaccccttcgagaggtcaacttactttggacgacagtttgatctaggacagttcgagcgcttccggcgtctgtttcaccactcaacctacagagtgctgctgggccacagagagagaagaatattgagcagtttatgggttgaagagaaccagttcaagcaaagagtttggatacaaggagcccgtcccgaggaagaagagatatttcaattcacaatggttcagagggtcggaggatcatgggatggttactggctgacagagagcttaataaacgatggagacgcgttctcgggtgggattgcttactgatgtagtgatgattggtgtaaatcgatcaggtgcagactagcaggtggcttgaaaaagctgagagacatgttggtgtgtagaatatgccctggctttctggagatgtttggcactgtcggacacgctagtattgtacaggaagacctctcacggcgcccatagcaccagatggccaagcatgcatatctgtggaatacttttctgttgtacgcctgctgcttgcctggtttggtaagaggaagacggcgctgcacatcttgcgccttcatctgcagcgagttacggcgcggttctttcttgatgtcctctcctttctgtgtaaagtgcttcgagttttggccactgcctcttttcacttttacgtgtctgttgtttggtcgagacgtcgagtctatggtgtcgccagcagctcctgcatgcactctcgcgaccta

SEQ ID NO: 149496 - DNA, 1079 bp, Zea Mays
aggttgcgtggtgcgacaaaccgacaagccaacaatggcgtcgtcagctgctacgaccgcgaagctgatcgcgctcccgccggcgccaacacgcggcggctgctgctgctggaggacacgcaggcccgcgatccccgcggcggcggcgcgcctcaaggtctccgcctccgccgcctcgtcggacgtgccggacttcctctcgtccaattggcttgaaacccgcaagagaaagcccttcggtcccaggttgaattttagtgcagaagaagcagtcgaataccagcttgagtccttaaagtacaatgatctgccccgcccagattatgggatagagtttgcaggctttgaccccttcgagaggtcaacttactttggacgacagtttgatctaggacagttcgagcgcttccggcgtctgtttcaccactcaacctacagagtgctgctgggccacagagagagaagaatattgagcagtttatgggttgaagagaaccagttcaagcaaagagtttggatacaaggagcccgtcccgaggaagaagagatatttcaattcacaatggttcagagggtcggaggatcatgggatggttactggctgacagagagcttaataaacgatggagacgcgttctcgggtgggattgcttactgatgtagtgatgattggtgtaaatcgatcaggtgcagactagcaggtggcttgaaaaagctgagagacatgttggtgtgtagaatatgccctggctttctggagatgtttggcactgtcggacacgctagtattgtacaggaagacctctcacggcgcccatagcaccagatggccaagcatgcatatctgtggaatacttttctgttgtacgcctgctgcttgcctggtttggtaagaggaagacggcgctgcacatcttgcgccttcatctgcagcgagttacggcgcggttctttcttgatgtcctctcctttctgtgtaaagtgcttcgagttttggccactgcctcttttcacttttacgtgtctgttgtttggtcgagacgtcgagtctatggtgtcgccagcagctcctgcatgca

SEQ ID NO: 149497 - DNA, 909 bp, Zea Mays
agccacaacaagacagagagatacccgatcgccaccgccgaccggactcccctcaaaggcggccacagcacagcgagcatgggagaccggcatcagcatgggcctggcagcggcgtggaggacccggcgacgctgctgcggcgggtgcagacccgcgcgcccaactcgacgcaggtggtggggttcctgacgctgctcgtctctggcgccgtgctgctgctgctgacgggggtgacgctgacgggcgccgtggtggcgctcgtcttcctgggccccatcgcgctgctcaccagccccatctgggtgcccgtcgccgtcgtgatctccgccatcgtcgccgccgcgctctccgcctgcgccttcgccgccgccgcgctccccgtggccacctggatgtaccgctacttcacgggccgccaccccgtgggcgccgaccgggtggactacgcgcgcagccggatcgccgacaccgccagccacgtcaaggactacgcgcgcgagtacggcggatacctgcgcacccgcgccaaggacgccgcgcccggcgcgtaggcgcgcgccgcccggcgtgcatgtgctgcaacccccgtccgtggtgccgctagctataggtcatcattgctgtcgtcgtcgtcgtcttagttcctcttgcattgcgtgtgcgtactctgctccaatcatcccccgcccgtgttgtcaagcaatttctggtcctcttgcttgctttctctaggagatgctgttcatttcgatctcttggcgcaatttgatctttcgcttggtgtaattaggtcattagttaaatcataagagactcgtgttcatggtctttctcacaaccttaaaacaactaattgttgttgaaaagaatatatataggtaaccttgctcagttttcgtcgaacagaa

SEQ ID NO: 149498 - DNA, 624 bp, Zea Mays
atgtcatccaatgtttatgatgccagaagtaacatgattggagagatcgagaacagatcaacattcctcttagctgtaaaagctgatgtggagacacaaggagaatttgttgagtctctagcaaatgaggtccgagcagcaagctttgtaaatattgatgatgttgttgcatttgtaaattggttggatgaggagttatctttcttggttgatgagcgagcagtgttaaagcattttgattggccagagagcaaaacagatgcaataagagaagcagcttttgaataccaggatctgataaagttacagaacaagtggagcagtgtgtctatgcactactccgtacaagagacatgtccctcacgctacaaggagtatgggatcccagttgactggttgtctgattccggagtagttggcaagcttgcgaacaagtatatgaagagggttgcatcagaacttgatgcgttggaaggcactgagaaagagcccaatagagagtttttgcttctccagggtggcaggtttgctgggggatttgatgcagaaagcatgaaagcttttgaagagctaagaagcaagatgagtacacataaatctgctccacagatatctgaaggctga

SEQ ID NO: 149499 - DNA, 1536 bp, Zea Mays
atggccaaacaaagaaagggaatgataaggctcacaattctgaacatgtatggggagaaagaagaagagaaggaagaggttaaaacaatcagcggtataattaacttagcccggttgctagacgatgacgacgatgatgtgctttttgagatcgaaagcctcctgtcaggagacattgaaatccctataccaagcgatcgcttcaacgttaatggatggtcacggtacaacacttacatggctaacaaggcctctgagatagagggactgcgcagcctggtgaaggagatggaagagagagaggcgaagcttgagggcgagctgctggagtactatggaatgaaggaaatggagattgatgtcgctgagctgcaaaagctgctcaagatcaagacagtggagatcgacatgctcaataacaccataaactcactgcaggaggagcggaagaagctgcaagatgacgtggaacgtggagcagttaccaagaaagagctcgaagtggctaggaccaaaatcaaggagctgcagcggcagatacaggtggaagcgggccagacaaaagatcagctaatgctgctgaaacagcaggtcattggattgaaggccaaggaggaagaggcggtaaaaaaggaagccgaggttgagcggaagctgaagaagctcaagcagttggaagtggaggtacttgagctaaggaggaagaacaaggagttgttgtatgagaagagagatctcattgtgaagttggatgcagctgaagggaaaataactgagagtgatgtagttgccaatgcaagagaagagataaacaagctgaggcatacaaatgaggacctcacaaagcaagtggaaggcctacaaatgaacaggttcagtgaagtagaggagttggtatacctgcactgggtcaatgcctgtctgagattcaagctccgggactatcagactccatcatggaaggtctctgcatgtgatcttaacaggacactgagcctcaaatcacaggacagggccaaacaactgatgttggagtatgcaggatctgaacggggtcacggtgacacagatcttgagagtgtttcttcagtgccttcttcacctggaagcgaagactttgacaacatttcaattgacagttcttccagtagatacagtttcataagaaaaaggcctaatctgatgcaaaaaatcaagaagtggggaaggagcaagaatgacagcagtagtttaggctccctcatcagtggttctccgaggaggaaaccaaagggccccctggaagctgtcatgctaaaaaatgctggagatggtacagccataacaacatatggaaagagggttcccaatggtgtcttggacgatgaaaatgtcgtgtcctcattccaattgatgtccaagacagtcaaaggttttgctgatgagaagtatcccgcttacaaagataggcacaaacttgcaactgaacgggagaacgcgataaaagagaaggctgggcaagcaagagcacaaaggtttggcggtggacatagttaa

SEQ ID NO: 149500 - DNA, 230 bp, Zea Mays
aattttgatggagtcgcaaaagatgtcccacatttaagatggttataaaccgtcttaaaagatattatataagacaatttttaatttataaccgtctgaaaaaggtatttgtttaagtcattttgtccgataaaccgtctgaaaaaggtatttgtttaagtcattttcgtccaataaaccgtcttgaattaggtttttttaagacactgcttctaaagaatcgtagagaa

SEQ ID NO: 149501 - DNA, 600 bp, Zea Mays
gcggcaaggcaaccactacgccgcacgggtgcggtgcaggagctcctccagcggcgccgcaaccgcctccgagccctcatggtttggctcgaggctgatggctaggtcgaccgtctcctccatgcgcaggaggacgatcaggccgcacacatcgtcgaggagaagcaacagtagatcgagtaccccatcttcaccgagggctcgtaggagcttctcaaggcgcgtgtcgacattgtatagtacttgctgccacgaggaccccgatgaagatactgaggcggaggccaaactcgtcgtcaagaaggctgggcagtttgtgctcgagtgcaacaagattggagatgattgcctgctcactggttgttccttctctcgtgatgcatcaatgcttaccacaaggtcacatgaaaagattctaatcttttgcaaattaacaccttggaccagattaaactctcttatgaagtagcagctttggcttctagttcctgcatattcaagcaaacggaataggttatacatgacgtgtcaagaaaatacaaatactatataattcaagttttcttcattgcatttatacaactgtagtcaaaacatgta

SEQ ID NO: 149502 - DNA, 655 bp, Zea Mays
atataggttaccaaacgcaattaatttaattagtctgtaattcaattttgcgcatccattttattgtgtgtaatggaaataaaacaaaaataaagctaaatggatggaaaaagaaaatctgttaacactataactttagaggaccgaatttagagaacgttgctggagactgagaagatatagaggacagaatcttttagagtgtgatgtaaaagacagaatattcctttaggggatagaatttagaggacgctgctggagacagccttaggctagacccgagctgcagccccttagctcgggccaaaaactaccgtttctatgagctgcctcgggcgagcgcctgtgccaccttcagagacgctggcctcagccgcgtcgggctctaaagtccggaatctgaccggtcaccctattaggctggctccaaactctaaagggtcctctactctaaatatagaggatcaaatggttctctacgcactccagcagcgtcctctaaacggtcctctaaatttagagaacgctgctggattctctatatatagagtttctctaaacgttcctctatctatattaatactttaaataaccggtttagcaaaactaaaatatgtacaatacatttgagagtatgataaataggtatgtacaa

SEQ ID NO: 149503 - DNA, 444 bp, Zea Mays
atgccctcctcaactagagacctaagtaaacaagcggtcaaggcatgttataaatgtttcaaggattcattcaaatcccaatatgagaattcagaaaccagcgcagccaccacagtagcagggaccggatctagttccggttccctagcatccggcgtcacctgcgcgtctcatctccacactacgtcgcaggtacatcgagccagaaaaatctggctgacggtggaatcgagcgggcatcgacggcgatgcgccttgaccatgtggcgagccggcagacgactcaaggtaaacatgaggcaactcgaaacactatcacaagaagaagcgaagattcgtaacttacgtgctccgaggacacggtcgactgcgaatacctggaacaatcaagcaagccgaatgaacgtcagtgacaatttgcgaggggaagctatatatatatag

SEQ ID NO: 149504 - DNA, 1984 bp, Zea Mays
cagtcggcaccggcgccacgtgccgttcggtcattggaccagccaacggcagacccagtcagcatcgcagagaggccccattttctcagccgaaacgaggcctagcccaccacagctgttgtagagactcgtggctccgaaggggcgtatgggcctcaggagtttccaagagcccatcaccaaattgccagccccgcgtcctcccctcgcggcctcacctgtcaccaagtcaccctcccatgcactgcaaagaccacacagacagacaaagccacatgcggcgactcgcgcgctcatccgctccccaattttggctcccccccacgaacctcccccgcccccctctctctctccatgactccacctccaggccaccccgagtccgctcccctcacggcctcaccctacactgctacggggaccctcgcacccgctgatcgccgttgcaatgcagctcgccagcgagcaccccgcctgcgggcgcgcgagcgccgagggggaggccttcgttccgcgcagcggggcccagggcctgcgccgccgcaccggcgcggccccgctcgactactcgagcccccgcagcggccgcgcgggcgacgggaagcgcaccaccttccgggaggacgtcgggcacgccgccgccgagacgtacctcgtcacgggcctcgccttcaccctgctcggatacctcggggttagttatcggtggatatcgcagcttattgcactccttgtttatgcagttctactcatgcctggtttcataaaagttgggtactactatttcttttcaagacatgttattagaagtgtaatctatggagaacaaccaagaaataggttggatttgtacatacccaaagataatagcaaatcaagtccagttgtggcattcgtaactggtggagcttggatcattggaaatttccctcaaggaacaataagcgacatggtcagtgatgcttctgaggcgatatcattcatttgtaacaatgttgttagctttggaggggatcctaataaaatctacttgatgggccaatcagcaggagcacatatcgcggcctgcgctctcttagagcaagcaattaaggaatctaagggagagaatacctattggaatgtggctcaaataaaagcatattttggtttatctggaggatacaatatccaaaatttggtcgatcactttcatgagcgtggtctttatcgttcaatatttctcagcataatggagggagaggaatcactgccacattactcacctgaaattgtcgccaaaaaattaagtgcagaaaccatatctctactacctcagattgtactattgcatggaacagcagattactccataccatcatctgccagcgaaacttttgctgatgtccttaaacaagctggtggaaaagtagagttacaattgtataaagggaaaacacatactgatgtatttttacaggatccactaaggggcggcagggacaaactggttgaagatgttttatctgtcattcatgttgatgatgcaagtgcgcgtgagagggacgcttcggcacctacccctgagcgcctggtttatgaatggcaaattaaattggcccgccaaattagtcccttctaaacaggtctgtacacagaaaggatttgttccaagacttcaacaagcatgtgttgcaacgtgataaactacgtggggtacatgatattttttgggattttcactgggtcaagcaaacgcagcttcaatctttgtttgcagggcgccagttgccaatgatggcagaagatttgccactgatggaagaaataagatttttgaggggtctctaggctgtaggcagtgctctactatactacacctgtttaatttccttggtttctttttacaaaatatatgaaatcctgatacaattctgtaaatagaatacgaagttgtttcatcatcgtaaaaaaacgtgggcaattcatgtgggaaatgttaaaa

SEQ ID NO: 149505 - DNA, 1220 bp, Zea Mays
acgcgcgcgagcacgaagcctcggccccaacccgactaaaacctagccgggcttccctttcgctaggtttgcgccaccgccgatccggccgacctctccccgcccgccggcggcgatgtacaacagcatcgggctgcagaccgcgcgggggtcgggcaccaacgggtacgtccagaccaacaagttcttcatcaagccccgttccacatccggcggggggccgggcgggccccacagaccgccgctccccgacgccgccggcgcggatggcggcgggatgcgcaagcccaacaaggagatcctcgagcacgaccgcaagcgccaggtcgagctcaagctgctcgtgctcagggacgcgctcgaggagcagggctacaccgaggacgagatcgaggagcgcgtcgaggaggcgcgcaaggtcgcggaggcagagacggcagcggaggaggcagggagcgtttgcggcgccgggcgaccgcctctacccggcagatggtttacagacacacagagccaccatgttgcagcacggaaggagaagcagcttgagactctaagggctgctttagggctgaacgctgatgatgcaaataaagggaatgcagaaagtgatggggagcttattcctgttaagtattacgaggaactagatactattgggcaaaaggatagcaaggattcaaaggatgtcaaaaagagccagaagaaaaaagagaatgacaaaaggagccaacccagaagttcgagaaagagcaagtatgactcaggtcacgatcatataacacaaaaacgaagaagagttcccacccaccatgattccgaagatggtttagagactgattataatgggaaggaaaagaaacacgacaagaaacgtcatcttggttcagttgataattctgaaaatgattggaagaaggcagagcgtggaaagaactcttatcacgatatagattacaacagtagcctcgacagttagggttatgtgtggctttgctatgtaatggggtgtcttctgtgtaatgggtttagactccacaattctattatataaatatatctcgaaaccttggttatggttctagcaatttttaactgagtaatcaagtatgtcgcaaaggttaaaacatcaataaagtataattaaacaggctgcaagcatcacatacatagagttagcaaataccagttacagaactcatcaatgttatttatcacaa

SEQ ID NO: 149506 - DNA, 1782 bp, Zea Mays
tatttgcctatttggtacccagacccacgcggcggcacccgccaccgatcgagccgctccggcgagcgcagcgcagcccacggcatttgccgatttgtgaaggagcgtgaaaaagcccttcccacgctgggccccgcctccgcgacgcgagcccacacgtccgtttccggtgccttggccagacaggcagcccatgtgctgagctcacatgcctgccgctcccacacctcgccaccctcctgcctcctccgcatccgcgccccctcgcttagcctaaaccgcggggcagctagtctcgccaccgcaggccgcaccggtcatcacaccggagcgcacgcggggagcccccgtagagttccggggcgaccaggccaactaacgccatgaaggaggaaggcggcggcggggacgcggggttcgtgcgggcggaccagatcgacctcaagagcctggacgagcagctggagcgccatctcacccgcgcctggaccatggagaagcgcaaggaggaggcctccgccggcgctggcgccggcgccaggcagcaccagcagtcccggcgcccgcggagggaggactgggagatcgaccccgccaagcttgtcgtcaagggcgtcatcgcccgcggcacctttggcaccgtccaccgcggcatctacgacgctcacgacgtcgcagtgaaactacttgattggggagaggatgggcatagatcagaacaagacattgcagcactaagagcagctttttcacaagaggtctctgtttggcataagcttgaccatccaaatgtaaccaagtttattggagctataatgggtgcaagggatctgaatattcaaacggaaaacggccacattggcatgccaactaatatctgctgtgtcgttgtggagtaccttcctggtggtgcactaaaatcatttctgataaagaacaggagaaagaagctagcttttaaggtcgttgttcaaatcgctcttgaccttgccaggggattaagctatctccattccaagaagattgtgcaccgtgatgtgaagactgaaaatatgcttcttgacaaaacgagaaccgtgaagatcgctgattttggtgttgctcgccttgaagcttcaaatcccagtgacatgacgggcgaaactggaacgcttggttacatggcacctgaggttctcaatggaaatccctacaacaggaaatgcgatgtttacagcttcgggatctgtttgtgggagatatactgctgtgatatgccatatcctgacttgagcttttctgaggtcacgtctgcggttgtccgtcagaacctgaggccggagataccacgctgctgcccgagctctctatcgaacgtgatgaagcgctgctgggacgccaaccccgacaagcgacctgagatggccgaggcggtgtccatgctggaggcgatcgacacgtcgaagggtggaggcatgatccctgtggaccagcggccaggatgccttgcgtgcttccggcagtacagaggtccatgacagataggtggaaacctgttggagctgcggcctctagatctcgtggatgccgatcgatcgcgtgttgttttctggggaagcaaactggttaatggagctagcccgccttaccggctcgtgtaaatcctctgtccatcaattctgtaactctgttttatcgattaatgaaaagaaccgggcttgctcgactgattcctggccgatgcaaatgttgttttttttggaagagaatcgaacttgaaatgaaaacgagatgggtgccgta

SEQ ID NO: 149507 - DNA, 1362 bp, Zea Mays
tatttgcctatttggtacccagacccacgcggcggcacccgccaccgatcgagccgctccggcgagcgcagcgcagcccacggcatttgccgatttgtgaaggagcgtgaaaaagcccttcccacgctgggccccgcctccgcgacgcgagcccacacgtccgtttccggtgccttggccagacaggcagcccatgtgctgagctcacatgcctgccgctcccacacctcgccaccctcctgcctcctccgcatccgcgccccctcgcttagcctaaaccgcggggcagctagtctcgccaccgcaggccgcaccggtcatcacaccggagcgcacgcggggagcccccgtagagttccggggcgaccaggccaactaacgccatgaaggaggaaggcggcggcggggacgcggggttcgtgcgggcggaccagatcgacctcaagagcctggacgagcagctggagcgccatctcacccgcgcctggaccatggagaagcgcaaggaggaggcctccgccggcgctggcgccggcgccaggcagcaccagcagtcccggcgcccgcggagggaggactgggagatcgaccccgccaagcttgtcgtcaagggcgtcatcgcccgcggcacctttggcaccgtccaccgcggcatctacgacgctcacgacgtcgcagtgaaactacttgattggggagaggatgggcatagatcagaacaagacattgcagcactaagagcagctttttcacaagaggtctctgtttggcataagcttgaccatccaaatgtaaccaagtttattggagctataatgggtgcaagggatctgaatattcaaacggaaaacggccacattggcatgccaactaatatctgctgtgtcgttgtggagtaccttcctggtggtgcactaaaatcatttctgataaagaacaggagaaagaagctagcttttaaggtcgttgttcaaatcgctcttgaccttgccaggggattaagctatctccattccaagaagattgtgcaccgtgatgtgaagactgaaaatatgcttcttgacaaaacgagaaccgtgaagatcgctgattttggtgttgctcgccttgaagcttcaaatcccagtgacatgacgggcgaaactggaacgcttggttacatggcacctgaggttctcaatggaaatccctacaacaggaaatgcgatgtttacagcttcgggatctgtttgtgggagatatactgctgtgatatgccatatcctgacttgagcttttctgaggtcacgtctgcggttgtccgtcaggtaaagatctgattttccgccttgcatgcttgccgcttgcaagttgcaactctct

SEQ ID NO: 149508 - DNA, 1665 bp, Zea Mays
gatccggaacaattgaatcgctgcatcggtgtttcgccgccgccgcaaaaagaggcggccgcggtgagttcaagggaggaggaggaagagggtgtgaggcgctgcagaactcctgtggatcggtgagccgagggcgatatggggatgttcttcagcaaggcggaaccgccgccgcccatggtgctggtgccgccgctcttcgactaccctcccatcgctgcccgcaccaggatggcggtgccagcatatgagctaatgtttgggaaagtctccctgcacaatctgtttgaggactactttgatcaagctgggaatatgacctcaaggatcatgttgaagccgcttgaagatcctcacgttgatttgattgctactgtgtctgctgctgctgatagaaacagtggaacagaagtaaaaggggatgctttatttcgctggcagagagagctggatgacccccatacctttgtggaccttcttgtgtcaacttcaaatcccttgctgcagctgagattatgtgcatatcatcctaagtatcgtattggtgcctttggaacattacctttgctaatggggaacagggtgcgttcagaagactatggggtcatgggtgtaagatatggttcagagaatttatctgttggagcatcctttgtgccaatttccttacccagtgaggtaccctttggtgcatggttggttgggagaaaagggagcttatctgcaggagtacaatacaagccacttagtggcagcaaatatcctatgccatttacagaattggagaactggaattatgcaatcagttatggtgttggctcaactagcccgctcagcccttcattcattttctccctggaacttgccagaagcacacagctaaccgcatcattctatcagcacctggttgttcaaagaagggtaaaaaatccttttgaagatgatcaggttgttggcattacaaactacatcgattttggacttgagttggctgccaaggttgataaagataaagtgagtggggatggcaactcgtttcagttggctgcaagttggcaagctaacaaaaactttctgctgaagggaaagcttggtccttccacgtcctctgtagctctggcattcaaatcatggtggagaccatcctttacatttagtgtaacagctgtgaatgatcattcaaagggcacaacatcgtatggatttggcctccgtgtcgaggaccttagacgagcgagttaccagcgagctgatccaaactacgtcatgctgacgccaagcaaggagcacttggcaccaggtgttctgcgcgagtacgggaagcggcccatgttccagacacaaatcgattcgggcaactacgaccatctgcctacagagctgaagcctcttggcaggattttctaactgtaggctggctgctcgtgctcgtggtcgtctttcgctaggagagattttttgttgttgttgttgtagatcttatccgtcttggtcctttagacatgctgctgtaacttgcattgactcgtgagcggattgcgtcatgatagctgcatggcttttggaagccagaaggatcatccaacgcttcttcttgcattgctatgtacttgggtggatatatataacggtatggtgcagtggacaggcggtcttgaatcctca

SEQ ID NO: 149509 - DNA, 1233 bp, Zea Mays
gagcatattacgtatacgtaccaaagacggtggagaacgcgagaccggcgggaggcttgccaggatggcctgcagccccacggtgtcccgcagcacgacgtagtggtgcttggagcgctgtgtgcgaagtcagcaggctggattagcgccgacgacgtgcgcttggcccgtgtgccgtcgcctgcagcgtaagggcgagtaggaggggcggaagcgtgtcccgcgtgaatccgacgtagtaggctccagcaacgccatggccatcgaagacgatgtggttcgttgatcgatgacagcagtatggagtgcaacgcgaccatgagcgcggaggccacacagggtcggcacgcaatacggcgagtagctgatggcgtgggggggggggcgctggccaatcgccatggccttgggccgttgagatgggcgcgattagccgcgcatggcggcggactctcgcggccatgcaggactgccataggtgtcgaccgcggcggggaagatggatgtcatagaagcgcctgcgtcgtggtcttgcggtcgactggatctcgccgctccacgaatatgatgttgatgcagatctaatcccgcggcaacgtcgaggtagagcgtgctgataacgtgttgagaactacgttaccacagatcacgagatccgctcccttccctcccgtcagcagtagaggcgcaagaagatgtagagaacccgtctcccttcccataagcatgacagatgaaacacacgagacactgaatatagggttgggcctctggcctctttctgatctctattccatatgagggggtacatgttctatatatagaaacgtgattgccctcaggggcatattcggtatttgcccacataacccttcattagggtttctcaacagatctgaccatcgcagccgctgccgctgcgaccggagaggggaatgcatcatagcatagcagagacaagctctgggcctctggatggattcatggaggagcagggcgccaaacagccaaggcgccagctgtctgcctgacgactcacttaatcgtttcacaatggctagctcttagtcttttggtccatgtggcacaatgcttaatcggcccattaatcttaaacttgacctcgtgggcggcgccgcccaatccacataacggccttgtacctaaaaatgtttggatatcattaagagctagttttggaagcttatttttttggtgagatttctattttct

SEQ ID NO: 149510 - DNA, 627 bp, Zea Mays
atggcagcacagtggccagtgcggctcgccgtgctcgcggcgtggttcgcagccaggcgcgcagctagggggctcggcccatggctggcgtgcccgtgccccggcacgatgtgcgcgcagccaaggcgcggccggtgccccggcgcagctcgcggcctgtgcgccctcgccggcgcgacatgcacagtggtcggcagcgcagccccgacgtggctgtctgcgttcccacgcgatgtgctcccggcgcagctgcctgcacgaccctacgcagcatgccccggcgcggtagccggcgtggctcgcctacgatgcagccccgactcagcctttgcgtggtcccatcgcagcggtaaacgtcgtcgagtagggagacacgtcccatcaacacatcgcgcccaaagcctatatgcgtcgagcctatctcatgtcgtggtgagaacgatgtctacccgtcgccgtctacccatgcgcgtagtccgttgtcgcctagctagtgtgttcgcacctcgtgtcgtagctcgcgcgttgtcgcgtgtgacacacaggttgttcgcgcgtgtcgtgagcgttgtttcgcgtttgtcgcgcgcattgctacgcatcgttcacgcgctgccagcacgctga

SEQ ID NO: 149511 - DNA, 282 bp, Zea Mays
atgccgccgccgcttcggcgcctctgcctcagcctccaccgacgccggctcctggtcctggccctggccgctggctttattgcctttttgctttggcgtccccgcctcgccgtgccgtggacggagcagtgcagtttgggagaagcgtgctcggtgctctcgggccgggcggcctcgggaagtcgggattgtgtgatcggtgggtgcagggtcgcgcgtgaggccactataaatagcaacctcccgtcctcccgtaaagaaaaatccgcgcgtacatggtaa

SEQ ID NO: 149512 - DNA, 1857 bp, Zea Mays
agtggggagcgacgaaagccatgacacaagtgaagctactctcgtctcgtgtctcgttgccgttatttaaacaccccttatctttccctcctcaggctcaaaagccttgcccttccctgttctgctcctcctcgttctctgtgatgctgaggctaaaagctctcaccttcctgctcctgctcctcctcctcgctctctgctccggcgttcatctgtgcgacgcgaggagcggcacgcgctggagtcggacgacgcgaggcggtggtagcggggcggcaccgtccgcctccgctgctgcgatcgggaggaaagggaaagcgagaagcagcggctcctcccacaggcaaagcggcgaagggagtcggagcccgaccgacggcgaccccgtgcagggcgacggaagccaggctccaccaccacaggatactacggtcttcagcgtggtggagttcggagccaagggtgacggcgttacagatgacactcaggcctttgaagcagcgtgggcagcagcgtgcaaggtggaggcgtctacggttcttgtaccatctgggctcgagtttgtcgtgggcccgatctcgttctctgggccttactgtaaaccgaacatcctgttccagctagatggaactattttggcccaaaccagcgcaagagcatggggctctgctggtctgttgcagtggctggagttcacgaagctaaccggaatcgcggtccaaggcagcggtgtgataaacggcaggggccaggactggtggacgtatgcagacccaaacgatgccgacgacgagtctgtggagatgctgctgccacggactaagcccacggcgctgaggttctatggcagctccaatgtcacggtagctgggatcacgatcgtgaacagctcccagtgccacctcaagttcgacagctgcgagggcgtcatggtccacgacctgagcgtctcgtcccccgaggacagtcccaacaccgacgggatacacctgcagaactccaggggagtcgacatccaccacgcgacactggcctgcggcgatgactgcatctccatacagacggggtgcagcgacgtgaacatacacagcgtgaactgtgggccagggcacgggatcagcatcggtggtctagggaggttcaacacgaaggcgtgcgtgtccaacgtcaccgtacgagatgtcaagatgttcaggacaacgacgggtgtcagaatcaagacatggcagggcgggtcggggctggtgcagggcgtgaggttctcgaacatccaggtcacggaggtgcagacgcccatcatgatagaccagttctactgcgacagggcgacgtgcaggaaccagacgtcggcggtggccgtctcgggcgtccagtacgaggacgtcaggggcaccttcaccgtcaggcccgcgcacctggcgtgcagcgacagctcgccctgctcggggatcaccctcgccgggatacagctccagcccctgccgctgccgcagcaccgccgcctgtcgtacgaccccttctgctggcaggcgttcggggagctgtacacccccaccgtgccccccataccttgcttgcagatcggcaggccggcagcagggaacagcgtgctgtccgacggcgacctttgctgaaacgccgatcggttcatcagttaagctaaggcggtcgtcgtgatgcttccgacccctgctttgcacgatgtggattgtggagtgtcagttgatgatgcatcatgcatgcatgcgtacgtgggatacttgaggccgatttattatattgatgcgagccgatcaccactattgctatgtacacgaggtcacttgtcacgcacgctccagtcgttgtccagcatca

SEQ ID NO: 149513 - DNA, 2062 bp, Zea Mays
agtggggagcgacgaaagccatgacacaagtgaagctactctcgtctcgtgtctcgttgccgttatttaaacaccccttatctttccctcctcaggctcaaaagccttgcccttccctgttctgctcctcctcgttctctgtgatgctgaggctaaaagctctcaccttcctgctcctgctcctcctcctcgctctctgctccggcgttcatctgtgcgacgcgaggagcggcacgcgctggagtcggacgacgcgaggcggtggtagcggggcggcaccgtccgcctccgctgctgcgatcgggaggaaagggaaagcgagaagcagcggctcctcccacaggcaaagcggcgaagggagtcggagcccgaccgacggcgaccccgtgcagggcgacggaagccaggctccaccaccacaggatactacggtcttcagcgtggtggagttcggagccaagggtgacggcgttacagatgacactcaggtcatctgcttgcctttccatccttgtgatttgcaaagacatgtcatgcctcaaactccgtttatagtctagatacattgattctatgttttccttgcattctcaaggatatagatatttagaccaaggaattacaagcgtcttgtgcagatcagatgcgcttatacacgggctcaaaatgtctgttaaactgaataaccggcaggcctttgaagcagcgtgggcagcagcgtgcaaggtggaggcgtctacggttcttgtaccatctgggctcgagtttgtcgtgggcccgatctcgttctctgggccttactgtaaaccgaacatcctgttccagctagatggaactattttggcccaaaccagcgcaagagcatggggctctgctggtctgttgcagtggctggagttcacgaagctaaccggaatcgcggtccaaggcagcggtgtgataaacggcaggggccaggactggtggacgtatgcagacccaaacgatgccgacgacgagtctgtggagatgctgctgccacggactaagcccacggcgctgaggttctatggcagctccaatgtcacggtagctgggatcacgatcgtgaacagctcccagtgccacctcaagttcgacagctgcgagggcgtcatggtccacgacctgagcgtctcgtcccccgaggacagtcccaacaccgacgggatacacctgcagaactccaggggagtcgacatccaccacgcgacactggcctgcggcgatgactgcatctccatacagacggggtgcagcgacgtgaacatacacagcgtgaactgtgggccagggcacgggatcagcatcggtggtctagggaggttcaacacgaaggcgtgcgtgtccaacgtcaccgtacgagatgtcaagatgttcaggacaacgacgggtgtcagaatcaagacatggcagggcgggtcggggctggtgcagggcgtgaggttctcgaacatccaggtcacggaggtgcagacgcccatcatgatagaccagttctactgcgacagggcgacgtgcaggaaccagacgtcggcggtggccgtctcgggcgtccagtacgaggacgtcaggggcaccttcaccgtcaggcccgcgcacctggcgtgcagcgacagctcgccctgctcggggatcaccctcgccgggatacagctccagcccctgccgctgccgcagcaccgccgcctgtcgtacgaccccttctgctggcaggcgttcggggagctgtacacccccaccgtgccccccataccttgcttgcagatcggcaggccggcagcagggaacagcgtgctgtccgacggcgacctttgctgaaacgccgatcggttcatcagttaagctaaggcggtcgtcgtgatgcttccgacccctgctttgcacgatgtggattgtggagtgtcagttgatgatgcatcatgcatgcatgcgtacgtgggatacttgaggccgatttattatattgatgcgagccgatcaccactattgctatgtacacgaggtcacttgtcacgcacgctccagtcgttgtccagcatca

SEQ ID NO: 149514 - DNA, 1762 bp, Zea Mays
ctgagctcctgcacatccgcccacgtccaccacccgggcccagtggatccaagtatccaagccaagttcagttccgaatctcctctcctcctctctgcgccgcgctcgctttaaagcccagcactgtggcctcgttgcagaccatgcttcgccactgcacccacaagcagcacagacacagccaccaacagagcgtcgtggccgcggccgctgcccccgccaccatggcggccgcgtccccagccttctcgctcttcttcccgctgcccaacaccaaggccttccagttcgacgacgacagccacagctcagtcaccacctgcccctcgtccccgtcctcctcctcttcctccacgggcaccgtcgactgcacgctctcgctcggcacgccgtcctcgcgccgcgccgccgccaagccccgcccgccgtgcctggcgctaccgtctcgcagcgccgtgtcgtgcgacgtcgctgcacccgctgaccagtcctgctgctgccgctgctgctcctgcccgggcggcagacgtccctctcccgcggccgcgaacaagagagccgcggccgcgcacgggcacgggcaggacccggcgccgctcgtggaccaccgctgcgccagctgcggcaccacgtccacgccgctgtggaggaacgggcctcgcgggcccaagtccctgtgcaacgcctgcggcatcaggttcaggaagaaggagcggcgtgcggcgacggggacgacgacggctgacatggaccagggcgggtgctacttggcgcagcgggcgcagtacggggcggcgacgtctggtagggcgtactacggcggcggcgacggcgacatcgcggacgccgaagcagtgccggcgcagttccttgcatggcgacccagcgtcgtcgaggcggccgagttcgcggcggtctggccggagccggcgaccttgttccagtacatcaactagtccggttcggggtacgcaaggcaagcgcaacggttttgggggggcgttttgttgaaccgttttgcacgcggccgaatgaacctggacgcttggaactgaaacgcatttgtttcgtttctccatcgcggttcgcggaattcagattcggcccatcggattaaccactccgtaggtactcccttattttagcctagtaaatatcatggaggactctatcaatatatagatcgccaatagtgccgggctaatcgggccggcccagagcacggcacgagtggagttgggcccatgccggcacggccctatggctagtgtcgtgactgtgccgagcacgggccgagtgccgagcacgctgggtcggcacgggcacggctcaattagctctaaagcacgattaggcgcaaacacgactagtgctgtgggctgtaatctttttttctatttagggttatctcaaaatggttaatgtttatctagataggtttttaattatgtagtcattacactaaacagctcaatactagctattttagtatgttttaactgtgtttgtgaatgtctcactaaaattaaaattctatggtgtggcactacgggtctaccgtatcggcacggcacggctaagaaggctctatgccttggttaggggcctcctgtttggccatctcggataaatctgttgaaatggttgaattgttatcctcttcgtgatcctattgtttcgggctacaaaatctatgggcccaagtacgcatccacaatgaaagcccatgtgtccagcttggaatcacgggatggactggact

SEQ ID NO: 149515 - DNA, 732 bp, Zea Mays
atggcggccgcgtccccagccttctcgctcttcttcccgctgcccaacaccaaggccttccagttcgacgacgacagccacagctcagtcaccacctgcccctcgtccccgtcctcctcctcttcctccacgggcaccgtcgactgcacgctctcgctcggcacgccgtcctcgcgccgcgccgccgccaagccccgcccgccgtgcctggcgctaccgtctcgcagcgccgtgtcgtgcgacgtcgctgcacccgctgaccagtcctgctgctgccgctgctgctcctgcccgggcggcagacgtccctctcccgcggccgcgaacaagagagccgcggccgcgcacgggcacgggcaggacccggcgccgctcgtggaccaccgctgcgccagctgcggcaccacgtccacgccgctgtggaggaacgggcctcgcgggcccaagtccctgtgcaacgcctgcggcatcaggttcaggaagaaggagcggcgtgcggcgacggggacgacgacggctgacatggaccagggcgggtgctacttggcgcagcgggcgcagtacggggcggcgacgtctggtagggcgtactacggcggcggcgacggcgacatcgcggacgccgaagcagtgccggcgcagttccttgcatggcgacccagcgtcgtcgaggcggccgagttcgcggcggtctggccggagccggcgaccttgttccagtacatcaactag

SEQ ID NO: 149516 - DNA, 2175 bp, Zea Mays
ggtcccttcaatctctctgcgcaatcaaactgcggtggccaaccccggaagcggcggcgggcaaagcgcgcgacgcagagaagcgtaacttcaggccgccggtcgctctacgcatcctgctccccgttctcgtcggagatccaccggggcagcctttctttccccttcctcaatcaagtcgatccaatttcgcgcgcgggtcgggctcgccttctcctccagtctccacctccaccagcgctcgaggtcgacggacgctactcgcagcagttcttctttgcggtgcggccgagaagaagctaaggctcaggcatgagcttccgggaccaggagagtggcggggaggatgggggcaggacgtcctccgcctccgacctgcggaagccgctcatcaacaccgggagctggtaccgcatgccgccggcgggtggcgtgatgggctcgcggcaatctagcctcatggagcgattgggctcctctgcgttctctctccgcgacgtcgctatctcggcgacgctctgcacgctcattgtcgcgctaggtcccatccagttcggtttcacatgtggctactcctcacccacgcaggacgccatcattgctgaccttggcctctccctctctgagttctccctcttcggttcattatctaatgtaggggcgatggtaggcgccatctccagtgggcaacttgcagagtatatcggccgcaaggggtctctcatgatcgctgcgattccaaacataattgggtggctcgcgatatcatttgcaaaagattcctctttcttgtttatgggtcggctgctagaaggatttggagttggtgtaatatcgtatacagtaccggtttatattgcagaaatcgctcctcaagatcagaggggagctcttggttctgtcaatcagctctccgtcacgattggtatattgcttgcctatttgtttggcatgtttgttccctggagaattcttgctgttctaggcattttaccctgttcaatcctgattcctggactgttctttgtccctgaatccccaaggtggttggcaaaaatggggaagatggaggattttgaatattcattgcaagttctgcgaggatttcagacagatatcacagcagaagtaaatgaaataaagagatcattagcatcatcgaggaggaggacaaccataaggttcgctgatatcaaacagaagagatacagtgttccccttgtgataggaatcggtctccttgtcctgcagcagctaagtggtgtcaatggcattctattttatgctgcgagcatcttcaaagctgctggtattacaaacagtaatctagcaacatttggtttaggggctgttcaggtgattgctactggagtgacaacctggttgactgacaaagctggtcgaaggcttcttctcattatttccaccacaggaatggtcattactcttgttattgtttctgtgtcattttttgtgaaggacaacatagctgctggttcgcacttatactctgtaatgagtatgctttcactggctggacttgtggcatttgtgattgcattttctcttggcttgggagcgattccgtggatcattatgtctgagatccttcctgttaacatcaagagccttgctggaagtgttgcgaccctggcgaactggctgacagcatgggccattacaatgacggcaagcctgatgttgaactggagcagtggaggaacctttgctatctacgccgtcgtgtctaccatggccctcattttcgtgtgcttgtgggtgcctgagaccaagggaagaacgctagaggaaatcgccttctcattccgctgacacgtcgtcatgatctaggtatgggaagccacaccacaccatgtgtcattgagtcatgccgcggtgcgttcagttcatgaatcccgcagggatcttgcggccattctgttgcttggatgtaccaccatcttcagtgttcataccaatgtacattgtacaatatgacgacgacgccatagcagaaaggcaagtgggtttatgtttgtacgatggactagtagcagaaagcactcgaacccctgtacgggttgcggaggagagcaatttatttgctgtattttcctggttcaataccggacacgttagaattttgaaaaataaaaatctgagcaaatttatcaa

SEQ ID NO: 149517 - DNA, 2099 bp, Zea Mays
ggtcccttcaatctctctgcgcaatcaaactgcggtggccaaccccggaagcggcggcgggcaaagcgcgcgacgcagagaagcgtaacttcaggccgccggtcgctctacgcatcctgctccccgttctcgtcggagatccaccggggcagcctttctttccccttcctcaatcaagtcgatccaatttcgcgcgcgggtcgggctcgccttctcctccagtctccacctccaccagcgctcgaggtcgacggacgctactcgcagcagttcttctttgcggtgcggccgagaagaagctaaggctcaggcatgagcttccgggaccaggagagtggcggggaggatgggggcaggacgtcctccgcctccgacctgcggaagccgctcatcaacaccgggagctggtaccgcatgccgccggcgggtggcgtgatgggctcgcggcaatctagcctcatggagcgattgggctcctctgcgttctctctccgcgacgtcgctatctcggcgacgctctgcacgctcattgtcgcgctaggtcccatccagttcggtttcacatgtggctactcctcacccacgcaggacgccatcattgctgaccttggcctctccctctctgagttctccctcttcggttcattatctaatgtaggggcgatggtaggcgccatctccagtgggcaacttgcagagtatatcggccgcaaggggtctctcatgatcgctgcgattccaaacataattgggtggctcgcgatatcatttgcaaaagattcctctttcttgtttatgggtcggctgctagaaggatttggagttggtgtaatatcgtatacagtaccggtttatattgcagaaatcgctcctcaagatcagaggggagctcttggttctgtcaatcagctctccgtcacgattggtatattgcttgcctatttgtttggcatgtttgttccctggagaattcttgctgttctaggcattttaccctgttcaatcctgattcctggactgttctttgtccctgaatccccaaggtggttggcaaaaatggggaagatggaggattttgaatattcattgcaagttctgcgaggatttcagacagatatcacagcagaagtaaatgaaataaagagatcattagcatcatcgaggaggaggacaaccataaggttcgctgatatcaaacagaagagatacagtgttccccttgtgataggaatcggtctccttgtcctgcagcagctaagtggtgtcaatggcattctattttatgctgcgagcatcttcaaagctgctggtattacaaacagtaatctagcaacatttggtttaggggctgttcaggtgattgctactggagtgacaacctggttgactgacaaagctggtcgaaggcttcttctcattatttccaccacaggaatggtcattactcttgttattgtttctgtgtcattttttgtgaaggacaacatagctgctggttcgcacttatactctgtaatgagtatgctttcactggctggacttgtggcatttgtgattgcattttctcttggcttgggagcgattccgtggatcattatgtctgagatccttcctgttaacatcaagagccttgctggaagtgttgcgaccctggcgaactggctgacagcatgggccattacaatgacggcaagcctgatgttgaactggagcagtggaggaacctttgctatctacgccgtcgtgtctaccatggccctcattttcgtgtgcttgtgggtgcctgagaccaagggaagaacgctagaggaaatcgccttctcattccgctgacacgtcgtcatgatctagggatcttgcggccattctgttgcttggatgtaccaccatcttcagtgttcataccaatgtacattgtacaatatgacgacgacgccatagcagaaaggcaagtgggtttatgtttgtacgatggactagtagcagaaagcactcgaacccctgtacgggttgcggaggagagcaatttatttgctgtattttcctggttcaataccggacacgttagaattttgaaaaataaaaatctgagcaaattt

SEQ ID NO: 149518 - DNA, 861 bp, Zea Mays
gggataccggaaataccctgcacggccatccgatcgagccaacgcttggagacgccgtctccgaatgaagtaggggagagcggggtgccggggggtcagtttgttgccggtcatcctcctcgtcgtccaacccaggtgagttccgcatttcacatcatcccatgctcgccttttaattttatatgggaacactaggtcatcgcatcgttcacgttcactctctgagactccgagacgcggttgctatggcctatttgttgattattacgggaatatggctgatgaggtatttccttccttctgatgctggttcatgtgttcattcgtcggcttgttgagttgctgttggtgacttgcagtgcctggtttactaatgatactcaggggcaccgattggcttgtttcacgtaggaatgcagtttaaaaactggagcaccaccgcgtggttgcttttgcaggatagtgtgccaatcaggtcaggacataggcttcagcattattttctgaatcctgctcacaacaattgaactgcagtctgtgccatgacaactgacaagtcatatgcgtgagtcagacgaagagtttgagacgagacaaattttcaaagcaggacacctctactaattagttgcagaatcaagtgtgtctgttgcacatggctttgacaaagcattgcatttctagtttgctgttacatacctagaccctagtgaatagagaagtcactccggtgctgctttaggaataatgctaatttattcagtcttgatatcttctgtaaaattcacagtaaattcataaacgaaagggaattttatttgtgagtaaagccgtaatagtatttgcatcaggagttcacaa

SEQ ID NO: 149519 - DNA, 726 bp, Zea Mays
gggataccggaaataccctgcacggccatccgatcgagccaacgcttggagacgccgtctccgaatgaagtaggggagagcggggtgccggggggtcagtttgttgccggtcatcctcctcgtcgtccaacccaggtgagttccgcatttcacatcatcccatgctcgccttttaattttatatgggaacactaggtcatcgcatcgttcacgttcactctctgagactccgagacgcggttgctatggcctatttgttgattattacgggaatatggctgatgaggggcaccgattggcttgtttcacgtaggaatgcagtttaaaaactggagcaccaccgcgtggttgcttttgcaggatagtgtgccaatcaggtcaggacataggcttcagcattattttctgaatcctgctcacaacaattgaactgcagtctgtgccatgacaactgacaagtcatatgcgtgagtcagacgaagagtttgagacgagacaaattttcaaagcaggacacctctactaattagttgcagaatcaagtgtgtctgttgcacatggctttgacaaagcattgcatttctagtttgctgttacatacctagaccctagtgaatagagaagtcactccggtgctgctttaggaataatgctaatttattcagtcttgatatcttctgtaaaattcacagtaaattcataaacgaaagggaattttatttgtga

SEQ ID NO: 149520 - DNA, 110 bp, Zea Mays
gttattcaaacatgttcaaaatctttacaacaatattaaccataaagataaattgatacatttatcaccctccacctatagaaatagcattacaatatgatttataaaaa

SEQ ID NO: 149521 - DNA, 306 bp, Zea Mays
atgacggacgccgcagctaccaccgccgtagcgcccaaagacagcaacagcggtggtagggaaacaaccgtcgaacccaccgtgggaggggcaccagcagtgatagctgtgtcacgggaaccacctcgaggtcaggcaagaactcctgtatctctggaacagggacgccgacagtatgctcccaacacttcccggacaatggaggtcgccgatgcacccacgtcagcagcagcggacgtcgaggctgcaggcaagacgaccgggacggccgagagagtcaccctggcagatgtatggcagatgtag

SEQ ID NO: 149522 - DNA, 1428 bp, Zea Mays
ccctgcactgcacgcccaagtttcctcttgttcccctgcccagactgcacgcctcctgtcctgaccatgcctctgaggccagttcatggctttgcgtctcttcttgtcatcttcgcctgccactgccatggtgagttactgtacctactctgctgtctttgcctgctagtttcgtttcgtcgctttgttcagctgttgaagctgacgagcagagagtgagagtgtgtcatgtcagtacccagtaggtcgcagcaacagacaaaaatctgctttcgttcgtactgcttactaatctgcagcgtccagatactggagagctttcgttcatccaggcgctgctgaactgaaagatgatggtctgcttcacgctgtctgcagggggaggaagcgagcagggagcggacgtggcggcagagcggctggagcgcgacgtgacgtcgcccctggccacggtcccggtggtggacccgacggcggcggcggcggcgacgacgacgcagtcgccggccaccggcgggagctggtgcgtggcgagccccagcgcgagcgcgacggcgctgcgggtggcgctggactacgcgtgcgggcagggcggcgcggactgctccgcgatccagcagggcgggagctgcttcagcccggacaccgtccgcgaccacgcgtcctacgccttcaacagctactaccagaagaaccccgtgcagaccagctgcgactttggcggcaccgccgccctcaccaccgcagacccaagcacttcgacgtgccagtatccatcaacgagcaccggcgcttcggtcctgaacacgtcgactccgctgacgccaacgaacgggtctccgcccggccccgggtacgggagctctccgccggccggatacgccaactctcctccgctgtacgggaacatgtcgccgccggactacggcgacaacatcagcgccgcagcgagggcgctgcccggccgcaagacgacggcgacggcggccgtcgcgtcgctggcgacgacgtgcctactgaccgcggcactgtcactgacggtgagcggctgaacctgcacacgcacgcaacaatagctccaagccgccgccgccgcacgttcaggtgccgaccgtgatgtcctggaaggccatgaaggtggagacgagacaaacatgtgccggtgcagcagagactacagaggatacgtgcgtgtacagtacaggcagtggcggatctggagagcaggatggtgatggagaccagtgacgccgtgtcactgtcagtcactctgtcagtagtgttgcctgccctttgtaatgtttagcaaatgtgtacagatagactcgtatacacggcgacggttatgatctttggtatcccctcggcccctccaactctaaactctatctcttaaattaaaaaaaaacaagccatgatttgagagct

SEQ ID NO: 149523 - DNA, 933 bp, Zea Mays
cctccgcgtggtgaccgtggtcgccgtggcgtgcgcgtccctgttcgcgcagcacgaggccggcaaaggcttcgccgtgtccgtcgcgaacgacctgccgcggggcagcgccgcggcgcggcgcttcgacctcctcctggtgtccaacggccgcgccgagcgcgcgctcctgcgcgccagccgcgccgtggagcgcgcgctgttcccggacccgtcgttcccgccccggcgcgcgtcaccgagtccatggttgactacctcgcctccgccgcggccgaggtcgaggtcgaggtcgaggcgcctccatcggctgccgggtgcggcatgtcggcgcggctcctgaggcttctggaggcgcggcgcgagggcttcgtggcaaggctgaaccgggcgatgagggaccggtggagcgacgccgctgtggacgcggcgctcggcgcgccggcccggctcgcctgccacgaccagaagaagggagcgacggcgctgaccggccgcggcaccaccacctctccacgtcggacgccggacgccgctcgtgggtccagcgtggcaacgtgaggctggaagcgaagggcagttctggtattggtgtcttagattgaaattaaaactggtcccgcgggtggtaggcgtgggccatggccgcggccctaatggtggctggaggtgagtgagtggtcgttgtcatgcatgtaaaaatggtagatggctgggactgggaggatgagggccccccggtggcttcatcatttggcttgagcatgagagcatccatccagatccatagtggattgtaaatgacaggtagtgctataaaaatatggttccattccatgccatagcaaacgcgatgtgagaaatagattttttgttttatctttgcctgtgacgtggatgaacgcggcggttgataatgatcgacgaagaaga

SEQ ID NO: 149524 - DNA, 1078 bp, Zea Mays
agccagctccaagctagctttgctttagcctcggtcttcgccattcttaatccagtgctccccaccacgccaatggaggctccgctcctcctaccaatctccaccgcctcatcctgcatcgagatcgccgagggcgccgtgccatcgggccctcgtgctcgctcgtcctcgtccatgccttcggcccagagcttcgtcctccgcgtggtgaccgtggtcgccgtggcgtgcgcgtccctgttcgcgcagcacgaggccggcaaaggcttcgccgtgtccgtcgcgaacgacctgccgcggggcagcgccgcggcgcggcgcttcgacctcctcctggtgtccaacggccgcgccgagcgcgcgctcctgcgcgccagccgcgccgtggagcgcgcgctgttcccggacccgtcgttcccgcgcaggcaggtccgccgcgtcaccgtccggatggctgcgcgcaacctcaccggcgccgcggtgcactccgcggcgcccggggagtacgtggtctcgctgggccccggcctcgcgtcctccgcgcccgccgccgaggccgcgctgcgccgcgccatcgcgcgcgtgtggctctgggacggccgcggcgccgccccggcgcgcgtcaccgagtccatggttgactacctcgcctccgccgcggccgaggtcgaggtcgaggtcgaggcgcctccatcggctgccgggtgcggcatgtcggcgcggctcctgaggcttctggaggcgcggcgcgagggcttcgtggcaaggctgaaccgggcgatgagggaccggtggagcgacgccgctgtggacgcggcgctcggcgcgccggcccggctcgcctgccacgaccagaagaagggagcgacggcgctgaccggccgcggcaccaccacctctccacgtcggacgccggacgccgctcgtgggtccagcgtggcaacgtgaggctggaagcgaagggcagttctggtattggtgtcttagattgaaattaaaactggtcccgcgggtggtaggcgtgggccatggccgcggccctaatggtggctggaggtgagtgagtggtcgttgtcat

SEQ ID NO: 149525 - DNA, 111 bp, Zea Mays
gtgaattgggccaacatattaagaaatacacgatcaacttcttattttcaggacagaggaagacctagcatggacagtcgtctgaaatttgaccgtggcaataacaaataa

SEQ ID NO: 149526 - DNA, 914 bp, Zea Mays
actagtcggattgctccgattccacgcgggcacgcacgtggtgcccacgcacgccgcgcgctggggggccgccgtgtcgccctcctctccccgctacttgatgttactgatatatacgcacgcgacgcggccaccactttccccacccatccaccgagctgccctgctacacggtcccctgccaagatccatcttcccggttacgccgcctgatcgaagtgaacaagcaaggaagagccatggcgagcgagcacgcggcggggggcgaggctaagcatgaccagaagcagagcctgatggacaaggcgaaggggttcgtcgcggagaagatcgcgcacatccccaagcccgaggcgacgctggacggcgtgacgttcaagggcctgagccgggagtgcatcacgctgcacagcagcgtgaacgtgtccaacccctacgaccaccgcctccccatctgcgaggtgacctacacgctccggtgcgccggcaaggaggtggcgtccggcaccatgccggaccccggctggatcgccgccagcggctccaccgcgctggagatccccgccaaggtgccctacgacttcctcgtctccctcgtcagggacgtcggccgggactgggacatcgactacgagctccaggtcgggctcaccgtcgacctccccatcgtcggcaacttcaccatcccgctctccacctctggcgagttcaagctccccaccctcaaggacttgttctgatctagtagtagctcgcttgccttgtgttctgtgcgggcgcgcaccagcgatctgtacgacgagcttttgcaaataaacgacgcagctcctctgttctatatatctcaatgaatgcctaagctaaggggatggatggtttaatttgactgcaaataaagagctggatttcgttca

SEQ ID NO: 149527 - DNA, 1254 bp, Zea Mays
atccccggcacgcagcggtctgcctccctcccttgtcccccccttccaggcagccccatcacatgcaggtcctccggctcctggcggcgcggccaggcgccgccgcgaccatcacggacgacgacgagggccccttcttcgacctggacttctcttcctcctccgtccgggcctcctcgaccagctccacctcggcctcctcggacgacgccgccctcacggacctcgacctcgccatctccctgcaccggagccgctccgcctcgccctcctactacgacgcgcgccgcctctcccagctccacttatttccctcccacgcgccgccgctcctcctcaagccgggccccgacgtcggcctgcaggcgcacagctccgcgggcgccgctgccagcagcaccacgaacgccgcgctgtacggccgccgccgcagcagctccgccggcagcggcgcgcggttgtcgctgcggcaattcatggagtgccctaccacgccgggcggcgacggggaggccgagcgcgagccgccgccgccccgcgccgccgtccggcggtacctcgccgagatctccgtgcggctgcggcggagcgtgcgtccccgccgcctgcgcaagagccggtccgccgcagcgccggcgacgcaccgcgacgactcgctggccgagaagcaggacggcattgccagcgccatcgcgcactgcaaggagtcgctccaccgggggctggcgctggccccgtccgtgtcaccgcagtcgggccgggctgcaacgagtcgcggtcctttggttttgtctagttcttagtttgtgtaatgttgggttgttagaggcttggaaaaaaaacaaaaaagaactctttttaggctttctttacccgctctaggtagatgaggaaaagttcggggcgccatgatggcggcgacagcaaaagccaaaaggcgccgcgcgcgtacgtacggcaggccgcggttggacgaggatctgtgcgtggttttctgatgggcctcgggaacaggtgataaaatattttttttaatgataaaatatgttttttttaatgataaaatactccctccggtgcagtaaaagaagtcatgctgcgcgtaaccgagtgtgcacaaaaagaagtcatagcgcgcgtgggtctgggatttggacgttgttgcccctagtaattgcacaaaaaaagatgcatttaagaggaatcgaacttgagacctccagtctagaatgccttggagctgctgcagcaacc

SEQ ID NO: 149528 - DNA, 81 bp, Zea Mays
atcgccgtcacgcagcggcccagggcgaagttcggcaagatcctcgcgcacctccgcgcctccggcgatggcgtcaaggac

SEQ ID NO: 149529 - DNA, 2479 bp, Zea Mays
aactctaccaaaataattagttttaaattttgttttaaaaaatagaaataaaaaaacccaccgcgttcgtgcgtccgtggagagggacggagaccagtcgcccgccgacccgtgcgtctccactcgtccacgcgcaaatccccttcccaccccctgaccagaccaaaggcagtagcaactagcaatgcagcttcctcctcgtcttcctcctccacctcagctgctcatgctcctcccagtcccctcctcctgcccccaatcctcttccgcccctccctcgggcctcttccccatctcctgatcacactcgctcgcgcgccatgggcggccgcgcctcccgccaccgcgcgcagccgcacgaccagtcttctcaccctcctcctcggccgccgcccaagcagcagcagggccagcagcaccccaacaaccgccccaacaagcccaagcagcagcagcagcccccacctccacgtcctccgccgccacaccaggctccccccgccgcctcccccgccgccccgggcgcggccaccgtcggccgcgtgctgggccggccgatggaggacgtgcgcgcgtcctacacgttcggccgggagctgggccggggccagttcggcgtcacctacctggccacgcacaagcccaccggccgccggtacgcgtgcaagtccatcgcgacgcggaagctcgcgcacagcgacgacgtcgacgacgtccgccgggaggtgcagatcatgcaccacctcacgggccaccgcagcatcgtcgagctccggggcgcctacgaggaccgccactccgtcaacctcgtcatggagctgtgcgagggtggggagctcttcgaccgcatcatcgcgagggggcactactccgagcgtgccgccgccgccctctgcagggagatcgtctccgtcgtccacagctgccactccatgggggtcatgcatcgggacctcaagcccgaaaacttcctcttccttaacaagagggaggactcgccgctcaaggccacggatttcggactctccgtcttcttcaagcccggcgagcagttcagggatcttgtcggcagcgcttactacgtcgccccagaggtgctcaagcggcgatacggagctgaggcagacatatggagtgccggagttatcctctacatcctgctatccggcgtccctcctttctgggccgagaacgaggatggcatatttgatgctgttttgcgaggtcatattgacttcgcatctgatccctggccttccatatcgaatagcgcaaaagatttggtcaagaagatgctgcgccaagaccccaaggagcggcttactgctgctgaaattttgaaccatccatggattagagaggatggagaggccccagacaagccactagacataacagtaataagcagaatgaagcagttccgggccatgaacaagcttaagaaggttgccttgaaggttgttgctgagaacttgtcagaggaagagatcgtgggcttgaaggaaatgttcaaatccctggatactgacaacagtgggacaataacgctggaagaattgagagctggtttaccaaagctcggcaccaaaatctctgaatcagaaataaggcagttgatggaagcagctgatgttgatgggaatggcaccattgattatgttgaatttatatcagcaacaatgcacatgaatagactagagaaggaggatcatatatttaaagcattcgagtattttgacaaggatcatagcgggcacattacagttgatgagttggaagaagctttgaagaagtatgatatgggcgatgaggcaacagttaaagaaattattgctgaagtagacacagatcacgatgggagaatcaactaccaggagtttgttgccatgatgaagaataatagccccgagattgttccaaatcggaggcgcatgttttaaggctcatctcctacatttaattggaaaaaagaaagacttctaagatatatttttccgcggtcagaggggagagcaactgatactcgaaagtgggattcagcctgggcatatgtgcaatgatattacagactttggacaagtcatcagtcatgggtgattgcctttgtgttgcttccattttcgaccatctcatcctacgatctttccaagttatctttaatgaggtgtgtcgtgtggtctatgtttcctgcctctggatcttttatgtaagagaaacggacttgtaaaacagttccaaattatcatataccaggcgaaaagtaatgcgatgtgccttgtgatcctcttttttttcttttctctttggtcagcggatcatttaatgtcgatgctttctccaactgacaggagcaaatcgtaatcgcccactgcccccttttcaagaacggaacacatgactcctgtgtacatgccaaaacctcttggacagtgagcaggtttgaaacgagcccttccagaacaggaaaaaaaacaacaac

SEQ ID NO: 149530 - DNA, 2449 bp, Zea Mays
aactctaccaaaataattagttttaaattttgttttaaaaaatagaaataaaaaaacccaccgcgttcgtgcgtccgtggagagggacggagaccagtcgcccgccgacccgtgcgtctccactcgtccacgcgcaaatccccttcccaccccctgaccagaccaaaggcagtagcaactagcaatgcagcttcctcctcgtcttcctcctccacctcagctgctcatgctcctcccagtcccctcctcctgcccccaatcctcttccgcccctccctcgggcctcttccccatctcctgatcacactcgctcgcgcgccatgggcggccgcgcctcccgccaccgcgcgcagccgcacgaccagtcttctcaccctcctcctcggccgccgcccaagcagcagcagggccagcagcaccccaacaaccgccccaacaagcccaagcagcagcagcagcccccacctccacgtcctccgccgccacaccaggctccccccgccgcctcccccgccgccccgggcgcggccaccgtcggccgcgtgctgggccggccgatggaggacgtgcgcgcgtcctacacgttcggccgggagctgggccggggccagttcggcgtcacctacctggccacgcacaagcccaccggccgccggtacgcgtgcaagtccatcgcgacgcggaagctcgcgcacagcgacgacgtcgacgacgtccgccgggaggtgcagatcatgcaccacctcacgggccaccgcagcatcgtcgagctccggggcgcctacgaggaccgccactccgtcaacctcgtcatggagctgtgcgagggtggggagctcttcgaccgcatcatcgcgagggggcactactccgagcgtgccgccgccgccctctgcagggagatcgtctccgtcgtccacagctgccactccatgggggtcatgcatcgggacctcaagcccgaaaacttcctcttccttaacaagagggaggactcgccgctcaaggccacggatttcggactctccgtcttcttcaagcccggcgagcagttcagggatcttgtcggcagcgcttactacgtcgccccagaggtgctcaagcggcgatacggagctgaggcagacatatggagtgccggagttatcctctacatcctgctatccggcgtccctcctttctgggccgagaacgaggatggcatatttgatgctgttttgcgaggtcatattgacttcgcatctgatccctggccttccatatcgaatagcgcaaaagatttggtcaagaagatgctgcgccaagaccccaaggagcggcttactgctgctgaaattttgaaccatccatggattagagaggatggagaggccccagacaagccactagacataacagtaataagcagaatgaagcagttccgggccatgaacaagcttaagaaggttgccttgaaggttgttgctgagaacttgtcagaggaagagatcgtgggcttgaaggaaatgttcaaatccctggatactgacaacagtgggacaataacgctggaagaattgagagctggtttaccaaagctcggcaccaaaatctctgaatcagaaataaggcagttgatggaagcagctgatgttgatgggaatggcaccattgattatgttgaatttatatcagcaacaatgcacatgaatagactagagaaggaggatcatatatttaaagcattcgagtattttgacaaggatcatagcgggcacattacagttgatgagttggaagaagctttgaagaagtatgatatgggcgatgaggcaacagttaaagaaattattgctgaagtagacacagatcacgatgggagaatcaactaccaggagtttgttgccatgatgaagaataatagccccgagattgttccaaatcggaggcgcatgttttaagaaagacttctaagatatatttttccgcggtcagaggggagagcaactgatactcgaaagtgggattcagcctgggcatatgtgcaatgatattacagactttggacaagtcatcagtcatgggtgattgcctttgtgttgcttccattttcgaccatctcatcctacgatctttccaagttatctttaatgaggtgtgtcgtgtggtctatgtttcctgcctctggatcttttatgtaagagaaacggacttgtaaaacagttccaaattatcatataccaggcgaaaagtaatgcgatgtgccttgtgatcctcttttttttcttttctctttggtcagcggatcatttaatgtcgatgctttctccaactgacaggagcaaatcgtaatcgcccactgcccccttttcaagaacggaacacatgactcctgtgtacatgccaaaacctcttggacagtgagcaggtttgaaacgagcccttccagaacaggaaaaaaaacaacaac

SEQ ID NO: 149531 - DNA, 1804 bp, Zea Mays
aactctaccaaaataattagttttaaattttgttttaaaaaatagaaataaaaaaacccaccgcgttcgtgcgtccgtggagagggacggagaccagtcgcccgccgacccgtgcgtctccactcgtccacgcgcaaatccccttcccaccccctgaccagaccaaaggcagtagcaactagcaatgcagcttcctcctcgtcttcctcctccacctcagctgctcatgctcctcccagtcccctcctcctgcccccaatcctcttccgcccctccctcgggcctcttccccatctcctgatcacactcgctcgcgcgccatgggcggccgcgcctcccgccaccgcgcgcagccgcacgaccagtcttctcaccctcctcctcggccgccgcccaagcagcagcagggccagcagcaccccaacaaccgccccaacaagcccaagcagcagcagcagcccccacctccacgtcctccgccgccacaccaggctccccccgccgcctcccccgccgccccgggcgcggccaccgtcggccgcgtgctgggccggccgatggaggacgtgcgcgcgtcctacacgttcggccgggagctgggccggggccagttcggcgtcacctacctggccacgcacaagcccaccggccgccggtacgcgtgcaagtccatcgcgacgcggaagctcgcgcacagcgacgacgtcgacgacgtccgccgggaggtgcagatcatgcaccacctcacgggccaccgcagcatcgtcgagctccggggcgcctacgaggaccgccactccgtcaacctcgtcatggagctgtgcgagggtggggagctcttcgaccgcatcatcgcgagggggcactactccgagcgtgccgccgccgccctctgcagggagatcgtctccgtcgtccacagctgccactccatgggggtcatgcatcgggacctcaagcccgaaaacttcctcttccttaacaagagggaggactcgccgctcaaggccacggatttcggactctccgtcttcttcaagcccggcgagcagttcagggatcttgtcggcagcgcttactacgtcgccccagaggtgctcaagcggcgatacggagctgaggcagacatatggagtgccggagttatcctctacatcctgctatccggcgtccctcctttctgggccgagaacgaggatggcatatttgatgctgttttgcgaggtcatattgacttcgcatctgatccctggccttccatatcgaatagcgcaaaagatttggtcaagaagatgctgcgccaagaccccaaggagcggcttactgctgctgaaattttgaaccatccatggattagagaggatggagaggccccagacaagccactagacataacagtaataagcagaatgaagcagttccgggccatgaacaagcttaagaaggttgccttgaaggttgttgctgagaacttgtcagaggaagagatcgtgggcttgaaggaaatgttcaaatccctggatactgacaacagtgggacaataacgctggaagaattgagagctggtttaccaaagctcggcaccaaaatctctgaatcagaaataaggcagttgatggaagcagctgatgttgatgggaatggcaccattgattatgttgaatttatatcagcaacaatgcacatgaatagactagagaaggaggatcatatatttaaagcattcgagtattttgacaaggatcatagcgggtaatttcactccgaactccaccttttcgttacttttcacctttaacatta

SEQ ID NO: 149532 - DNA, 2574 bp, Zea Mays
tccagcccagcggtttgccgcgccaccccgcccccgcaggccgcagccgcttttttattataaaccgcctgcgctgcgccccctcctcgcgtgctcgatctttcccccctgcgctgcgcacaccaccaccagacgccccgccgccgccgccccccgtcgccccggctcccgcgcgcatcagtccggccctccccgtctcgtctcccccgctccgctgccgcaggtctattgtcccttccggaaactgaagctcagccccccaaaacctcaccgtcctcctgtggttcttgaaagtggcgagagatggatcgtgacgatgtggctggctttgtcagcggaggttgcaaacatttcttgcgggagacttctaatctaatataacccagcagcacagcacagtagatgacagtagcagtagtagggtttttggttcttttcgtttcgtctctggacatgtttcttgactggaatggacagggcctcctcctccctaagccttggatctggtggtaacgttgactcctcgaacgatccctgtcaccggcaggcagttcagtgcagatcgaggtactgccgtcggcacactactagtgtatcgtcccagcttctctggggacaagacaacccgagggctggtatggctggagttgaaggtcctggaaacccgctgctcacgcttggtctgggccggtcaccaagttcctctgagacgaacagcaaggtcagctcccccacagcctgcatgatgtctccatcttcagtgaaagaggctgacgaggagtcgtcgatggatcttggtctgagctttgatctctgtcttggtcatgacactgcacatcgtcacaagaagccatcggcaggtgctccgaagttggaccttcagttgagcctgtccacctgttcgcctgaatcagccttgaccaatgtaagtgccaatgatggcttagagacagtggcagatactactactactctggaaaagctagagccctggatcttcaggaattacatggcttcatcatcatcatatgcatatgcttctgaagcaacctacggcctttctttgccaaagatacctgaagatgtcgtggtcgtgccttcaacaacagacgtgtcatcagccgttacggtgagcgtgaaaagcccggctccgaaacggagcaatattagcacgaaatgctgccagttcccagggtgtgagaagggagcgagaggagcctctggttactgtatcgcccatggcggcggcaggcggtgccagaaacctggctgccagaagggagccgaggggaggaccatctactgcaaagcccacggtggcggcaggcggtgccagtacctgggctgcacgaagagcgccgaaggccgcaccgaccactgcatagcccacggcggcgggcggcgctgcagccaggacggctgctcgcgcgccgcgcgcgggaggtccggcctgtgcatcaagcacggcggcggcaagcggtgccagagggagagctgcaggaggagcgcggaggggcactcgggcctctgcatctcgcacggcggcgggaggcggtgccagttcccggagtgcgccaagggcgcccaggggagcacggggctgtgcaaggcgcacggcggcgggaagcgctgcacgttccccggatgcaccaggggagccgaaggcagcacctggctctgcaaggcgcacggcggagggaagcgctgcgcccaccagggcggcggcggcggcggcgcgtgccccaagagcgtccacggcgggacgcggtactgcgtcgcgcacggcggcgggaagcggtgcctggtcgcgggctgtaccaggagcgcgcgagggaggacggagcactgcgtccgccacggcggcggcaggcggtgcagggccgagggctgcgccaagagcgcgcaggggagcaccgacttctgcaaggctcatggcggagggaaacgctgcgtgtggggccaggagggctcgagcctcggggccggcgggccgccgtgcgataggttcgcgcggagcagggtcggtctctgtgcgggtcacggcgctctggtcgaggaccgctgcgtacacggtggcggctcgttgggccctgcccctgctatcgggcagctgacaaccgattgtgagcctgctgctgctgctgcaacgaggggcgatgctgatatggcggacggagacgaggaagcgttcctgacgctgggatggaacggcgacggtgagtctgctggcgccacggccccggccccgttcatggagggcagggtccatggcagcgggctgcttgctctgctcagctgctctggtaatggcggcgcctcggcggcttcgtcgactggcatgcgcacctggatgtgatgttgtaggttcgagtagtgacagtgtcttgtcgcaatgcctgaatccggcggcataaacggctgccccgtgtagcagaaataataaggggtagccagcaggggtcatagtgtgttattgctatcgttggtgaagtgtttatctgactgactgtgtgtattgcccgtgattgattgaaagtctgtcttatacattgtgaagtggtagccttgtttcgt

SEQ ID NO: 149533 - DNA, 1109 bp, Zea Mays
cctggacctccttgctcatcagtgctgacatatgtaccttagaaagcatagtagctttgtacagctatgctagtgcaaattcactgcacacaattaatatgatgattcctacatcaacttacatttttcttatctttggaggtgatgtggtaatgacgctgcttgtttggcaagtggccaagaacaaatcagggaattactagcaactttagttagccaaaagcagaaaggccaatactgagaacaattcaagaagattttttttcataagcatcttctttctgtctctgtctttggggcgaactcaagattcatagctgaagatgttgaaggaaccactgtgcgtttgtgttgagtttagagtgcatatttgttttgaacacacaaaagtaacttgtgaccatctgaatgcatctgcgccatgaatggtagtactgttggtggataaatagtgcattgcttaagcagtagacagcctaggcagaacaacaagatgtacctgctctcattctaatgattaggttggtcatcatgactttgtctaacatctggtcctatcctgttagcaagttatttctaccttttctgcgaaagggcctctagcgtaatggttagggcttccgagtagcacttccaggtcctgggttcgatccccctcgggggcgaatttctggcttggttaaaaaaatctcctcgctgtgccctgcccgctcccgggttacgtcctgcgcgccaccctccggctgggccgttgcagagtgggcggtgatggcccgctagtgatggggggccagggttcggggattttctcggctgggaccatgtttcggtctcttcttaatataataccgggagggcggtctttccctccccgactgagtttttatttctaccttttctataccttgcttccaataaacatgtttggggcttgttcggaggcttgaccctaacccttaagctgaacagtctgacaaaaatgattaactcggtgacatttttcttttctcgagggagccattgtgaaacaattagggtgcctctaggtttaggagtaagatcctctattgagtaactactttttaggtgatgaaattatggattcaatt

SEQ ID NO: 149534 - DNA, 369 bp, Zea Mays
tggtgggccaatttggaggccaaggtccctcatgcgctgcgcaaagggattaactcccttgtgatgttggtggcatggtggctttggaagcagcggaataaatgtgtgtttgagggggatgctcctagtggcaaccagattattcagaacatcaaagacgacgctcagaggtggtgtctcacgggtgccaaagatctgggcaccatctggccttagtttaggggcagttttggctgtcttctagatggatgtttattttttttactctgtactctggtcttctttagaccattggtgtttcttctatcttaatatatctaatgcgcagttctcctgcgcgttttagaaaaaagaataagcaaggagtcc

SEQ ID NO: 149535 - DNA, 1218 bp, Zea Mays
ccattttcccccctgcccagttttcatctgtcaattttgcaggcacaccaccaaaaactagccgcccccccccccaatctcctcctcccaaggtgccaatccttgccgctcggatcatcgtcacgtggtgcgagtcttcaatcgttttggtggagggaagaagggaggaaggaaagggggagaatccaaggtggtggactcccagatcgttcttagggatttgcccaaacttccggtgaaggcaagtaaaactgtgatggttattccgtctgtcagatgaggagtcttatacttgcttatgttgtgctattgtgttcatattcatattttcttttgagtaccatcatttgaaaatgttcatgtttcatggatttcatatgttgagtttgaggtttgattatgttactcaagtggtatattatgtggaatgggcggaagtaaatgtctagcacatttttatttgggaagaactcatgatgttgtcatgcataatgcactcatcatccattgcattgaagtttcgtcgtgatcttatggtccgaccgtaccggtacattgagcatcatatgttgcccgagaaggggtatggtgcagcttcatatccttagagatatggaggcagaagtcattattgcatttgtagccatgtgcattcatgggagaggtgtggaatctattatgtggatgtggataatttggacttgtgcatggtgattctacttggcgttgagtttttagttacttgtttacttgctacaatttactgttcaaaagaaaagaaagaagttctgaacacgtggttgtgtaagcacagttgatttacaatgtcctatttgttgttgttatgtttacttgctgagatgtgttatctcacatcttgcattgtttgatgcaggcacctaatttctgctttgggaatagagggatgtagcagcacgaccactacacctttaataaaggaaccaccatttaataatgttgttaatcagagttggtcaagtctagtgaattgctttgttcttggttgagcgtttattttggggtgggctgagtttcttatcccatttgttttacttcagttggggcataaatgatctttaccactttgcatctagtttctactatgtgaattatatgtctttatatcctgtatgaacttcatgttttcccctccttgttatgttagtttcaaaggaggtgctgccggattttgctata

SEQ ID NO: 149536 - DNA, 698 bp, Zea Mays
aggtctcgcccacgtggggctaaagctggaagggtagctaatcggtcccgactgcttaacacccatcatcgcttgtctattctattccccgccccaccagcccacctctcgctcctcaccgcacacgtgcgcaccaacgctcatagtcgccaccaaaacctcggcccgagccaaccccgactcggggtgctcaacctcctcctaggcgtcatcaacctcctcctcgacgacgcgggcaagcccggtgggggcagacatggcatcagaggacatggtggggaagagcaggggcgacatggctgtcaccaccaccatcaacctggcaaaggaggccaagctcgcacgcgagggggtcaaggcgcccggccaccagatcctcaccatctgcaagttgctcatcgtcgtcaccctcctcctcctccgtcacatactgctgttgctccgctcgaacgattgaaaatctcgcttcaggttcaaaatccacaaaacatcaagtacaacggtacagttcagggtctcaagtatatctggagaactgagggcctatgtggacttttctagggcaatggtaccaattgtgcaaggaccattccaaattctgtcgtgaagttttttcgctacaagcaggcgtcaaaggaattctgtgggcttaccgtcaacagactggggaaggtacgccttttgctactatggtactg

SEQ ID NO: 149537 - DNA, 1263 bp, Zea Mays
atggacaaagagcagcaggagagtcacctcgacagcttcgcgccgctggacggcgccgcggcgccggaggaccagcagcaccagcccgcctgcggcggggggcccgagatggtcgactacatgcttggccgccaccacgtgaacgcgcacgcgccgccgtcgccgacgcagagccaagcggtgtcgttcgacaagctcagcttctccgacgtgctgcagtttgccgacttcggccccaagctcgcgctcaaccatccggtggccgcgtccgtcggcggcggcgaggacgcggacgcggacgacgacgacgacgggtacttcttcaggttccagtcgctgccccagcgccatgcggaccgtgaggcggcgggaagcaagacgacggccgaggacggtggaggaaccggcgtcgtcgtctccgagggcaccacgctggtgcagcagcaggccgatcacggccgggcggacaaagccggggaccaggggaagagcggccgccggaagcgcccgcggaccgtgaagaccagcgaggaggtggagagccagcggatgacgcacatcgccgtcgagcgcaaccgccggcgccagatgaacgagtacctcaggatcctcaggtcactcatgccaggatcctacgtccagaggggagaccaggcatccatcataggaggcgccatcgagttcataagagagctagagcagctgatccagtgcctggagtcgcagaagcggcggcgcctgtacggcgggtccggggacgcgccacggccgccggtggtggacgcggcagcgggctccggcggcgcgctaataacgtcctccactcagccgctggcgctgcagccgccgcacctgttccctccgaccccgagccaccctttcccggtggcgggcgccgacgccaagatcacgctggacctggaggcggcggggggcgccgtggtcgacgacgccggcggcgggctccgggaggaggtggcggagaacaagtcgtgcctggcggacatcgaggtgcgcgcgctgggcgccgatgccatgatcaagatcctatcccggcgccggccaggccagctgatcaagaccatcgccgccctggaggacatgcagatgtccatcctgcacaccaacatcaccaccatcgagcagaccgtcctctactccttcaacgtaaaaatcgtcggcgaggcaaggtactcggcggaggacatcgccggcgccgtgcaccagatcctcagcttcatcgacgtcaactacagcctgtga

SEQ ID NO: 149538 - DNA, 372 bp, Zea Mays
atgttccagaacggcgagtcctggaagacgaggttggagacgacgacgtcggtggagtacatgagctccagcaggtgcggcctcgtgaagggcagcgtgcgcttcttccacatgtcccaccacacgccgccttggccgtcgatggtgccgttctcacctgtgatgaagacgtcctgcagaccgtggccgtggatcaagctcatgtatctcccgccaggcagctcgcgccctctcccgtacgacggcagcgggtcgatgagcggccagctcgacgtgtcctgctcacttattagttcgatggtagcaaggcatggctggcagtggcggcgaccaagaaccacgaagggcgatgggcaattgcccgtacggtag

SEQ ID NO: 149539 - DNA, 1241 bp, Zea Mays
taacacacttacacaccgatcgcgaaactgcttcctagcttcgttccggttccggagcgccagagagagaaagaaagggaaaagaagcgcctttgcccaccgcgcgatcgatcgatccggggtccggcggcctgccatggtgaagctggcgacggccagggaggcgcggctgtacgggccggcgctggcggcgaggcggtgggagtacatcaacgcggggacatacgtgttcgcggcgctgctcctggtcctggcggcggcgctgtccatgtccgtgtccgcggccaggctggggctcgccgtaggcgccgtggcgctggcggccgtggcggccgtcaacgcacacgacctcgccgcgcacctggctggcgtcgactgccgcgtgggactggcgaggtacgatgcccagctcgggctcgtggagttcctcgtgccggccgtgcacgcagccgggtgcgcgctcgccgccgccggcctggcgctgctggcctccccccactcccactcccagtcccagcagcggcacgcggcgaccatgctgctcgtcgcggcgctgctgtgggtgctgggctccgtgctcaactcctgccaggtgtacgagcgcgccgacggccgcgcgcagctgctgcagtcgggcgtgcaggtgcctcagctgctggggagccttctgttcctggtcgccgcggcgctgaaccgcccccgcagcggcggcgagccggcgtggctgtgcctggtcgggagcgtgctgtggctggcggcagcgctgctcaacgtgctgaaggtgttcgccatgcaccagagcgacgcgctgcggctggagaagctccgcggcggcgcgcaggagtggctcagccgcgaccgcgagggccgcgtgccgctcaactgggaggaggccgccaggagacgggcgctgcccaccgagctccggtgatcatcgcccgcgccaggcgccacccatcatttcccgtgccgtaaaatgaggggaaaagggtagataaataaattgtttcagcgccacccttttgggccgttgcttgggctcaatggaggcccgaagccccggattgtagggcccattagctgctggagcttatcgcattccatttcctatgtccgagtcccttgcggctcctttggaaggaaaaggaatgagagaattaagagatggattgaagagggttggaaggattaaatttctttatattcaaatttgactagaatgggtttaatctaccctaatc

SEQ ID NO: 149540 - DNA, 1332 bp, Zea Mays
tatataagggaggaaggtgagagtgtggatggacgctgaatttgtggatattcaagttttagaggaaaaatggcaagcatggaagatttctatgatttaaaatcatctaaaattgatgataacaaatacatctctttggaatttttgatgatagagattttgttcttctagacttccttttgtgtctcagtgcatatatctaaagcatttatattctcgcaggtcatggcggttcacgtgctgctgagtatttgaaggagcatttgtttgagaacctcatgaaacatccagagttcatgacaaacacaaaattagcaataaatgaaacatataggaagaccgattcagagttcttggatgctgaaaggaattctcatagagatgatgggtcaacagcatcaacagcagtgctagttggtgaccatctttacgtggcaaatgttggagactcaagggctgttatatcaaaggctggcaaagctattgcgctctctgaagatcacaagccgaacagaagtgatgagaggaaacgaatcgagagtgctggtggaatagttatgtgggctggaacttggagggtaggtggtgtacttgcaatgtctcgggcatttggcaaccgtctcttaaaacaatttgttattgcagaccctgagattcaggaacaagaaataaatgatgagttggagtttctaattatagctagtgatgggctgtgggatgtggttccgaatgaggacgctgtttcacttgtgaagatggaggaggatcctgaggcagcagcccggaagctgacagagactgcgttctcccgtgggagcggcgataacatcacctgcatcgttgtgaagttcgagcatgacaagcctggtggcggcggctactcgcctccaggcgacaagagttgattccatttgctgttggttatacgctttgccggtgtcccttttaccctgggccggattttgctggccccatccatggtgccccccgcggctggtacttgaggaaggagctggttcatgttcgtcgcctgtcttgtctatatttatgccactaattttggtctccggtcagtggggttaccggcgggcagtgcttgcccatttgcatgtttatcgtgggttcatcgtcctatacggcattgttgtagacttgtagttgctgttgcctgttgtatcaatgagagctaattctgtgaggcgcagggggatgggtgcactttgagatgttcccggaccgatctccttgcaaacacctccgctgcactgtatgtttctgttatatacagatcattgtccttgcacggccgtcagccaaggacgaatggccagt

SEQ ID NO: 149541 - DNA, 1254 bp, Zea Mays
tatataagggaggaaggtgagagtgtggatggacgctgaatttgtggatattcaagttttagaggaaaaatggcaagcatggaagatttctatgatttaaaatcatctaaaattgatgataacaaatacatctctttggaatttttgatgatagagattttgttcttctagacttccttttgtgtctcagtgcatatatctaaagcatttatattctcgcaggtcatggcggttcacgtgctgctgagtatttgaaggagcatttgtttgagaacctcatgaaacatccagagttcatgacaaacacaaaattagcaataaatgaaacatataggaagaccgattcagagttcttggatgctgaaaggaattctcatagagatgatgggtcaacagcatcaacagcagtgctagttggtgaccatctttacgtggcaaatgttggagactcaagggctgttatatcaaaggctggcaaagctattgcgctctctgaagatcacaagccgaacagaagtgatgagaggaaacgaatcgagagtgctggtggaatagttatgtgggctggaacttggagggtaggtggtgtacttgcaatgtctcgggcatttggcaaccgtctcttaaaacaatttgttattgcagaccctgagattcaggacgctgtttcacttgtgaagatggaggaggatcctgaggcagcagcccggaagctgacagagactgcgttctcccgtgggagcggcgataacatcacctgcatcgttgtgaagttcgagcatgacaagcctggtggcggcggctactcgcctccaggcgacaagagttgattccatttgctgttggttatacgctttgccggtgtcccttttaccctgggccggattttgctggccccatccatggtgccccccgcggctggtacttgaggaaggagctggttcatgttcgtcgcctgtcttgtctatatttatgccactaattttggtctccggtcagtggggttaccggcgggcagtgcttgcccatttgcatgtttatcgtgggttcatcgtcctatacggcattgttgtagacttgtagttgctgttgcctgttgtatcaatgagagctaattctgtgaggcgcagggggatgggtgcactttgagatgttcccggaccgatctccttgcaaacacctccgctgcactgtatgtttctgttatatacagatcattgtccttgcacggccgtcagccaaggacgaatggcc

SEQ ID NO: 149542 - DNA, 980 bp, Zea Mays
ggcggttcttctttctcctcgtctctcttcaccctcgcgtgggtaggagcgccagcggcttcgtccgatctctcacctcacttcagtcttcagccacgcacactccctccttccctccccgatcactactctccctctccagttcacacccaccgccccacctctcccactcaaatccagggccatcgcagatccaccgcctccccgatccggtcgcctacccagccgcccgatcggatcctgcagggtttgtgcccgccgtgagttagatggtttacgatggtgccgtgaaggaccaggaccaggagagcgcagcggcgagcactgcgttggcggcatcggtggtggcggcgtctcccgagcaggtggtggtggggagcacgagggtctcggcgaggccgccgcaagacaagcgcctcggcgtgcgccaccccttgaagcaccgctggttccgtgcccggggtaaggtgatggtggagctcggaggggtgccgcccgctcacgccgtgccggaaggcgaggaggaggaagaggaggaggagggagtcagcgagagcgaggtggaagaggagttagtggaggtagaggtggagcaagcctcgtcagcggggacgggaatgcggggcgttgaagtggaggtgttatccgcgccagcaacaggggtgcaggagatggacgtggaggtcggtgaaatggaggtgtcgcctgagcccgcggtcgctgtggggggcaccgagctggagccccagccggacgacgaggacgaggtctcatccgtcaccttggcgcgaggggagaggaagcaggaggccgctcctgctcctgcttcctctgccgtgctagctgtggaggcgcccagggagaaggatcaggatggggagagggtggagaaggagaagagggacaaggagagggaaatgcagaaggagcgggagagggtggatgaggtcggctacatgagcggaggatggaagaggtaa

SEQ ID NO: 149543 - DNA, 101 bp, Zea Mays
aagaagcacacatattcatctttttttcttctgcactaaataaaagtatactccattatatacttgtctcatggatgatatattttagaatttactgcata

SEQ ID NO: 149544 - DNA, 1694 bp, Zea Mays
gcgcacggccgcctcgccggcttatgcctcaggcttgggatggttgagaaggcaaagacgcacttcacactggctggaagtgcaaaccagtctgatccggctgagtggcagaagctgcatgaggtagagatccatcaaggcagatgcatggatgcaaggaaaattggagactggaagagtgcactcagggaagccgacgcagccatcgctgttggagcggactcctctcgattgcttcttgccttgaggtcagaagcgttgctttggttgcacaaattagaggaagctgatttgactattacaagcttgttgaaactggatgacgcgtcgttgccttcgacgccaaccagagtctcaggcatgtcagctgactcttatgtccatatcgtccaagccaaggtcaacgtgacatttggaaggttcgattcagctgtcgcactggctgagaaggctaagcttattgatggcgtgagctcagaggttgaagtgatcctaaacaacgtgagattagtcgcattggctcgagcccgggggaatgacctttttaaggcaggcaagtttgctgaggcgtcgctagcctatggtgaagggctgaaatatgagccttctaatccagtgctatactgcaaccgggcagcttgctggtcaaagctgggtcggtgggcaaaagctgttgaggactgcagcgaggccctaagagtccagcctaactacacaaaggctctgctaaggcgtgcggcgtcatatgcaaagcttgagcgctgggcggactgtgtgcgggactacgaggtgcttcgcaaggatcttcctggtgacactgaggttgcagagtccttgttccatgcccaagttgcattaaagacagcccgtggagaggtggtatctaatatgaagtttggaggggtagttgaagaaattatcagcttagagcaactccaagatgttatccgttcacctggtgtatccgttctttacttcatggctacaatgaacaagcaatgtgcacaaattaccccgtctgtggactccctttgctccgagtgccctgcattgaatttcctgaaggtaaacgttgacgagcgccctctggtagcaagcgcggagaacgtgcgagtagtcccaagcttcaagatttacaaggacggcacgagagtgaaggagatggtctgccctagcttgcaggtcttgcgctattccgtgaggcactatgctgtctccagctcttgaggtccggcactcagttcgctggccctgttagtgtcaccacatgccaacatttcaccaacaaatctgtccctctatagtatcacagcatttcccccttcccatcgcgtcacttaggctcctcctaccgcaacatctctagaaccatttgatccaagcttaagcaattctcatgcctcgctttccaaagtgatgacttcaactcctgaagaaaggctccctgtggtggtgttcagggaataggtaaacacggctggctggttttctcattacatgtacatatattcccgtatagcaacacatcaaacccattgatagattggttcactgtggagaaaaggcggggttcggacttggatgaagagtacaggtctagttgccattgaatgtagagatggagaagatagatgggtcgtgttgttggtatggtacgtagagagacagaggagggaggtggctggtgtggttca

SEQ ID NO: 149545 - DNA, 1886 bp, Zea Mays
gcgcacggccgcctcgccggcttatgcctcaggcttgggatggttgagaaggcaaagacgcacttcacactggctggaagtgcaaaccagtctgatccggctgagtggcagaagctgcatgaggtagagatccatcaaggcagatgcatggatgcaaggaaaattggagactggaagagtgcactcagggaagccgacgcagccatcgctgttggagcggactcctctcgattgcttcttgccttgaggtcagaagcgttgctttggttgcacaaattagaggaagctgatttgactattacaagcttgttgaaactggatgacgcgtcgttgccttcgacgccaaccagagtctcaggcatgtcagctgactcttatgtccatatcgtccaagccaaggtcaacgtgacatttggaaggttcgattcagctgtcgcactggctgagaaggctaagcttattgatggcgtgagctcagaggttgaagtgatcctaaacaacgtgagattagtcgcattggctcgagcccgggggaatgacctttttaaggcaggcaagtttgctgaggcgtcgctagcctatggtgaagggctgaaatatgagccttctaatccagtgctatactgcaaccgggcagcttgctggtcaaagctgggtcggtgggcaaaagctgttgaggactgcagcgaggccctaagagtccagcctaactacacaaaggctctgctaaggcgtgcggcgtcatatgcaaagcttgagcgctgggcggactgtgtgcgggactacgaggtgcttcgcaaggatcttcctggtgacactgaggttgcagagtccttgttccatgcccaagttgcattaaagacagcccgtggagaggtggtatctaatatgaagtttggaggggtagttgaagaaattatcagcttagagcaactccaagatgttatccgttcacctggtgagtttctcctctacatgcacctagcctgttgtaggcatttcacctccttcttggttcttgttgtgctaagaagtggacagttaaccaggtatgtccacatgcaaatatatcaatgttgtttgatatgcatagtacatgttcagttcagtaaatggagtgaatgttgtttgtgtggcattttttccccaggtgtatccgttctttacttcatggctacaatgaacaagcaatgtgcacaaattaccccgtctgtggactccctttgctccgagtgccctgcattgaatttcctgaaggtaaacgttgacgagcgccctctggtagcaagcgcggagaacgtgcgagtagtcccaagcttcaagatttacaaggacggcacgagagtgaaggagatggtctgccctagcttgcaggtcttgcgctattccgtgaggcactatgctgtctccagctcttgaggtccggcactcagttcgctggccctgttagtgtcaccacatgccaacatttcaccaacaaatctgtccctctatagtatcacagcatttcccccttcccatcgcgtcacttaggctcctcctaccgcaacatctctagaaccatttgatccaagcttaagcaattctcatgcctcgctttccaaagtgatgacttcaactcctgaagaaaggctccctgtggtggtgttcagggaataggtaaacacggctggctggttttctcattacatgtacatatattcccgtatagcaacacatcaaacccattgatagattggttcactgtggagaaaaggcggggttcggacttggatgaagagtacaggtctagttgccattgaatgtagagatggagaagatagatgggtcgtgttgttggtatggtacgtagagagacagaggagggaggtggctggtgtggttca

SEQ ID NO: 149546 - DNA, 307 bp, Zea Mays
gtacttccctcccttgtatgcctgcctctgccagcgcgttgtcggcgaggggactgcccccgccgccgccgctcgcgtcggctgccgtcagcccgtcacccacccacgcgacctccggtgatggcagaggccgacctcacgctgcacgacgccggcggcggcgccagggacaagccggaccggaaagccgacgtcttcgcggatcttggctcgccggtctcgccgctgcgcctgcgcccggcagcgacgccctccacctcgtcctcctcgtccggctccgccaagtcgccggcgcccggtaatgcgg

SEQ ID NO: 149547 - DNA, 100 bp, Zea Mays
gatcctgcctagctcgcgtcgcgtccatggatgcagtgctggctgcatcttgatagccatgccaggccacacagagcacatgtttggtttggttacgtta

SEQ ID NO: 149548 - DNA, 1117 bp, Zea Mays
ggcaaccatgcggcagccgccccgcggaccacgcagattagagcagcccgcagcagcgaattaaagttacagcgggtcgtttgcgagcacacaaggatctctagctctgccatggtggtaactggtattctgggcgggctgctctaaccatcaaagcgtagcgcacaccacttgctcgacaaaagattcaaggaatctttcaacatatattcctctctccaggctttcattataaatagaggccaactgggttttgcacttcatacaaccccataccttcagagcttacaaggagtagcagagctcagaagagcattcgtattcagcacatagtgcgccttcttgaaagaactgtacaggagatcacacaatgagctattatggcagcagctcttctggtggacgaagcagtaggagagtcgactatgggaggacatatgtggtgaggccaaagggaaggcacctagccaccattgtgtggctccatggcataggtgacaatggtgctagctggtcccagctcctggattctcttcctctaccaaatatcaagtggatatgccccactgctgcaacccggcctgtcgcggcttttggtggattcccctgcacagcatggtttgacgttgaggacacatctatagatggccgagacgacattgagggactggatgcttcagctgcacacattgcaaatctgctgtcgtctgagccgtctgatgtgaagcttgggattggcggtttcagcatgggcgccgccgttgcccttcactcagcagcatgctatgctcatggcaaattcacaagtggcattccctatccaatcgcactcaacgcagtcatcagtttgagtggctggctcccttgctcaaggaccctgaggagcaagatggagggttcacatattgctgtaagaagggctggctccttgcccatcctgcttagtcatggaagaggtgatgatgatgctgattcaaaagaaaaagaaattcagtacatgctactactagacatggatgaagttgtcgtctacagggatggcgagagatcagctgaggttctgaggaactcaggattctcatttctgactttcaagccctacaacgggtacagatga

SEQ ID NO: 149549 - DNA, 649 bp, Zea Mays
tatgtttaatgaacctttctgatttatgcaaacttaattacacaagagaatctggttcgaccattgtaatctccagtgatttcaatcttcataaggcatgacaaaggcagcactttcacaactaactaacatatctgatgcactaagaggaacaaaactagatacatcatattaggcagaatacactgccctgacaactgcctagccttattgcagctgataagtgctgactaacgtcagctgacaactgataagtgatgactaacgtcagttgacaaataggagatgattgctaagggccgctgggaatcaagactataaggacattcttattctttatcatcatggctacaattactggcatcacattcaatctcgtcttcactattctccacagcatgcgcaagcgaattggcttgcagcgtcttaaaactgcttatgaagtcggttgcttctgagatgagagcatttttagcagccttcagactaccagcttgctgctcagaaagagacttcccagaatcagcagctttagagccagctggagcccttctgcgaggcctttttgctccttctctacgtgccaatttatcaatgtacctctcatgtaggataacattctttataggctttagaactcctgggctgg

SEQ ID NO: 149550 - DNA, 279 bp, Zea Mays
atgctatttttctgcagaaaacttatcccgcgcactgctgcagcattacataagaacacagcggctgtgctaagttctgtgcagacaacccgggcagctcagctattcagcagcagatacatgatcttaaaccaccctaccagagccaccatatttggatcccagaaatgggcgtctggaaggaggaacggggcgtctggatgtcacgggagcagcatgatacatcggcttcaacgcttcttagttcttattgccaaccaagttctagctggttgttga

SEQ ID NO: 149551 - DNA, 171 bp, Zea Mays
tgccttggagcagtgtcgcatccgagtgtcctcctgccagacgctcgtccacaagctcgactacgcctagatgaagctgacgctgaggttccgcctcgccgtcaccaccgcaacgttggcatcggccttaggtccatatctagacccgcaatagtagcagcagtcatcatc

SEQ ID NO: 149552 - DNA, 606 bp, Zea Mays
atggtgctggggcaaggagaaccggcgagcagaggagcgcgcgcagggaactctaggccggacgagtgcaaggagcagggagctgggcgaccaagcgccattggggatggggcgtgcgcatccctgcgactagagggagagtcgcggccacagggacgcgagcacaggggcgccagggggaagacgccatgggggagctcgaccaggggcgcggtgcttcaggaaaaaatccagggcggtggaggatggcgagagtccggcaagctgacggcacagaggaagacgtcggccaccggaaatcaaagagcggcgcagtccgagctgggaggccgcggtgccatggatttgaggagcagagaaggcactggcagagaggagaaggggaaagatgaagccaaggggctgcgcagcggccaggcgaacgacgcaaggaggaagaggagggagagagaagcaagggggtgcgcgtccatggagatggcggccaggagagtgagcagagggacgccgcgatggagcttgagcagaggaaaactgcatgcgtggaagataaggcttcagagaacggcgacgcgcaggggaaaaatcaaggcgcagttggaataa

SEQ ID NO: 149553 - DNA, 1194 bp, Zea Mays
tcaggtgtccttagtctcactaattttcttaacttgctgtaatcaggcttccaagtctgtcattcccttggaggaggcactggatctagaatgggcacgcttctcatttcaaagattagagaggagtaccctaatcggatgatcctgacattttctgtctttccctcgcccaaggtgtcagacactgttgttgagccatacaatgcaaccatgtctgtccatcagctggttgagaacgctgatgaatgcatggttcttgacaacgaagcactttatgacatttgcttctgaactctgaagctaatgacccctagctttggagacttgaaccacttgatcagtgcaacgatgagcgatgtcacttgctgcctccgcttcctaggacagctgaactctgacctgcgcaagcttgcagtcaacctgatctcgttccctcggctccacttcttcatgatcggctttgcaccactcacctcgcgtggctcgcagcagtaccgtgcgctcaccgtccctgagctaacctagcagatgtgggatgccaagaacatgatgtgtgctgctgacccacgccatggtcgctatctcacagcctctgccatgttctttggcaagatgagcactaaggaggttgatgagcaaatgattaatgtccagaacaagaactcatcctactttgtggagtggatccccaacaacgtcaagaccagtgtttgtgatatccctctgcgtggcctctccatggcctccactttcattggcaactccacctccatccaggagatgttctgccatgtgagtgagcagttctctgctttgtttaggaggaaggctttcttgcattggtacactggtgagggcatggatgagattgagttcaccgaatctgagagcaacatgaacgatctggtgtccgagtaccagcagtaccaggatgccgctgctgacgaggaggcaaaatacaaggacgaggaggccatccaagatgagtaagggtggtttgggctctgccacatttgtacccttgtttcctttcattctggggcttgcctatggtttgcttgttgtattcgctcaagttatgcggtatgtagtagtactttcatgtgtagcatgctgtatgctaccacaaagactttgttcacctgcactgcttgatattccatggcatatgtgacgagtatttcattattgtat

SEQ ID NO: 149554 - DNA, 282 bp, Zea Mays
atggatttgaggagcaaagaaggcaccgacatagaggagaagggggaagatgaagccaaggggctgcgtagcggcctggcaaatgccacaaggaggaagaggagggagagagaagcaagggtgcgcgcggccatggagatggcggtcaggagagtgagcagagggacgccgcgattgagcttgagcagaggaaagctgcgtgcgtggaagataaggcttcagagaacggcggcgcgtaggggaaaaatcaaggtgcggctggaaaaatctgagcacggctga

SEQ ID NO: 149555 - DNA, 858 bp, Zea Mays
caattttaacagaaacaaacttattgatattattcgctttcacttattttggtaatgctagatatttacctagggcacttaatcggtttctaacgaagagtatcatgactactcaaacataacactaactacagtaaacaaaatccatcgaaagaaacattaataacattcaccatccacacatttgaatttattaatttacttttcatattgctaatttcaccttacaccgcatcgctaagaccaatccgataaccttttacatatacctatattccaaacctaggatttaccacatgatacaattaataaggctaatcatcgatgtaccataaaaactgaattagcataacaacactaatagaatgcccactagccaatcaaacactattcctattttacatgtcaacaattaatcaaccatctcaggtttgactaccaaaatatcctacaaaatcaaggatgacagccttacggataatcgtttggaatactaaatcaattcctcacgctactaattctcctcactcctcagcaaagagccaatttaaacctattcgacatatgcatccaccacatactacccacgacgcattttaataatcatttaatataaccacacacacttgcgcaactaacaaaagaattcatcgcgaccaatatactaactcgatctacttcatgagtcggctagcgggagtagtgaaatagttcaccacaccataaacgactcggatctgcgaaatcaacgataaatcctagcgcaagcattttattagatatttggcaagcgttgaactacgttttcttttccacacaaaaccctgggatttctttccttaaatcaggcacccaaac

SEQ ID NO: 149556 - DNA, 1662 bp, Zea Mays
atgtcggcggccggcgccaccgccgtctgcacgagggacggcggcctcctcccgctgcgtccgcactgcgcgaggtcgtcctcctccttcgccgccgccgccgccgccatcgtgatctacctgacggcgccgggcctggccgtgttgccgatgcgggtgatggcgtccgactccatcgcctcggtgaagctccgcgtgcagacgtcccggggcgtgagggcgcgcaagcagaagctcgtcttcggcgggcgcgagctggcgcgcgacgacgggcgcatcctggactacggcgtggcggacggcaacgtggtgcacctggtcatccgcgtcccggacgtgcgcctcatcaccgtggagaccgtgcagggcggcaagttcaggttccgcgtggagcccgggcgcaccgtcgggtacgtgaagcagcagatcgccaaggaccaccccgcggcggcgcgccccggcgagcagcggctcgtgctcgagggcgaggacctcgacgaccgccacctcatccacgacgtgtgcagggccgacggcgccgtgatacacctgctggtgcggcgctccgtcgtcgcgcgcgacgccgggtccgggcggccgtcgccaccgccacggcgtgacgacgtcaggatcgagcccgtaggcggcgaccataaggcggcggtgcgtggcatggtcgacgcggcgctcgccgggatggagagcgggaacgcgcccatcatgtcgtcggagggcacggggggagcctacttcatgcgggacgcgacggggcagcggcacgtggccgtgttcaagccggcggacgaggagcccatggccgccaacaacccgcgcggcctccccgtgtcgtccaccggcgaaggcctgaagaaagggacgcgcgtcggggagggggcgctgagggaggtcgcggcctacatcctcgaccacccacccaggagcgggaccgcggatgatgggttcgccggtgtgccgccgaccgcgctcgtccggtgcacgcacggagccttcaggcagggcggagccggagccggagcgagggcgccggtgcccaagctggggtccatgcaggccttcgttagtaactgcggcagctgcgaggacatgggacccagcgcgttcccggtgcaggaggtccacaagatctgcgtgctggacatacggctcgccaacgccgatcgccacgccggaaacatactcgtccgcaagcacgacggcggcggaggcggaggcatgtcgctggttcccatcgaccatggatactgtctgccggagagcttcgaggactgcactttcgagtggctctactggcctcagtgccgggagcccttcagcgacgagacggtggagtacgtgcggtccctggacgcggaggaggacgtgactatgctgaggctccacgggtgggaggtgtcgcgcgagtgcgcgcgcacgctgcgcgtcgccaccatgctgctgaagaagggtgtggagaggggcctcaccgccttccacatcgggagcatcatgtgcagagagaccctgaccaaggagtccgccatcgaagagatcgtccgtgaggcggcggaacggggaggaggatgcgagactgtcttcttgcaggctgtctcggagatcatggaccgccgtctcgacgacatcaaagaacatgttagcctctag

SEQ ID NO: 149557 - DNA, 381 bp, Zea Mays
atttcaaatccaattcgagttcaagtttaaattcaaattttgtgaaataacttgtcctcagtttgaaaggtataatttaataatataagtatgaaggatgtttattctgatttttattttattttatgtattatttttcttagttcttcccttctcttatttcaaaccctaattccaattcaaattaaatttcaacttgtggcaaatttattttcagattaatagtaaaatttggacatacttaaaagtgtgatgaatttataactttgttttgttttgtataatatttctttctttctttcctatttccaattcaaatcaaaccaagtttcaaattctagatttcaaattttatgcacaagttaaactttcacatgatgc

SEQ ID NO: 149558 - DNA, 2511 bp, Zea Mays
tattttttacatctcgctgctaataattttaactgcattctactatatcttatggttatgccttttatcatgaagggtaatcgccaggagctcaagccaatcatgcagccacatagttcccatgttatcacactttcacaagcatgtccgaacaacatttctgggtgcactttgacacccattaaccaacatctaaatgccgtctttatattttgtctaaacttaaacaggccccttgatctctgtgatgtaacaaacgagataacactgccgaaccatcagggttctgttggtccttctactccttcaaatctgaattccaggttaccagggtctcctgctatggttttgggcaacaattcaccgttcccttcaacattgagtagtcctagggatgctcagaaatatggtgttcccagacctatctctttacagggtgatgagcaaccaaagattcagtataatcagatggtcaatgacagaaatcttcatgaacctggagtttctgctcctggaactactccttccggggttgattgtggtccaggtgccctcatgatgccatctgcccctgctatgggaacagtggcaggactaaatcgaggtatgcctggtgccaagccaggctttccaaggattagttcaccagtaatgttaaatgctgttccatctggaaatctgtttcccaacagtgggcaaggtgtgctcaacacagtaaatgtccatcctggagccatatctggtcctggcaattcaatcttgaggccacatgatcctatgcaaacatttcgtcctggtcagggtatggaagagcataggcagatgtcggagtttgacatgccggtttcacagggaagcggccaagccactatccagtttagcagcatgaattcatctttctcgagtccacctgttcagcaaccccaacggccacatcagatgtcacaatcgttacacatgtttgggaatccacaccattctcagatccagggaactagttcaagctcacaacagcaggcatatgctgtgcacttggctaaagaaagacaaatgcaacagcatatggcacctcaacagcatagtgatctttctggagcaagtgcagtacccaatgtgcagagtaatactcaaacattgcagcagggccaaacctcatctgccaattcagccccttgttcaaaatcacagcatcagcgacagcaagcggcacaaaatctgccggatagctcttcatctcccaaccaacctgccacttttacacaacagaagcagaagaaacaacaggaacaacagcagtctagacaaaatgagccacaaaggaaccgtggcagtcaacaagctaagcttatgaagagtttaggacgaggaaacatgatggcccagactcctccaattgactgcacaccaaccaatgctgcttctactccatcaaaaaaccatgtgtctgaaaaactggtgcaacatggccaaggacatttccctgccaatacaacaccagtaccgtcaatgcctcaacctaggctagtcacttcgttgcctcagtcaccaacgaaggtggcagacattggtaaccaaggtttaaaaaagggtggttctttgagtcaggccatgttagctttgcaacaacctccacatggttctaaatcgacattgaccactcagctgcagcagcggcaggtcaatccgccacagaacaacaatgggagagcagtggtgcaacagaaccgccaaatgaactctgactgtaggacagacttgcacgtcggtcaggtccgtcacaatcagatggttccaacatccatgccacagagtgcagattcgtgtagccctgtactgtcatctgtaaaccagcagaagcgtgagccatcgctcaatcagacttcagttacctcgccgtctaacctgcttaggtctcctaaagatacttcttttgggtagccaagacatgctacaaaggcaagttttcaggtggcttccctatacaggctcatggtgttggtgaccagtggaaccaacatggcagagagcaattgcagtctcagcatcagcagagacaaccggttgttcaaggcagtgcatatgctccttcaaattctgggcctggctgatcattaattatttcaggtttgtaggtttgagatagcgagctttctttccattgtaaagttactgtgcaggtacgtgatttgcattatttcaggttttaatgtgagctagattaggtaatttaattgttcgtgtttaatcttacctgaagtggggataggttgcagtctagtagaatgtagaaacactgcttccacttctttagcgggcactgcacttgtgtctgtcgcttctgcgtgggacgagcacgctgccatctcttacgcgagtccaagaggtggtctctgcacacctgatatgttccttttgtatcctcgtagatcatagtatatgtgtttgtacaagttaaaacaactcccgcccatgaatgaattggtactctatctatccgtttggttacctgca

SEQ ID NO: 149559 - DNA, 2874 bp, Zea Mays
atggtgaatgctgagccatgctcgatgggtggaattatggattacggtgttggtgtgggcaccaaatcttcaccacgcagtatggccattgagaaagctcaggaggagctcaggcaggagtctgatgttcgcgatgaatggaggagagaattggaatttctagagaaagtatgcccgcaccagggaggcaacccattggatttcaattttgcacatctggaaacggtcggtgtacactctgcttctctcacaaatcaagtagaagcacaaactgtgataagtgacgcgaaaggtagtttttctgcatcacctcttggagattcggtcgagagtaccgacaaaccaggaggttccatgtgccgcgaaaccaacacagcagacaatcttatgcttttgggtggaggtaaaaatgacattgcagaagaaaaggttgtaaaaagaggaaccaaaagattaaatgcagcacaacccaaacattcattgcccagtgacggtcacaaaaacacaaaaaagcctgctgcttctggtttgtcacacctcggtgtcaaaagccaggcatatgttcggcgcaacaggtcaaagccaagtagggagagcgggaatgtcacatctattagatcttctatgatccctgctaaagtctatgagccaaatgatgaaaaggttacagcacagaaaaacaatgcagacgatcatggtgtattgtccgtttctagtataaaacagtctggacctaaccgtgacattgcaccaaagagtatagcttctgatgaccatgcagcaatggagctggatggcattcaaacaattctcgaaagtgaatgtgtggtgaacgacaaagtaaacaaagctggcaataataacaaagctaaacagttgtcatcaaatgacacaaatcatgatcgtttccttgttgggtgtggtgagatagctgctgaagtttcatctgcggaaacccctgatgccaatttaaaagttgttataaagccatgttattctagtgcatctacatatgatgagaaagagtcatgtgctgttcacgaaaaggctgatgatggacacctggatgaatgtatggcccatatccgtgaaggggaacttggtcacagcaggacacttccttgtgttgtagaagcttctacttcacacaatgatgtagtgggcccatcttgtgaaggcactgtgaatattgttgatgaacatgcagatggggacatcaatactgttgcagggaagattgattctcatgaagacctagatagtagtagacattctaacatgattctcaaggtaagtggcacatcgatagatttcagcaggcctgcttctttgaaggaaagttctgatcttgtacgacctgaagccagtaatatttctcatgtgaaagatgaaattgaagtttgtaacagtgcaatagttgcacagaaagacacagagtgcttgtcttctggccgcagcatgaacattgaggaaagtccagtttcggttaggaaaaatagctatgttgggaattcaaactctgcacatcctatatccgtaggcatcgatttgtctgatgccttgtctccaccaaaaaatgatgaatctaacgtggagagtgagattaaaaaatatgagaacctgaataagatggaaaagaaggcctatgaagattctattcttaaaaatgctcgcgttatagaggcaaatattaaaaaggctggtcaacgatctccctgtaacattgctttagagaagaggagaaagagtcactgggattttgtccttgaggagatgacttggatggctaatgatttcatgcaggaacgactttggaaaagtgtggctgcagctcaggtgtgccattggattgcctctgatgcccacgccaagtttgaaaaagcaagcattctgaaaaagcagaaagctgttataaagatcattgcaaagggtatcatgagtttctggcgttcagctgaggctttacagactgctgacaggacagctaaagtgatgccacacaattcaactatgctggaggagatagatccttcgggagtcaaagcaggaaaagaacagggtcacaattcactggaagcgaaagaatccagccagcaacggtcacagattcatgattatgcagttcgatttcttgaatataatagaacagctgatttgcacgtgttgcctgaagctccaccaactcctgacaggctgaatgactttggagtcttgaaagtgtctgatcatctctcagaagaaagtctcttttatacagtagcagcacctggtgcagtgctggcatacagggactctctggaatctcttttcatgtatcacaagtgcggcgttttctctatcggttgcctgggcatcgtgttcgcggcgctccctggtgtggaggcctgtcattcgcccccctctccctggagcgacttctgtcggtgtcatggtgggatcgtcggaaggagggtttgcgtcgcggaggtctgtgatgcactctccttgaagtttgacattcagactgatgtgctcgaccttcgacgagctgcaccaagcaccttcattgcctacctgcccaatgaagacttggctcgtcgcatctacaatggaggtcaacctcgttttgcccctcctctccgtctacatattcggtggtggtctcgtcaagccctggcatgcgattgtagagctttgtctcagctccttgaagttgaactgcgtggtatccctactcatctttgggcgattgagatggcagaacttctttttagtgaccattgtttgatccaaggtgtacacgctgactccaagtttggatccatcggcgttcaagttaagaggctggtgtttagatccggagagcattcctgtttcattggatctccatgttga

SEQ ID NO: 149560 - DNA, 2044 bp, Zea Mays
cgacagtcagtaatttctccttatatagccgagagtcgggccgtgctgtgctcgaggacgcacgtaatccccaatcgcccaccacttcgatctactcgagcgagccctagccccgaatctccccggtgcatcaacaggctccgtctgcttctgctgattcccggatcgtctcccccgacgcggctgcgctcacggcttccgccacagccatggagccgcgcatcggcaacaggttccgcgtcggccgcaagctggggagcggctcctttggggagatctacctcggcacgaacgtgcagacaaacgaggaggtcgcaattaaactggaaaacgttaagacgaagcatcctcaattgctttacgagtcgaagttatatagaatacttcaaggaggaactgggattccaaatgttaagtggtttggtgttgagggtgattacaatgttttggttatggacttactggggccaagccttgaagatctttttagctgttgtaacaggaagctgtctctcaaaactgttttgatgattgctgatcaaatgatcaatcgagttgaatttgttcattccaagtcattcttgcatagagatatcaagccggacaattttctcatgggtctcgggaaaagggcaaaccaggtttacattatcgattttggacttgcaaagaagtacagagatacatcaacacaccagcacattccatacagagagaacaagaacttgactggaacggcaagatatgcaagcgtaaatacccaccttggaattgaacaaagccgaagggatgacatggaatctcttggatatgtactgatgtacttcttgagaggaagccttccatggcagggcctgaaagctgggaacaagaaacagaagtatgaaaagatcagcgaaaggaaagttgctacttcaattgaggctctctgccgtggatatcctaccgaatttgcttcttacttccattactgtcgctcactacgctttgaagatccaccagactatcaatacctgaagagattgttcagagacctttttattcgggaaggttttcagtttgattatgtttttgactggacaattctaaagtaccaacatgcacagatgaccacggctccgccacgtgcaattgctccagcagtaggacaaagctctgggatggctcctgtggcaaacaacaatagacattcaggcactgaagagggaaggagaagcgggtggtcaggtgtggacccaacgcgacgccaggctccaccaccagttataaatgcaggcagcctagccaagcagaaatcccctgttcggcctgaggcatcgacatccagagatgctgtgttctccagttcgactcttttgggacgctcaagcggatcgtcaaggcggcctgctgtctctagtagccgagagccaagcattgaggcggagcaaacacgtagccgtacgactgacgcaagcccaggtgcaacattccagaggtctggagctccgcggtggagcctgcagatgcctgactcctcggacggcaggcgctcgtcttccggcaggcgccactcatctaacccgaagaactacgagtctaccataaggggaatgcagggcctaaactttgacggcgatgacagggttcactattagcatctcatctctttgggaccttggcagggagggtgcattgcgtcaaggcccctcgccgacatggcctatgtaccacgggcggctagacaataaagatgtctgggtgagtgagcctgagcatagacaatggctatgctgctttagcctcccttcccttgtacaggtttgccatttgtttggttgcgcggcgtcctgtgtattttgagttgagattcacatttgctgcgatgtgcgtatgctgctttggttgattcaacgattgggcttttttttttactctctctctctctctctctctctctctctctctctctgataatgttatgttgcccgtgacagatctgagaatgttatgtcatgtgtaactccggaatgctcaactgttatgttttggctgtgcctctgag

SEQ ID NO: 149561 - DNA, 1883 bp, Zea Mays
cgacagtcagtaatttctccttatatagccgagagtcgggccgtgctgtgctcgaggacgcacgtaatccccaatcgcccaccacttcgatctactcgagcgagccctagccccgaatctccccggtgcatcaacaggctccgtctgcttctgctgattcccggatcgtctcccccgacgcggctgcgctcacggcttccgccacagccatggagccgcgcatcggcaacaggttccgcgtcggccgcaagctggggagcggctcctttggggagatctacctcggcacgaacgtgcagacaaacgaggaggtcgcaattaaactggaaaacgttaagacgaagcatcctcaattgctttacgagtcgaagttatatagaatacttcaaggaggaactgggattccaaatgttaagtggtttggtgttgagggtgattacaatgttttggttatggacttactggggccaagccttgaagatctttttagctgttgtaacaggaagctgtctctcaaaactgttttgatgattgctgatcaaatgatcaatcgagttgaatttgttcattccaagtcattcttgcatagagatatcaagccggacaattttctcatgggtctcgggaaaagggcaaaccaggtttacattatcgattttggacttgcaaagaagtacagagatacatcaacacaccagcacattccatacagagagaacaagaacttgactggaacggcaagatatgcaagcgtaaatacccaccttggaattgaacaaagccgaagggatgacatggaatctcttggatatgtactgatgtacttcttgagaggaagccttccatggcagggcctgaaagctgggaacaagaaacagaagtatgaaaagatcagcgaaaggaaagttgctacttcaattgaggctctctgccgtggatatcctaccgaatttgcttcttacttccattactgtcgctcactacgctttgaagatccaccagactatcaatacctgaagagattgttcagagacctttttattcgggaaggttttcagtttgattatgtttttgactggacaattctaaagtaccaacatgcacagatgaccacggctccgccacgtgcaattgctccagcagtaggacaaagctctgggatggctcctgtggcaaacaacaatagacattcaggcactgaagagggaaggagaagcgggtggtcaggtgtggacccaacgcgacgccaggctccaccaccagttataaatgcaggcagcctagccaagcagaaatcccctgttcggcctgaggcatcgacatccagagatgctgtgttcgactcttttgggacgctcaagcggatcgtcaaggcggcctgctgtctctagtagccgagagccaagcattgaggcggagcaaacacgtagccgtacgactgacgcaagcccaggtgcaacattccagaggtctggagctccgcggtggagcctgcagatgcctgactcctcggacggcaggcgctcgtcttccggcaggcgccactcatctaacccgaagaactacgagtctaccataaggggaatgcagggcctaaactttgacggcgatgacagggttcactattagcatctcatctctttgggaccttggcagggagggtgcattgcgtcaaggcccctcgccgacatggcctatgtaccacgggcggctagacaataaagatgtctgggtgagtgagcctgagcatagacaatggctatgctgctttagcctcccttcccttgtacaggtttgccatttgtttggttgcgcggcgtcctgtgtattttgagttgagattcacatttgctgcgatgtgcgtatgctgctttggttgattc

SEQ ID NO: 149562 - DNA, 1605 bp, Zea Mays
tttttttattttccttatcgcttcattcccgctctttgttttacaatgtgttgactctcgtttttctctccatctgcagctgggattccaaatgttaagtggtttggtgttgagggtgattacaatgttttggttatggacttactggggccaagccttgaagatctttttagctgttgtaacaggaagctgtctctcaaaactgttttgatgattgctgatcaaatgatcaatcgagttgaatttgttcattccaagtcattcttgcatagagatatcaagccggacaattttctcatgggtctcgggaaaagggcaaaccaggtttacattatcgattttggacttgcaaagaagtacagagatacatcaacacaccagcacattccatacagagagaacaagaacttgactggaacggcaagatatgcaagcgtaaatacccaccttggaattgaacaaagccgaagggatgacatggaatctcttggatatgtactgatgtacttcttgagaggaaggttgtttactgtaacctgattcactgtttcacctctgattttctgatatgtctgggttaacatgtggtttgcctacagccttccatggcagggcctgaaagctgggaacaagaaacagaagtatgaaaagatcagcgaaaggaaagttgctacttcaattgaggctctctgccgtggatatcctaccgaatttgcttcttacttccattactgtcgctcactacgctttgaagatccaccagactatcaatacctgaagagattgttcagagacctttttattcgggaaggttttcagtttgattatgtttttgactggacaattctaaagtaccaacatgcacagatgaccacggctccgccacgtgcaattgctccagcagtaggacaaagctctgggatggctcctgtggcaaacaacaatagacattcaggcactgaagagggaaggagaagcgggtggtcaggtgtggacccaacgcgacgccaggctccaccaccagttataaatgcaggcagcctagccaagcagaaatcccctgttcggcctgaggcatcgacatccagagatgctgtgttctccagttcgactcttttgggacgctcaagcggatcgtcaaggcggcctgctgtctctagtagccgagagccaagcattgaggcggagcaaacacgtagccgtacgactgacgcaagcccaggtgcaacattccagaggtctggagctccgcggtggagcctgcagatgcctgactcctcggacggcaggcgctcgtcttccggcaggcgccactcatctaacccgaagaactacgagtctaccataaggggaatgcagggcctaaactttgacggcgatgacagggttcactattagcatctcatctctttgggaccttggcagggagggtgcattgcgtcaaggcccctcgccgacatggcctatgtaccacgggcggctagacaataaagatgtctgggtgagtgagcctgagcatagacaatggctatgctgctttagcctcccttcccttgtacaggtttgccatttgtttggttgcgcggcgtcctgtgtattttgagt

SEQ ID NO: 149563 - DNA, 1497 bp, Zea Mays
atggcgagtcgtcgcctcctctttgccgtgcagctcctcgtactgatcgccgcagtggccggcacacggtggcaggacttcctccgcctgccgtcggagtcggagtcggtggggaccaggtgggccgtcctcatcgccggctccaatggctactacaactaccgtcatcaggtagtaatttcatccattacgttatcattatgctttgcgaccactcttgttgagcagatcctgctacatgcctacatccatatccatggacaggcggacgtgtgccacgcgtaccaggtcttgaagaagggcgggctcaaggacgagaacatcgtcgtcttcatgtacgacgacatcgccgacagccccgacaaccccaggccgggcgtcatcatcaaccacccatccggcggagacgtgtacgcgggggtccccaaggactacacgggcaaggacgtgaacgccaacaacttcctcgccgccttgctgggcaacaggtccgccgtcaccggcggcggcagcggcaaggtggtcgccagcgggccggccgaccacgtcttcgtctactacagcgaccacggcgggcctggggtgctcgggatgccgtcgtcggacgactacctgtacgccaaggacctggtggacgctctcaggaagaagcacgccgcggggggctaccggagcctggtgttctacctggaggcgtgcgagtccgggagcatcttcgaggggctcctgccgcccgacatcgccgtgtacgccaccacggcggcgaacgcggaggagagcagctggggcacctactgccccggcgacgacccgggcccgccgcccgagttcgacacctgcctcggggacctctacagcgtcgcgtggatggaggacagcgacgcgcgccgcgaccgccgcgccgagacgctgaggcagcagtacctggcggtgaaggaccggacgtcggcgcacggcacctacagcctcggctcccacgccatggagtacggcgacgtgcagggcctcggcgcgcagagcctgtacacgttcatgggcagcgacgacgccaccgccgcgagcttatccggccgtggccgtgggcagccagccgtgagccagcgcgacgctgacctcgtctacttctggcggaggtaccgcagggcggcggagaggacgcccgagaaggccgaggcccggacgcggctgctgcgggcggtgtcccgccggtcccgcgtcgacagcatcatggagctcatcggaggcctcctgttcggctcggagggaggtcccagggtgctcggtgccgtgcggccggcgggacagcccctggccgacgactgggactgcctcaagtccttggtgcgtgcgtacgagcgcagctgcgggccgctcgggcagtacgggatgaagcacatgcgtggcttcgccaacatctgcaatgccggcgtcggggaggacggcatggccaaggtggcgtccgaggcctgcgccgccgtcgcccgttctgacgactga

SEQ ID NO: 149564 - DNA, 2205 bp, Zea Mays
atggggggtctgcccaaggagggggccccggcggtggatgtctccgtggaggggaccctggtctggttgcgccgccccaacggctcctggtggcccagcatcgtcatctcgccgcaagacgtccccgaaggctgcgccccgccgccgcgctgccccgccacacccatcatgctcctcggccgccgccccgacggaccaacctacgtcgactggtgtaacctcgacaggtgcaagcgcgtcaagcccttccgctgcggggagctcgacttggaacagcgcattgccaacgccctcaccctcgccgccaccagcgacaggtccacctggagctacaacaagggaaggtacgcccgcatggaggacgccattctccaggccctcgacatagagaaggagctcgctctcggcccggcaaccaaggcctacctccatgcccgcagctgctcgcccaggcccaaagttgaaatgcccaacggacaagtcaaagatactgcagcaaaggatcatgctccaaccatccagccaccgctgccgccgcccaagaggaagcgcaagacgccttatgactccgaggacgatgtgcccgaagtgtcccgtcgcatgagggacctcagggacatcggatccaaggcggtcgtcccaatggacttggccaatgctgctgcagtctctgctcccaagtacgatgatctaactaatgctgggcaggccaaaagaattgtgcactctcaggccaccgcaaagaggaagcatgctggtctgcatcaggaccaaccttgtgggatccccaggaagaaggataggtctcgtccgctctcggagctctgtaatggagacatgtggggtggttccagaccaaatggccagaaggccgatgaacatttgttgggtgtggctacatgttcaagcagctcctctggcacttcaaccttggacactccattggacatgaacaactgtcatcgcagcatggcattcaaaacagatcaagcaaagggcacagaaatatcctgcatgacaaggctactgagtgatgattcccggcatggaaatgattttgtcggaactcctgctgcacaaaatattgtggaaccagatcatttgcatagatatcaaccttgtggattggcaaagaatcctacctggaaacccaataagcaaactaatgacgcccgcaaagctgagaaacatgcacgcaaaaatatgaagatgagaaccataagctctgttgatcaggagaacaagaacaggacaagagattctaatgatcatgaccaccacaaaccaaagacaggaaagcacaaatcaccaagagatggggttgtccttttggagaaaaggcaggagaagcgttctttggacaagaacaagcccgctgaacatgatattaaaatgcatattgccgtagttcctagtggtatggattgtgttggcgcctttcagcagcagcgctttaaaagcaggtgtgatcctgaagagtcattggaaagcttaagcaaccattcaaactgtgagagtggctcggtatcatcgctggtgtttgagaagccactgcaggcattgccgcccggaaagaatctgctgggttatgaaatatgtcatgcagcgaagccaatcaagacactgcatttgaatcctgccctgtatgatgtggagttgagcgtgttggggagcagcaacacggggcgccgtgtgccccttgtttctctaatgagtaggtggaattgtaaagccgtcgtggggtatcctgtctccgtggaggtcagcgatgatgtgtttggctgtccttctccttcatcagagaaagatatccagcaggctgctacaaacagtgtgaatgggatagtattgaagaaggatgaaactgagggtttggaacgtgttgttgtgccaccatcagcgcagacatcccggccaagatgcaaaagccgcagcaggagggcatcagagaaagcagtggacaagttatggcagccacataccaaatggccagcatcctcgtcgagaaagatgcggaggctttcctcttttggtccaggccagagagatgggaagtcagcggtgaggaaagtgtccggggcaaccgtcgcgtgcatcccgctccgagttgttttcagcaggatcaacgaggcgctgagcttctcagttaatgagaatgccctagctgggtgtgggactgcttcccggctgaggaatacttggtag

SEQ ID NO: 149565 - DNA, 1329 bp, Zea Mays
cccacctttgcttgcacggcccgcccattcaccggttgaggggagaagggagaggagaggtagctcagtcctcctctgaccgccgacccatccgccatggccgcctcctacgaccgcgagttctggaacttcagcgaccagctgcgcctgcacaacaacttctccaacctctccatcgccgaccccatctggtcctccaccacactggatcctccctcctccttcagcgacgccccgggcctcataggatccgccaagctcgcctttggcaacgccaccacggccaacgccgaccgctacaacgccaacgccgccggtgtcgccagcaagagcatgagcgtgggcatgatcgaccactacctcaacaagaacactaacaacgacgtcgtcaagagctacttcaacaagtccgtcggcagcaggccggccaacaacaacaccaccacaaccgtcaagaagaactccgccgcccaccacgacaagaagcacaagaactccggcaacggcgccggcgtcgacaagaggttcaagagcctgccggcggcggaggcgctgcccaggggcgaggccatcggcggctacatcttcgtctgcaacaacgacaccatggaggagaacctcaagaggcggctcttcgggctgccgtccaggtacagggattctgtgagggccatcaggcccggcctgcccctcttcctctacaactactccacccaccagctccacggcatctttgaggctgcaagcttcggaggatccaacatcgatccagcagcttgggaggacaagaagtgccccggcgagtcccgcttccctgctcaggtgagggttgcaacgcgcaagatctgttcgccgctggaggaggacgctttccgccccatcctccaccactacgacggccccaagttcaggctggagctcagtgtccctgaggcgctctcccttcttgatatatttgcggagaagatttttgacagacagacagcctgatgtctccatacttgcttccagttccagaggagtagtacatgtataatataaatataatatgctgattaccgacatctgattatctattctagtataagttacactcgaacttaggccctctttggaattatagtatttttatagttttaaaacaatactatgttatttggtgatactatagtattggagctcaaaaggtgtttggtttgtacagtcaaaactcagttttaaataccatggtttaccaaaactgtggtatttttggagttttcgaaactccaatcaggatctcagttttcttctcctctatatatactttgtttttccaatagaaccaaa

SEQ ID NO: 149566 - DNA, 2124 bp, Zea Mays
atggttgcctcccttccccctcctcctcttcctcccagctgagctgcccttcttctttctccagcaagcaagcagcagcagcagcccaattgcattgcattgcagtgatggtgatgtgatttctgcggcgcgagacaagcacacccaccctcccagctcaacttacggtgacgccgtgacggtgaggttaggagctgggtgactgacgggggaggcccaccggacgtacgtgatcggcagccaagccaaggcgatgcctgcagccgcggctccagctccacacaccaggaccaggaccaggtccagcggcagccccagcgcagccatcggccccccgcttccttactggggcggcgccgctgttggcgcagaggagcagaggtggcgcatcggcatggactccgccgccgctgccctcctcgactccgcctccgcgtccgcctcttccgccaacgccgcaggcaaggagatgcccaccgcccgccacatcgcccaccgcaccgcccacaacatgtcctcctcctcgctccgcaagaagtccgacctcgcgctcctccgcaaggtcccctgcgccccgctccgacgcctcctcgacaacctccaggaggttttgctcgccaccaagctcgccctcctcttccccgccgttctactcgcgatcgccgcgcgaatcttccacttcggccaggaatgggtctttgtgcttagcttgatcggtctcgttcctcttgctgagcgacttagctttctgactgagcaggttgcgttttacatagggcctactgtgggtggactgttgaatgcaacatttggaaacgtaacagaggtcatcattgcgatctttgcactctatcaaggcaaggtagtggtggtgaaatgctccctgctaggctcagtcttgtccaacctgttgcttgtccttggaacctcccttttctttggtggcctggctaaccttggaactgagcagctatacgacaaaatgcaagtagatgtcagcacaggacttctgattcttggtgtgctatgccactctctgccactgatgctgagatatgctgtgagctccggggagcacgcagaatcctcttgggattcaggactggagctgtcccgagcatgcagcattgtcatgctccttgcctatgtagcctaccttttcttccaactgaaaacccaccgccaactatttgaaccccaaccccaagaggttgaagatgatggtgatgattcggtctctcaagacgaggcagtactgggattttccagtgcaatgatttggctgggagtcatgaccctgatgacagcactcctatcagagtttgttgtgagcacaattgaggcagcatcggaatcttgggagctatctgtcagtttcattagcgtcatcttgattccaatagttggtaatgcagcagagcatgctggtgcagtgatatttgcgtttaaaaacaatctggacatcaccctcggagtatctttggggtccgctacgcagatttccatgtttgtggtgccattgagtgtccttgtagcatggatcatgggagtcccgatggatcttgatttcaacttgcttgagactggttgtttgtttcttgcaatattagtaacggccttcacgctccaggatggatcatcacattatctgaagggactgctgcttgtgttttgctacattgtcatctccttatgctttttcgttttgagacagcatggaaatggaagcaacgatgatcagctgggtgtagcaagcaagccatggaggatttagggcgcctgagctggcagtagtttctcaacaagtagcgtggactttggtttgcacgattttgcatggaacactggaggggagacccgtgaagtttgactaaagtatgtagactgcgggaagatgctgttcagctgatgtgtgaatgtaagtacatacaaagactatagatgaaaactgatgttgcgtgagagactatttgtgtgtgtttttcttgttctttccaccaagcaatggctagaattcggttgagctgttgaaattgtctcctgtataaatcagtgacatgtcatactattttccaactggacttaacagagcctttatccttctaattggttacccgcatggtc

SEQ ID NO: 149567 - DNA, 2208 bp, Zea Mays
atggttgcctcccttccccctcctcctcttcctcccagctgagctgcccttcttctttctccagcaagcaagcagcagcagcagcccaattgcattgcattgcagtgatggtgatgtgatttctgcggcgcgagacaagcacacccaccctcccagctcaacttacggtgacgccgtgacggtgaggttaggagctgggtgactgacgggggaggcccaccggacgtacgtgatcggcagccaagccaaggcgatgcctgcagccgcggctccagctccacacaccaggaccaggaccaggtccagcggcagccccagcgcagccatcggccccccgcttccttactggggcggcgccgctgttggcgcagaggagcagaggtggcgcatcggcatggactccgccgccgctgccctcctcgactccgcctccgcgtccgcctcttccgccaacgccgcaggcaaggagatgcccaccgcccgccacatcgcccaccgcaccgcccacaacatgtcctcctcctcgctccgcaagaagtccgacctcgcgctcctccgcaaggtcccctgcgccccgctccgacgcctcctcgacaacctccaggaggttttgctcgccaccaagctcgccctcctcttccccgccgttctactcgcgatcgccgcgcgaatcttccacttcggccaggaatgggtctttgtgcttagcttgatcggtctcgttcctcttgctgagcgacttagctttctgactgagcaggttgcgttttacatagggcctactgtgggtggactgttgaatgcaacatttggaaacgtaacagaggtcatcattgcgatctttgcactctatcaaggcaaggtagtggtggtgaaatgctccctgctaggctcagtcttgtccaacctgttgcttgtccttggaacctcccttttctttggtggcctggctaaccttggaactgagcagctatacgacaaaatgcaagtagatgtcagcacaggacttctgattcttggtgtgctatgccactctctgccactgatgctgagatatgctgtgagctccggggagcacgcagaatcctcttgggattcaggactggagctgtcccgagcatgcagcattgtcatgctccttgcctatgtagcctaccttttcttccaactgaaaacccaccgccaactatttgaaccccaaccccaagaggttgaagatgatggtgatgattcggtctctcaagacgaggcagtactgggattttccagtgcaatgatttggctgggagtcatgaccctgatgacagcactcctatcagagtttgttgtgagcacaattgaggcagcatcggaatcttgggagctatctgtcagtttcattagcgtcatcttgattccaatagttggtaatgcagcagagcatgctggtgcagtgatatttgcgtttaaaaacaatctggacatcaccctcggagtatctttggggtccgctacgcagatttccatgtttgtggtgccattgagtgtccttgtagcatggatcatgggagtcccgatggatcttgatttcaacttgcttgagactggttgtttgtttcttgcaatattagtaacggccttcacgctccaggatggatcatcacattatctgaagggactgctgcttgtgttttgctacattgtcatctccttatgctttttcgttttgagacagcatggaagtatggatttctagtcttaacaaccttcattcaaaaaaaaacctatagatgcattattggttgacattttctaaataatctcaataacatgttactgatgctagatggaagcaacgatgatcagctgggtgtagcaagcaagccatggaggatttagggcgcctgagctggcagtagtttctcaacaagtagcgtggactttggtttgcacgattttgcatggaacactggaggggagacccgtgaagtttgactaaagtatgtagactgcgggaagatgctgttcagctgatgtgtgaatgtaagtacatacaaagactatagatgaaaactgatgttgcgtgagagactatttgtgtgtgtttttcttgttctttccaccaagcaatggctagaattcggttgagctgttgaaattgtctcctgtataaatcagtgacatgtcatactattttccaactggacttaacagagcctttatccttct

SEQ ID NO: 149568 - DNA, 2593 bp, Zea Mays
gaccgtccttctggcgctgttcctttcttgcgcggccagccatggagttagagggcaagcatggcttcccttggtgacataggcctcgccgcgggtctcaacgtattgaccgccgttgccttcttgctcgcatttgcattccttcggctgcagccaatcaacgacagggtctactttcctaaatggtacctcaggggaatgagagacaatccaatcgtatctggtgcagctgtgcaaaagtttgttaacttagacgccagatcctacttgaagtttttaaactggatgccagctgctctcaagatgccccaggatgagctcattaaccatgcaggccttgattctgtggtctacctacggatatacgtaacagggctcaagatatttgttccaattacagttctggcttttcttgtactggtcccagtcaattggaccaatgacaccctaggacgcatcaacgtagtctacagtcctattgacaaactttcgatatctaatgtacctaatgggtcgaagaggtttatagctcacttgggcatggcttatgccatcacattttggacctgttatgtactgttgaaggagtatgaaattatttctaacatgaggctgcgctttctagcttcagagaaacgccgaccagatcagttcactgtccttgtgcggaatataccaccagatcctgatgaatcaatcagtgagcttgtggaacatttcttccttgtcaatcatcctgatcattatctacaacaccaggtggtttacaacgcaaataaacttgctgatctggttgaaaagaagaagaagatgcgaaattggcttgactattacctactaaagtatgagcgaaattcatcattgaggcctaccacaaagactggctttcttggatgttttggttccaaggtggatgctattgactattacaaatcagagatcgagaaaatcgggaaacaggaagctgaagagcgtaagaatgtcatgaaggatccaaaatcagttgtgccggcagcctttgtctcatttcgctcccgatggggtgcagcagtctgtgctcagacccagcaaacaagcaatccaacactctggttgacagaatgggctccggaacctcgtgatgtttattggaataatctgtccatcccatttgtgtcccttacaattaggagattgatagttgctgtggcattcttcttccttaacttcttttacgtcatcccaataacattcgtacagtctcttgcaaaccttgaaggaatagagaaggcacttccatttctaaaacccttgattgacttgccattcattaaatcattcatccaagggtttcttcctggaattgctttgaagatcttccttatagtgcttccaactatactgatgtttatgtctaaatttgaaggactgatatcgcagtcatctctggagaggcgatctgcatctaagtattacatattcttgttcttcaatgtatttttggggagcgtaattgcaggatctgctctggagcagcttaaaacttatctccatacatcagcaaacgacataccaaggatcattggtgactccatcccaatgaaggcgacttttttcataacatatgtgatggttgatggttggactggaatagctggtgaaatattgagactgaagccgcttatattcttccatctgaagaactttttcttggtcaaaaccgaaaaggacagagaagaagctatggaccctggcagtatctgctttgactcaactgaacctagaatacagttgtacttcttgcttggccttgtttatgctgcagtgacgccgttcttgcttcctttcatattggtgttctttgggttcgcatatgttgtcttccgccaccagataataaatgtctataatcagcaatatgagagcgccgcacagttctggcctagcgttcatgggcgtataatcacagcgttgattgtatcgcaactgctgctcctgggactgatgagcacgaacgactttgagcagacgacacctgtgctccttgttcttcctgtgctgacctttgggttttacaagtactgcaagaaccgctttgagccggcattcgtgaggaacccgctgcaggaggcgatgaagaaggacaccctagaacgcgcccgggagcccaacttggatctgaaggcgtacctggccaactcgtacctgcacccggtgttcaagggggacgaaggcgacgacaggtactcggtgatggacgacgatgggtggatggaggaggaggtgatcgtgccgacgaagcggcattcgaggaggacgacgcccgcgcagagcaagcatgaagggtcggactcgctctctgtgctcgagagttctctacagcggtagtcacagtaggagcttagcctgtacagaatggatgaaaatgatcacggccctgctccattgcttttgctttggttgttggttgttcatgtcacaggggacacacacacacagatagaattcaagagagctgtggggaggactgaggggagagatagtttactgtagcttggacaaagaatctgaatacagcagttacattatctgatgaatctgttagcaccatcca

SEQ ID NO: 149569 - DNA, 2635 bp, Zea Mays
ttcaattttctcacaacgctgcttcttctgggggtcatcatgttttttttttcaggccatatggtccgtgccatccttacttcgtacacttgtttttgtgggcgcaggagttagagggcaagcatggcttcccttggtgacataggcctcgccgcgggtctcaacgtattgaccgccgttgccttcttgctcgcatttgcattccttcggctgcagccaatcaacgacagggtctactttcctaaatggtacctcaggggaatgagagacaatccaatcgtatctggtgcagctgtgcaaaagtttgttaacttagacgccagatcctacttgaagtttttaaactggatgccagctgctctcaagatgccccaggatgagctcattaaccatgcaggccttgattctgtggtctacctacggatatacgtaacagggctcaagatatttgttccaattacagttctggcttttcttgtactggtcccagtcaattggaccaatgacaccctaggacgcatcaacgtagtctacagtcctattgacaaactttcgatatctaatgtacctaatgggtcgaagaggtttatagctcacttgggcatggcttatgccatcacattttggacctgttatgtactgttgaaggagtatgaaattatttctaacatgaggctgcgctttctagcttcagagaaacgccgaccagatcagttcactgtccttgtgcggaatataccaccagatcctgatgaatcaatcagtgagcttgtggaacatttcttccttgtcaatcatcctgatcattatctacaacaccaggtggtttacaacgcaaataaacttgctgatctggttgaaaagaagaagaagatgcgaaattggcttgactattacctactaaagtatgagcgaaattcatcattgaggcctaccacaaagactggctttcttggatgttttggttccaaggtggatgctattgactattacaaatcagagatcgagaaaatcgggaaacaggaagctgaagagcgtaagaatgtcatgaaggatccaaaatcagttgtgccggcagcctttgtctcatttcgctcccgatggggtgcagcagtctgtgctcagacccagcaaacaagcaatccaacactctggttgacagaatgggctccggaacctcgtgatgtttattggaataatctgtccatcccatttgtgtcccttacaattaggagattgatagttgctgtggcattcttcttccttaacttcttttacgtcatcccaataacattcgtacagtctcttgcaaaccttgaaggaatagagaaggcacttccatttctaaaacccttgattgacttgccattcattaaatcattcatccaagggtttcttcctggaattgctttgaagatcttccttatagtgcttccaactatactgatgtttatgtctaaatttgaaggactgatatcgcagtcatctctggagaggcgatctgcatctaagtattacatattcttgttcttcaatgtatttttggggagcgtaattgcaggatctgctctggagcagcttaaaacttatctccatacatcagcaaacgacataccaaggatcattggtgactccatcccaatgaaggcgacttttttcataacatatgtgatggttgatggttggactggaatagctggtgaaatattgagactgaagccgcttatattcttccatctgaagaactttttcttggtcaaaaccgaaaaggacagagaagaagctatggaccctggcagtatctgctttgactcaactgaacctagaatacagttgtacttcttgcttggccttgtttatgctgcagtgacgccgttcttgcttcctttcatattggtgttctttgggttcgcatatgttgtcttccgccaccagataataaatgtctataatcagcaatatgagagcgccgcacagttctggcctagcgttcatgggcgtataatcacagcgttgattgtatcgcaactgctgctcctgggactgatgagcacgaacgactttgagcagacgacacctgtgctccttgttcttcctgtgctgacctttgggttttacaagtactgcaagaaccgctttgagccggcattcgtgaggaacccgctgcaggaggcgatgaagaaggacaccctagaacgcgcccgggagcccaacttggatctgaaggcgtacctggccaactcgtacctgcacccggtgttcaagggggacgaaggcgacgacaggtactcggtgatggacgacgatgggtggatggaggaggaggtgatcgtgccgacgaagcggcattcgaggaggacgacgcccgcgcagagcaagcatgaagggtcggactcgctctctgtgctcgagagttctctacagcggtagtcacagtaggagcttagcctgtacagaatggatgaaaatgatcacggccctgctccattgcttttgctttggttgttggttgttcatgtcacaggggacacacacacacagatagaattcaagagagctgtggggaggactgaggggagagatagtttactgtagcttggacaaagaatctgaatacagcagttacattatctga

SEQ ID NO: 149570 - DNA, 2254 bp, Zea Mays
gaccgtccttctggcgctgttcctttcttgcgcggccagccatggagttagagggcaagcatggcttcccttggtgacataggcctcgccgcgggtctcaacgtattgaccgccgttgccttcttgctcgcatttgcattccttcggctgcagccaatcaacgacagggtctactttcctaaatggtacctcaggggaatgagagacaatccaatcgtatctggtgcagctgtgcaaaagtttgttaacttagacgccagatcctacttgaagtttttaaactggatgccagctgctctcaagatgccccaggatgagctcattaaccatgcaggccttgattctgtggtctacctacggatatacgtaacagggctcaagatatttgttccaattacagttctggcttttcttgtactggtcccagtcaattggaccaatgacaccctaggacgcatcaacgtagtctacagtcctattgacaaactttcgatatctaatgtacctaatgggtcgaagaggtttatagctcacttgggcatggcttatgccatcacattttggacctgttatgtactgttgaaggagtatgaaattatttctaacatgaggctgcgctttctagcttcagagaaacgccgaccagatcagttcactgtccttgtgcggaatataccaccagatcctgatgaatcaatcagtgagcttgtggaacatttcttccttgtcaatcatcctgatcattatctacaacaccaggtggtttacaacgcaaataaacttgctgatctggttgaaaagaagaagaagatgcgaaattggcttgactattacctactaaagtatgagcgaaattcatcattgaggcctaccacaaagactggctttcttggatgttttggttccaaggtggatgctattgactattacaaatcagagatcgagaaaatcgggaaacaggaagctgaagagcgtaagaatgtcatgaaggatccaaaatcagttgtgccggcagcctttgtctcatttcgctcccgatggggtgcagcagtctgtgctcagacccagcaaacaagcaatccaacactctggttgacagaatgggctccggaacctcgtgatgtttattggaataatctgtccatcccatttgtgtcccttacaattaggagattgatagttgctgtggcattcttcttccttaacttcttttacgtcatcccaataacattcgtacagtctcttgcaaaccttgaaggaatagagaaggcacttccatttctaaaacccttgattgacttgccattcattaaatcattcatccaagggtttcttcctggaattgctttgaagatcttccttatagtgcttccaactatactgatgtttatgtctaaatttgaaggactgatatcgcagtcatctctggagaggcgatctgcatctaagtattacatattcttgttcttcaatgtatttttggggagcgtaattgcaggatctgctctggagcagcttaaaacttatctccatacatcagcaaacgacataccaaggatcattggtgactccatcccaatgaaggcgacttttttcataacatatgtgatggttgatggttggactggaatagctggtgaaatattgagactgaagccgcttatattcttccatctgaagaactttttcttggtcaaaaccgaaaaggacagagaagaagctatggaccctggcagtatctgctttgactcaactgaacctagaatacagttgtacttcttgcttggccttgtttatgctgcagtgacgccgttcttgcttcctttcatattggtgttctttgggttcgcatatgttgtcttccgccaccagataataaatgtctataatcagcaatatgagagcgccgcacagttctggcctagcgttcatgggcgtataatcacagcgttgattgtatcgcaactgctgctcctgggactgatgagcacgaacgactttgagcagacgacacctgtgctccttgttcttcctgtgctgacctttgggttttacaagtactgcaagaaccgctttgagccggcattcgtgaggaacccgctgcaggtatatttcgccgtggcatatgctaccacattgtcattgacgatggatttgctgaacatgatatatatacatatgaaatggtggcaggaggcgatgaagaaggacaccctagaacgcgcccgggagcccaacttggatctgaaggcgt

SEQ ID NO: 149571 - DNA, 935 bp, Zea Mays
tcttgttcatcgctgtatggtacacctctagtcatatgcaggctgacatgtgaaccatttcgcttcagatttctgagattatgagccgatttgagagaaaaggctataagcttgttgccatcaagctgattgttccatccaaagaatttgctgagaagcactaccatgatctcaaggaaaggcctttcttcagtgggttgtgtgattttctcagctctggccctgtgcttgcaatggtttgggaaggagagggtgtcatcaagtatgggagaaaactaattggtgccacagacccacagaaatctgaaccaggaaccatcaggggcgatcttgccattgttgttggaagaaacattattcatggaagtgatggcccagagacagcgaaggatgagatcgctttatggtttgaacccaaggagctggtctcttacaccagcaatgcggagaagtggatctatggggtgaattaacgagagagtcaatctgttttttttcccttcttttgatctcggttttcacataattgccgacagacctaggcacaaggatgtaataaagtcgctaccgtcacttcgagttggattgtgaccttcaggtgtagtaaggcacaaggaaggatggaaaggaaaggaatataccgtgaaatatagagcgtgcactgagtagtcgcgatgttcaaatcaaactatatatcaccgtcactggagtcatgtaatccaagatggcgatgcagatgtttctttggatctatttctctagatatccctaccatgatgatggcccaccgtctgtttttattcttgtttttggatctatttgtctacatatccctaccatcatgatggcccaccgtctgtttttggtcttgattttggatcttgtttttgcgtgagagggtagatgctattctggagctgtgtgattagacatta

SEQ ID NO: 149572 - DNA, 1907 bp, Zea Mays
aatggcgacctcacatagccccatacgcctgtctcgaagccggagaatgaagagatagcctatcaacgaagcagcaatatggcacctggatcgatcatgccgccgggacgctctgtggcctccgtcctcctccatggcctcctctgcctgcagctggttgccttggccgagatcgagatggagggcggcagctgcatgcatttcagtgtctccccgccggctgctccgcccgaggacgccgatgagcgtcgcaactatttccgcgccatggaggccaaggacctgttccggcaccagcagatgatcaagatgatggggaacggcagtggcactggcagcggcagcagcaggaggcggcaggccaaggagtcgtccaagctgccggaggtgatgtccgccacgtccatgttcgagctacccatgcggagcgcgctcaacatcgcgcacgtgggcatgtacctggtgtcggtgcgcttcggcacgccggcgctgccgtacaacctggtgctggacaccgccaacgacctgacgtggatcaactgccggctgcggcgccgcaagggcaagcactacgggcggaccatgtcggtgggcgccggggacgatggcgcggcggccaaggaggcgaggaggaagaactggtaccggccggccaagtcgtcgtcgtggcgcaggatccggtgctcgcagaaggagtgcgcgctgctgccctacaacacgtgccagagccccagcaaggcggagtcgtgcagctactaccagcagatgcaggacggcacgttgacgatgggcatctacggcaaggagaaggcgacggtgacggtgtcggacgggcggatggccaagctccctggcctcatcctgggctgctccgtcctggaggccggcggcagcgtggacgcccacgacggcgtgctctcgctggggaacggcgagatgtccttcgccgtccacgccgccaagcgcttcggccagcgcttctccttctgcctcctcagcgccaatagctcccgcgacgcctcgagctacctcaccttcggtcccaacccggcggtgatggggccgggcaccatggagacggacatcgtgtacaacgtggacgtgaagccggcgtacgggcccttggtgacgggcatcttcgtgggcggggagcgcctggacatcccgcaggagatctgggatgccgagaaggtggtcggcggcggcgtcatcctggacacgagcacgtcggtgacgtcgctggtgccggaggcgtacgcggcggtgacgagcgcattggacaggcacctgtcccacctgccgcgggtgtacgagctggacggcttcgagtactgctacaggtggaccttcgccggcgacggcgtggacctggcgcacaacgtgacggtgcccaggttgacggtggagatggccggtggcgcgaggctagagccggaagccaagagcgtggtgatgccggaggtagtgcccggggtggcgtgcctggcctttaggaagctgccgcggggagggcccgggatcttgggcaacgtgctcatgcaggagtacatctgggagatcgaccacggaaaggggaagatgaggttcaggaaggacaagtgcaacacccatcatctccacaacagcaaaggcggagaggtctataataataataatggcaattcctcctctactgtcgtgcatcgcgtcaattaattcgttctctcttctctatctctacaaaattaaaggaccagaccatgcatgcacttcgctgtatgtaacaaaagaagcaggtagctcagctgccttgcctgtgttatgtttatttcacttcttcatttgctgattatcttggagtatatacccactctgtaagaggattacattcataatgagagagaagcgggggttacatgtttaagaca

SEQ ID NO: 149573 - DNA, 1175 bp, Zea Mays
gtgctggatgatacatgcatcagggggcggccggccaaccagtagtcgtcgatcgatcacattatgtcccacatcgcggtggagcgcaaccggcggcgtcagatgaacgagcatctcaaggtgctccggtccctgacgcccggtctctacatcaagcgcggcgaccaagcatccatcatcggcggcgccatcgagttcatcaaggagctgcagcaggtgctggagtcgctggaggccaggaagaaacggcgcagcagcggcggcggccacagcttccttacgggtagccccagccccacgcccagcccgcgctcccacctcctctcctccgtttccaccccgtcgccgcctgtcatgatcaaggagctcgccgcctgctgcaactccgccgtggccgacgtcgaggccaagatctccggctccaacgtcctgctgcgcacgctctcccgccgcagcagcatccccggacgacaggccgtcaggctcatcgccgtgctggagggcctccacctggaggtgctccacctcaacatcagcaccatggaagacaccgtcctccactccttggtgctcaagatcggcctcgagtgccagctcagtgttgaggatcttgcctacgaggtgcagcagatcttcggtcaggacacggccgagcagaagccgcaggaggagaatcataatcagcatatcatatactcgtcagccatggccgccgccatataattaacataataacaaatgcatggctccatccatttgcttacttatatgaagtatgtagccagctagctcgctgtatttgtgtccttccttctcttgctatatatccttcaagcgcatgcatgcatgggcatggtataacacatagtgaagtagagctatctagctttaccttttttacgtcgtcgtcgtgattatgctgatactaatctgggaggtataaacttaaacggttaaaccataccttcttgtccgacgttgagggcggcagttgctatatatggccgtggcgtcctgcatgggaacaccaccatcctccgtatgatccacctccctgtcttcctcctccggttgtctcctggggctctccacgggccttggtgccatgcatgggggatctaggagcggtggaagccacagctacggtgattccagtcattgataggggccctgag

SEQ ID NO: 149574 - DNA, 1216 bp, Zea Mays
ccgcgccagcacctcgctctcgtcgcagtccttgtctctgccgccgtggcagcgcagacgaccacagacgagctttctgcttctccggcggataacaacagcgcactagtggcgggcgtgggcatcaaggtgtccttccgcccccgagtggcaatcgtggtggggcatcttcaccatgatcttctccctcaccttcctcgtcctcatgtacgccaagttctgccacccttccggctcctcctccacaaacggcgcagccgcagcagcggtgtgcagcgtcggagtccccaagcaggtcatccagtcgctgcccttcttccggttcgccaccctccgtggggcgcgccaggggatggagtgctccgtctgcctcgcccgcttcgacgacgccgacctcctccgcctcctgccgcgctgccgccacgccttccacctccactgcgtcgaccgctggctccagtccaacgctagctgcccgctctgccggaccagcgtcgacgccgaccacgccacgctcggcctcaagtacccctccagcgcgcgcatcgtcttcggcggcgacgcgctgtcttctggacgcttcgacgacgctgctggtgctgggacggggagcggccgcgacctcctcgacatcttcgtggagcgcgtgcccggaccgtacattaagaagacgatatcatcatcgccgccgccgccggggctggacaggcacaagcaccgcatcatcgtgtccgacgtgttgttcaggagccggtggagcgagctcaactccgcagaccttatcgcgctcgacacggagatgctgcgctccgtgtccagcggccgctttgtgttcccgccagagtacaacaacgagatgatagcagcagcagcagcagaggaggaggaggaggaggacgacggtatcatgccgacggcgatggggaggaagcggctgctggagcctgtcgacgacgtggtggacgacgacctactaggtgacgggtgcagaagcggcttcgccgtgtcggcctcggcgtccgcggcgaggatgatatcctccggggtgcgctccatgtcggagatcgtgagtctgtcgagggagcggctgtcggaggaggacaatcggcggtggctgacgatcgcacggcggacggcgcggtggttcgccgccgggcgcgccagcagagggaatgaggaagagcaccgagctgtccacgtcgtggatgacgtgtag

SEQ ID NO: 149575 - DNA, 172 bp, Zea Mays
agtcgaagtgagcgtcagcgagcgaccgcaccggcacggcgcccatccatccatcgccatcctctagcccagtccaaaggaaccctagccatgagcgccgcctccaagaagctcttccaggccgccaggtccctcgtcctctccgcttctcaccgctccgtcctcgccgccg

SEQ ID NO: 149576 - DNA, 291 bp, Zea Mays
ttttttcgttctttttgcatttctttttttgaaacatgaattatttcaaactagctgagctagcctcggcacttcatcttacagggcaaccaacaacaaatatgcaaataacgaagccaacaaaaacccaccccaccgtcaaaaaaaaagacccttttaacaatctggaccaaaaaaagaaacatttgtgtgcttgtattcactgatgaatttcttcctcaaatttgtaacctacagcaactgcctacaacaacaccctccccgttaccgttgtcaatctcgttttgggga

SEQ ID NO: 149577 - DNA, 216 bp, Zea Mays
cacaacaaacgtccgagagacagacatctatggaccatgcacaattttctcataaatacataaccaacaagaccacctctttgttgatctgggtgtactttagacgctctgatgatgtgctcataaaactgaaagaactgtacctaagcacctgcttgccatacaccaaccatgtttctgctcatttgccgcaaggggcagatagttaatctatga

SEQ ID NO: 149578 - DNA, 1630 bp, Zea Mays
aaaccgcaggaaccaaaaggccactgcagcagacggaggacggcgacggtggcggcggggaagagccgaagaggacgacgagggatagaacggcgagggagaagctgtctctcttcacgctcgggatcgttaaccgtagctgacaaccgtgcggaaacaccggattgtgagggccgaggagagaggtgcggcgaggcctctcgaggaggcgggggcgggatggcgacgccggggaagggaggggcagcgcggtttgcggccgcgctcttcgtcctcctgaatctcgctgtggccattgctgggaagagctactacgacgtgctgcaagttcccaagggcgcgtccgaggatcagattaagaggtcgtaccgcaagctcgcgctcaagtatcatccggataagaaccccgacaacgaggaggccaacaagcgcttcgctgagatcaacaacgcgtatgaggtgttgacggaccaggagaagaagaagatctatgaccggtatggcgaggaggggttgaagcagttccaaggcgggagaggaagtggcggtggaatgaacattcaggacatctttagcagtttttttggtggtggtggtggtgggatggaagaggaggaacaacaaattttaaaaggtgatgaggtgattgttgaactggatgcttcattagaggacttgtacatgggcggttcattaaaggtttggagagagaaaaatgtcataaagccagcaccaggaaagaggcgctgcaactgtaggaacgaagtttaccatcgacaaataggtcctggaatgtatcaacagatgactgagcaggtctgcgaccaatgtccaaatgtgaaatttgtacgagaaggtgaattcttgactgttgatattgagaagggaatgaaagatggacaggaggttttgtttttcgaggaaggcgagcctaagattgatggcgaaccaggcgatttgaagttcaggatccgaacagcattacacagccacttcaaacgagaaggcaatgacctgcatgcaacagttacaatatccctgctgcaagctctggttggtttcgagaagacaatcaagcatcttgacaaccatctggtagaaattggcaccaaggtaaaggcaggcatacgtcaacatgatttttgtcatctgcaacagaccagaccggctcaattttggccttaattcacagggcatcaccaaaccgaaggagatcaggaagttcaaaggtgaaggcatgccactataccaaagcaacaagaaaggtgacctgtatgtgacattcgaggtgttattcccgaaaaccctaaccgctgaccagaaggccaagcttaaggatgttctcgtgtagaccattgttttccacttgtatgctactgagtttgaggcagagcgccttgaggaaaattttcggagtagcttgcataggaagcagcagctgcttcctttttatgtgattttccattgcaaatcctagcagcatggtcttctttttctttcccttgcgttttgttatgcgcccttaacagctcggtgtaggtttagaaggcacaacaaaactgtaccagaatatttgtacctttggaattctgaatacatagattgaacacctcgggtgcttgcttattct

SEQ ID NO: 149579 - DNA, 1549 bp, Zea Mays
aaaccgcaggaaccaaaaggccactgcagcagacggaggacggcgacggtggcggcggggaagagccgaagaggacgacgagggatagaacggcgagggagaagctgtctctcttcacgctcgggatcgttaaccgtagctgacaaccgtgcggaaacaccggattgtgagggccgaggagagaggtgcggcgaggcctctcgaggaggcgggggcgggatggcgacgccggggaagggaggggcagcgcggtttgcggccgcgctcttcgtcctcctgaatctcgctgtggccattgctgggaagagctactacgacgtgctgcaagttcccaagggcgcgtccgaggatcagattaagaggtcgtaccgcaagctcgcgctcaagtatcatccggataagaaccccgacaacgaggaggccaacaagcgcttcgctgagatcaacaacgcgtatgaggtgttgacggaccaggagaagaagaagatctatgaccggtatggcgaggaggggttgaagcagttccaaggcgggagaggaagtggcggtggaatgaacattcaggacatctttagcagtttttttggtggtggtggtggtgggatggaagaggaggaacaacaaattttaaaaggtgatgaggtgattgttgaactggatgcttcattagaggacttgtacatgggcggttcattaaaggtttggagagagaaaaatgtcataaagccagcaccaggaaagaggcgctgcaactgtaggaacgaagtttaccatcgacaaataggtcctggaatgtatcaacagatgactgagcaggtctgcgaccaatgtccaaatgtgaaatttgtacgagaaggtgaattcttgactgttgatattgagaagggaatgaaagatggacaggaggttttgtttttcgaggaaggcgagcctaagattgatggcgaaccaggcgatttgaagttcaggatccgaacagcattacacagccacttcaaacgagaaggcaatgacctgcatgcaacagttacaatatccctgctgcaagctctggttggtttcgagaagacaatcaagcatcttgacaaccatctggtagaaattggcaccaagggcatcaccaaaccgaaggagatcaggaagttcaaaggtgaaggcatgccactataccaaagcaacaagaaaggtgacctgtatgtgacattcgaggtgttattcccgaaaaccctaaccgctgaccagaaggccaagcttaaggatgttctcgtgtagaccattgttttccacttgtatgctactgagtttgaggcagagcgccttgaggaaaattttcggagtagcttgcataggaagcagcagctgcttcctttttatgtgattttccattgcaaatcctagcagcatggtcttctttttctttcccttgcgttttgttatgcgcccttaacagctcggtgtaggtttagaaggcacaacaaaactgtaccagaatatttgtacctttggaattctgaatacatagattgaacacctcgggtgcttgcttatt

SEQ ID NO: 149580 - DNA, 926 bp, Zea Mays
agagaaatctgtactgtgttgtgcataagggaaaagtatagtatttacatttacgtttctatgttcaatgtgtcataggtttggagagagaaaaatgtcataaagccagcaccaggaaagaggcgctgcaactgtaggaacgaagtttaccatcgacaaataggtcctggaatgtatcaacagatgactgagcaggtctgcgaccaatgtccaaatgtgaaatttgtacgagaaggtgaattcttgactgttgatattgagaagggaatgaaagatggacaggaggttttgtttttcgaggaaggcgagcctaagattgatggcgaaccaggcgatttgaagttcaggatccgaacagcattacacagccacttcaaacgagaaggcaatgacctgcatgcaacagttacaatatccctgctgcaagctctggttggtttcgagaagacaatcaagcatcttgacaaccatctggtagaaattggcaccaagggcatcaccaaaccgaaggagatcaggaagttcaaaggtgaaggcatgccactataccaaagcaacaagaaaggtgacctgtatgtgacattcgaggtgttattcccgaaaaccctaaccgctgaccagaaggccaagcttaaggatgttctcgtgtagaccattgttttccacttgtatgctactgagtttgaggcagagcgccttgaggaaaattttcggagtagcttgcataggaagcagcagctgcttcctttttatgtgattttccattgcaaatcctagcagcatggtcttctttttctttcccttgcgttttgttatgcgcccttaacagctcggtgtaggtttagaaggcacaacaaaactgtaccagaatatttgtacctttggaattctgaatacatagattgaacacctcgggtgcttgctta

SEQ ID NO: 149581 - DNA, 232 bp, Zea Mays
tcaaatatattttctttgtcaaaacgtacgtgacttacatatggcccagtggtttgtgttagtagttaggtgtttgaggtgctgggttcaatccttccttgggcctttttttttacattttgtccaattaaactatattcactgaatcagaggtccgattaaaatatattttatccaattttttaccttaagtaaataaggccaaaacatgactccatgccaagtttcacta

SEQ ID NO: 149582 - DNA, 264 bp, Zea Mays
atggcgacgttcaacgttgaagaccgaggggagggcgcgacgcggcaccagggagaatctcggcgagcagagaagaccagagggagctcggcgagcatggcaagggcccgcggccaagggaagatgagcaggggcatcctggcgagctcgcagcaggcgctggggcagggaaatcgcgactggggagggactccgagcagcgcgcggttggggaagatggagcagagggcgcgatggggaaactccacggcgcgcagggaataa

SEQ ID NO: 149583 - DNA, 450 bp, Zea Mays
atggcatggagaggtggctggagtccgacgagctggagcattggcaagctcagcagacgcgggcaaggaagctggcgagcgcatgccgacacgacaacaagagaatacatgtggtcgtgtagtgcccactgcccagatgtcgtcgtgcttgagagagggagacaagaccgacagccagagaagaggagcgccaggaacccggatggggttgacggcgagctcgcagcgacgcaactggagtgctgcgcaggggacgagccagtggcgcagccatggatgagcgccgacgaactgggagaggaagagagcttcggccatggaaacacaggggaacggggatccggcgcagggagcagggcgagcgccgcagggagccgcgcggtccgagctggggagcgagcaacacgccgtcctgggcgagctgaagaacttgaacggcagagcagatag

SEQ ID NO: 149584 - DNA, 706 bp, Zea Mays
ataacgctaatgcaattgatgcaggtgtaggatgtccttagcaaccaggaggccgttgacatcgtgttgtcgtccccaggccgatcaaaggccgcgagatccctggtcgggctgccgctcgcgaatggaaaaccaagtacgacatctaagatcgacgactatgcagtggtctgcctatacatggacggcaagatggaccacgaaagcgactcgacggcctcaatgctcaatggacaacatcagcctggactacgaattcgaaggctcagccgcggacccgaacgaagctcaggagcaggagccagcgctgaccctcaacttcacggtcaggacggtggccggaactgaagtgcccacgagaaggcgctgtcgagggcggcagacgcggtcgtcgccgcccacgaccagagctggtcgggccttgacggagtgacgcaggtgaacttgctcgtccagctccccaggttctccgaggagaaggcggttggctgatgagccggctgctgcgattctttggttttgattgagttgttttttcccatcctgtttggcaatctagtttagtagttgccccgttgtttgagaggaacacggtagaaacaaaaatatggcattgtagcttgcatcggcgcgtggttagccgtggactcctccatagaatcagtcagggttcgattcgatcctggacgctgcacatttttgccgc

SEQ ID NO: 149585 - DNA, 510 bp, Zea Mays
tataaagcatatccactcaaccaggggcaaaatggaccaactcctaagtttaggatccaatggccacgtccttcacatagagttgcttcgtcttgacgcaccctccgcaatcacgtcacgtgttgccaccggttccctccggaactaccgccaccgagttttgaggcccaaactcaggaaaacccgccatccgtaccgctatgtggttttaaggcccaaaccaccaaacctgccgtgagcaccgcaccttgtgcacgtcctccgtgaccagacgcgtgtctcgctagtcctcgaccacaccagcaacacgatccactccaccacatcctcgtgcgagtgtgtgtcctaggtgtcagccaccgcagctggtcactcgactactctggtccgtcaatcatgacccatcactcgcccttcaccgcccctggtccatcagcacgagcccgcatgaccttcacctcagccgtcgatcaccatccctatgctccacacctacacaccacaagccga

SEQ ID NO: 149586 - DNA, 1116 bp, Zea Mays
actagtcactaccgcagctgtcagcccgctgaccagtctcgctctctcgcggcttccgaatcctagcgcgagtggatcggcgggcgggtggcggcgatgatggtgagggcgcgcgacgcggcgcgggcgctgctccgcctcgccggcgccagagctggcgtccatagggactatttccctccgctagcgcgcgccacgtttgctcgcgccttcctggatttccgcaagacggggaacaaggaggccatcgagaaggataaggccaggcttaccgatgaactgagtagaggctacttccaagactttgccgagatccgcgagaacgctggcaagattgcgacagcgagtaaggtcatcatcccagaggtagatgctgtgaagtttcctgatcttgatgtggattcccctgatggaggggcactgcatctgcctcttgttgcaccaactctgcaagctgatgatggtgaggctggagaccataagattcctggtgcttcattggtgtgcctttccttccgcgcaagctcgctgaaaatggcagagtcatggagtttaccttacctggatgctttcggtgctgccaagaacatgcatgtttatgaggtctcatttatagattcttgggtattatcattgagtcctatgaggcgagcatttctgaaggcgatgaggaaatctaacaatccacggagacatgttgtgtatgctttcggggaccattatgacttccggaagaagcttcaaattataaaccttctcactggatacatatatctggttgatggcctgggaagaataagatggcaaggctctggatctgcaacacaagaagaactgtcgtcactaacagcgtgcacctccattttgttagatgaaaaatgagatggggtggctaatctttgctattttgtaacttctggtacaagatattttgcttttcactaagcaaatcgagtttttttcccgtgggtaataagtattggatggttagtttttttcactaaacaaccttgattttctggtggaaaatgattttggtatggtattatcgttgtatttaactgctatcctaacttcgtgctataataagactgaattagtttaaatctttccaaa

SEQ ID NO: 149587 - DNA, 1108 bp, Zea Mays
actagtcactaccgcagctgtcagcccgctgaccagtctcgctctctcgcggcttccgaatcctagcgcgagtggatcggcgggcgggtggcggcgatgatggtgagggcgcgcgacgcggcgcgggcgctgctccgcctcgccggcgccagagctggcgtccatagggactatttccctccgctagcgcgcgccacgtttgctcgcgccttcctggatttccgcaagacggggaacaaggaggccatcgagaaggataaggccaggcttgcagtaccgatgaactgagtagaggctacttccaagactttgccgagatccgcgagaacgctggcaagattgcgacagcgagtaaggtcatcatcccagaggtagatgctgtgaagtttcctgatcttgatgtggattcccctgatggaggggcactgcatctgcctcttgttgcaccaactctgcaagctgatgatggtgaggctggagaccataagattcctggtgcttcattggtgtgcctttccttccgcgcaagctcgctgaaaatggcagagtcatggagtttaccttacctggatgctttcggtgctgccaagaacatgcatgtttatgaggtctcatttatagattcttgggtattatcattgagtcctatgaggcgagcatttctgaaggcgatgaggaaatctaacaatccacggagacatgttgtgtatgctttcggggaccattatgacttccggaagaagcttcaaattataaaccttctcactggatacatatatctggttgatggcctgggaagaataagatggcaaggctctggatctgcaacacaagaagaactgtcgtcactaacagcgtgcacctccattttgttagatgaaaaatgagatggggtggctaatctttgctattttgtaacttctggtacaagatattttgcttttcactaagcaaatcgagtttttttcccgtgggtaataagtattggatggttagtttttttcactaaacaaccttgattttctggtggaaaatgattttggtatggtattatcgttgtatttaactgctatcctaacttcgtgctataataagactgaattagttt

SEQ ID NO: 149588 - DNA, 889 bp, Zea Mays
actagtcactaccgcagctgtcagcccgctgaccagtctcgctctctcgcggcttccgaatcctagcgcgagtggatcggcgggcgggtggcggcgatgatggtgagggcgcgcgacgcggcgcgggcgctgctccgcctcgccggcgccagagctggcgtccatagggactatttccctccgctagcgcgcgccacgtttgctcgcgccttcctggatttccgcaaggtagctgcttcgtctccgttcctcctcgtttcctccgcaatgcagtaccgatgaactgagtagaggctacttccaagactttgccgagatccgcgagaacgctggcaagattgcgacagcgagtaaggtcatcatcccagaggtagatgctgtgaagtttcctgatcttgatgtggattcccctgatggaggggcactgcatctgcctcttgttgcaccaactctgcaagctgatgatggtgaggctggagaccataagattcctggtgcttcattggtgtgcctttccttccgcgcaagctcgctgaaaatggcagagtcatggagtttaccttacctggatgctttcggtgctgccaagaacatgcatgtttatgaggtctcatttatagattcttgggtattatcattgagtcctatgaggcgagcatttctgaaggcgatgaggaaatctaacaatccacggagacatgttgtgtatgctttcggggaccattatgacttccggaagaagcttcaaattataaaccttctcactggatacatatatctggttgatggcctgggaagaataagatggcaaggctctggatctgcaacacaagaagaactgtcgtcactaacagcgtgcacctccattttgttagatgaaaaatgagat

SEQ ID NO: 149589 - DNA, 1442 bp, Zea Mays
ctccatcacgcactcctgccagagaccaaactattcgtatcgtgcgtaggtgttgcttgctgttgcaacggaccatccatctagtgcttgcattgctgtcgcactcgctcagctatctccaccgctattggttgttgtttggttacccacgccctgctctctgataccagttgatagcagcagcagctagctataggttgtcagcaggatcgaccagatagatagcgcggatcggaattaacagcgctgcaggaggatggtgaagagcacgacgacgatgggggcggcgagctgcggcggcggcgtgctgccgctggcgtcgctgaaccacatcagcatcgtgtgccggtcggtggaggcgtcgctgcgcttctacacggacgtgctcggcttcgtccctatccgccgccccggctctttcgacttcggcggcgcctggctgttcaactacgggatcggcatccacctgctgcagtcggaggaccccggcagcctcccgccggagaagggagagatcaaccccaaggacaaccatatctccttccagtgcgagagcatggtggcggtggagcggcggctgaaggagatcggcatcccgtacgtgcagcgctgcgtggaggagggcggcatcaacgtggaccagatcttcttccacgaccccgacggcttcatgatcgagatctgcaactgcgacaacctccccgtcgtcccgctcgccggcgaccagcagcgcgcgccggccgcttgcaggcgggctccggcggcggtcaataccgtcaagcagcagcagcagggcagcgtggtgcctgcttcttccgctccggtcacgacggcggcggcgcagtgcatgccgtcggcggccacggcggcgcaagccatccgcgtcgccgaggagtcgtcgtcgcacatttcgtgcgcgtgattaattactagcttgttgacgacgacgccagtgcatggattcggcgcggacggtgacgaagcaggcacgatggatcgacgagcgccgagtcacgaccacaagaggcgtctctgtacatgcgcgtgcgtgcgtgcgtgggtgtaggtgctgtatgtgcagtgcactcaaactgcctagcttttttttagtaaagaataaacccatggtacggtgggagtgaagagactagtgcgtccactccatcatatccttgtgtatatcttcttctgcgttccgtgtcgatcgatctacttactaaaacagcgtacgtgaagcactaacgccgccagatcgacatcaactagctagtggacagtggtagggatggacagtggtagggatgaaaacggaaaacggacggaaaacccctctcccgttttcgtatccgcattttatcatcggaaacgggattggatccggaatagtcggggacggaaacgggagcgggataaacggaattgcgaaaacgaacggaaacgga

SEQ ID NO: 149590 - DNA, 1806 bp, Zea Mays
aaggcctcgactttaattcgtttccccattttctggttgcagattgattctttaccatttgtatcgccattcctccctgttcgttgggcgtggggtctcaacctaaaatcagtcccattccgcgctcctagtggagagtggattcgaacggaaacacctttttgtgccccaagatgcctgtttccgcttcgtttccacgccacaccttttgaatcctttgccgtcacctcgccttttgcagcactagttgtttgtcagccttcttggagtgtggaggggcagagagcgccgtcctgttgattcaggaaaacagtccgagccgatgggcaggaagagcgacggcgcgcggttgcaatgcgctgaggccaaactggcgacggattggacctgctgcttcctggccctgccaccggcagcaccatccgctgtggatggcgatggtggattcaacctctcgtggaacctccaccagtccttccacccgccggccggcctcttcgccagcgtgggccagcaggttggggttgggttcccagggccttcgtcccagtcgccggagacgccacgggacccatacatgaagtacgtctcgccggaggttgttgagacacctctgccgggggaaggtgtgggggggttgagggacaaggggaagaagaaagtcgtgaagctcaagattaaggttgggaatcatcacctcaagagactgatcagtggagcaatcgcaggcgcagtgtcaagaactgctgttgcacctttggagacgatcaggacgcatttgatggtgggaagtaatgggaattcgacgacggaggtgttccagtctatcatgaagcatgagggatggactgggttgttccgtggtaacgttgttaatgtcatccgggtagccccaagcaaggcaatcgagctttttgcctttgatacagctaataagttcttgacccccaaatatggggagaaaccgaagatcccagtccctccttcactagtggctggggcatttgccggtgttagctcaactctgtgtacatacccactggaattaattaagacacggctaactatacagagaggtgtgtatgacaatttccttgatgcatttgtcaaaatcatccgcgacgaagggcctactgagctctaccgaggcttaaccccaagcttgattggagtggtgccatatgctgcaacgaactacttcgcctatgacagcctgaagaaggtgtacaagaagatgttcaagacaaatgagattggcagtgttccaacactgttcatcgggtctgccgcaggagctatctcaagcacagcgacgttccctcttgaggtggcacggaagcacatgcaagttggagctgttggtggcaggaaggtttacaagaacatgcttcatgccttgttgagcattcttgaggatgaaggggttgggggcctttacagagggttggggccaagctgcatgaagttggtgcctgctgctgggatttcgttcatgtgctacgaggcttgcaagaaaattctgattgaggaagaggatgagtgaagtgtatgcagatcattagaactcagttttgtgacatcctgacagcaggcagcttgaggttactgctgtagtcggcataagttcttaacccctttttgcacccagttttatctgataaactcacctctttttttttccccagatttacttttacttttgggtacaacttgtgttgaaaacacgtctttcgaaagtcattactgggatgcatgaaaacgttgagttgccatcggcaatcataattcacaactgatttgtgttct

SEQ ID NO: 149591 - DNA, 793 bp, Zea Mays
ttctcttaattttcaaaatatttaaactaacaaaacaaactaagatcatttcactaactgtaggtgctcatttgttatgctgttttggtacattcgatatgactgttggaccactgcattgggagttgcgacctattcgattgttaggcacttattggtttaagacttaagggttctgttctgatatagattggaatgtatggacatagctggctctttgatgttgtatatcgttttcttatatgtttgcagatgattttaatcagtttccaaagtattgacttattactaatcagtaccagttcaatgttggtttagattccctttttgctttagtgcatttaaattgtaaccactataccttcttgacttctatggatatggatactttttaaaaacttttttacatgtgatttttaaactctattctattgtttcttttaaaaagctaattgctcttgatatgggtgcattgattgctggtgccaaatatcgtggagagtttgaggatagacccaaggctgttctcaaagaagttacagattctgatgggcagaccattcttttcattgatgagattcacaaagttgttggagcagcgtccattgcaaggaagatctaccagaggcaagacattggtgtgggtggctttcggaagatttacagtggctgcacctcaagcgcttcggcaaggttgctcaatttctggctgcaggtggacagcgccaacaagtacgagaccttgctggagctgtacaatgcggagctcactgatcgtctagctgtacaatga

SEQ ID NO: 149592 - DNA, 973 bp, Zea Mays
atgtgcccacgtcctcaatctgcctccacgacgctccgccacttccgcacgcacgagctcgacctcgcctgtttccgccagctccgccacttcctcgcccccgacctcgatgtgtgggattcgataccaaatgaagagacaagaggagaatacgagccctcagcctcgcccttgtcctcggtgttccccattcaccgctcaggcgcactccatcgctccttcgacgaggactccaatgactacagctccatcgctcctcatggtgatgccgccaagggaaccacaacgactacaacgaagccgtccacgatgccatcagtggttgcccacataggagcatgctccaccatgcgcgcaccttgccctgcacaccggcagacacaccctgcggctgcccacacaaggctgctaatggcggaggctgagcgccgccatggatctgacacggtgtggaatggggaggagccgaagtggagattggatcaaagtggactaggcaggagccaagcaaatcgtgtccaggacgactgggttcgctatgctaagatgactgaagcaattggagagcaactgcatattgtcggtgatgaccttgtcactaatcccactgttagtacatttatttctttccttctaaaatagaagttaaaattccagtttggttgttgcaatacccttatgtcagctgcttttaatatagtagagatatgttctggtgtttgctaatcagcagatgtcatgctatgagttctgtcgtgaataactctctgggagcagtggcttggttttgtggtgggcgtttggacaaaatctttaggattaacaagacttcgtaggttgaattagaccttgcaaaattatgattgtcttagtggtgtcactaagcatttgccagtgaccagaaaattatgactttgtctttttatatcgacaccatgcatattccaatcaataacaggaatcatctataaaa

SEQ ID NO: 149593 - DNA, 455 bp, Zea Mays
atcgacaaaatggaggtaccgcgcctcccccagggtgcccttccatccatggcgttgtcgcggctgtccccgcaatcaactcccagatctcgtgctcacctccccgcaatcaaggtcgtcacgcccgatgaggatggtcgccagtcgccgcacggcggttcgggccccagcgatagctccggcgcaggcgcgaggaagaagctccggctcaccaatgagcagtcgacgctgctcgaggacaccttccgcgcccacaacatactctccaacgcgcagaagcaggagctcggacggcaggtggatctcagcgccaggcaggtggaagtgtggttccagaacacacatgttcagataacacacatgttcatgctcatgctgaccccacacaggttcatattgtcttctgcgtgtatgtagttgtttcttcttcaattctctttgtggggaaaacatta

SEQ ID NO: 149594 - DNA, 650 bp, Zea Mays
aaccttaacggtgtattttgcagagccgcaagaacgagggacaaattgctccgtttcgccgcatagccgagaggaagcaggcggcggcgagaatccagtagaacgcgagcagacggcggcgatggcatggcgggcgagcctgtctcggagtgtaaaggagatacgcgtcctcttctgccagtcctcccccgctagcgcccccgcccgggagttcgtgaagaagaactatggtgacatcaaggcccgcaacccctccctccccttccttgtccgcgagtgctccggtgtccagccccagctctgggcgcgctacgatatgggtgtggagagatgcgtgaacttggatggtctgacggaagcacagattgataagaagctggaggaacttgcaatggccggggagtctcttaaaaccaaatagttttggaactcgtatcatgtcttgtttaatgttccaaaataatagatactcctaccatattggtggacaattgctactctgtcattatctgtagttgtgcgtggtacgaagccttcgattagctcaacttaatgtgtaataattactattgttttacatgctatgcattttctagattacatgaatgattgaaaatggaaaaaaaaaataatactctctcttttctttt

SEQ ID NO: 149595 - DNA, 1588 bp, Zea Mays
gcttcccaccagctcgcgcccgccgccggccgccgtctcgcgcaccccgctgccgccagctcgagcgccccgcgccgccactgcgcgccctgccgccgccaccccatgcgccccgctccgccagcccgcgcctccaccccgcgtgccgcccgctcgccagccccacgtcgcctggcctcctccgagcccgacgccgacaaggcggcgctgctggcgttcctctccggcgtgggtcacggcgccaccgcctgtccgcgctcgcgggcctccacctccaccacaacgccttctccggcgcgctccccgccgccctcgcggggctgaccacgctccaggatgtttccaaaaaggtgtctagatctgatggggtttccactgagagatctactagattgaggtttagccaggatcatgctgccaaatcaaaagcaaagctcaagggtgctttctctttacttggactgaacaatgacaccttcaaaggacctcatacctccaaaaggcttcagttgaaggacctgtcctggagatcaaaggatactactatcaatgtgaaagagaaccatgatcaagagacagtgcatgaggagaataccaagtcctgtgaacatgaatatgggagttactgcctctggtctactgaacacagggaagtaatgaaggatgccattgtcaagaagcttaaagatcaactttttatggcaagagctcattatcctagcattgcaaaattgaagcagcatgaagcatttacaagtgaactgaagcaaaacatccaagaacatgaacgcatgctaagtgacaccatcacagatgctgatcttccaccattttttgcaaagaagctggagaagatggagcacacaattgtgagagccaagtctagtgaagtaggatgctccaatgttgaacggaaacttaggcagctacttgatataactgaaaatgaagcttatttccatacaaggcagagtgcatttctatatcatcttggagtgcagactatgccgaaaactcaccattgcttgaacatgagattgacagtagaatattttaagtctggatcaagtcatgtggatcagttaaatgaccagaagcttgaaagtcctgccttacatcactatgtaatattttccaggaatgtacttgcagcttccaccactatcaattcaacggttatgaactcccaggtctctctctctcggacacttatattaaatagaaacgaaacgctccggatgtcgcttgccgcgcgcgcggcgtgcagttgtgatctctgccaggagtagagtgtgggatggggatgcataacgagcagtgctgcagcaggcagggattgtaagttgtaaccttgagcagcttgtggttcatggtgcccccgttctccagatgccggctgccacgcgccccgaggccggcgagctcctggtgctcgacctctccttcaacgccttcgaaggcgccgtccctagcgcgctcgccaacctcaaccgcctaatcctagacgattaggattgggggttaacagtaaataaaggcaatgcagaatcaaaaggctaccaagtgtggaaaaggtccttgtttcttc

SEQ ID NO: 149596 - DNA, 1796 bp, Zea Mays
ctcttcctctcctttcccgcttcccaccagctcgcgcccgccgccggccgccgtctcgcgcaccccgctgccgccagctcgagcgccccgcgccgccactgcgcgccctgccgccgccaccccatgcgccccgctccgccagcccgcgcctccaccccgcgtgccgcccgctcgccagccccacgtcgcctggcctcctccgagcccgacgccgacaaggcggcgctgctggcgttcctctccggcgtgggtcacggcgccaccgcctgtccgcgctcgcgggcctccacctccaccacaacgccttctccggcgcgctccccgccgccctcgcggggctgaccacgctccaggtgctcgacctctccttgaacgccttcgacggcgtcgtgcctggcgcgctcgccaacctcacccgcctcgtcgtgctcgacctctccaacaactcgctgtccagtcgcgcggaggtggcaaaccagatgcgtttctctcgtcatgccttggctggcatgcccatccctcggttttctgttcttggagtaggatgtttccaaaaaggtgtctagatctgatggggtttccactgagagatctactagattgaggtttagccaggatcatgctgccaaatcaaaagcaaagctcaagggtgctttctctttacttggactgaacaatgacaccttcaaaggacctcatacctccaaaaggcttcagttgaaggacctgtcctggagatcaaaggatactactatcaatgtgaaagagaaccatgatcaagagacagtgcatgaggagaataccaagtcctgtgaacatgaatatgggagttactgcctctggtctactgaacacagggaagtaatgaaggatgccattgtcaagaagcttaaagatcaactttttatggcaagagctcattatcctagcattgcaaaattgaagcagcatgaagcatttacaagtgaactgaagcaaaacatccaagaacatgaacgcatgctaagtgacaccatcacagatgctgatcttccaccattttttgcaaagaagctggagaagatggagcacacaattgtgagagccaagtctagtgaagtaggatgctccaatgttgaacggaaacttaggcagctacttgatataactgaaaatgaagcttatttccatacaaggcagagtgcatttctatatcatcttggagtgcagactatgccgaaaactcaccattgcttgaacatgagattgacagtagaatattttaagtctggatcaagtcatgtggatcagttaaatgaccagaagcttgaaagtcctgccttacatcactatgtaatattttccaggaatgtacttgcagcttccaccactatcaattcaacggttatgaactcccaggtctctctctctcggacacttatattaaatagaaacgaaacgctccggatgtcgcttgccgcgcgcgcggcgtgcagttgtgatctctgccaggagtagagtgtgggatggggatgcataacgagcagtgctgcagcaggcagggattgtaagttgtaaccttgagcagcttgtggttcatggtgcccccgttctccagatgccggctgccacgcgccccgaggccggcgagctcctggtgctcgacctctccttcaacgccttcgaaggcgccgtccctagcgcgctcgccaacctcaaccgcctaatcctagacgattaggattgggggttaacagtaaataaaggcaatgcagaatcaaaaggctaccaagtgtggaaaaggtccttgtttcttc

SEQ ID NO: 149597 - DNA, 1802 bp, Zea Mays
ctcttcctctcctttcccgcttcccaccagctcgcgcccgccgccggccgccgtctcgcgcaccccgctgccgccagctcgagcgccccgcgccgccactgcgcgccctgccgccgccaccccatgcgccccgctccgccagcccgcgcctccaccccgcgtgccgcccgctcgccagccccacgtcgcctggcctcctccgagcccgacgccgacaaggcggcgctgctggcgttcctctccggcgtgggtcacggcgccaccgcctgtccgcgctcgcgggcctccacctccaccacaacgccttctccggcgcgctccccgccgccctcgcggggctgaccacgctccaggtgctcgacctctccttgaacgccttcgacggcgtcgtgcctggcgcgctcgccaacctcacccgcctcgtcgtgctcgacctctccaacaactcgctgtccagtcgcgcggaggtggcaaaccagatgcgtttctctcgtcatgccttggctggcatgcccatccctcggttttctgttcttggagtaggatgtttccaaaaaggtgtctagatctgatggggtttccactgagagatctactagattgaggtttagccaggatcatgctgccaaatcaaaagcaaagctcaagggtgctttctctttacttggactgaacaatgacaccttcaaaggtaaaggacctcatacctccaaaaggcttcagttgaaggacctgtcctggagatcaaaggatactactatcaatgtgaaagagaaccatgatcaagagacagtgcatgaggagaataccaagtcctgtgaacatgaatatgggagttactgcctctggtctactgaacacagggaagtaatgaaggatgccattgtcaagaagcttaaagatcaactttttatggcaagagctcattatcctagcattgcaaaattgaagcagcatgaagcatttacaagtgaactgaagcaaaacatccaagaacatgaacgcatgctaagtgacaccatcacagatgctgatcttccaccattttttgcaaagaagctggagaagatggagcacacaattgtgagagccaagtctagtgaagtaggatgctccaatgttgaacggaaacttaggcagctacttgatataactgaaaatgaagcttatttccatacaaggcagagtgcatttctatatcatcttggagtgcagactatgccgaaaactcaccattgcttgaacatgagattgacagtagaatattttaagtctggatcaagtcatgtggatcagttaaatgaccagaagcttgaaagtcctgccttacatcactatgtaatattttccaggaatgtacttgcagcttccaccactatcaattcaacggttatgaactcccaggtctctctctctcggacacttatattaaatagaaacgaaacgctccggatgtcgcttgccgcgcgcgcggcgtgcagttgtgatctctgccaggagtagagtgtgggatggggatgcataacgagcagtgctgcagcaggcagggattgtaagttgtaaccttgagcagcttgtggttcatggtgcccccgttctccagatgccggctgccacgcgccccgaggccggcgagctcctggtgctcgacctctccttcaacgccttcgaaggcgccgtccctagcgcgctcgccaacctcaaccgcctaatcctagacgattaggattgggggttaacagtaaataaaggcaatgcagaatcaaaaggctaccaagtgtggaaaaggtccttgtttcttc

SEQ ID NO: 149598 - DNA, 765 bp, Zea Mays
cttgctattggatgatcatgaggtatataaagtataatatttgttgatcaaattcatttgaatgcatatgagttgattgaattggatatatatgcatatgttgcttgttataagatgattgaatggacaacttgctaaataatcaagtttggattgatttgtgttgaataaattcaagagacttcatttagtaagtggtttgaatggatacttgtcttttgaaagtagttcatttcagatttgattcaacttgaagaagaataactcaatatactgaaatctggccaatattgaaaatctgacaaagctgtgctcataaccatgtttgagtgatcaaatctatttggattggcttgaaattcagtttacttgctctatgcatatgatagcaaagtctgtgcaaatttcataatcattggataagtgaaacttcttgattaagtcaatcttgtcagcacaaacacagcagttttcagcatgtacctaccgtgggagatgttatggctggcagcacatatgaagtcaaatgagtctcaactttttacagctgttagcagacttattaaagcacatctccaccaattgtcgtggtcataggatctgtacatcaaaatttatgaatgtttctttggagtatacagaatctgtcataagtgacaagtatttgaaatattgaaagtcactttgattggaaggctctcatataggataaatcacataagttgtctgagagaccatagtttggtttttaattgatctataatc

SEQ ID NO: 149599 - DNA, 4069 bp, Zea Mays
tgtttacagcaatctggctgccttctataaatggagcatatccaccaccaaagaaacacacacacacacacgaccactgcaaaatactagtaacaatgtctcagacaacatatatggcccctgtaggcactctcggcttctcgctgccgttgatcatcctcttggcttctctttcggcgctactagctactacacctaacgacgacatggaagcgctgctctgcctcaagcaccacctctcagcctcatcagaccctacggggacactaccttcatggaagaatgattccacgcagttctgcagttggtccggcgtgacatgcagcaagagacactcgtcccgtgttgttgcactggaccttgagtcactcgacctccatggccaaatacctccttgcatcggcaacctcacgttcctcacaaggatccacatgccaaacaaccagctgcagggtcagatcccggctgagcttggccagttaaaccggctgcggccatcgatctttcgaggaattccctcagcggaagcatccccgaaggtctggggagcctcctcggcaacctctcggatttacgcctttcaggtaaccatctgacgggcagcattccagcttcacttggaagcagctcctcccttgtctccgttgttctcaacaacaacagcctcactggacccatcccgtcgctactagctaacagttcgtcgctccaacgactggggctaagaaacaaccgtctcagcggactcattccccagtcgctgtttaacagcacgtcgcttgagatgctagtgcttgcagggaacagctttgctgggcccatacctgctgtctcaaacaccgtcgttgactcgccgccgccgcccttgcagtatctgatactggactcgaacgatctaacagggcccttgccttccactctagggaacctcacttctctcctctggctcacgcttgggggtaacggttttcatggtagcatcccgacgagcctgggtgcactcgtgaacctgcaagtgctggacatgactaacaatgctttgtcggggactgttccggcctccatctacaacatgtcagcgctcacacacctcggcatgggcatgaacaatctcaccggggaaatcccagctaacgttgggtatagccttccgagaatcgtgaacctgatcatggctcgaaacaagttcactggccaaatccctgtttcgctgaccaaggccaccaatctccagatcattaatctctgggacaacgcacttactggtactgtccctttgttcggagccttgcccaacttagtcgagctggatctaacgaagaaccagctcgaagctggccgggactggtcgttcttgacatccttgacaaattgcacgcagctggtgactctgtacctggacagaaacactctcggaggagtcttgccgaaatccataggggacctgcccagtggactggaggtgttgtttttaagtgcgaatggaatatctggcaccatccccaatgagataggacgcctaaaaaacctcaagcttctttatctggacaggaacctccttgctggaagtattccctactccctagggcatcttccgaacatgttcgcgttaaacttagcgcagaacaaactctcagggcagattccagcctctctcggtaacctaagccagcttagcgagctctacttgcaagaaaaccacttgagtggcccgataccaggtgctttaggacgctgcaagaacttagacaagctgaacctctcttgtaacagctttggcggtggcataccggaggagctgtttactctttcttccctctctaacgaactggacttgtcgcacaaccaactctcaggagagataccactagagatcggcagcttcgtcaaccttggcctactaaatatttctaacaacatgctggccggacgaataccgtccactctaggtcagtgtgtgcatctcgagtccctccacatggaggggaacctacttgatggtaggatcccacaatcgctccaaggattacgaggcctcgttgagatggacatgtctcggaacaacttgtctggtgaaatcccggagttctttgaaacatttagctccatgaagcttctcaacctgtccttcaacgacctcgagggaccagttccaacaggtgggatatttcaggatgcacgggatgtgtttgttcaagggaacaaggacctatgttccagtacccacttgctacagctaccactttgcactacagatactacatctaaacggcataggcacacctcctcctatgttctgaagttagtaggatttacagctctttctttagtcttgctattatgctttgcggtcgtccttttaaagaagagaaagaaggttcagcaagtagaccatccatccagcatggatttgaagaagtttacgtacgctgggctagtcaaagcaactaacagtttttcctcagacaacttggtgggctcaggaaaatgtggattggtgtataagggaagattttgggatgaggaacatgtagttgccatcaaagtattcaaacttgatcaactcggagcaccaaacagcttcctcgctgaatgtgaggccctgaggaatactagacaccgcaatctcgtgaaggtgatcactgcatgctcgacgattgattcagagggacatgatttcaaggccgtcattcttgagtacatgtctaacggcagcctggagaactggctctatccgaaattgaacaggtatggaattcgaaaaccgttaagtttgggctccagaatagaaatcgcagcggacatagcctgtgctctggattacctccataaccattgcgttcccgctatagtccattgtgacttgaaacccagcaacgtacttcttgatgatgccatggttgcacaccttggtgactttggattggctaagcttcttcacacttgtagctattcaattactcatagttcttctacaagcttgattggaccaagaggatcaatcggatacattgcaccagagtatggcttcgggagcaaactctctacacagggcgatgtctatagctatggaatcaccgtcttagaaatgctcacagggaagcgccccacagatgagatgttttctaagggtttgacccttcacaaatttgtgaaggaagcatttcctcaaaagattcatgaaattctcgatccttctatattcccggttacaagagatggtgataatcacacaacggatgaaataaccagaagcatcatgaaccttcttaagatcggtatctcgtgctctgcagatgcaccaacagaccgaccaacaatagatgatgtttatgctaaagtcatcacaatcaaagaaacatttttagatctatgccactaaggaatggaacaatcatttttactatttaaatcaggggggcattatgttttatttactctgtttgcttgggaagcttaggaatcaaataaattgtgggtcttgtcctttattttgtcattactcttatgtaatttgacgagtagagagctgacaagtctgtttgctaggtgtgaccgcagctccactgtggggcatacttgtaatattcttataactcaatgactctttagcaaacatccaaaccacaaagaccagttgtgccctgagtgaactcactgtattgttgggagatagatacaaaggattaagagtgatccaccaataaaaagagatttccgatcactatagttggctgtcaaaaaatagtggtccgaccatgttaactttcgatggctctgtgaggcgtcggaagttaataacttccaacaccaaccgtcaaaagttagataactttcgtatgcagttgaaatttactaacttccaatagttttagctaacttttgatggctttggcgatcataagtcaagttgtttttgtcgtgcagttaagctttttttctcccttataaattgtatatgatactagaacagagaagctttatagtggcggtcgtaaacctattttttgtggcgtttatcttaaccgtcagtgctaggaatcagtaaaaatcattatttttacaggcg

SEQ ID NO: 149600 - DNA, 3336 bp, Zea Mays
ccactgcaaaatactagtaacaatgtctcagacaacatatatggcccctgtaggcactctcggcttctcgctgccgttgatcatcctcttggcttctctttcggcgctactagctactacacctaacgacgacatggaagcgctgctctgcctcaagcaccacctctcagcctcatcagaccctacggggacactaccttcatggaagaatgattccacgcagttctgcagttggtccggcgtgacatgcagcaagagacactcgtcccgtgttgttgcactggaccttgagtcactcgacctccatggccaaatacctccttgcatcggcaacctcacgttcctcacaaggatccacatgccaaacaaccagctgcagggtcagatcccggctgagcttggccagttaaaccggctgcggccatcgatctttcgaggaattccctcagcggaagcatccccgaaggtctggggagcctcctcggcaacctctcggatttacgcctttcaggtaaccatctgacgggcagcattccagcttcacttggaagcagctcctcccttgtctccgttgttctcaacaacaacagcctcactggacccatcccgtcgctactagctaacagttcgtcgctccaacgactggggctaagaaacaaccgtctcagcggactcattccccagtcgctgtttaacagcacgtcgcttgagatgctagtgcttgcagggaacagctttgctgggcccatacctgctgtctcaaacaccgtcgttgactcgccgccgccgcccttgcagtatctgatactggactcgaacgatctaacagggcccttgccttccactctagggaacctcacttctctcctctggctcacgcttgggggtaacggttttcatggtagcatcccgacgagcctgggtgcactcgtgaacctgcaagtgctggacatgactaacaatgctttgtcggggactgttccggcctccatctacaacatgtcagcgctcacacacctcggcatgggcatgaacaatctcaccggggaaatcccagctaacgttgggtatagccttccgagaatcgtgaacctgatcatggctcgaaacaagttcactggccaaatccctgtttcgctgaccaaggccaccaatctccagatcattaatctctgggacaacgcacttactggtactgtccctttgttcggagccttgcccaacttagtcgagctggatctaacgaagaaccagctcgaagctggccgggactggtcgttcttgacatccttgacaaattgcacgcagctggtgactctgtacctggacagaaacactctcggaggagtcttgccgaaatccataggggacctgcccagtggactggaggtgttgtttttaagtgcgaatggaatatctggcaccatccccaatgagataggacgcctaaaaaacctcaagcttctttatctggacaggaacctccttgctggaagtattccctactccctagggcatcttccgaacatgttcgcgttaaacttagcgcagaacaaactctcagggcagattccagcctctctcggtaacctaagccagcttagcgagctctacttgcaagaaaaccacttgagtggcccgataccaggtgctttaggacgctgcaagaacttagacaagctgaacctctcttgtaacagctttggcggtggcataccggaggagctgtttactctttcttccctctctaacgaactggacttgtcgcacaaccaactctcaggagagataccactagagatcggcagcttcgtcaaccttggcctactaaatatttctaacaacatgctggccggacgaataccgtccactctaggtcagtgtgtgcatctcgagtccctccacatggaggggaacctacttgatggtaggatcccacaatcgctccaaggattacgaggcctcgttgagatggacatgtctcggaacaacttgtctggtgaaatcccggagttctttgaaacatttagctccatgaagcttctcaacctgtccttcaacgacctcgagggaccagttccaacaggtgggatatttcaggatgcacgggatgtgtttgttcaagggaacaaggacctatgttccagtacccacttgctacagctaccactttgcactacagatactacatctaaacggcataggcacacctcctcctatgttctgaagttagtaggatttacagctctttctttagtcttgctattatgctttgcggtcgtccttttaaagaagagaaagaaggttcagcaagtagaccatccatccagcatggatttgaagaagtttacgtacgctgggctagtcaaagcaactaacagtttttcctcagacaacttggtgggctcaggaaaatgtggattggtgtataagggaagattttgggatgaggaacatgtagttgccatcaaagtattcaaacttgatcaactcggagcaccaaacagcttcctcgctgaatgtgaggccctgaggaatactagacaccgcaatctcgtgaaggtgatcactgcatgctcgacgattgattcagagggacatgatttcaaggccgtcattcttgagtacatgtctaacggcagcctggagaactggctctatccgaaattgaacaggtatggaattcgaaaaccgttaagtttgggctccagaatagaaatcgcagcggacatagcctgtgctctggattacctccataaccattgcgttcccgctatagtccattgtgacttgaaacccagcaacgtacttcttgatgatgccatggttgcacaccttggtgactttggattggctaagcttcttcacacttgtagctattcaattactcatagttcttctacaagcttgattggaccaagaggatcaatcggatacattgcaccagagtatggcttcgggagcaaactctctacacagggcgatgtctatagctatggaatcaccgtcttagaaatgctcacagggaagcgccccacagatgagatgttttctaagggtttgacccttcacaaatttgtgaaggaagcatttcctcaaaagattcatgaaattctcgatccttctatattcccggttacaagagatggtgataatcacacaacggatgaaataaccagaagcatcatgaaccttcttaagatcggtatctcgtgctctgcagatgcaccaacagaccgaccaacaatagatgatgtttatgctaaagtcatcacaatcaaagaaacatttttagatctatgccactaaggaatggaacaatcatttttactattt

SEQ ID NO: 149601 - DNA, 166 bp, Zea Mays
atggagaggatttcatctgctccagaaatggatgaggctatctcaactgatcagtcaagcagatcaacaaaaagaagggctaaagtttgggatcacgttgattcagagctaagagaaggcgatttgcaaatactgtaaggcccacttatcttctgttgcgggtaag

SEQ ID NO: 149602 - DNA, 956 bp, Zea Mays
gcctcctcattctcaactctgaagcggcacctacctcttcactgcagtgcttccctccttttcttgcagtccctcctctcctctcctcctccctccctctccctctgtctctgggctagcagagcagagtgccagtgagtgcgcagtgcatgttcgccatgtcaagcgccggctgcaaggcggagcctggattgttggcgaagcaggggagcaagctccacgccaagatgctctccaaggaggcggcggcgcagctcgccgtgccgtcgttccgggtgtactactccatggcgtcggccggcgcggtgccgttcctgtgggagtcgcagccgggcacgcccaagaacgactcgccctccgcggccgtgcttccgccgctcaccccgccgccgtcctactatgccgcaggcaggggaagcgccggcggccgctccaggaaccgtcggcatggcggcctccttggcgtcgtgctcccccgcatcaccctcctccggaggcccggcggcagccaggcgacgccgccgtgctcctcctcctcctcctcctggtcttcctcgagttccaacacgtcgtccaccatgtcgcccgtgttcaccgtacagtcgtcgcccgccgtgcacgtgggggcttcctgccgccaccacaggcctgcgttctcggccggcggcgccgacgacgtcgcggaggccacgccgcggtgcttctggaccgagcgtgagtgctgcgagaggcgggtggtcagggggtgtggcgtcgcggtggccgtcaggaacgcgcttgccacggtcgtcggcggcaagaccagcaggcgagctgccaccagcgccgcagtatagaatagagaggctttgtttcatattaatatggctaaagcccagggtgtggtttgcatattgcggcatcatgtgtactgtaatctatgtgctttgtgctaaatcttgacatgcaatgccaaa

SEQ ID NO: 149603 - DNA, 1083 bp, Zea Mays
cggcgccattgccgtctctaccgaaaatccagacaaagcacgagctacgcacgcccccgctgcctcctttctgccgtcccaacgccgccggagtctgtcgccaccgtcgctgctctcccgccttcaccgcgcccaactctcgtccttgcctcccctgcgcgcttcagccgcttcactccccatcgttttcgcctggccaggatctactgggaccatggatcaagaaaaaaaactagaagtatctaataccagccatacttacaagcatcattgtagcgttggagttgacgtccacgagatctttgttaagaggagcagattgcgggttgttctgtcatacattggcattattttccttcttgtgaatgcctgccaaccattgctgacaaaggagagcctatctcttgggtctgtttggaatattacctttgctgttctggtcgccaaatgtttgcaatacaaacctgtgaagagagaatcagtagtgataatgccagcttttggaattcagctagaaatacatttttggagtggaagagttgatcatcgttttgtgcccgttggcaagattctcaagccaatgataaatgagtgcgtgacaccggtgacctgttactggagcttggcgctgcttctgcgtgatgaagaggaacttctgctcgttttccagagatctcgtcctcctgtcaaaatgttggttccaatatggaaagctctctgcacgttgacaaactctcaacacccaagcccttctcaaattcctaaccatgacccttgaggaacatgagttagctggggcgttgtgtagatgtacgtatcatcagaagaggcacctgcagttgagccagattcagataggaactgttgatgccaccataggacgtaaccagtgctaggggcattgattgttagggagtgatttcggctggaagtgtatacggataaacactagcaatttgtgacactgaatactctcctttacttgcatgcttcattttgttggatatctgaatgaggtgctgaatataagcaaatttaagtgaaactttggtatgtacgtaaagatgcaaacttttgttaaac

SEQ ID NO: 149604 - DNA, 780 bp, Zea Mays
cgacgactcactcacaaccaattagctcaagatcgagctatagagagaaaagctaagatcgaaacatataccaatgggcaacagccttaggtgctgcctggcctgcgtcctcccctgcggcgcgctggacctgatcaggatcgtccacctcaacggccgcatcgaggagtacggccggccggtggccgccggcgagatcctggccgccaacccgaaccacgtcctcagcaagccgtgctcccagggcgtcgccgtgcggaggatcctcatcgtgtcgccggactccgagctagagcgcggcgagatatacttcctcatcccggcctcgtcggtgccgccggagaagaagccgcagccgcagcgacagcagaagagcgtcgtcctggccggctcgcacggcaaccaggtggtggtcaacaagaagatatcgtcgtcgcaccggagacgacgcaccgccggctgcagaaccaccgtatggaagccacacctcgagtgcattgttgagggggacacttaggcagaggtggacgatgatccattcttttgctctctctttttttttggtttttgtggatcaagcggggggctaatggctaatgcaatgtaacaccactagcagcatggtgttttgcccactttgtgtggttagtcagcatttttaatcttttttcttgggtaattgtatatccatgtaatgttttcccccttcctacatatgatgggaatgcagaggaagggttgttgccagttctttcttcttcttcgtgttccgcggttgcc

SEQ ID NO: 149605 - DNA, 1285 bp, Zea Mays
atgtttgctgacaagaagaacacgtccagtgatagcaataaaccagctttccagtttggtggaaataatgtcatatttggtggcaagaaggatgcacctgttgacagtagtaaacctttccagtttggtccgaataatggcatatttggtgacaagaaggatactcccagtgacagcaacaaacctttccattttggtgcaaacaagggcatatttggtgacaagaagacgacaagtgtgtttagtaggcaaaaacactttgggctagatcatttcaatttgggaatctaccaggttttgaaaactcctgtttcactggatatatttcaacatatgcattttaatggttctggaaaacctattgacaatggccccccgatattgcccgaagcctacttggatatctctggaagttttattaaccccagcgagagaacatatccagaggagatgatccaaactggcatatccaccattgatgtcatgaattccattgctcgtggacaaaagattccactgttttctgctgctgggctccctcacaatgaaattgctgctcagatttgtcgtcaggctggccttgtgaagacattggagaaagaaaagcatgctgaggacccagatatccatttcaagtacatagaagcagcagcaagaactggacaaatcaaagaagttgaacatgtaaccagagagtcaaacttatatgatgctgagaagacaaagattgacaggctcagtgatattgaggaattctcaaatttattgaagtaccttctgatggtaaggcaaaagtcacgggtcaccaaagtcgatggagaactcattttagcatatgctaagattgacaggctcagtgatattgaggaattcattcttatgccaaatgttgccaaccttcaaaatgttggtgaccatctgtatgacgaagaactatatgaagctgcaaagatcatctatgctttcatctcaaactgggctaaactggttgttaccctggttaagctgaagcagtttcaaggtgctgtggatgctgctcgcaaggctaacagtgccaaaacatggaaggaggtctgctttgcttgtgttgacgccgaggagttccgttttgcacaaatttgtggtctcaatattattattcaggtatacaagtaggagcacatacttgataattttttgtagtatctgctttatagcagagcttctatcactatgatctatttgttttctcatatctgcttttgtatttttgtttatggtgatgacttggaagaagtcagtgagt

SEQ ID NO: 149606 - DNA, 98 bp, Zea Mays
gttttttgtgttatgaattatcggtggctcagtgcaatgttcagaacatcaagatcatcaaatacaatttcaattttcttcaaaccatgtagcattgc

SEQ ID NO: 149607 - DNA, 1798 bp, Zea Mays
caccttccctttttctgtcagggaaggagaatcatcacctccaattacattccatgacttcatgggacaacatgtgtttacggagcaagtagctgtatctgctgcaccagggacaactcatccttgcccatatgtggcatacttgcatcctcttccaccactgacatcgtcaagctcccatgtccctgagagaaccactgatcgtactgcataccatgatcattggaaccccatggttgggccatcagatgttaggcccatgcaaacaatgcaacctgctgatttccatcatagccattgggcacatgtgccccattcttatgctcaacccaacagcaacaatgagcagccaggaatcccttttggaacaagggctacacgggttgatggtgatagccaacgtcgaatatctgttgtttctccatcttacttcagcaatggatctagacctcccagtgttcctcctctgatgcctcagttcatgagggcccatggcagcatcaatgaacaataccaacagaattcatcatctagcctatttgctggggcacataggtcaggaggcatgcgacctgcgccgacacctctaccagagaaccccaccttttccttgttcccaccgggttcatccggccatagttcgatggagactgatgacgctggaggaagccagttctatgcctgggagcgtgaccggttcgccccatttccgttgatgcctgtggactgcgagataagctggtggacctcacagcagcagtctcatagcacatcagagccttcatctgctccaaggaggctattcgggcaatggctcggcgtcggcaggtcgtcccctgaaaatagaccacccgagggctcttcgtatcggcaaatgatgcctgtggactgcgagacaagctggtggtcctcacagcatcagtctcatagcacatcggagcctacatctgctccaaggaggctattcgggcaatggctcggcgtcagcaggtcgtcccctgagaacagatcgcccgagggctcttcgtatcggcaaatgcactcgccacggatgtagaccatcgctgctggcaatccaatttaatttggaacccgagatgcttgtaagaaacgatgggaaacccattgtattatgttaggccaggctgggccgtaaaactttgggacgatgttcgaggggcgagaaacaggaaatcatccggctgagaggatattttgatttggtttatgtgaattctatctcgtacatatttgaaatcaagttgggatgttaggagtcatgctgcaattctgttgatcgacggctttcaaatgctattaaatttacgttgcaatggtacctgttgaaccgaagatggttttatgttcgtgtcgcatgtgaaggattacctttcatgcggttttcaatagggcaaaataaaatcttaattaaactcttaccattgacttgcagtgattggtattttgttagcactgtaaaatgttgaagtacgacacagaatatcggcactagggcagaaggttctttgtggaaggttcatattaataaaaaaaaggctgctgttttagtgtatttttagtggcggaagtgagaggggagacagcttatctgttagagctagtttgagagtctaaaaactggaggggttagagaggctaaaatcctcttcttatttaaaattgaataaggatgacattttagccccttcaattctctccggttttgtggctcctaaactaaccttaggtcaactttcatcctgcaacggataacttaatactggactgcaccgtcgtc

SEQ ID NO: 149608 - DNA, 123 bp, Zea Mays
caatttattatccccttcaggaaatatataaaatattctcttttgagttaaagtcacatttgttaaaagaattcacattaacttcttcctaaattaatagggtaaggcatgttgaattattgg

SEQ ID NO: 149609 - DNA, 330 bp, Zea Mays
cttctgtcagatagaagatcaaatagtttcccaccatatatttcaaaatagctaagccacaacttaaaattctgattccgatagacaggttggtgcaatagacgaaccatgtcttgtgcagctctcagaggcaaaggttgcattgtgtacgtcttgccactacctgctcacgaatcagcaaaacatgttgctttcgttctctgaaatataattggaattatgggctcaactgtttcacgcaacacctcatcattggaaacatgttcgtccaaaacagcatcaaaacaaaattcatgcttctccacataggctgtcagatccaccttccag

SEQ ID NO: 149610 - DNA, 786 bp, Zea Mays
atggcgcccaaacgccatggtccagagcctcgcccttctcctcaccactcataccttcttagaagccgcaactccaacaggctaagacaagctccaagggcatgcgagggcaaggcgggttctagtggtgagcaacagctaggaccaagggaagctccagcatgagcacagcttagatgacatccaacagcgagttgggagaggcaagccttggcacgcgtgcaggcaaagcgacctccggcgggtagggagggggtgaacgggtactggtcggcatgtactgaatggcagaaatccatggtggcagaggaagaaaagctatggtgacaaaggaagaaaaacaaaagattaaatgatgggccccacacaacagatggttcatcccacttcctagtatccctcaaccaaatgtagatcagagatggttccatcctctaaaacaaacacataacaaggtcaataccgtctctaaaagttgggttgggtccgtcccatcccactatgtctctaacccaaacatacgctaagggcgcgtttggtaggctgcatatgggccggccaggctggtgagatacagcgtacgcttttttggttggttgtctctgtatctagcgggctgagggcgatgtttggttgcctgtatgtctatgctcacctgcactgcgggatgcagcatctcgccacgatccaggttgtggagaaacgggtttcatttctgtatcttgggagccaggccctggctagcctctttggagcggccaggctccactgtgaaacgaaccaaac

SEQ ID NO: 149611 - DNA, 165 bp, Zea Mays
atggcgcccaaacgccatggtccagagcctcgcccttctcctcaccactcataccttcttagaagccgcaactccaacaggctaagacaagctccaagggcatgcgagggcaaggcgggttctagtggtgagcaacagctaggaccaagggaagctccagcatga

SEQ ID NO: 149612 - DNA, 1056 bp, Zea Mays
atgacgaaggcccttgccgatctcaccaccgcgatcactcaaatgatcagtaggccgccaacaccaccgcccccagcgtccaccagccctacttccatcccatatggcatgtcaggttatggcggaatacctcctctgtcaaaccccgccgcgccacccataccatcaccgccgatcaccaccacagccgctccactccgatccacctcaaccaaccttccaccgccaacctcagccttgctgccacccacatctaccatgcccatacccatccatcagatacccttcccacactccccatcacccatcccaggattttccgaaccccaccataccgcttacccacagcagcaaaaccctcccaaccagcaccaccacaaccttccctttcccacattcgacggcaaagaggatcatgttggttggttgttccgctgtgagagcttcttctacaatcaagggacgccggaggtggataaagtctggatggccacgtactatctcacgagcgctacacagctgtggtctgtcatgctacggcgcgacaagcccacactacactggccacacttcaagacgttgtgccagcagcgttttgggcctcctctgcgcacgaacacgttgggcgaggtggcacgcctgtcgttccgctccacggtggactaccaggatcgattcctagctctcctgtgccacacagagcccgtgccgctgccgcaccaacaggcccaactattcaccgcgggactaccatggcatctccgagtggacgtcgaactgtgcacatcctgcaacaggccatggccctcgctcgagcatacgagcaccgccagcaaggctcggacagtcgcgtgcctccgccctctacacgctacgccatcctcgacgccggcatcaccagccgggccagcggctgctgcctccaccctggcagcaccgacattcaagcgcctcaccccagcagagatgacggagcgacgccgccagtggctgtgtgacaactgcgatgagtcatttgtacgaggccatcactgccaaacgcctcttctaccttga

SEQ ID NO: 149613 - DNA, 665 bp, Zea Mays
atggagtacaccgacgccagtaaccgccaggtgctcgaggaaatgcgcctgatggaagcacggctctccgagaagttcgccggacgttgtgacaacatcgaaaggcgtgttgaggacatccactcccacttcacgacgcgctgtgacaagatccaggagcaagtcgacgtggcagctctccgcggcgacgaccgcctcgtcgcgctggagaaaatgcgctccgacattgagcgctggcgtccagagttggtcaagcgtgtcgaggacatcgccctcgaggttctgcgcgtcaacaagttcctcgagcgggagcgtcgagctgactccatcgacaaaccgggcatcttcggctccggcacggaggcgcccctgcgtgcggcgatgagaactcggccatggacatcttaccgcgaccgaggtgggatgagtcctggcgactgtgtacagcagcgccatggcggaggttgttcaacggcgagaaattccccgccatcgggtcgatcatcgtccccggcgccacatcaaacaggtcccagggtaaccggcgaagctcttagttctgtcttcgcgccccgaacgaccataggagcttgaatcaatagcggcgacgcgagcacctctttttctccctcggtattcggcgaggttctcaatggctcggagtt

SEQ ID NO: 149614 - DNA, 1068 bp, Zea Mays
atgcctatccaggcgcagaacacgccatttgtaaaccaatcctagccgtgcgtcttcaatccaacggaaagttcctccttgtcaatagcaaatcggaggcccaagcgctcccaatctctccgggtcctctctccgcattctccgtcatggctgagccgacgccgtcgcagtcgccagcgcagacgccgcccccgccgccgacgcagcagactcccgcggcgggtgggctcgaggacatgctggcgtgtgtggcggcgctggaggccgcgctgctgccgtgcctccccgcgcgcgagctccaggccgtcgaccgctccctccagtcctcccaccagattgatgttgagaggcacgcaagggatttcatggaggctgccaagaagctccagtcttatttcatcagcctgcagcgtgaggaaccgccatctgcagaagagatgcttcgaaaggagattacgacaatggaggaagagttgaagagcaagtctgagctcattgccaagcacaagaagttgattgaagggtggcaaaaggaactgaaggagcagctgagcaagcacatcacggagcttgaaagggtgtgaggagtgcgattctgcggtttaccttgtagtgatcatgaacctctaggtgaccaaatgttatgttatgccctataaaactgtgtacatgtgcttagaatctgacgccatggttagcaatcgccttttgttggtttcttaaggttggaagccacgaacaaagcccactttatctatgtttgattgtgtacctttacttgccccatggtctctgttgttgtgcaaaatgagtctctgccatcataaaacgacatagaatgctaacggcttcctgtctttatgggtaaactttgggtgaatttatgggtaaactttgggtgaactgttggagtcagcctagcgggttatgtgcctactctggatggccgccatgttcgcaagttcctttctatctttactccatttgtgcctggatcagctcgaacagaaccttctcctgacaaaaagccgagccaagtggcacagttgctacgttgaatacacgagc

SEQ ID NO: 149615 - DNA, 656 bp, Zea Mays
aaacatactgtgttctcgccaagtggagcacggagagcaagctggtcaaatgtgaggcactccccaccagcattgacaatcctggcccttgccgtctcggtgaacctcagggcagtaaccttcattgctggaacctcttggatcctcttgtcatctgtgactgtgccaacaatcacagcaatgttcttctcctgtcaacatagaagatactatttcagcaccatatccatggtgcacaaagagattacattacattttggaataaaagagattacctttccttccatgaacttgacaaggcggcgcatggagattggtgggcgattggttttgctcatgaagagcctcttgagaatgacagcattgaagttgctcttggtcctcctgaccaagaaacggcgtaccttgacaaggagcttgagataaacatcgtcggacttcggcgctgtgcgcttggtcttcttgttcctcccaccggcaacgaggtcgataccctacgacacagcgcaacaccagcgtcaggaaagagcgtagaaagcatctgaaaagggctgcaaggaaagaaacaggtgctcaccatggctgcggatgcggcggtgctagggttcctgctgctgcttacctggtccgcctcctccgaaaggagagtggcggcg

SEQ ID NO: 149616 - DNA, 2476 bp, Zea Mays
cgtatctcccttccgttccccaattcgaaatcgaatcgggtccgacgggtcggtcttgccgtgcgtgcgtggctgcgcgagcgactcgactgcacccccgctcctcccagtccccacacactgcgcgccgccgccgggtcctcctagggtttcgccgcgatgtcgctccggccgagcgagcgggagcagatgcggaagggcaactacaagcagacggtagacgcggaggagagccgccgccgccgcgagggccagatggtggacatccgcaaggccaagcgcgaggaaagcctccagaagaagcgccgcgatgggtttcccgcctccgccgccggtgtgccgccgatgggccactccaccgcgctccagcagaagctcgatggcttgccggcgatggtgcaggccgtccactccaacgacccctccgtgcagcttgaggccaccacacagttcaggaagctgctttctatagagcgtagtcccccaatcgaagaggtgatcagcacaggagtggtgccgcgattcattgagtttcttacacgtgaggaccatccccaactccagtttgaggctgcatgggcactcaccaacattgcatcaggcacatcagagaacactaaggtggtggttgagagtggtgctgtgcccatctttgtcaagctactcaactccctcagcgaggatgttcgtgaacaggctgtatgggctttaggtaatgttgctggtgactccccaaagtgccgtgatctggtacttggtcatggtgggctataccctttgctgcagcagcttaatgagcatgctaagctttcgatgcttaggaatgctacatggactctctccaacttctgtcgggggaagccacaaccaaactttgatcaggtcaaaccagcattgccagcactacagcaccttattcactctcaggatgaggaggtcctaactgatgcctgctgggcgctctcatacttgtctgatgggactaatgataaaatccaagctgttattgaatctggcgtgttccctcgccttgtggaacttctgatgcatccttcggcctctgtactcattccagctcttcgcacggtgggtaacattgtaactggggatgacatgcagactcagtgtgtcattgacaatcaagcacttccatgccttttgaatcttctgactaccaaccacaagaaaagcatcaagaaagaagcatgctggacgatctcaaacatcacagctggtaacaaggagcagattcaggctgtgatcaatgcaaatataattgcacctctggtgcaactcctgcaaactgctgaatttgacatcaagaaagaagcagcctgggcaatttcaaatgccacttctggtggcacacatgatcagatcaagtaccttgttgcccagggttgcattaagccactctgtgatctgcttgtttgcccggatcccagaatcgtaacagtttgcttggagggtctcgagaacatcctgaaggttggcgaggcagagaaaaaccttggtgcaggtgatgtcaatgtctatgcacagatgattgatgatgctgagggcctggacaagattgagaacctgcagagccatgacaacaccgagatatatgagaaggctgtgaagatgctggaatcctactggctggaggaggaagatgatgccatgccctcaggcgacaatccccagaatggcttcaactttgggaaccagccctctgttccatcaggtggattcaactttggctgaagatgcccatttggaatggccgctgtgccattatgccttggctagtgctctgggctagtcagaggtgtggggtagcggcgtcaaccaagtcatggttgagtcccattggtctggtctcagggagttgtcatgtcagtcccagtcagcagggtcagtccttgggctgcattaccagtggtgcagcttggtcggtggtcagtcttgaaggtcagccggttggatcatttgggctcttgctcccaccagcaccacctctggtgggaggcatcaggcatggagtcgcgggtgttgtcgggagttgggttttgcctcctatacagcataaatgaattatattgttttacctgttggtagaaagaaccttgaaagatagggaacgtgtcgttttttgtcaaagcggttcctgtgctgtataacatgttgcatgagtattggcgcaacttataagacaatgtcaaatgggtttttgggagtcccattctggtttcttgagtcttcttcattggtctattgtgtaacatgtacacaggtttgtggttcgtcttgtcttgtctgttgtatttgccaccgttgtctggaagttgttgcatgcttatctagaacagcagtataccagggttaattctgtgacatttatggttcctaacttggtgggatcagattaaaaagttgtatggccatgacgatatcaaagaaataattcggtgcatttttgctccgttttatc

SEQ ID NO: 149617 - DNA, 2145 bp, Zea Mays
cttccgttccccaattcgaaatcgaatcgggtccgacgggtcggtcttgccgtgcgtgcgtggctgcgcgagcgactcgactgcacccccgctcctcccagtccccacacactgcgcgccgccgccgggtcctcctagggtttcgccgcgatgtcgctccggccgagcgagcgggagcagatgcggaagggcaactacaagcagacggtagacgcggaggagagccgccgccgccgcgagggccagatggtggacatccgcaaggccaagcgcgaggaaagcctccagaagaagcgccgcgatgggtttcccgcctccgccgccggtgtgccgccgatgggccactccaccgcgctccagcagaagctcgatggcttgccggcgatggtgcaggccgtccactccaacgacccctccgtgcagcttgaggccaccacacagttcaggaagctgctttctatagagcgtagtcccccaatcgaagaggtgatcagcacaggagtggtgccgcgattcattgagtttcttacacgtgaggaccatccccaactccagtttgaggctgcatgggcactcaccaacattgcatcaggcacatcagagaacactaaggtggtggttgagagtggtgctgtgcccatctttgtcaagctactcaactccctcagcgaggatgttcgtgaacaggctgtatgggctttaggtaatgttgctggtgactccccaaagtgccgtgatctggtacttggtcatggtgggctataccctttgctgcagcagcttaatgagcatgctaagctttcgatgcttaggaatgctacatggactctctccaacttctgtcgggggaagccacaaccaaactttgatcaggtcaaaccagcattgccagcactacagcaccttattcactctcaggatgaggaggtcctaactgatgcctgctgggcgctctcatacttgtctgatgggactaatgataaaatccaagctgttattgaatctggcgtgttccctcgccttgtggaacttctgatgcatccttcggcctctgtactcattccagctcttcgcacggtgggtaacattgtaactggggatgacatgcagactcagtgtgtcattgacaatcaagcacttccatgccttttgaatcttctgactaccaaccacaagaaaagcatcaagaaagaagcatgctggacgatctcaaacatcacagctggtaacaaggagcagattcaggctgtgatcaatgcaaatataattgcacctctggtgcaactcctgcaaactgctgaatttgacatcaagaaagaagcagcctgggcaatttcaaatgccacttctggtggcacacatgatcagatcaagtaccttgttgcccagggttgcattaagccactctgtgatctgcttgtttgcccggatcccagaatcgtaacagtttgcttggagggtctcgagaacatcctgaaggttggcgaggcagagaaaaaccttggtgcaggtgatgtcaatgtctatgcacagatgattgatgatgctgagggcctggacaagattgagaacctgcagagccatgacaacaccgagatatatgagaaggctgtgaagatgctggaatcctactggctggaggaggaagatgatgccatgccctcaggcgacaatccccagaatggcttcaactttgggaaccagccctctgttccatcaggtggattcaactttggctgaaggtacgctctcttcagcggaattgagtaaaaaactgtgtggtgtaaaattttgatttctgatgtgatattgtacatgcagatgcccatttggaatggccgctgtgccattatgccttggctagtgctctgggctagtcagaggtgtggggtagcggcgtcaaccaagtcatggttgagtcccattggtctggtctcagggagttgtcatgtcagtcccagtcagcagggtcagtccttgggctgcattaccagtggtgcagcttggtcggtggtcagtcttgaaggtcagccggttggatcatttgggctcttgctcccaccagcaccacctctggtgggaggcatcaggcatggagtcgcgggtgttgtcgggagttgggttttgcctcctatacagcataaa

SEQ ID NO: 149618 - DNA, 501 bp, Zea Mays
ggcgcccagggcaagccgcgagctctctgctcccatctctgttcccccgtgcgcccaggcgagcagtgcgccgtcgacctcgcgcagcagccgcgatggcagtttgtgtagccacatgggttccctctgcgtcgcgccctcggcgtgctcgtcgaaatgacgcagcgagcagcagccatgagatcccgtcggtgtcgcttgcattgatccgatctgcgcaggcccgacccatgccgtcgcgttggtgtttggggatagcccatccgcgacgtctttcacccccggtgagacaacgacgctccttgtttgattccacatcggcgttattttcatatgattaattgtgtatgtgtgctgtgttatttttgttttgtggaggagaggcaccccgtgttttgagtggagaagaaggcaagccgctcgacgctcgtcgatgttcgtagcgatgcacaaattggaatcgccatcgtcctcacaaacactgattgggtttgtttatgg

SEQ ID NO: 149619 - DNA, 1379 bp, Zea Mays
ccgcacagtcttcttccctgcgcatccatctcttctgctctccctgctcgctcctccagtgccttgccccagcccctggttcggctttgctcctccctgtgctcgccggcttctcctgccgcgccgagctcggccgctgcttctccctagaagcttctccgcgcgcgcgagctgccggcgctccgtccctaacacgcactccttctccttttccccagccgaggcccctgcgcgaccgagctcctcccctgtgctcgtcctttcccctgccggtgtccagccccagcccagatctccctccttcaagcccccatggcacgccctcgttccttctctctactcgcgtcgtcgcctcgcctgttcgtccctacgcgctcctctcccctagatccctccctgcacgccggacgtcgcccgttccctggtggccgagcatagcccttgcgctcgcgccttctctgttcaatttctagaacacctaggtctgtccatggtcgctcccttcgtcgttggtgcgcggcgaccttcgttgctccttctctggagttgtccttccgttgtgcgtgacctcgccctggccgtgcagtagcaacaactatggcaacccctgctccatgatatgttgcagcgagcacgggttcttggtgtcgtgcgtgcgtgttcttccgcaagtcgcgcgccgggatcctggccgcgcgtccttcctgctcgtcgcgcccatggccgagcctggtcgtggtggtgttgtggtgtggcgatgtcgtgcgcgtcacgacagctgtcttggtcgcgaagcagtccgagccatagagttcgcccggccacggtctcgtcaaattgcgaagcttcctcgccgtgcgctctggcatcggctgccaccgattccgccataaagttcacgagcgctccttgctcggcttgtttcaccgtgggcaatttctacacgcttcaaatccgtgctgcttgcccagtgtgctctcgcacttcgtccatcgggtttcgtgcgtgctcgcgtttgccgtcgagtcatcgaacccatcatcccctgctcgacccccacctcaccagctcgctctggacttcaactgaaggccgtcatctttcaggcaactaccaaatcgagttgtgatgtggtgagtatagcgttatgttgtgtgatgttatggggtcgatgatagaagtggaattctagctgttgggcgatgacgggaaggttgtttattaaaatgcttcatcgtatatagtgtattggtttatatatatgtatatatatacatatgagatgtgtaggtaatgagtaggataggtttagtgttctaattaattaactgataagttgtgtttaggctaattatattaaatatgtatcgtttgttgtt

SEQ ID NO: 149620 - DNA, 686 bp, Zea Mays
aatacacgctggtgatctcactatagaactgtaatgcatgtcatggccttgtatccttcaatcaataaagttctctccaagattgggaaggaacataaaggaggtgagtcaataggagctcaaactatgctagaagtatttaagtcatttgagtttgttttcatgttgcatttgatgaaggaaatatttggatacacaaatggttgatgcagtgctttgcaaaggagggagcaagatgttgtaaatgcaaatggatcttcttgaattcacaaaggtagaattggttgttgagagaagattatggatggcaagaatttcttaataatgtctcttcattttgtgagaaacacaaagttaaaattgttgacatggatgcaaagtataagcctattcagagagacaagaagttctatagaaatgctatcaattaccatcggtttcatgccgatagatttgatgaggtaaacacaaagttacttagatgtatggcatcattcaatccatctaagaactttgatgcattaaatgctgagaaattggttaagcttgctaggttttatcctcaagattttgagtttgaggagaaggtacaactcccttttcaattaaatcgctatatagaagatgtgagaagagatgaaaacttcaaaaacttgagaagcctagcagaattatatatccttgtc

SEQ ID NO: 149621 - DNA, 336 bp, Zea Mays
atgggcggacccacagggtggtccgggtgggccctggcacaccctaagccaggtccaccgggaccccacccggtcattcggttcggcggacgtccgactgctgttccaacttccatctccgaatctccgatcgttcggcttcccacagccccaaaacgatcgatcctcctgcgcaagacggatgttcctagcggctggcttcctgcgcggccacaaccacaagacaatcccttctcctgcgcggctattcctggcgactggcttcctgcgcggctgaccggctgttccgggcttccagctctcgtctcgtctcgcgaaatccggtcagacacctga

SEQ ID NO: 149622 - DNA, 2010 bp, Zea Mays
aaaaacaaaaacaaaaagaagagccacacattttggaaacttttttgtggggcccgcccgcagcaccaaaaccataccaacccccgcaatggcaaaccaaacaaattcgtgtactcaaattggacccgtctcggcgctctctcccaaaaaaacgctataaaatccccggcattcctccttgcctgttccatcgcctccacgaacaaaccacacaccccacctaccccggccggaccggcaggcagcacagcatggacctcgccctcctagagaaggccctgctgggcctgttcgccgcggctgtggtggccatcgccgtggccaagctgaccggcaagcggtaccgcctcccaccggggcccccgggcgcccccgtggtgggaaactggctgcaggtgggcgacgacctgaaccaccgcaacctgatggccatggcgaagcggttcggcgacatcttcctgctgcgcatgggcgtgcgcaacctggtggtggtgtcgaccccggagctggccaaggaggtgctccacacgcagggcgtggagttcggctcccgcacccgcaacgtggtgttcgacatcttcacgggcaaggggcaggacatggtgttcacggtgtacggcgaccactggcgcaagatgcggcgcatcatgaccgtccccttcttcaccaacaaggtggtggcccagaaccgcgccgggtgggaggaggaggcccggctggtggtggaggacgtgaggaaggaccccgaggccgcggccggcggcgtcgtgctccgccgccgcctccagctgatgatgtacaacgacatgttccgcatcatgttcgaccgccggttcgacagcgagcacgacccgctcttcaacaagctcaaggcgctcaacgcggagcgcagccgcctgtcgcagagcttcgagtacaactacggcgacttcatccccgtgctccgccccttcctccgcggctacctcaaccgctgccacgacctcaagacgcgccgcatgaaggtcttcgaggacaacttcgtacaggagcgcaagaaggtgatggctcagactggtgagatccggtgcgccatggatcacatcctcgaggccgagaggaagggcgagatcaaccacgacaacgtcctctacatcgtcgagaacatcaacgtcgcagcgatcgagacgacgctgtggtcgatcgagtggggcatcgccgagctggtgaaccacccggccatccagcacaagctccgggaggagctcgcctcggtgctgggcgccggcgtgcctgtgacggagccggacctcgagcgcctcccctaccttcaggccatcgtcaaggagacgctccgcctgcgcatggccatcccgctgctggtcccccacatgaacctcaacgacggcaagctcgccggcttcgacatccccgccgagtccaagatcctcgtcaatgcctggttcctcgccaacgaccccaagaggtgggtgcgccccgacgagttccggcccgagcgcttcctggaggaggagaagtccgtggaggcccacggcaacgacttccgattcgtgccctttggggtcggccgccggagctgccctgggatcatcctcgcgctgcctatcatcggcatcaccctgggccggctggtgcagaacttccagctgctgccgccgccggggctggacaagatcgacaccacggagaagcccggccagttcagcaaccagatcgccaagcatgccaccatcgtctgcaagcccctcgaggcctagaaatcaatgcgtgtttcctgcacgcgcccccgcagatgaagcactatgtattttctcttttttttgtgtgttgtgttttttttactaagaggagatgtatttcttgttcgtaaaatgcacttagtcaaatggatcgagattatgttgatcattaaacaccaaaatcacttagtcaaacgggtcgggatccattttcctcacaatgtcaacctttgactgatgacaatataatcaaagcaagcaaatattaaat

SEQ ID NO: 149623 - DNA, 436 bp, Zea Mays
aggataatagggaaagccgtcgcacctggaaatcctttgcattagctttcagcctcggggaattggtcctggtgattcatcaggtcacgctcaagcaattgaccccttgctgtgcatgtctggtggacgaagataccgtgattcgtcgttggagtgccgtcaccaccgcagagccgcgtctcatcgtgggtagagaacatcacgcctcggttcctggttgggatttccggtgatggcgccgccgtgggctgagaacaccgccgcctgtgcacagcatcggtaaggaggaggagatgtggggatcgtcaatctcgagttcgacggtcatgattagtgcactgttacctgtttggctcgataaatcctgagcgtgggcccatatgggcggatgagagggtgtaataaaatggggccatgatctacgaatctctgatcg

SEQ ID NO: 149624 - DNA, 1843 bp, Zea Mays
aaaaaacgtgcttcagctgggctttcggggttacatcaatatttctcttcctccacttcccatcctgttcgtgactcgtgatttcgccgccggaaagccgagggagagggagcgagatggggttcgtcggcgacacgatggagtcaatccgctccatgcagatccgccaattgctcacgcagatcatcagcctcggtgacgctctctgccgcaccctcctcttctttcccccctgcttgttttttttttctcctcgagatctttgtagtgcgtttggagccctataattcttgggtttgtggtgaggcctttgccatgcgagtctactacgattttaattagcgggacaagtcttttttccatttccagtggtttttgccgtaagatcggtggagactgctcctgattcttcatctggttctatgatctgaactctttagctaccccccttaagaatcataaaaatgcgtagatgagaacagtagtcgaattgggtgtgacagctttagagaactggattttgtttttttttcttcttctcctcttttattatctggagcgtttataatgatgcttatgcactgaagaagtgattaagtttcttgtgggttactctagactccagttgtcgctaatagcaattcaggtttgtacactgggactttcctgcggtttgatatttgactgttaatttgcaacatgagtctcatgaggagggttttaactttcgaatttttctctttgcaggtatgattgttacctctgcattaatcatatggaaggggttgatagttttcacagggagcgagtcaccagttgtagtggttctctctggtagcatggaacctggatttaaaaggggtgatatcctgtttttgcatatgagcaaagatcctattcgcacaggagaaatagttgttttcaatatcgatggccgtgaaattccaattgtccaccgtgtaattaaggtccatgaacgtcaggacactgcagaagtggacatcctcaccaaaggtgacaataattttggggatgaccgactattatatgcacatgggcagctttggctccagcaacatcacattatgggacgtgctgtgggctaccttccatatgttggctggattacaattatcatgactgagaaaccatttattaagtacctgctgattggtgcactgggcttgctggtcataacgtcgaaagattagagtgtcaaacttcgcgcagtatagattttgctcttatggtgcaacatcagaggttagtggctttgctgcgttaagagaagccgttctgttgcaccatggatcaaacgagaatatttgtttatagactgtgagagcacctgcccactaattagatagtcggttctcatccagcatccatcttttggtatttttagcctagctaatgagttgaaccagttcgttgttctatttgatgatcactattcattgcagctttccaggaaaccccctaggctagctatttgcaatgaaaaaatctgcgcaccaggacaaatttgggatagacgattgttgcttttgtttcatcttattacaaacgggcacacgtcaagccggcaacaggttccggtaatgtgctatgaacaagcaattaaaacggagattgatagggtgtgtttggttaggtttttggctttggtttcggcttggacttctctcccctaaaatccaaaagtcaaacaaaggactggatttagggagctgttttctctgaaagtcatttttctcacaatgtaaaacagaaagcatctatagacctaattttagcagcttttggatggaactatgaaaatatatatggaagaatttttaat

SEQ ID NO: 149625 - DNA, 1291 bp, Zea Mays
aaaaaacgtgcttcagctgggctttcggggttacatcaatatttctcttcctccacttcccatcctgttcgtgactcgtgatttcgccgccggaaagccgagggagagggagcgagatggggttcgtcggcgacacgatggagtcaatccgctccatgcagatccgccaattgctcacgcagatcatcagcctcggtatgattgttacctctgcattaatcatatggaaggggttgatagttttcacagggagcgagtcaccagttgtagtggttctctctggtagcatggaacctggatttaaaaggggtgatatcctgtttttgcatatgagcaaagatcctattcgcacaggagaaatagttgttttcaatatcgatggccgtgaaattccaattgtccaccgtgtaattaaggtccatgaacgtcaggacactgcagaagtggacatcctcaccaaaggtgacaataattttggggatgaccgactattatatgcacatgggcagctttggctccagcaacatcacattatgggacgtgctgtgggctaccttccatatgttggctggattacaattatcatgactgagaaaccatttattaagtacctgctgattggtgcactgggcttgctggtcataacgtcgaaagattagagtgtcaaacttcgcgcagtatagattttgctcttatggtgcaacatcagaggttagtggctttgctgcgttaagagaagccgttctgttgcaccatggatcaaacgagaatatttgtttatagactgtgagagcacctgcccactaattagatagtcggttctcatccagcatccatcttttggtatttttagcctagctaatgagttgaaccagttcgttgttctatttgatgatcactattcattgcagctttccaggaaaccccctaggctagctatttgcaatgaaaaaatctgcgcaccaggacaaatttgggatagacgattgttgcttttgtttcatcttattacaaacgggcacacgtcaagccggcaacaggttccggtaatgtgctatgaacaagcaattaaaacggagattgatagggtgtgtttggttaggtttttggctttggtttcggcttggacttctctcccctaaaatccaaaagtcaaacaaaggactggatttagggagctgttttctctgaaagtcatttttctcacaatgtaaaacagaaagcatctatagacctaattttagcagcttttggatggaactatgaaaatatatatggaagaatttttaat

SEQ ID NO: 149626 - DNA, 889 bp, Zea Mays
aaaaaacgtgcttcagctgggctttcggggttacatcaatatttctcttcctccacttcccatcctgttcgtgactcgtgatttcgccgccggaaagccgagggagagggagcgagatggggttcgtcggcgacacgatggagtcaatccgctccatgcagatccgccaattgctcacgcagatcatcagcctcggtatgattgttacctctgcattaatcatatggaaggggttgatagttttcacagggagcgagtcaccagttgtagtggttctctctggtagcatggaacctggatttaaaaggatcctattcgcacaggagaaatagttgttttcaatatcgatggccgtgaaattccaattgtccaccgtgtaattaaggtccatgaacgtcaggacactgcagaagtggacatcctcaccaaaggtgacaataattttggggatgaccgactattatatgcacatgggcagctttggctccagcaacatcacattatgggacgtgctgtgggctaccttccatatgttggctggattacaattatcatgactgagaaaccatttattaagtacctgctgattggtgcactgggcttgctggtcataacgtcgaaagattagagtgtcaaacttcgcgcagtatagattttgctcttatggtgcaacatcagagctttccaggaaaccccctaggctagctatttgcaatgaaaaaatctgcgcaccaggacaaatttgggatagacgattgttgcttttgtttcatcttattacaaacgggcacacgtcaagccggcaacaggttccggtaatgtgctatgaacaagcaattaaaacggagattgatagggtgtgtttggttaggtttttggctttggtttc

SEQ ID NO: 149627 - DNA, 917 bp, Zea Mays
tagctcccttcctcaaccgaaccctagccgccgcaacccaaccctagccgccgcacccatggatcgaactgctcctgtcgtcgctgtggcagatgctgttgatgctgctcgtgctgcagctgttgcagctgcggaggctagatgtgcggcgcgttggtggctgagaaggaggcacgagcggtggtgcaatctgccagtaatgccgccgacaaggttaaacttgccgtcgaagctgtgaagtatcgaagctttgttgaagataactccaaggaacatgttgatttgaagtatcacgttagcgtcaagaactcactgcgatatgccattcaagagatgaggaggcaatcttcactgttacataacatgaataggatgtgttgtagtatccctgaagttgaagggggtaaggttggaaagcttgctgcccatttgaatgatgtttgcaagaacctcgagaagacttgtattgtctgtgaagaagatctggagaataaatctcctggttgggaccttcatcatcccccttcggatgttgaagaccaccctgacctttctgatgttgaggaccaagtggatggatacgtgtcagaagatccggagctgtgggaaatggtgtttgaagacatgaagtgggaggagaataaagtggttgtttcattgtccgagcattgtcgtattatgggctacgactacgacgagatttttgatcgtactgtttaagttgccaagatgtttcttatgtggttgtatcttttgtggtcatgagatgaatttgtaacgagtttgtgtcatgagatgaactagttagcagttatgaagactttggtgatgtcaagactacgtacttgtaacatctcactatgtgatgtggttgtgtttatgtaagacaactatgtatcgaagactatctatgcaat

SEQ ID NO: 149628 - DNA, 120 bp, Zea Mays
caaatttaaatccgagttatgttttcaaaattctattctaatgcacaatgaaatctccatcatgcaaaattttaagtttattcctatttaattattttattcctttaattaagtgcttcc

SEQ ID NO: 149629 - DNA, 1719 bp, Zea Mays
attgggctggtccggcctacaccgacgcccttatataaatcccgaaccctagaaggcagcaccttcctccccaacacgccgccgtcttctgcggttctgccgtttactcttccactttggcctcctctcttgcaagtttaagcttcgcctccagccatgggtaaggagaagtctcacatcaacattgtggttattggccacgtcgactctggcaagtcgacaaccaccggccacctgatctacaagcttggaggcattgacaagcgtgtgatcgagaggtttgagaaggaggccgctgaaatgaacaagcgatccttcaagtatgcttgggtgcttgacaagctcaaggctgagcgtgagaggggtatcaccattgatattgctctgtggaagtttgagaccaccaagtactattgcaccgttattgatgcccctggacaccgtgactttatcaagaacatgatcactggtacctcccaggctgactgtgctgtccttatcattgactccaccactggtggttttgaggctggtatctccaaggatggccagacacgtgagcatgctctccttgcgttcacacttggagtgaagcagatgatttgctgctgcaacaagatggatgcaaccactcccaaatactccaaggcacgttatgatgagattgtgaaggaagtctcatcttacctcaagaaagttgggtacaaccctgataagattgcatttgttcccatctctggttttgagggtgacaacatgattgagaggtccaccaaccttgactggtacaaaggcccaaccctgcttgaggctcttgatcagatcaccgagcccaagagaccctcagacaagcccctgcgtctccccctccaggatgtgtacaagattggtggtattggaactgtgccagttggtcgtgtggagactggtgtcatcaagcctggtatggttgtcacctttggtccaactggcctgactactgaggtgaagtctgttgagatgcaccatgaggctcttcaggaggcccttcctggtgacaacgttggcttcaacgtgaagaatgtcgcggtgaaggatatcaagcgtggttatgtggcctccaactccaaggatgaccctgccaaggaggctgccagcttcacctcccaggtcatcatcatgaaccaccctggccagatcggtaacggctatgccccagtgctggactgccatacctcccatattgctgtcaagtttgctgagctgattaccaagatcgacaggcgttctggcaaggagcttgagaaagagcccaagttcttgaagaacggtgatgctggtatggtgaagatgattcccaccaagcccatggtggtggagacattctcgcagtatcctcccctgggtaggtttgctgtccgtgacatgagacagacggttgctgttggagtcatcaagagtgtggagaagaaggacccgaccggtgccaaggtgaccaaggctgctgccaagaagaaatgatgcgacctgtcgttgatgcagcgtctgcttttccaatacgtagctgagatgttccattttggcataagttttgtatgctgtggttgctgacttgctgttaccttgtgaactgttgagctctactattgggtgcccgtttatctgtttatgtagcatcttgttatttcacctattgcaatacaagaatgctatatatgacatatagtgagaaaaaaaaca

SEQ ID NO: 149630 - DNA, 1785 bp, Zea Mays
tggctgagtttatgggtcctgggcctccattcggtagtcaattttattgggctggtccggcctacaccgacgcccttatataaatcccgaaccctagaaggcagcaccttcctccccaacacgccgccgtcttctgcggttctgccgtttactcttccactttggcctcctctcttgcaagccatgggtaaggagaagtctcacatcaacattgtggttattggccacgtcgactctggcaagtcgacaaccaccggccacctgatctacaagcttggaggcattgacaagcgtgtgatcgagaggtttgagaaggaggccgctgaaatgaacaagcgatccttcaagtatgcttgggtgcttgacaagctcaaggctgagcgtgagaggggtatcaccattgatattgctctgtggaagtttgagaccaccaagtactattgcaccgttattgatgcccctggacaccgtgactttatcaagaacatgatcactggtacctcccaggctgactgtgctgtccttatcattgactccaccactggtggttttgaggctggtatctccaaggatggccagacacgtgagcatgctctccttgcgttcacacttggagtgaagcagatgatttgctgctgcaacaagatggatgcaaccactcccaaatactccaaggcacgttatgatgagattgtgaaggaagtctcatcttacctcaagaaagttgggtacaaccctgataagattgcatttgttcccatctctggttttgagggtgacaacatgattgagaggtccaccaaccttgactggtacaaaggcccaaccctgcttgaggctcttgatcagatcaccgagcccaagagaccctcagacaagcccctgcgtctccccctccaggatgtgtacaagattggtggtattggaactgtgccagttggtcgtgtggagactggtgtcatcaagcctggtatggttgtcacctttggtccaactggcctgactactgaggtgaagtctgttgagatgcaccatgaggctcttcaggaggcccttcctggtgacaacgttggcttcaacgtgaagaatgtcgcggtgaaggatatcaagcgtggttatgtggcctccaactccaaggatgaccctgccaaggaggctgccagcttcacctcccaggtcatcatcatgaaccaccctggccagatcggtaacggctatgccccagtgctggactgccatacctcccatattgctgtcaagtttgctgagctgattaccaagatcgacaggcgttctggcaaggagcttgagaaagagcccaagttcttgaagaacggtgatgctggtatggtgaagatgattcccaccaagcccatggtggtggagacattctcgcagtatcctcccctgggtaggtttgctgtccgtgacatgagacagacggttgctgttggagtcatcaagagtgtggagaagaaggacccgaccggtgccaaggtgaccaaggctgctgccaagaagaaatgatgcgacctgtcgttgatgcagcgtctgcttttccaatacgtagctgagatgttccattttggcataagttttgtatgctgtggttgctgacttgctgttaccttgtgaactgttgagctctactattgggtgcccgtttatctgtttatgtagcatcttgttatttcacctattgcaatacaagaatgctatatatgacatatgttagacatttgggcaatgttaaatggatttttaccaagtcgtctagttagattt

SEQ ID NO: 149631 - DNA, 1650 bp, Zea Mays
ttcttgagctgcttcatgcgatagcgactggaccaaatttaagcttcgcctccagccatgggtaaggagaagtctcacatcaacattgtggttattggccacgtcgactctggcaagtcgacaaccaccggccacctgatctacaagcttggaggcattgacaagcgtgtgatcgagaggtttgagaaggaggccgctgaaatgaacaagcgatccttcaagtatgcttgggtgcttgacaagctcaaggctgagcgtgagaggggtatcaccattgatattgctctgtggaagtttgagaccaccaagtactattgcaccgttattgatgcccctggacaccgtgactttatcaagaacatgatcactggtacctcccaggctgactgtgctgtccttatcattgactccaccactggtggttttgaggctggtatctccaaggatggccagacacgtgagcatgctctccttgcgttcacacttggagtgaagcagatgatttgctgctgcaacaagatggatgcaaccactcccaaatactccaaggcacgttatgatgagattgtgaaggaagtctcatcttacctcaagaaagttgggtacaaccctgataagattgcatttgttcccatctctggttttgagggtgacaacatgattgagaggtccaccaaccttgactggtacaaaggcccaaccctgcttgaggctcttgatcagatcaccgagcccaagagaccctcagacaagcccctgcgtctccccctccaggatgtgtacaagattggtggtattggaactgtgccagttggtcgtgtggagactggtgtcatcaagcctggtatggttgtcacctttggtccaactggcctgactactgaggtgaagtctgttgagatgcaccatgaggctcttcaggaggcccttcctggtgacaacgttggcttcaacgtgaagaatgtcgcggtgaaggatatcaagcgtggttatgtggcctccaactccaaggatgaccctgccaaggaggctgccagcttcacctcccaggtcatcatcatgaaccaccctggccagatcggtaacggctatgccccagtgctggactgccatacctcccatattgctgtcaagtttgctgagctgattaccaagatcgacaggcgttctggcaaggagcttgagaaagagcccaagttcttgaagaacggtgatgctggtatggtgaagatgattcccaccaagcccatggtggtggagacattctcgcagtatcctcccctgggtaggtttgctgtccgtgacatgagacagacggttgctgttggagtcatcaagagtgtggagaagaaggacccgaccggtgccaaggtgaccaaggctgctgccaagaagaaatgatgcgacctgtcgttgatgcagcgtctgcttttccaatacgtagctgagatgttccattttggcataagttttgtatgctgtggttgctgacttgctgttaccttgtgaactgttgagctctactattgggtgcccgtttatctgtttatgtagcatcttgttatttcacctattgcaatacaagaatgctatatatgacatatgttagacatttgggcaatgttaaatggatttttaccaagtcgtcta

SEQ ID NO: 149632 - DNA, 417 bp, Zea Mays
atgctcacgggtctggccatccttggagataccagcctcaaaaccaccagtggtggagtcaatgataaggacagcacagtcagcctgggaggtaccagtgatcatgttcttgatgaagtcacggtgtccaggggcatcaatgacggtgcagtaatacttggtggtctcaaacttccacagagcaatatcaatggtgatacccctctcacgctcagccttgagcttgtcgagcacccaagcatacttgaaggaccgcttgttcatctcagcagcctccttctcaaacctctctattacacgcttgtcaatgcctccaagcttgtagatcaggtggccggtggtggtcgacttgccagagtcgacgtggccaatgaccacaatgttgatgtgggacttctccttacccatggttgaagg

SEQ ID NO: 149633 - DNA, 196 bp, Zea Mays
ccgctgccaccaccagccctggcatgcacctccccatcgcccctgctgcgatcagcagcagcctcgcccatggaggggccccctacatccccggcctcgggccgccccatgctgctcccccgccacacatgagccttacctcacatgccgctctcgtgactgtacgtgttctcctccacgacggccacctcatccg

SEQ ID NO: 149634 - DNA, 329 bp, Zea Mays
cgataaaatattagtgcataatgattatataaaaatgaggcataatatctcataaattctttaccgacaaccagtttagtgttactctctaaatttacatcaactattacgtcacacggcacggtcgaagacctagatattagtggagtagcccgctaacatcattctcaaatgcaacaggctgatcatgtggcatcattaatcaccaccttgtacttctcgtccatccttttatcgcagcctacatggatggtgatcccaaactccttagtgccaaatgacaatgccccgcggtgaagagtgagtcatagccgtcgtacgcggagatc

SEQ ID NO: 149635 - DNA, 288 bp, Zea Mays
atgatgcaaccggtgcttctagttcacttcaaggttgcaacttcccaagaagagcccgatatgagtctgtttatttcaaggcgttgtcaagctgctgctacacaggaggagagagttatggaagaggaagagcaaggcaacgagggcaatgaacaagatgatgaagagtacatgcctagtgatgatgaagaggatgactttggtgaatccccacatagcagtccaactcaagctggtgttggtggtgaagaaaatacaatggatgatcttgatttgggagatatttag

SEQ ID NO: 149636 - DNA, 102 bp, Zea Mays
tttttctttatttttatattttatttttctctatttattgtaacatagttcaaaatggggttgggtcggtcattgatgtatatatggtaggctagattggag

SEQ ID NO: 149637 - DNA, 414 bp, Zea Mays
atgatggtccttgcctcagttgccgtcacctcattcgcaatcctgcttcttttttctctcccctcatgcctcggcctccgcgccaccccatactcgacagagggcgtgggagctggcgcctcctccccgtattcgtccgacaccagtcccgacaccgaccctcgcagtggctattgcacgtccacgaggacgtttcatagcatacatgcaccatcattttcgccgtcgtcggacgtcctgttcgtcttcctggccttcgccctgttcttcctccccaacctgctgcccccgcccatggtcgcagccgcaaggcaaccgacgctcgtcgacgcgggtacgggtgagtcggtcttgctcctagcttttctcagtgcgtgccgtcgaggaggacatggtggcacctaccacacttag

SEQ ID NO: 149638 - DNA, 1677 bp, Zea Mays
gttacaaataccccagccacttgacgacacgggatgcaaacctatttatattctgtccttaattcccgtgtttctcgtccgtctccgctcctccgcaaccccttcccctcctccgccgaagcctctcctccggccgccgaaaccctagcctccgccgctgccgtcatggcaagcagcaacgtctcgaccgtttacatctctgtcattgatgacgtcatctccaaggtccgcgaggatttcatcacctacggagtcggtgacgccgtcctaaacgagctccaggctctctgggagatgaaaatgctacactgtggcgcgatctcggggaacatagaccgaaccaaggctgctgccgcgtccgtcggaggcaccaccggcacgacaccgcccgtgcacgacctgaacgtgccgtacgaggccacatctgaggagtacgccaccccgaccgctgacatgttgttcccgccgacaccattgcagaccccaatccagactcctctgccagggacagacacagcgatgtacaacatacccactggcccttccgattatgccccctcaccgatcagcgatgtcaggaatgggatggcaataaatggggcagacccaacagctggtcatccaagtccctacatgccaccaccttccccttggatgaatcagaggccgctgggtgttgatgtgaatgtcgcttatgtggaaggccgtgaagatcctgacaggggcgtgcagcctcagccactgactcaggattttttgatgatgtcttctgggaaacgcaagagggatgagtatcctggtcagctcccttctggttcttttgtaccacaacaagatggaagtgctgatcagatagtagaatttgttgtgtcaaaggaaaatgcgaatcaactttggagttccatcggcaataagcttgaaacaccaaccaagacaatcactccagttattccgcagcgtgatgggattcaagataactacaatgatcaatttttctttccaggagttccaaccgaagattataatacccctggagaatctgcggagtatcgagctcctacacctgctgttggaacaccaaaacaaagaaatgatgctggagatgatgataatgatgatgatgatgatgaacctcctcttaatgaagacgacgacgaggagttagatgaccttgagcaaggggaggatgaacctaacacacaacatcttgtacttgcacaatttgataaagtgtcaaggaccaagaatcgttggaagtgcaccttgaaggatggaatcatgcatttgaatggcagggatgtcctttttaacaaggcgacaggtgagtttgatttttgattttttggatgaagatgagctattttagaagcagctgtatggacatatctttgtcttgacataaggacagggaggtgacagtgttcttggtggggtcctggcagcatgactgcgtcgtgttttctttcctattgaatcttcgttccaccctcttgtttgtcaccgcaactgttatcgctgtaaagaagttactgcttgtgctgtgtagacaatttctgatatgggtctctcaaatccgctgcgtaactatactaaattatatgtttgtccgtgcgttacgacggctcacaacaatacccacgtaaactatccactaaaaaaatcttaagattttttatt

SEQ ID NO: 149639 - DNA, 231 bp, Zea Mays
cttcctcaatggataaaagcacgactctcttgtgctcaaaactatggagaagttcatagatcgttgcatcagttcttcaagttcaataaaaaaatgttgaaatactctagaaaccatcgtagcattgtgtttgtgtatccttatgctgcttacttatgagttatgagtaaggcttcagcctgcgaatgcgatcaaagttatgtacagaattatggtgacagtaacgcttcc

SEQ ID NO: 149640 - DNA, 270 bp, Zea Mays
atggctgaggggaggggcgagctcagcgacggcgtggagaaagggctagagcagaggatgggcgagctcgactggggcgctcggggaagcggtgccaaggccgacgctaggaagggcgatgcagcggcgctggccaccggcgaggacgcggccgggtggaggtccgaacaggggatggatgccgtggcaagagctggaggcgagggcttggggatccgagttgagaggatggtgtgctctgctgctgggcggagggcggctggaagatga

SEQ ID NO: 149641 - DNA, 759 bp, Zea Mays
cgcagaagcatcaccctgtcttcttcctcgacgccccctgctcctctctctaccgagcccccattctccacggcgtttggcagcagggagcccttctcccccagcaggagcagagcctccatggcgtccgacccctctcctttctcctccccgctcggagctctgccatagcgcacgcaaatcccttccccctccattcctaggcgcaggaacttctcccccacgccgtccaactccaggccggatccaattcgccctatccctgctcgcccagaatttcttgccccaagtccggcaatcccctcgccgtggatttcctcgagcttgcctccccatggccgccaaccatcctgcccctgcccctggtgcgctgggcgcgtagtgctctgacctcgatggccgacggactctaggcacccggagctctatccggtctagcttcgagcaccctctgctccattccttcaccagcgcaccctattccattgagcacatgccgcagggaaggccgtttccccatggtgctgctctccggcgatgcccccaggtccggcgacccctctcctccatggtcgagctcccatggttcagacgccccttccccatcggatccatggcgcaggggagcaacagctcttcctcccctagcctccatttccctgctcggttttgtctttaacctctaggccacgaccttctcccatggcgcgggccctcctctagtccagtgcgcgcaaggagatcctccaatgccgcacc

SEQ ID NO: 149642 - DNA, 1218 bp, Zea Mays
ttctgctgctagctgcctcgctagccgcctagcccaaccgcaatgcgcgccatcgcctccccacttgcgcctcctcgcccagagccacccattgccgtccgatcaagatccaacgccctcaaacgcgccactttaccaccagtccccctcaccgccgcccgtctccgcctccgccgacaaccggagccagggccctcgccacccacccgattgagccaccccatgcctcctcccactgcgacgatgtcccccgcagctggcggttcctttcctgagctcacctgtcccgcggactttgccaccgtcgccgcccccggcggccgcttctccgtcgtcggcttcggatccctcctttccgagcggagcgcgaggagcacgttcccggagctggagggcttccgtgtcgcggtgctgcgggggttccgccgagtcttcgcccacgctgcccccatcttcttcgagcgcggcatcgccatcgaggccaccaaggaattctcaagcttgagcgtagagccatgcgacagtgaactgatagtagtcacggttttcgaaatcaaggaggaagaggtcccggcgtttattgagagggaacatgagtttagatttcttgcggttgtccctgaaggattggatggggtaccttttacaaatcgagcagttgtctgtgcacgctacagcaatgaagaatatttccaagagagatgccgaggaagcaaggaaatatataacaagtactatggacggtacaatattgacaaaatatggagagatgatatcttaccatgtcgcttatacctcagacattggtgagttttgatgttcaaagatatataacgttaaacaatatgtggggttgcttctttcatctattggataaatttgtaattaacattaagagagggtctaacttgtgatcaaattggaataagcctactataactacccttgcacatccttagtgcatactaatatgtactcacgtgtaaagttggaatccaaattcgtatattaaaatgacaaattttatgtttatgtgcactaaaatacaaaattcctagtgtttcatcgtttaattcatatgagcctcatattttccattttggtatgtttttttttctaatttgagtttgcatattctttttgaactactcaggagagctgcgtgtcatttcattaacgcctcgtttggatcattggaattgaattccattctaataa

SEQ ID NO: 149643 - DNA, 2808 bp, Zea Mays
cttggtcgtaggctaacacgggtgggggagggaaacgagacgaaggggagggagggcgactcgcactttaggacggcaatggacaacgcgacagcggaggccttgaagcccatgaaggcaacgtcggacggcgtgttccagggagagaacccgctacactcggcactcccgctcgccatcctgcaaatttgcattgtcgtcgtgctcacccgcgtgctcgccttcatcctccgcccgctgcggcaaccgcgcgtcatcgcggagatcatcggcgggattcttcttggtccgtcggcggtgggccgcagcaccgccttcctgaacaccgtgttcccgaagcagagcctaaccgttcttgataccatcgccaacattggcctcctctacttcctcttcctggtgggcctcgagctggacctccgcgccatacgacacactgggagcacggccctcgtcatcgcggtcgccggcatttcccttcctttcatcatgggcatcggcacctcctttgtcctccagcacaccgtcgcccgcggcgtgcccacggctccgttcctcgtcttcatgggtgtcgcgctctccatcacggcgttcccggtgctggcacgcattctcgccgagctcaagctgctcaccaccgacctcgggcgcatggccatgtcagctgccgccgtgaacgacgtcgttgcgtggatacttctggccctggccatcgctttgtcaggcaccggttcccctcttgtctcgttatgggtgctgctagcgggaactggctttgtcctcgcggcgttcttgttgctccgcccgggcctcacctggatggcacggcgatcccctgaaggcgagccagtgaaggagctctacatatgcgcgactctggccatcgtgcttgccgccggattcgccaccgatgccattggcatccacgcgctctttggagcgttcattgtcggcatcatcgtccctaaggacgggccgttcgccggggttctcctggagaaggtggaggacctcatatctggcctgttcctgccgctctacttcgtgtccagcggcctcaagacgaacgtaatgaccataaagggcggtgactcgtgggccctcctagtcctcgtcgttgccaccgcgtgcataggcaagatcggcggcacggtgatcgcgtcgctcatcgtccgggtgccgttccgcgaggccctcacgctcgggttcctgatgaataccaaggggctcgtggagctcatcgtcctcaacatcggcaaggaccggcatgtccttaacgacgagactttcgccatcctcgtgctcatggcgctcatcacaaccttcatcacgacgccggtggtcatgacaatctacaagccagcgcggcggggggcgccgtacaagaaccgcaccgtccagcgcgcgaacccgcacgacgagttccgcatgatggcctgcttccacagcacgcgaaacatccccaccatcatcaacctgatggagtcctcgcgcggcacgcggaagcgtggcatcaccgtctacgccatgcacctcgtggagctctccgagagatcgtccgccatctgcatggtccacaaagctcgtcgcaacggcatgccgttctggaacaggcggcgcaacggcgacggcggcggcgaccagctcgttgtcgccttcgagacgtaccagcagctgagccgcgtgtctatccgggccatgacggccatctccgacctggaaacgatccacgaggacgtcgtcaccagcgcgcaccagaagcgagccgcgctcatcgtgctccccttccacaagctccaccagatcgacggccacatggagtcgcttggcgaccagtaccagcacatcaaccagcgcgtgctccaccacgctccctgctccgtaggcatcctcgtcgaccgcggcctcggcggtgtcgctcaggtggccgccagcgacgtgtcatacaccatcgttgtcatcttcttcggtggccgcgacgaccgcgaggccctggcctacggcatgcgcatggtcgagcacccaggcatcgggctgcacgtcctacgcttcttgctacagtccggcggcgccgccagcgacgacgacgcgtcgttccttgaagagttccgaaccaaggtggccaacgggaacgactctgtccgctatgaagacaggacagtgggagggaaagaggaagtcgttgaggcgatcaaggcaacagggcggtgcaacctgttcctcgtcggacagggcacgccctgcatgccgctggttgactggagcacggacagcccggagctcgggccggtgggtacttacctggcgctgccggaattctcgacggtggcatctgtgctggtcatgaaacagtacgatccgatggcgaagcacgacgacttcgtcgaggaggtggccgacatagcggtggacgttgacacgccgggccccagtaaccggggaaccaatactagcttccatgccggatgatacgtgctggtgttagatgtattattaacatgtcgagcagacaagactgattaacattatgtaatgtaatctcaaagtggtgtaaatggatggatcaaggtataggatcccctggagtgtccaaccggcaatccaaaccaattccttttttcgaattatcatgatgtaattcccaaatgtataaaattcagtttttagtttttccttaactccaatcaaacatatccggacgttttttagactagtttgggagcctcaaaaccggagagaattgaagaggctagaattcccttcttattcaaaattgagttagtagaggattccaacccctcaaatcat

SEQ ID NO: 149644 - DNA, 1220 bp, Zea Mays
gggagcagttgcagctgcaacggtcactttgctggctgctgggccggtcggttcctttgcccaccagctcagctcactcaattcaacactcttcgagcttgcttgcccatctccccaaacatccgccgcgcttcaatacttacaacgactcaacgagatcgcagcttccatggccttcttttccgaatcccagactcctttcacaaaacagaaacaaaaataaaataaatcccagactcccagagacagacagacacaagagttggtggcgtggttccttgtttctacctccctgggctccgtttctttccctgcgaagctggctggctcggcacggcactgcacagagcataccggcggtaactgagaggccctgcggcgatggggaagaagcgagcggcggccgtgagtgctccgttccccgcgcccgcctccgagcccgagtcggaccacttcagcgactacggcttcgacccgcagctcctccacttcccctcccagcctgaggcgaagcgaccgtggggcaggcgccagcgccaccagcagcctgcgcagttgaagcccctggactccgcgcggttcaagctacagaagcccatcgccaagaagcaccaccgccagcagaaacagcagcagcgccgccggtggtggagctccgccgcctctgccgcgctccatctcttcaggaagcgcccctcatcaaccagacccgccgcaggagctccacctccccagtacgggtcgcccgcgtcgccaaccgtgcctatgtacctcaccgactgcgatgctggcggggacgacggcggcggcgcgtccgcgtgcacgtgctgggcaccggccgtgcggtccggccgcctggccgccgccgagcttggcgccgcggcagtggcggttccctacgtcagcctcaggtccactagccttggcactggaggcgctccggtgatgcccatctacctcgtcacctgaagctagctacctcaggccgacgcgggtttcttcttcagaagcttggaccacaagacgtcagtaaattaaaccctgtccaagcgcctggactagtcggtcaaatatcaactgcttgcttctataattgttcctggttttcttctcccgtctgtggggtattttccagatgtagttgcagcagctgcgtttttctttcaaattcgttgctccaagaaggttgccggctcctatatggaagttctgacttcttc

SEQ ID NO: 149645 - DNA, 180 bp, Zea Mays
tttttttaattttagctaggcgtcggctgtacgggggaatgggaatgggaatgagctttgcggggagggggaatgggaatgatagatatagaatggtggcagaacatgggaatggactgtgcgcggggaggagggaatcggaaagacagaacacggaatgggcagaacgcggaatggctg

SEQ ID NO: 149646 - DNA, 1865 bp, Zea Mays
aaaccttgcgtgcgccaccgccaatggcagcaggaatcctctgatcctctttcccgcacatccaaagaggcgccgccgtcctctgaaaaatcctagccgctttctacatggccgagcccgccaaccggcggatggaggccgtccgccgtcacctccttctgccttcacccgcgccgcttcgccctaatccgttaagcagcctcgcggaggtggagcccagcccggtgatcattggcgggatggtgctggatatccatgccaagccttccgtgccgccccatcatggtaccactgtccctggaatggttaaatacatcagtggaggcgtagcaagaaatattgctgagtgcatgtcaaagcttgggacacaacccttcatgataagtgttgttggaaatgatttggcaggggacttccttttgaagtactggaggtcagctggattatgttcagaaggaattctgcaggttgataatgttgcaaccccagtagtatcaaatgtgtttgacggtactggagaattaatcgctggagttgcaagtgttcaagcagttgaaaattttattacttcgagctggatttatcacttccgtcatcatattgctaatgcaccacttgtaatgcttgatgcgaatttatctcctgagtcacttaaagcagcttgcataatggcatatgaatttggggtgcctgtgttatttgagccagtctcagtggtgaagtgtcgaagaattgcaccagttgcagaatatgtgagtgtgaaagattaaaaactacagtatggttttatttgaagttttaacacttcatataaattttctgtgatgattcagataacttgcacttcccccaatgaaattgagcttgttgccatggcaaattcattatctccatcagtgaaatataattttcacacaatagagcagttcaaggagaaagcagatactgttgaatatatttttcaaatgcttagcccagcaatgttcttcctacttgagaagggcatcaagttgcttatcgtgacacttggctcaaatggtgtttttatttgttgcaaagagcacactaacttcatgaaagaccagcacaagtgcaaacagacgcctttctccagacagctacttgaaaaaatggacgggtgttttccatcgaacaatcttgttaatttgtgcagagaaagctcttcaagaacatgtgtttttcatttacctgcaatatcggcctctgtgataagcctcacaggtgctggcgattgtttggttggtggtgccctttcagctctatgtgcaggcttcgatatcatccagagcgttgcagttggggttgctatagcaaaggcatctgtggaatctgaagccaacatacctgatgacatttctgctgcgagtattgcagatgatgcacaaagtgtattgcattctgctaaggtgctttggtgcaaatgaagaatagaaaaactaccatcccggtgtaaattgaagacagtcaggtgctattgaagctattgaactctgttactgttccaacggcacaagacggataagaatgaaatcgctatatatgatggatttttggttggaagaacagagggatcaccaatcagaattctttctactatagcatatatttttcatgtacattgtgggtgcaagttcgatcaagggagcaaattctgttgtatttttttagttagtgagattatgtgatgaaaaattggttagcgtcaaatttgcaattgcaaagtgactaatataatgacataatataatacactgataagatataattggttgcaagttcaaattcatcattgtgatgtagttatgatacaatttagggtgtgtttcgttgaactgtgatttttt

SEQ ID NO: 149647 - DNA, 1605 bp, Zea Mays
aaaccttgcgtgcgccaccgccaatggcagcaggaatcctctgatcctctttcccgcacatccaaagaggcgccgccgtcctctgaaaaatcctagccgctttctacatggccgagcccgccaaccggcggatggaggccgtccgccgtcacctccttctgccttcacccgcgccgcttcgccctaatccgttaagcagcctcgcggaggtggagcccagcccggtgatcattggcgggatggtgctggatatccatgccaagccttccgtgccgccccatcatggtaccactgtccctggaatggttaaatacatcagtggaggcgtagcaagaaatattgctgagtgcatgtcaaagcttgggacacaacccttcatgataagtgttgttggaaatgatttggcaggggacttccttttgaagtactggaggtcagctggattatgttcagaaggaattctgcaggttgataatgttgcaaccccagtagtatcaaatgtgtttgacggtactggagaattaatcgctggagttgcaagtgttcaagcagttgaaaattttattacttcgagctggatttatcacttccgtcatcatattgctaatgcaccacttgtaatgcttgatgcgaatttatctcctgagtcacttaaagcagcttgcataatggcatatgaatttggggtgcctgtgttatttgagccagtctcagtggtgaagtgtcgaagaattgcaccagttgcagaatatataacttgcacttcccccaatgaaattgagcttgttgccatggcaaattcattatctccatcagtgaaatataattttcacacaatagagcagttcaaggagaaagcagatactgttgaatatatttttcaaatgcttagcccagcaatgttcttcctacttgagaagggcatcaagttgcttatcgtgacacttggctcaaatggtgtttttatttgttgcaaagagcacactaacttcatgaaagaccagcacaagtgcaaacagacgcctttctccagacagctacttgaaaaaatggacgggtgttttccatcgaacaatcttgttaatttgtgcagagaaagctcttcaagaacatgtgtttttcatttacctgcaatatcggcctctgtgataagcctcacaggtgctggcgattgtttggttggtggtgccctttcagctctatgtgcaggcttcgatatcatccagagcgttgcagttggggttgctatagcaaaggcatctgtggaatctgaagccaacatacctgatgacatttctgctgcgagtattgcagatgatgcacaaagtgtattgcattctgctaaggtgctttggtgcaaatgaagaatagaaaaactaccatcccggtgtaaattgaagacagtcaggtgctattgaagctattgaactctgttactgttccaacggcacaagacggataagaatgaaatcgctatatatgatggatttttggttggaagaacagagggatcaccaatcagaattctttctactatagcatatatttttcatgtacattgtgggtgcaagttcgatcaagggagcaaattctgttgtatttttt

SEQ ID NO: 149648 - DNA, 1452 bp, Zea Mays
gacggtcggaggcatcggaaccagccttgcgcttccgtcgacgccgatgtgccgccccgccgcacggaacggcacagaacaagcgcagccagatgagcgagggtgctactgccacctcgccggcgctggagaccgaggtggcgcctttgccggacaacgacgacctccatcgggagatctttctccgtctaccgccgctcccctcgtcgctgccccgcgcctccctcgtctgcaagcgctggcgccgcctcatctccgaccccgccttcctccgccgcttccacgtccaccacagggcgcctcccctcctcggcttcttcgccgacgaagacggcgacatcgagttcgtgcccacgctgcgccggcccgaccgcatccccggcgcgcgcttctccctgccgcggcgcgacaacgactatttgagcttcctcggctgccgccacggcctcgccctcctcgtcgatcgcgcgcggttcgaggccgtggtgtggaatcccgtcagcggcagtcagtgccgcgtgcctttcccactggagttcaacaaaagacacgtctacaaaggcgctgtggtgagatcctccggtgacggccacgtgcagggtgattcccgcttgatccccttcaaactggtattggtacatcatactgacctccacgacaagcttgcgttcgcgtgcctgtatgaatcggagtctggtagatggggcaatatcagctcaatagctattccattgtctcgtttgcatcagcctgctgtcctagttggaaaccgactttactggatacttttgggtaccagtgacatccttgagtttgatttggatggccagagtctagccatagttcggaagccagaggacgcccgtgttacaaacaattcaggcattcaggccctggcagtagaaggtaacaagcttggccttgcaactttgtcaaagatgagcatccaattgtggcggagagagaccaattcagatgctgccggccggtggatgccatggaaaactgttgaactagataagctccttccagtaagtcggtcaaccaggatatggccaacaaccattctggggtttgatgaggatagcaatgctttctttatttgtacgagtgttggcatctacatgatccagcttgagtcaacacagttcacgaaacttttggaaggtgattcgtttactgcctattatccctacacaagtttatatactgcaggcttgggcatagatgatggagatgatagagctgaaattttgaacgatacatgagatgattgtcccaatatatcttgtaaactgaggtgaggtgtttcctaaacagtggtggtaatttatcttttgctttcggtatgttatttttctaatcaacatgttagtagaggcaacgactctcatgcaatcagaccttaaatgcaagcatgcaagtgagactcctgatctgttagatcatgat

SEQ ID NO: 149649 - DNA, 1304 bp, Zea Mays
gtgacggtcggaggcatcggaaccagccttgcgcttccgtcgacgccgatgtgccgccccgccgcacggaacggcacagaacaagcgcagccagatgagcgagggtgctactgccacctcgccggcgctggagaccgaggtggcgcctttgccggacaacgacgacctccatcgggagatctttctccgtctaccgccgctcccctcgtcgctgccccgcgcctccctcgtctgcaagcgctggcgccgcctcatctccgaccccgccttcctccgccgcttccacgtccaccacagggcgcctcccctcctcggcttcttcgccgacgaagacggcgacatcgagttcgtgcccacgctgcgccggcccgaccgcatccccggcgcgcgcttctccctgccgcggcgcgacaacgactatttgagcttcctcggctgccgccacggcctcgccctcctcgtcgatcgcgcgcggttcgaggccgtggtgtggaatcccgtcagcggcagtcagtgccgcgtgcctttcccactggagttcaacaaaagacacgtctacaaaggcgctgtggtgagatcctccggtgacggccacgtgcagggtgattcccgcttgatccccttcaaactggtattggtacatcatactgacctccacgacaagcttgcgttcgcgtgcctgtatgaatcggagtctggtagatggggcaatatcagctcaatagctattccattgtctcgtttgcatcagcctgctgtcctagttggaaaccgactttactggatacttttgggtaccagtgacatccttgagtttgatttggatggccagagtctagccatagttcggaagccagaggacgcccgtgttacaaacaattcaggcattcaggccctggcagtagaaggtaacaagcttggccttgcaactttgtcaaagatgagcatccaattgtggcggagagagaccaattcagatgctgccggccggtggatgccatggaaaactgttgaactagataagctccttccagtaagtcggtcaaccaggatatggccaacaaccattctggggtttgatgaggatagcaatgctttctttatttgtacgagtgttggcatctacatgatccagcttgagtcaacacagttcacgaaacttttggaaggtgattcgtttactgcctattatccctacacaagtttatatactgcaggtaagcttatctttatgctgcacaagtaatggtatccaactatttttgctatatcgcaattgaaatatcattcatgcttaagagctc

SEQ ID NO: 149650 - DNA, 1077 bp, Zea Mays
gctaattcatttagtttctgcttgttttgctttcttgagatggtttgtagccttaacctttgtgatagcacaagaccaatgtggttgggactctgaacatgcttggattggcaaagaggatcaatgctaggttcctcctcaccagtaccagtgaggtctatggtgatcccctccagcacccgcaggtggagacttactggggcaatgtcaatcccatcggtgtcaggagctgttacgatgagggcaagcgtacagccgaaacgttgaccatggattaccaccgtggtgccaaccttgaggttaggatcgcacgtatcttcaacacatatggccctcgcatgtgcattgacgatggccgtgttgtcagtaacttcgttgctcaggcactgaggaaggagcccttgacggtttatggtgatggaaagcaaaccaggagtttccaatatgtttctgatctggtcgagggtctgatgaagctgatggaaggcgagcatgtaggaccatttaacctgggcaaccccggcgagttcaccatgctggagcttgccaaggttgtccaggacaccatcgaccccaacgcacggatcgagttccgtcagaacacccaggacgacccacacaagcgcaagcccgacatcggccgtgccaaggagctccttgggtgggagccgaagatccccctccgcgagggccttcccctcatggtcaccgacttccgcaagcgcatcttcggcgaccaagacaccgcggctgccaccaccggaaaccagcaaggctaggacggaagaggagcacgggacttggaaatttttggtggcctgcttctagctgcttggtcgaccctcctctccttactgacaaaagctatggccatgtagttcgtcgggaatgtgtcgctgaaataccttggttgatgctgtaatgctattctttctcctgtattttttctctctcagttcgctcagccattagctatacaaaaaaaattccagttgaaccgttggggataaacctggatgatctaattctttgttgagagcatagcatcatatatatggtatagctcacttttttttg

SEQ ID NO: 149651 - DNA, 1710 bp, Zea Mays
gccacccccgcgagacctgtccgaatcgcgtccaggtccctcgctgggagtttcgccgagggccctcccgcctcccccctagattcacgacggagatggcgtccgagctcacctaccgcggcggcggggcgttcacggccgccagcgccggcgccgggggctactccccgaagccgtctaagccgcttgcgtggctgccccgcgcggcccgctacgccgtcgccgagaaccgcccgctcttcgcgctcgccgggatgctcatcgccgccgccgtcatctccatcgcctccccgtccgcctcctcctcctcctccgccgcctcgtcctactccaacaacaacccgctcgcccgtttctccgtcgagcccgcccaccaccgcgacgtggccacgcggcacttcgtcggcggcaaggtgccgctgggcctcaagaggaaggtgctccgcgtcctcgtcaccggcggcgccggcttcgtcggcagccacctggtggaccgcctcctgcagcgcggagacagtgtcatcgtcgtcgacaacttcttcaccggccgcaaggacaacgtcctgcaccacctcggcgaccccaacttcgagatgatacgccacgacgtcgtcgagcccatcctgctcgaggtcgaccagatctaccacctcgcctgccccgcgtcccccgtccactacaaatacaaccccatcaaaacaatcaagaccaatgtggttgggactctgaacatgcttggattggcaaagaggatcaatgctaggttcctcctcaccagtaccagtgaggtctatggtgatcccctccagcacccgcaggtggagacttactggggcaatgtcaatcccatcggtgtcaggagctgttacgatgagggcaagcgtacagccgaaacgttgaccatggattaccaccgtggtgccaaccttgaggttaggatcgcacgtatcttcaacacatatggccctcgcatgtgcattgacgatggccgtgttgtcagtaacttcgttgctcaggcactgaggaaggagcccttgacggtttatggtgatggaaagcaaaccaggagtttccaatatgtttctgatctggtcgagggtctgatgaagctgatggaaggcgagcatgtaggaccatttaacctgggcaaccccggcgagttcaccatgctggagcttgccaaggttgtccaggacaccatcgaccccaacgcacggatcgagttccgtcagaacacccaggacgacccacacaagcgcaagcccgacatcggccgtgccaaggagctccttgggtgggagccgaagatccccctccgcgagggccttcccctcatggtcaccgacttccgcaagcgcatcttcggcgaccaagacaccgcggctgccaccaccggaaaccagcaaggctaggacggaagaggagcacgggacttggaaatttttggtggcctgcttctagctgcttggtcgaccctcctctccttactgacaaaagctatggccatgtagttcgtcgggaatgtgtcgctgaaataccttggttgatgctgtaatgctattctttctcctgtattttttctctctcagttcgctcagccattagctatacaaaaaaaattccagttgaaccgttggggataaacctggatgatctaattctttgttgagagcatagcatcatatatatggtatagctcacttttttttg

SEQ ID NO: 149652 - DNA, 1817 bp, Zea Mays
cagaaaactcgatcccccgccgtccaccccgcatccaagggccacgaccccgcatctctcccccggcgagccaccgctcccccgcccataaatacctctctgctccagccgctgccgctgccacccccgcgagacctgtccgaatcgcgtccaggtccctcgctgggagtttcgccgagggccctcccgcctcccccctagattcacgacggagatggcgtccgagctcacctaccgcggcggcggggcgttcacggccgccagcgccggcgccgggggctactccccgaagccgtctaagccgcttgcgtggctgccccgcgcggcccgctacgccgtcgccgagaaccgcccgctcttcgcgctcgccgggatgctcatcgccgccgccgtcatctccatcgcctccccgtccgcctcctcctcctcctccgccgcctcgtcctactccaacaacaacccgctcgcccgtttctccgtcgagcccgcccaccaccgcgacgtggccacgcggcacttcgtcggcggcaaggtgccgctgggcctcaagaggaaggtgctccgcgtcctcgtcaccggcggcgccggcttcgtcggcagccacctggtggaccgcctcctgcagcgcggagacagtgtcatcgtcgtcgacaacttcttcaccggccgcaaggacaacgtcctgcaccacctcggcgaccccaacttcgagatgatacgccacgacgtcgtcgagcccatcctgctcgaggtcgaccagatctaccacctcgcctgccccgcgtcccccgtccactacaaatacaaccccatcaaaacaatccacaagaccaatgtggttgggactctgaacatgcttggattggcaaagaggatcaatgctaggttcctcctcaccagtaccagtgaggtctatggtgatcccctccagcacccgcaggtggagacttactggggcaatgtcaatcccatcggtgtcaggagctgttacgatgagggcaagcgtacagccgaaacgttgaccatggattaccaccgtggtgccaaccttgaggttaggatcgcacgtatcttcaacacatatggccctcgcatgtgcattgacgatggccgtgttgtcagtaacttcgttgctcaggcactgaggaaggagcccttgacggtttatggtgatggaaagcaaaccaggagtttccaatatgtttctgatctggtcgagggtctgatgaagctgatggaaggcgagcatgtaggaccatttaacctgggcaaccccggcgagttcaccatgctggagcttgccaaggttgtccaggacaccatcgaccccaacgcacggatcgagttccgtcagaacacccaggacgacccacacaagcgcaagcccgacatcggccgtgccaaggagctccttgggtgggagccgaagatccccctccgcgagggccttcccctcatggtcaccgacttccgcaagcgcatcttcggcgaccaagacaccgcggctgccaccaccggaaaccagcaaggctaggacggaagaggagcacgggacttggaaatttttggtggcctgcttctagctgcttggtcgaccctcctctccttactgacaaaagctatggccatgtagttcgtcgggaatgtgtcgctgaaataccttggttgatgctgtaatgctattctttctcctgtattttttctctctcagttcgctcagccattagctatacaaaaaaaattccagttgaaccgttggggataaacctggatgatctaattctttgttgagagcatagcatcatatatatggtata

SEQ ID NO: 149653 - DNA, 229 bp, Zea Mays
attagtatgtgtttgaggaagtctcacctagttttggtagcatcacgagaaaaagtaaaagaaactatacttcggtgtatggtgggagctaaatagctctgtagtttatcgcctttcatgtcctcatgtgctaccgttgtatgtggcaagttctaatgtgttgtttgcctctttttaggttataataagtcgccaatgctccttttcttcttcggagtaatataatgac

SEQ ID NO: 149654 - DNA, 756 bp, Zea Mays
aaatgttttttaacaggttggatgctctgcacggaactttttcattttcttcttgagagtaatctctttttgcaaagaggccgccaactcttgtaccatcacggcgtcggagggccagtcgacctctctgctcgcgaaaaatggcggcggcagcggaaggtttggctgcctacagggcggtgctgcgggcggcgcggcggacgttcgcgggcgaccagctgatgctgaaggagtctgcggtggagatccggcgccgctttgaggaccaccgtggtctaaccccgggctccgacgatgcagcgcgtgccctcgccgacgcccgcgaggcggcgcacttcatcacccatatgatagtccaggccacacgcgcaccctccggatccttcgttgtgaagcctgagagtgttcatgctggagctacactggaagttccttccgaggagatcctttcaaagttgaagtaggtcactagcattgctgaagtaggtcaccatcttcatgctagtaaaataagaccagtttgcaacggttgattcttgtgttgcatactggtgcacttagtagcttcacacttttgcttttattattattattattattactgagagcatttagcggcaccaaggtaccggtgtcttcgatgcaaagtagtgtgaaacggctattgaggtttttgaaaatcgactgtatgatgaggaattatgcaaataggaaaattgcagtgccgtggacttgatcattgttgttgtcttgttt

SEQ ID NO: 149655 - DNA, 665 bp, Zea Mays
tttttatacacataatcacatagatatacaaatttaattagtattgcacaatgatagatccacatcacataaaccatcaacaagcaccacaacaaaatcattcacaaaacctacacatgttattatgttttgcacatatttgcaaacactttacaaaatcattcacaaaagtactaatgcttcaagtgattcgcaaaagccttcacaaaagcactccaacttcttgtatcctcttgttttaaggcacaagcttgtaggggttgtgatgtcgccacttacttgatgctaacaagacattttcttcaccaaagccatcttcaacacttcgcccataaaaaagatcaattctcattttcaattgcctgtctgcaagacaagcgataattacaataagtaaattataatctacatctatatagtctagactaccaaacagctacatatagtatattataatttggattatataatttagattataatctagattatataatctataagctgaaacaaatgggtcctaaggcaatgcaggcacgataaattcagcataacataaaggcagttcttcaaccatcagagagcacaatgttctcagtcagctccctttaacacaacaaaatcttaaacaagagcttccagcttttgtagatctctatccccca

SEQ ID NO: 149656 - DNA, 1737 bp, Zea Mays
atgcagcgccatatccgtgcagtctactccatttttgttcccctctccggtggcggcctagcgggggtgtggtcttcctcgcgtcgcctcccctcgctctcatccggtcatcagtttgaggtttcaacctatttcaccagagctgattggactcatggatgggaacaaagatgaggcattgagatctgtcaagcttgcaaaatctgcatttgcatctggggataggcagcgcgcagaaaaattaattaaaattgctcaaagattggaccctggtcttccacttgatgatttgctgagcccagttgagaaggttggcatcctgaatatttctacttgcaaagacaagactgaaagaggacaagctcttttatacccaaaaacaacaaaagaatctgttggtcctttaaatgttgataaggcttacactgaggagaatattagagtggttcaggatatcaggaaaaagaaggattactatgcagttctcggagtagagagaagatgcactgtggaggaaattaggaaggcatacaggaggttatcactgaaggttcatcctgacaagaacaaggttcctggggcagaagatgctttcaagatggtaagcaaggctttcaagtgcctaagcaatgatcagtcgcggaggacttatgatcagacaggcaccactgaggaccatgaattcaatgagcaatatcccaatgtcatgaggcggggagctgctaggcggagaaggccagcaagaagtggcttctataactatgaagaagattttgatccagatgagatattcaggtccttttatggcacccatgataatatgttccatccccagtatacctacagggctaggggaacaggcaggcaacagcaacagagaagggagcattcagtggagggtggttccagcataaatctaacagtgtttattcaccttgtagtagtactgtttattgtttcgcttgcatttattccagcgcgtcaagctgagtattcgctgcaacagacaaattacttccccatttcaaaggtcactcaaaaacaaggagtggagtacttcgtcagcaaacaagattttgatcagcagtttccacagggtagtcagtctagagagaatcttgaacggcatgttctgatggactataagagtatgcttggaagatattgccatgtggaactccaacgtcgtcaatgggccaaggactaccctacacctcgctgtgacaagctaagggagctgtctgtggcgcagaatgtgcatatgccatcagtttgatctcccgttttcatcatggaagaatattgctcatatttgcaggtgaaacgtaggaatcgtttggagcaaaacgaacagagtatggtatctagtcggtctggttgacaaatgtctaactggacagtagtgctcccttgtgttatagttgtagaattatatttgtttataattcacaaatctatatgtgtctgcgcaattggtacagttgtgaaccagtaagccagagcataaaaggcttgtttacatgaagagatacatggctggtgaccaaccggttgaagttgcggttcacgttgatgcagatgcagcacgcccgacacctcacacctccgaactccgatgttgctgctgatgcccgcactgtactgtaaacaatctttcaaaggcaaatggaactgtgggatacatgtggcagtgtggcacttcgatgatgtgctctgttaaatatttttttaggaaac

SEQ ID NO: 149657 - DNA, 542 bp, Zea Mays
tgtagcataatcttgagctaagtttggtcatttatattgatcattttacactaaacataagtttggtctccatgtgaacgtgtctcacacagatattgttttcttgcgtctttgttggatgattcaggtgaaacgtaggaatcgtttggagcaaaacgaacagagtatggtatctagtcggtctggttgacaaatgtctaactggacagtagtgctcccttgtgttatagttgtagaattatatttgtttataattcacaaatctatatgtgtctgcgcaattggtacagttgtgaaccagtaagccagagcataaaaggcttgtttacatgaagagatacatggctggtgaccaaccggttgaagttgcggttcacgttgatgcagatgcagcacgcccgacacctcacacctccgaactccgatgttgctgctgatgcccgcactgtactgtaaacaatctttcaaaggcaaatggaactgtgggatacatgtggcagtgtggcacttcgatgatgtgctctgttaaatatttttttagg

SEQ ID NO: 149658 - DNA, 413 bp, Zea Mays
tttgcagttgtgtttgatgtgcaagacatgacatgatactatccacatgaaacttgcaggacaggattgcacaatggggtacaaacaattttcctattgtattgctgtttttttgctagggcacaaagtcattgacttgtgttttatctgtatgataaattcatagatggcctatgttggtgctaatgacactagggctgcagggatgggtgccggattggttgtagggatgggtgctggtatagatgtctaatgatgttgatgaccgacgtatgatgggtgttgttggtatagacaacatatggatgacatatggtggtagatccaagcctcctcttccgtcggatgcatcaagcactatttatattgatgacttacctgcaaactgcacacgacaggaggtttcatatatc

SEQ ID NO: 149659 - DNA, 1751 bp, Zea Mays
ctttgatcccaaacaagccctaacagctgccaacaaacactgcaggcgcaacgggcgtccacacgttgcaaccgcacaaaataattggtgtagctagattacatcaccaccacaaaatcctccaccatccaaaacaccaatccccagttcgccaccgaatattatcaaaagaaaaaaaaagatcgcagccgaaaggaaggggaaaaaaggaccaaataaacaatccactgtctcctacctccgcggaagcatcaaacaaatcaccctgccgatcgccatggacgaacagcaggcggaggagggcgaaagcgcgcgcgtcaagaggacgccggaggaggggtcgtcgccgctgtccgctctggcggatgacgtgctgctacagatcctgggacggctcgaggcggacccgcgggactgggcgcgggcctcctgcgcgtccccgcgcctcgccgctctgctccgggcggcctgcctcccgccgcgactgtcgcgggcgctccccgccgagctcctccccgcgccgtcaccggacggggcgcccgcggcctgggcggcgctccacaagctctccgtctgttgcccggggctcctccgcgccggggtgctcctcgagcccaccgacgatttcgggctcgatctcgacatcgggcctgacgtccccatctacgcccgcaccgacgcctcctccgccgaggggttcgaggccacggccacctcccgccacagcggaaccatcgtcgcggccgggagcgcgccccgcgccggcgaatctgccaacgtcgccgcgtggtcgctctacgacgacctgtacctggacgcggcatacgactgctcgtccgagctgcagatcccgcctgccgctgcggctgtggaacccgccccgcccgcgcccgtggcggcgatccgcgacgtggaggaagcaacgaccacaaatgctgtctcatgcggcgtcgcccggcgcggcgtggtggccgggagccgactgcatccgcggcggtggctgggcaccgtcggcgcgcacctggcatcggggtcctggacgctgagccgtgagcaggggaacaagctccttgccagccgcttccgcggcgaccggctatacctctgcgactggcccgggtgcgtgcacaaggaggagcgacgcaagtacatggtcttccgcggcgtgttccacaacttcgcccggtctcaggtccggcgcgcgctcagggacacgcgccgccccaccgtcgccgtcgaatgcgccttctgcggctgcaaagagacctgggacctctactcggctttctgcctccgcagtttctacggctaccacgacgacggcgagcctgtggtgcgcgcctacgtctgcgagaacggccacgtcgcgggcgcctggaccgaccgcccactctactcctgatcttggagtggacactccgactgacatggtattgcatcaaagactgcaccctgccattgccagatgctcgctcctaccacttgagctgtttctagacataattatgcgtgcctgcatatagcaatccggattttcgtcatgttctgatacacgtgggatgtgtattctttatttctttcttcttgctgttgctgttgtttgtgagaaactgagaatggttgagtagaataaggatgccggttgatttgcagcataggatataaagagatttgcttaaaattgtaaacctgatgctacgagaaattggaaccgctgttttattgccacactaccgtttgtgttgggtatc

SEQ ID NO: 149660 - DNA, 300 bp, Zea Mays
atggcagattctggacggcagaatgaagaatgtgccgtggactgcaagactgcgatgactgtgctttgtgtgatcaaggttcagaaacttcagatcacctgcttctgtcttgtgtttacagccgcaaaacacggtgtcatgtgttccgatgttcgggataggaaccaccatgtcttcgaggcagtgtcaactaacccagctacgctgtttgagttcatcgtcattgaagggaacacctggattgcggctggattaaacgcattgtcgattctgttactggctgagctaaggagatgctag

SEQ ID NO: 149661 - DNA, 891 bp, Zea Mays
atggctaccaagatcctatctttaacagcaagttcttctggttgtgaaagaaattggagtgggtttgatggggtgcacactaagaagagaaataggcttactacagactgcctcaacaagttggtctacattcagttcaacaacaggctaattaataagagagcaaagatcaagtccaagaaaattactgatgttctcttgtctagtggtacaactgaagctcaaggtttcctccaagagaatggagatgattgtgcattagtttcctttagagatgaggaagaagtcatggaaggtacagggatactttggtctgtgcttggagatgcagtgggagcagaagaacaactagagctgcgtagaagtgcaagggtaagagagctcaatgaagaagagtttgagtccgaagaagaagagtttgatgaagatgaggatgagctatcctatgctgctgatcagtacttaatggatgggagaagggtcagacctcagataacagtgcttgaggattcagtgatcagcagatctgcaaggacaaaaggaccgggacgagagcggcactggcagcaagggttgaggcatctagcgctcccccaacctatcgggccgtccgggctgctggtgcagaagaggggcgacggggagccaccatccgagtcaaggctgatggtggaaagggccaccatccgagtcaaggttgcgtcgtccgtggtgctcgccgcccgtggtgaagcagagtgtgcagtgttaagcttcagcgagtacacggttgctcatgctgtactgctcgtggcgcttcatacaactgttttgtcgttctccaattctcagaatgctactcagaaaagtcgaatggtatttgtccatgttcctttagaaattgctggatga

SEQ ID NO: 149662 - DNA, 227 bp, Zea Mays
tgaaaagttagtacattgacaagctaatccatattttccttctgtggcagcaaacaatggacaccagtcaaatcaaaggaaaaaaagtatgcactcattcgaatctcctccaaaaaggtatccatgaacagaacaacatgatggatgatagagctacgaagacgatctggttggatgaagaagacacgcgaatacgtgttggccaagaacatggcttcgtcagttga

SEQ ID NO: 149663 - DNA, 466 bp, Zea Mays
agggtccgccgcgggtgctcctgcgcggggtagccctgctcgtgtgactgctccctgcacggcggtcacccctgcgtcggacaccgcaccccctgtgctggaactcgacgttcgtgctcctctgcccaaagccggtttctcctcctcctatcccacctctctagagcttcagtgaccgggctgggagagatgcatgcagttaggagctcggcggggaccaccgtcgcgagttcatcggtggcgctctgtggccggcgtgctgtgggtcaataccgcgaatgccccctcaaccgtcccataccagtgttggggcctgggcgtgttggccagggagtttcttgggcgcacctggaactgcaccgtggcgaccgcgggcgtgaaggtgtggacatcgtggaggaatttctcactggtgctgcgggtccgcgcatcgccgcgtgccatcatcaccacgcccggatttttg

SEQ ID NO: 149664 - DNA, 579 bp, Zea Mays
atcctaccgcagagtgccatagccactgagcagagcaaaaccattggtgtggagacatcaccgccgtgggtatgcaaagcggggaaaagggtccgccgcgggtgctcctgcgcggggtagccctgctcgtgtgagttgtgactgctccctgcacggcggtcgcccctgcgtcggacacctcaccccctgtgctggaactcgacgtccgtgctcctctgcccaaagccggttgctcctcctcctatcccacctctctagagcttcagtgaccgggctgggagagatgcacgcagttaggagctcggcggggaccaccgtcgcgagttcatcggtggcgctctgtggccggtgtgctgtgggtcaataccgcgaacgccccctcaaccgtcccataccagcggtggggcctgggcgtgttggccagggagtttcttgggcgcacctggaactgcaccgtggcgaccgcgggcgtgaaggtgtgggcatcgtggaggaatttctcactggtgctgcgggcccgcgcatcgccgcgtgccatcatcaccacgcccggatttttggtgagagtgccctgtaaac

SEQ ID NO: 149665 - DNA, 1599 bp, Zea Mays
gtactttggccaaaagaagtcaaattggcttgagccgaggttcagccgttcaggtcgccgacgccgcgcacgtcccatccgatggctgccgcagtccacctccggcctctccactcgttcgccttccctctccccgcagtgaaggccgcgcccagctggctcccgctccaggcgaaacccggcgcgcggaggacgggcagccgcgttgctctgctcgtcccctccgcgtctgcccccgcgccagcgtctccatctccctcgggcaaggatggcaccactgcgtcggctgcgacaaagtgggtggagtggatcccgcgcgctgcggcaggcgctgggtcggcagtgggccccgagcaggtgctcaggctcatctctggcgccgcggccacgcccatctgccagttcgttgacagcccgcgaacctttctccattccgtcgacccgcgcgtcaagctggtgtggctcttgtcccttgttgtcctaccagccaggtcaaatatttatatgcggtttggtttggtagtattcctggcccttatttcaatgtgggttttaccaaatcatgtttggaaggatcaacttggaagggttactcttctttcaggattcatattcatcatgctgggatttggtgctgatggtgcaccttcattagtccagatgagaacgcctccaccttctgttctaggcataccgaacattccttgctccacaagtgggtattcttacacaatcttgaaactgggaccactgcaatttacaaggaaaggcctatcattagcaagtacttcagcaagcctctcctttgcaatattccaaagtgcaagtctctgcttgacaacaaccactcctgagcagcttgcttctgctttgtggtggtttatgagtccactgaagcatatcggtgtgccagtgcctgagataatacttacattactactctcattgaggtttatcaatttagtatttgatgaggttcgcaactcagctctagcgattgtagcacgccggataaattggaaaaagctgacagctatggaaactatagatattttcttcagctatgtccaacggatatttaaaaatatatttgatcatgcggagcaaatatccaaggcaatggtagctcgaggatttcgtggtaatccaatcaatcacaagatctactttctcacagaatcatcatttggaattgcggatttcttttcgttgctttgcctattggttgtagtgagcttggcttccttttctgaccaattagtttgatggtaacaaaaaggcagaacatgtcttggatatttttgcgaggcagataatcacggaaaaagctaaaagcacacgtgaactgtttgatgatgtttgttgagttgaccctagttagaaaaaaaacgtgagcgaatatcattgaaaggaaattgtgtccgcaatgtatccttgttgaaatggaattgtgttcccaattgtaagtagtattaggtctatcataagtcaaacttttctagctttaatcgaattaacagaaaactgtagaaaatatgtacagcatcaaataagattcattgtatcacgcacctgcatgaaacatattttaatgatgta

SEQ ID NO: 149666 - DNA, 880 bp, Zea Mays
cacgcacccacaaggttgagagctgagactgatctgtgccatccgtccgttcccgcgagcgagagaggccggccgcagcatatggcgtccgccgcccaccggtccatggggtctgccctcctgtccctcaacctcatcatgtacgtcgtcgtcgcggtcatcgctggctgggcaatcaactacagcatcgacgagagcaggaactcgctgaagggcgcgacgccgccggtgcgcctgttcccgatctacttccccatcggcaacctggcgacggggttcttcgtcatcttcgcgctcgtcacgggcgtcgtcggcatctccacctcgctcgccggcctgcacgaggtcagccaggggtacccggccagcatgatgtccgccgccgcgtccgcccttgtcacctggaccctcaccgtcctcgccatggggctagcgtgcaaggagatcagcctcagcgtgaggcccgggagcctgcgcaccttggaggcgttcaccatcatcctgaccgccacgcagctgctctgcgccgtgtcgctccacgccggcgcgcacgcggtcatcctggagacgcctatcggcggcagagtctagctgaggtgcgcgatgacagctagcatgcgccatcttggcagagtgatcggtgttgtgtcgctttacaggtgccgtgtgtgtgctttctgggtacctaaaattcgtgtgagcctcattcatttgtaaaaaaaaaggcgtggactcataagtggtggtgaactatcggcgattcttcccatactactgcaagacaaaattattgcgctttgcacagttccactatatatatatactaagtgcatgtttgtattaaataatcttgattatttactctagctagaataaataa

SEQ ID NO: 149667 - DNA, 108 bp, Zea Mays
agggatctggggtcatgggccacaacacgccaccaccggtcataccagcaccaggaggagcttatgcaggggagggagctactccaggagagaattcaaacatgttac

SEQ ID NO: 149668 - DNA, 1139 bp, Zea Mays
agactcaaattcccgcaccatctcagtgggtcgaccttgcgtaagcagtgagatcacagcactcactatctgtaccacaattccacaaaaagaatattgtgctcaatctcgccggcccttgccgccagcaagttatagcttttaactttctcaggacacgggagcccttcttgccacaaaagttttagttccaactgggagagctagcatggcaagttcgcgctgctttgagaacccgccggtgctggagccggccagcggaggaggcgaggtggttgacgacttcggcgggcagaaggcctacgtcagcggctccgccgggtccaaggccgccgtcgtcctcatctccgacgccttcgggttcgaagcgccaaacctgaggaagatagccgacaaagttgcttcgctcggttacttcgttgtggtgcccgatttcctgcatggggatccatatgaccccagcaataatgcccatagcaatcctggaacgtggatacagtcgcacaatccgcaaacggcattcgaagaggcaaaaccggtaattgcggctataaaggagaagggtgtgtcgagcatcggagctgcaggttactgttggggcgcaaaggtggttgtggaactggcgaaagttcacgagatccaggctgctgtgttggcacacccttctttactaactgtcgatgatatgaaagatgtcaagtgccccatttccatacttggagctgaaatcgacaggtcagccccgcctgaattgctaaagcagtttgagcaagttctttcagcgaaccccgaggtcgatcactttgtcaaggtttttcctggcgtagcgcatggatgggctgtgaggtacagcgacgacgacgcagcggctgtcacgagtgcggaggaagctttgcgcgacatgagccactggttcaacaagtacctgaactgaattatgtggcggcatatgtgcgtgcaataagctcctaatggtgaacattatgcagggcccccatgctatgcgtgtgttttaaaagtcctcttagtggtggtatttgtactggtctcttacgcaatttttataacatttatcgagaataaagtgatgacacggtgaatgggtatttttataacagtaaaagaggacattttcgacg

SEQ ID NO: 149669 - DNA, 1083 bp, Zea Mays
attattcaggcaggcgcattgactgatacacatatatacaacaagcaaggcggctagctacagcggctagtgcgcgcgtggtgcaggcgcatctagctactacctggtgcttgttgtgcatacaatggcgacttcgctgggactgaaccctgaagatctcttcacttcgtactcgtcttcctactactcctcgccgccgttcatgtccgactacgcggcgagcttcacgccggcggccggggactccacggccttctcctcggagctcgacgaccttcaccacttcgactactcaccggcgccgatcgtcactgctgccggagccggggctgggggcggcgatcgcaacgagaagatgatgtggtgtgagggtggtggtgacgagagaagactcagaagcaacggaaggatcgggttcagaacgaggtcagaggtggagatcttggacgacggattcaagtggaggaagtacgggaagaaggccgtcaagaacagcccaaatccaaggaactactaccgctgctcgtcggagggctgcggcgtgaagaagcgggtggagagggaccgcgacgacccccgctacgtcatcaccacctacgacggcgtccacaaccacgccagccccggagccgctgctatcatcgtcccgtacggcagcggcggcggcaatagcggcttctacagcccgccgcacagcggctccccgtcggccacctcctactcgggctccctagccttctgacttttccgggccttgacccatagttacctttacactccagtcgtcggataagaagaatgttcagcggctggctaaacagtctcaactgctgcagctattcaaattagtgttggagatgcaatttatagagataaaatactctagaagctatcgctgtagccggattaaattctgacctacttgtatagttttacacttacacagtgcaagtaataatatttaagggaagcagagagcactctacttttttacctctcaattattagttacctcttgtgatgatgcatcattagtcatcatcactaggataattgatgacagcacgtttttaacttaattag

SEQ ID NO: 149670 - DNA, 1309 bp, Zea Mays
attattcaggcaggcgcattgactgatacacatatatacaacaagcaaggcggctagctacagcggctagtgcgcgcgtggtgcaggcgcatctagctactacctggtgcttgttgtgcatacaatggcgacttcgctgggactgaaccctgaagatctcttcacttcgtactcgtcttcctactactcctcgccgccgttcatgtccgactacgcggcgagcttcacgccggcggccggggactccacggccttctcctcggagctcgacgaccttcaccacttcgactactcaccggcgccgatcgtcactgctgccggagccggggctgggggcggcgatcgcaacgagaagatgatgtatgtatatatgcaacgcacgcagcaaaatattattactgtgtctgtgtgtgtgctagttattgttggttggtgtcggcgcccctgctagctgcttactacagtttgcttcggtgatttcgctcatcatcaggtggtgtgagggtggtggtgacgagagaagactcagaagcaacggaaggatcgggttcagaacgaggtcagaggtggagatcttggacgacggattcaagtggaggaagtacgggaagaaggccgtcaagaacagcccaaatccaaggtactactatactacacaaatacacatgcaaattaatagagcagctagctaaattcccccaacatgaaagccaagacaagagcaaagagatgaattaatcctcgcaaaacgaaacaaaaataaaaaaagaaatgtttacttcgtcgatgctgatggcttgtgcacatgcccatgtaggaactactaccgctgctcgtcggagggctgcggcgtgaagaagcgggtggagagggaccgcgacgacccccgctacgtcatcaccacctacgacggcgtccacaaccacgccagccccggagccgctgctatcatcgtcccgtacggcagcggcggcggcaatagcggcttctacagcccgccgcacagcggctccccgtcggccacctcctactcgggctccctagccttctgacttttccgggccttgacccatagttacctttacactccagtcgtcggataagaagaatgttcagcggctggctaaacagtctcaactgctgcagctattcaaattagtgttggagatgcaatttatagagataaaatactctagaagctatcgctgtagccggattaaattctgacctacttgtatagttttacacttacacagtgcaagtaataatatttaagggaagcagagagcactctacttttttacctctc

SEQ ID NO: 149671 - DNA, 2130 bp, Zea Mays
atcacagaccgaaaaggaaaatagaggcgagacaaacgagagcgagcgagagagaaacagttcgagctcaccccggcgagagccgactctcaagcgataaggggcgtgggcgtcgtcggcatggagagcgagatggcggaggagtcaccggccgcagtctcagcggcggcggcgcgggcccggccactggaggcggtcgcggaggaagggcaggaggtggcggagcagcacgaggtggcagttggctccaccaagaccatggagcgcgtggcggccgcgaagaagttcatcgaggaccactaccgcgcgcagatgaagaacctccaagagcgcaaggagaggcgcttgattttggaacaacagctagcttcttcacaagttccgagggaggagcagataaacttaataaaggatttggagagaaaggagactgaatacatgagacttaaaagacacagaatttgtgtggatgactttgatctgctcactatcattggaaaaggtgcttatggacaggttcaactatgtcgggaaaaatccactggtaacatttatgccatgaaaaagctgaagaaaactgatatgcttgtgaggggtcaggtggagcatgttagagctgaaagaaacttactggcggaagttggtagccactgcattgtgaagctatattattctttccaagatgctgagtacctctatcttatcatggagtatcttcctggaggtgacatgatgaccctcctgatgagagaggatactctgactgaaaatgtggctcgattctacattgctgagactattcttgccattgaatccattcataaacataactacattcacagagatattaagcctgacaacctacttctagacaagaatggtcatatgaaattgtcagattttggattgtgtaagccaattgattgttcgaagttgtcaacactgaatgaaaatgaaccaatgactgatgaaaaccttagggagtctatggacatcgatcattctctctctgatactgcaaatggtaggaggtggagaagtccaaatgaacagcttcagcattggcagaacaacaggagaaaattggcattttcaacagtcgggacacctgattatattgctccagaggttctactaaagaagggatatggactagagtgtgactggtggtctcttggtgcaatcatgtatgaaatgcttgttggttatccaccattttattcagatgatccactagttacatgccaaaagattgtgcattggagaagctatttgaattttccagataatccaagattgtctcttgaagcaaaggatctcatttgtcggttattatgtgatgttgatcacagaattggcagcggaggagcagatcaaataaaagctcatccttggtttcgaggagttgaatgggacaagctgtatgagatggaggcagcatttaagcccctagttaatgatgaactggatacacagaatttcatgaagtttccagatttaaaccctgctccagcaagagcaagttctggggcttcaaggaagatgatgcttaattctaaagatcttagctttgtggggtatacatacaagaattttgaggccgtgaaaggtttgcatcagtttgcagatcttcagagaagttcctcatttacaaggcactctgctggctccccatctgatacagcagatatggacgcctcaatggaagctaacgggaccgacacacacatgcgcactggttcagctggcgaccctatggcgccataatctgccctgttgttttcgtgaagtaccctgccctacaccggcatcatgcatgcacctcgacaacatggctacatctgaagagacctggttgtggacttgcatttattcaggtctggtgcccttctactatttggcgagcaccttcgtagttgtacaaaccagaggtatttgtgtagtatgtttcaggtgagacaagttgggcaggtctggccctgggtatatacttcttgacgctggttgcccaggttggcatagtattaggtcgtcgccttccttgtggcagctctttgcccgtttatttaacaataatatatattatatatggtcatgaggaagaggaaatggagacataataactgtgtt

SEQ ID NO: 149672 - DNA, 850 bp, Zea Mays
gaaccggctctgacaataggccccaccctcacggcctaacctttctctttctctctctacctcctcgcgcgccctcgtcagaccagccacgcgctcaactccacgggccttgagctagggttttcttcgccgctacctccctacgaggcgggcgtgcagccatggcgctggtgcaggcgggcatgggccttacccgggtcgttatcctcgtcggcgccggcgttgccggctccgtcgtcctccgcaacggccgcctcgccgagatcctcggcgagctccaggagatactcgacaaggggaagaaggtgaaggatggaggagggggagacggggaaaccgatctcaacgaggctcttacctcgcaggtgcgtcgccttgccatggaggtccggcaacttggtaattcacgttcaataactgttctcaatggaggttctgcacaatcaggagtatcaggcctgatagtacctgcagcaactgtaggagcactgggttacggttatatgtggtggaaggggatctcgttctcagatctaatgtatgtcaccaagcgcaacatggcaaatgctgtttcaagcatgactaaacatttggagcaagtgcaaagttctcttgctgtaagtacttattctttcctaatttatcacaggaactacaccttcaactgcataatgtgtctactatgacttctaggtagtgtttggttgggagacatggtaggatgggacggtcttgtctcattttttagagacgggacgatcctgtctgtttggttgggagagagcaagatgaccccgttttttgttttgtttgaggacataaaaatggaatcagctaaatgacatatggg

SEQ ID NO: 149673 - DNA, 816 bp, Zea Mays
gcacctctgaccaccagacagaaccaagccaccgagactgacctctgcatccatccatggcgaccaagagcagcgtcaccggcaatgccgccgctaagtcttcggcgccaaaagcagccgaggagcaggtgtgcacgctcctctccaagcggctccagcgcgtgtcgtgccactgcctccgcatcgccgcggcggtcctcgtcgtctacagtttcgccgtcacggcgtggcgcgtgcgtcaccagccgcaggacctggccttcgtcgctgccgccttatttctccttgccgagctccaggcgtgcctccgacgcgccgagcggctcgcgccggaatcgcccgccggggagaggcgccgagtgcgggccgccgtgtgggcgctgtccaccgccctcagctgcgcgttcgcctaccgcgtggccgcggtcatgccgccgccgctggccgtcctcgtctggtgcattaccgcgtccgtcggcctcgtcggtctgtgtctgcttgtgctctgcagagaccaacagtatcaagcgctccgcaacgacgatgccgcctgcgactgcgacagaagggcctctgccaagactagtcctactgatgaattggtctaaagcattcagattcaggggggcaagaaattacaaagagtttttctgaaaatgtcttggattttggtattgattttcgtgctaatgcttccctgctgccattgtttctctaaatacctcgcttggaacgacgtcatctaccaactcagatgaagagtagtgcctgcattttcgttcatcacgtataataaaaaagatgtgttctagctca

SEQ ID NO: 149674 - DNA, 210 bp, Zea Mays
atgttgacaatcgtggattttcttcgtctccaagtagtgtgtacttaccaaggcatgcctggcaacgacaaaattcatctgatcttccttgaagctaatcagcatttgcagatatctcactgctgttgtaaatgcctaatgaaaacaggtgttaagaacatgtcatctcatgtggcacctgcacagatcatacatgagatgttagcatga

SEQ ID NO: 149675 - DNA, 318 bp, Zea Mays
atgatagggcacaagaaacctagaagaaaactgcaatgcaacatgttcaatacagaatttacaagcaagaataagactattgcagttcattgccaaagcaaattgactcaccaagaccaacctattccacagccacagcaggggagccgtctgtcatatgttgacaatcgtggattttcttcgtctccaagtagtgtgtacttaccaaggcatgcctggcaacgacaaaattcatctgatcttcctgtgcaattcagaagaaaaatgaagttaatgcaaaacggctctaatagatatttgaaatacccttcgccataa

SEQ ID NO: 149676 - DNA, 1823 bp, Zea Mays
ctccccttctcgccaaaggggaagccctgcccgtacttccgttgcggcgctacgagcttcgacgggcctcgatctccacctctgaagtgactacttgtgatctagatctgaagctgtagtggtcagcagcttagtgtgaatcgaagatgagcgtggtggggttcgacctcggcaatgagagctgtatcgtggcggttgcgcggcagcgtggcatcgacgtggttctcaacgaggagtccaagcgcgagacacccgccatcgtttgcttcggggacaagcagcggttcatcggcaccgccggcgccgcgtcctccaccatgaaccccaaaaactccatctctcagattaagcgcctgctcggccgcaagttctcagatcccgagctgcagcgcgatctcgcctccttcccattccgagtcacggagggccccgatggttttcccctggtccatgtacggtacctgggcgaggagcggacgttcacctccacccagctgcttgccatggtgctgtccaatttgaagggcattgctgagggtaacctgaatgccgcagttgttgattgttgcattggtatcccggtctacttcacagatctgcagcgcagggctgttcttgatgctgctactattgcgggtctccggccattgcgattgttccatgagacgacagccactgctctggcatatggtatttataagactgatctcccagagaatgaccagttgaatgttgcatttgtcgatatcggtcatgcaagcatgcaggttagtgttgtcggttacaggaagggacagctcaagatgttgtcccatacatacgaccggtctcttggtgggagggacttcgatgaggccctgtttaagcactttgcagctaaatttaaagaggaatataagattgatgtgtaccagaatgcgcgggcatgtattaggttgcgtgtggcatgtgagaaacttaagaaggtgctgagtgccaacccagaggccccactgaacattgagtgcttgatggatgaaaaggatgtgcggggttttatcaagagggaggagtttgaacagatcagtgcctctgtgctggaacgcgtgaaagggccactggagaaggccttggctgaagctgggttgactactgaaaatgtgcactttgttgaggttgtcggatctggttctcgtgttccggctataatcaagataattactgatttttttgggaaggaaccaagacgtaccatgaatgcaagcgagtgtgttgcgcgaggatgcgctcttcaatgtgctattctcagccccactttcaaagtgcgagaattccaggtcaatgatgggtttcctttctcaattgcattgtcatggaatggagactcccagaatgcaccccaacaaacccttgtattccaaaaggggaatgcaattcctagcactaaagctcttaccatctttaaatccagcacatttgaagttgatgttttgtatgtcgacccagataactcacaaattccacaaaaaataagcacttacacaattggccctttccaaacctccaacggagagaaggccaaactgaaagtgaaagtgcgtctcaacatccatgggaccgttacagttgattcggtgataatgctggaggaggatgtggaagttccagtctcatctgcaaatgaagctccaaacgatactatgaagatggacacagatgatgtgccaagtgatcctgctgctggatctgatgtgactatgcaggagcagcctcctgcagctggaaatggagcacaagataatgaggaaaagtctgtttcgatggaaactgatgcaaaggtatgg

SEQ ID NO: 149677 - DNA, 3386 bp, Zea Mays
atctctggcaactcctagaacgttcacggccacaccgccacacccacaccacacagcagtgcagcacggcgccccgcccctcgtactcggtgagatatatccccgccttccctcgcgaaagctctcgtagagacgacgacgacgacgacgacgacgacgacgcgagaagtcgaggcgccgctgcttgctaggaccgagcttcaggaagtctccaacggccccggcgccggcacggcctgccccgcgccgccacagggattgattgtgatcagatctattctgtagtggtcagcggctgagggtgaaccgaagatgagcgttgtgggattcgatctcggcaatgagagctgcattgtggcagtcgcgcggcagcgcggcatcgacgtggtcctcaacgatgagtccaaacgcgagacacccgccatcgtctgcttcggggacaagcagcggttcatcggtacggcgggcgccgcgtcctcaaccatgaaccccaaaaactccatttctcagatcaagcgcctgctcggccgcaagttctccgaccccgagctccagagtgatctcgcgtccttcccgttccgtgtcacggagggccccgatggatttcccttggtacatgtgcggttcctgggcgaggagcggacgtttacccccacccagctgcttgccatggtgctgtccaatctgaagggcattgctgaggggaaccttaagactgcggttgttgattgctgcattggcatccctgtgtacttcagtgatttgcagcgcagggctgttcttgatgctgctactattgcaggcctcacgccgttgcagctatttcatgagacaactgccacggcattggcttatggcatttataagactgacctcccggagcatgaccagctaaacgttgcatttgttgatgtcggccatgctagcttgcaggtcagcattgtcggttacaagaagggacagctcaagatgctttcgcatgcatatgaccgttctcttggtgggagggacttcgatgaggccctcttcaagcacttcgcggcgaagttcaaagaagaatataagattgatgtttaccagaatgcccgtgcatgccttaggttgcgtgtggcgtgtgagaagcttaagaagatgctgagcgccaacccagaggccccactgaacattgagtgcttgatggatgagaaagatgtgagagggtttattaagagagaggagtttgaacacatcagtgcacctgtgctggtacgtgtcaaaggacccttggagaaggccttggctgaagctggcttgacaactgaaaatgtgcactttgttgaggttgtcggatctggttctcgtgttccagccataatcaagataatcactgatttttttgggaaggagccgagacgaaccatgaatgcaagcgagtgtgttgcgcggggctgtgctctccagtgtgctattctcagccccactttcaaagtgcgggaattccaggttaatgatgggtttcctttctcaattgcattgtcatggaaacaagactcgcagaacagtgcaccccaacagacccttgtatttccaaaggggaatgtaattcccagcattaaagctctaaccttctataaatccagtacatttgaagttgatgttttgtatgtggacacatgcgactcgcaaattccacagaagataagcacttacacaattggacctttccaaccctccaaaggtgagagggccaaactgaaagttaaagtgcgtctcaacatccacgggattgtcacagttgattcagctatgatgctggaggaggatgtggcagttccagtctcatctgctaatgaagctccaaaggatactacaaagatggacacagatgatgcaccaagtgatcctgtctctggaactgatgtgaatgtgcatgagcctgatactactgaggctgctcctgcagctgaaaatggaacacaaaatcccgaggaaaaatctgttccaatggaaactgatgcaaaggttgagccatcaaaaaggaaagttaagagaacttctgttccggtccatgcgttggtctatggtgccttggctgcagctgacctgcagaaggctgtagagaaagagtatgagatggctcttcaggacagagtaatggaagaaaccaaagagaagaaaaatgctgtggaagcttatgtctatgacatgcgtaacaagctctacgacaggtacaacgattttgtgacacctgaggagaaggaagggttgattggaaagcttcaggaggttgaagattggctatatgaagatggtgaggatgagacaaagggagtctatatttctaaactggaagatcttaagaagattggtgacccaattgaggcacggtacaaggagtcgacagaaaggggttcctctgtagatcaactggtctactgcatcaacagtttcagagaggctgctttgtccagtgaccaaaagtttggccatatcgacatatctgagaaacagaaggtcatcaatgagtgctctgaagtagagaactggttgagagagaggaagcagcagcaggacgccctacctaagcacaccgatcctgtgctgctcgtatcagatctgaagaagaaagctgaagcacttgacaggttctgcaaaccgatcatgactaaaccaaagccagctccgaagccacagactccgccaccacatactccacctccacagcctgaagcccaagcatctgaccctcaaacaccagaacaacaacaaagcgggactggtgcagctggtgagccgggtagtgagggaggtgtgcagcaggcctccggtgagcaaatggacatggacaggcccgatgattctgcggatgttgcggcataattgtggttgtggttgtcatctgtcttatgatcgatcaaaattttctgtttgtctggtaggtggatgagttaaggcaacagcatattctcccaagcgatttcgttttagggtttggaacattgagattgaggtaatgcgtcttgtccagcgttgttttggtctggactgtgaatcagaatagaaacgttgcatgatcgaattgcgccattagatctcataatcaaaaaacgtggatgattcgacaaaaggtatatttatctggatgtttcatgttaattcatgtcacatggattccttcagttatgctgtgtcctgttcctttgaatgctccaaagaacacaaaaggctattggtttctaaacgcttttgtgcgggtataattaaagcagccttttacttgttgcagtctcttgtaaggtgtgtgaactgcttcctcagccccgtcctaaaaaataaagtgctcacttatcgaaaagttttaaatcgcgagatacgcccgaatctcgaaaaaaggcaaaaaaaaaaaa

SEQ ID NO: 149678 - DNA, 2261 bp, Zea Mays
cgtacggttcctcctcctcggcacctcccgtgtgcaagtggcagggccagacacggcgggggccccggcattactcccccgccataaattctccgccgccgcacaaggcagaacggaagaggtgtccccgctccgcgcccagcggtaaccccacccaacccctgtgagctgtgacacagctgtactcctctccccactccaggcgctcacactcacatccccttccctccacaggaatccgccgccacaatcccctccgctccacattgtgggattgagccgaacacaagcaccctcctccccgaaacctcttctttgccctgctttcggtggtatggtgcgatgatgactagggaggctgtgctgttgtccctcctcttctgcctcgccgctgccggcgaggcagtgtcactggtgagccagggcgaggcggcggagctggcggtgtcggtggacccgtcgtggcgcttccccagccagcggctgcgggacgcgtacttggcgctgcagacgtggaagcagcaggccatcttctccgaccccaggggcttcaccgccgactgggtgggcccgggggtctgcaactacactggggtcttctgcgcgccgctgccgcggggggtgccgggcgccggggagctctccgtcgcgggcgtcgacctcaaccacggcgacatcgcgggctacctcccgacggagctcggcctcctcgccgacctctcgctgctccacctcaactccaaccgtttctgcggcctcgtgcccgccacgctccgccggctccgcctcctcgtcgagctcgacctcagcaacaaccgcctcgtcgggccgttcccggccgtcgttctcgacctcccggcgctcaagttcctcgacctccgcttcaacgaattcgagggcgccatcccgccggagctcttcgaccgcccgctcgacgccatcttcctcaaccacaaccgcctccgctcgccgctccccgacaacttgggcaactcgccggcctccgtcatcgtgctcgccgacaacagctttggcggatgcctcccggccagcatcggcaacatgtccggcacgctcaacgagatcctcctcatcaacgacggtctcgactcctgcgtcccgccagaggtcggcttgctccgggaggtgaccgtcttcgacgttagcttcaactctctcgtcggcccgctgccgcagcaggtggccgggatgcgcaaggtggagcagctggacgtcgcgcacaaccgcctgtcggggtccgtcccggaggccatctgcgaccttccgcgcctcaagaacctcaccatcgcatacaacttcttcaccggcgagccgccgtcctgcgcgcgcgtggtgccacgaggcggcgacacgaagaattgcctacccagccgccccgcgcagcgcacgccgcagcagtgcgccgcgttctactcgcagccgcccgtcgactgcgcctctttccagtgcaagccgtttgtccctgttccgccattgccgccgccgccgccatcgtaccccggccccttgccaccggtataccccatgccgtacgcatcgcctccgccacctgcgcattaccgatgattcgctgcgggagagaagcaatatcactttcaccttaaattcgccaccgccgctgcgctggacaaagttcgccgtcacaattgtatgtggtcagtcattgttgtgcttagattagtagtgttcttgattgatagctactggcatatagaagtttattattataaggtgcatatatcgtccttgcttttgcattggtcgttctctgtttttcgcgtcgatcggggtttgcgtcacggtgatggtgaaatagatggtcagatggaggtgaaaaggattggagggaacaatttgagtttggattgattgctaattggctgactgcttgagagagaggtcaggatgacgaggaggattggttggtgacttggcgccaccttgggcctcggatgtatagggggaattgagcataagttcttcagttaagctactgctttcagttgggagcccggagataagttttcagaccaaggaatgtaccccacttaactattctttttgcatttttatgtctcagctacttactgttaatcgattgttatgatatatctgtttcgattcttagaaggttttggtcctttgcttgctacttagtgttgtatggttcacgtatttgtaacgtgaacgacaatattcgtttaagtccaaccgtaattggatatctttgataccgtgct

SEQ ID NO: 149679 - DNA, 144 bp, Zea Mays
atcgagatatcgagtctgattctacaggcaagaaaaacatgcgagaccaagaatgcatgtgatccagagaccaagaaaaacatgcgtggccatgaaaatctacgcggaggtgtgcgtgcaggcgatctcgacgagcacacggtt

SEQ ID NO: 149680 - DNA, 816 bp, Zea Mays
atgaggacggccgccgccacggtgccagctgcccctgcgcttggcgttggcctccagtcccaactcccaatcgcagcagcagcaggcaaggaaggcccagcgctgctggcttctacagatgccaagagaattattgacgaagaaagagctaatgctcggttggagataggaagggctaaagcttctgtacaaaaaattcaatcagcacttaaagagcaggaaaaattttctcacagaactgggaagcaggatgtcgatgaactaaaagaagaagttcaagaagcaccaagagtgaaaatgttgcattgcccaagcaaggcaatggacattgagaacgagatccaagttctgtgtgatcaactggctaaaacatcttcatattctcttcgccttttgaaagtgatttctggaacagttcaatccagtggtttcgcatacagcctgaaggaagcaagaaagaaattatttgaggttgaacaattctcatcctacaaagcaccacaaaaccagcatatgctccagaaccacatgatgtgggccggtacacccaagctgaagtcaaatctggtggccaaacatcaatcacaaaaactgctggttcagtacatcctgttcttcagtttcgtagctgcaggattggttcattatgtagaggctcttgtaaggcgaagagaaactggttatgatgtagtcattcttcaagtgaatggagttgctcaggctgcagactctgttcacattctttgcatcgggagattgcagatgagacttgctaaagaaaagacgatcatcgtgaaggagttctattccacgtag

SEQ ID NO: 149681 - DNA, 752 bp, Zea Mays
atgaggacggccgccgccacggtgccagctgcccctgcgcttggcgttggcctccagtcccaactcccaatcgcagcagcagcaggcaaggaaggcccagcgctgctggcttctacagatgccaagagaattattgacgaagaaagagctaatgctcggttggagataggaagggctaaagcttctgtacaaaaaattcaatcagcacttaaagagcaggaaaaattttctcacagaactgggaagcaggatgtcgatgaactaaaagaagaagttcaagaagcaccaagagtgaaaatgttgcattgcccaagcaaggcaatggacattgagaacgagatccaagttctgtgtgatcaactggctaaaacatcttcatattctcttcgccttttgaaagtgttggagctgcatcgaagttacggggaaaatgacatgcccttgtatgaactaaagggtctagaaactttaggctcaacgttgcacatagttgttcacgactgtgcctctgtagatttctggaacagttcaatccagtggtttcgcatacagcctgaaggaagcaagaaagaaattatttgaggcaccacaaaaccagcatatgctccagaaccacatgatgtgggccggtacacccaagctgaagtcaaatctggtggccaaacatcaatcacaaaaactgctggttcagtacatcctggtatggtttcctgatggatggattgtccaacacatacagctattgtttaatt

SEQ ID NO: 149682 - DNA, 1637 bp, Zea Mays
ctacaaacgcctgctgcaggccgcttccttcccctgcctgctgtctactcgcggataattttgcaggtaacctctcgtctctcccgagcacagcaaatccatcaatccaacagaccaacacaaacccaacctgcccccggccgatcgcgcaaaccctagcgccgtcgcctccctctcggttctacaccgtcctctccagcctcgcccgcgtgcaccgcagatcaggggacgtacgtcgcccgcgcgcaccgcagatcaggcaacgtacgtcgcccgccggagatcggaattctgtatttttttccttctgtgctcgcggctgctacggcgatggcgggcggcgggagcaggcgcgccggcgcggcggagcagccgaagatcggcagcggcaacgtcttcgccgcgctcgagacgcttaagaagaagaagaagccggcggacaagggggccaagcccgccgccagggaggaccccaagccagaggtcttctgggcgcccgcaccgctcaccgccaagtcctgggccgacgtcgaggacgacgacgatgacgactatttcgccaccaccgcgccgcctcccaggcccgtctggggggacgcccaccgcgacgctgccaaggaccagcacgacgcgcccgcactggaagaggagattgagagtgaagatgatggccttgatgatgaggttgatgatgacgctgatgaggaccatgaggataaagcagatgatgctgtccctgctgaaccaaccgtgaagaatgcgacagctccacctgcaccacccaaagatactgaaagacaactttccaagaaggaattgaagaaaaaggaactcgctgaacttgatgctgttctggctgagttgggccttggcacatcaaacaattccatacaagaggaacccaatggtaagaaaggtgcagatcaagttgcagatggagagaaaaaggaagatgcacctgctcctctagaaagcaagaactcaaagaagaagaaatctaagaaagaaaagtcttcaaaggagctaaaggaagcgcaggatcaagccaatgggttggaagcagcagctgttgcagaacctgatgaagatacagcctctgtggatgtcaaggagcgcataaagaaggtagcctcgatgaagaaaaagaagtcaagcaaagagatggacgctgcggcaaagattgctgcatccgaggccgcagcgaggagtgcccggcttgccgctgcaaagaagaaagagaagagccactacaaccagcagcctgtgcggtgaactcccctgatctgaggccgcagcgaggagtgcccggcttgccgctgcaaagaagaaagagaagagccactacaaccagcagcctgtgcggtgaactcccctggtctggtgtctctagaaaccttttgagctctgatgtcccctgttcgttttggacctgcaataaaacttttgagactgttttttgacatggtggaggtgccgtctgatgctcgttttgggaattaaattacatataggtacataggggttgtcttgtcgctggattctgtttggtgtaatgagctatgaactgttcgtcaatcgtcatatgaaccctgctgactatttatatggaaaatgtgggatatttgatacctaactaa

SEQ ID NO: 149683 - DNA, 917 bp, Zea Mays
cacaacagctacaactacaaacgcctgctgcaggccgcttccttcccctgcctgctgtctactcgcggataattttgcaggtaacctctcgtctctcccgagcacagcaaatccatcaatccaacagaccaacacaaacccaacctgcccccggccgatcgcgcaaaccctagcgccgtcgcctccctctcggttctacaccgtcctctccagcctcgcccgcgtgcaccgcagatcaggggacgtacgtcgcccgcgcgcaccgcagatcaggcaacgtacgtcgcccgccggagatcggaattctgtatttttttccttctgtgctcgcggctgctacggcgatggcgggcggcgggagcaggcgcgccggcgcggcggagcagccgaagatcggcagcggcaacgtcttcgccgcgctcgagacgcttaagaagaagaagaagccggcggacaagggggccaagcccgccgccagggaggaccccaagccagaggtcttctgggcgcccgcaccgctcaccgccaagtcctgggccgacgtcgaggacgacgacgatgacgactatttcgccaccaccgcgccgcctcccaggcccgtctggggggacgcccaccgcgacgctgccaaggaccagcacgacgcgcccgcactggaagaggtccatctcgcctgaatttcatcccgttttctttctcttttcattgagctttgtggatagctgagtctcacaatgcgtctttccaggattttcttttctttttattgttatactaagtctatgtttatgttttatatatgtactcttgatggtggtatgtagaatgatcttgaagacaattgcccgcaggtgctaattttagtatcgtcttcgagtggtttcatggaataagatctgcctagtgggtcataggta

SEQ ID NO: 149684 - DNA, 697 bp, Zea Mays
aattaatctcgttgacattgacatcctatctcctctctatatctaggtattgccttgccgtgtccatctctgcagcaatggcttctgatgccgccggcgccggcgccaccgccgccgttctcgccattctggtcgtatcttccatggggcatccaaacaaagggccattatgcagcgagtgtgggtcgctgtgcaatacgaactgcactgcagaggctgccaactccacaacctgcagaagctactgcgacaacgacaccacggctgcccgggaggactgcgaaaggcaggtcctccaggggtgccaggcggcctactgcagctacggcacctgcagccgggactgcaacttggaagcccagaacgcctgcctttctatccatgacgactatacagattgccaagcatgcaagcaaggtatgttccagtcatgcttccccacctgccaaagcaactgcaacagcacctgcgtcaagaaagaacatggatgctgagcgtttgatgcgagatgcgatgcgatctcggacaatatgcatggaagacgattagctacgtatctatcttgatttatataaccaatggtgattggtgatgaataatattgatgagttcggtcacaaaagaataaaggctctaagatatatgagcttgggttgtctgggtttataataagaaattcaaaagcaagtctttttaa

SEQ ID NO: 149685 - DNA, 216 bp, Zea Mays
atgtgtaacccaccaagtcggacatgtggaattattacctgtccttgcaaattatttttttacatgtatgtatgtacacacaattcagacctgtggaattataatttattgctgcaaattaatcttttgacatgtatgaatggcacttctgttgctttcttttctgtcaagagcagctactatggagagtatataaatctagttgtcctacattaa

SEQ ID NO: 149686 - DNA, 342 bp, Zea Mays
atgtccacggccaggtactcgaggcgcttggcgcccgtgggctcggggaggctgccgaccagcgcgccggccgggtccgggatggcgtcgcgggcccaggtgggcgccacggagacccggtccgccccgcgcgccagctcccccaccgcgcccatgaacttggccgcgccgagcccgtccgccaccgcgtggctgaaccggaagcccaccacgaagccgccgcactcgaacgctgtcacctggacgagtaggatcagcttgctctcctcctggtgggtaggcctcggcagcgggtgcggcagcaggtcgtccttggggatctggagcgggtactcgaggtag

SEQ ID NO: 149687 - DNA, 98 bp, Zea Mays
gtggcgggtccgagcccgaggtcgggcgaggcggaggctcctccgaggtcgaggtcgagtctgagccctggggtctgtaacgcccaaaatgtgtatat

SEQ ID NO: 149688 - DNA, 548 bp, Zea Mays
cacccccgtcccgattcctcctcctctactctcacctgcgtggctgcgccacaattgccaagctcttctactcctgttcctcccatggagctcgcagcgtctgcttccgcctccgtctgctcggcgtaccaccacctctcggtgccagcggcggccgccgatgctgctgctactgaccgcggcggcgcgcaggagacgacgacgacgcggctcgatcggcggcggggcaagcgtgccggcggtggctgcgcggggctccggcggcgttgctacaaagtgctgaagcagcagcggacgcggctctacatcctccggcggtgcgtcaccatgctgctgtgctggcacgagcacgacctgtcagactgagcgtgggcagcgccgggggcgaagccgggcctggtttcagcgctcgatctttttcgttgcgtaggttcctagtgggaggatatggaggagatggaaaggagtttttctttgcggccggctgccggcctgtgaaaatgtccagatgctggtggaatcaagtggttttcaatttggtgtgtatt

SEQ ID NO: 149689 - DNA, 387 bp, Zea Mays
caacgccattttcgtgcctggatagatcgtagatctacgaggtagcatcgaatggctctcccgtaggaagggtagagcctccgtgtggtggcctccagatcgcaactccggttcttcttcccaccccgcggcgcatcgacggaccgaattttggcgaagagaacgcttggagcgcctctatcccctccacgatggaggccaggtacacagcaaccgtgccagggaacaacaccgttttgatgtcgttttggaggatctacgccctcgtggcatgcttggtggccggacttgccctcacctctatcccctctaggcctctgtgatggaggctgggtactcagcggccatggcccaattcgccgctctcgtgaccggggacgccgatgt

SEQ ID NO: 149690 - DNA, 2570 bp, Zea Mays
gggatcctctttctctcttccggtcatcccctgctcgcacttctccaacccacccggccgctaaccaaacactagtggtaccaccaaatggggtacctctcctgccgcgcggactcgtctgtggcgacgtgccgctccatcacggccatcccgccgctcccaacctcgcgccgctcggggccgggggccggctcgtccaggcccgcgctgcctccggcgccggcggccatcgaacgcttcgactacgcggaggtggaggcggccacgtcccacttcgccgacgcggcgctgctgggccggggcagccacggggccgtgtacaaggccgtgctcccgtcgggccgcgccgtcgccgtcaagcggccctccccgcgccgccccgaggtggacaacgagatccgcatcctctcctccgtcagcggcccgcggttcgtcaacctcctcggcttctccgacccgggccccgccccggcccccgccgcgcgcctgctcgtcgtcgagtacatgcccaacggcacgctctacgacctgctccaccgcaacccgcgcccgccgggctggcctcgccgcctccgcctcgcgctccagacggccagggcgctgcgcgcgctccacgacgccgacccgcccgtcatccaccgcgacgtcaagtccgccaacgtcctgctcgacgccaacctcggcgctcgcctcggcgactttggcctcgctctccgcgtgcccaaggccgccggcgtcgccacgccggcgcccgcgggcacgctcggctacctcgacccggcctacgtcacgcccgagagcctcagcaccaagacggacgtcttcagcttcgggatcctgctgctggagatcatgagcggccgtaaggccatcgacgtccagcactcgccgccgttcgtcgtcgagtgggccgtcccacttttgcggaaaggcaaggttgcctcgctgttcgatccgcgtgtggcgccgccgcgcgacccgctcacccgcaaggaccttgctgcgctggccgctagctgtgtgcgctcgtgcagggagcggcggccctccatggccgacatcgtccagcgtctcgtggttctcagcaaagcagtgtcggccaaggtgtggaacgggctcgctgtggtggggaacccttgtgcggttgttgatgttcagaccatctcgaagcgagctgctgccagcaacagagctgaatcagagagggagtcgagttcagcattggcgtttgacgatgacgaaaaggaggaagcagatgcagagcccttggacgaggatcaggtgccattggtcggtgccaagaagttaccccagccactaaagaacgggatagtgttacctgagtcaggggctcgggagaggagaaatctgttggacctgatggcccggatcgatggcgttgccagccaaagattcggcattagcagagcaagaacagtgcgcgctactagcgagcttattgaaaaggatgcagtgttactcctaaggaggaaccagacggtaagagttgttggatctaaggcactgccaaagtctgaaaggatttctcgttatgacgtgaagatcaaacacaaagcagttgaagagcaagagaaggcagggaaagtccaagagaaagcagagaaaatccaagataatgcaggtggggttcaagaaggttacaaagaaatattaggcaaaacaggtaaattgttagaggcactggagccaaacgctgacaaagaagagaaggttcaaggaaaggaagaacaaaaccttgaaaaaacgaaaaatgttcaagagaatgaaggcagactccaatgcacggcagagaaaatccaggaaagtgaaggaggaatccgagacaaagtataaaagttcatctgaagactgaggggagttaaatccatacaatgttcttgaggttggcttaatcaactatcatctggcagcaccacgctgtgatcagatacaaatctcattcctcgggaatcatcttggcaatcgggattgtaccagaaatatttcctggtattggtgattggctaatacagccttgaattcagatccaagcgatgtgatctgccatttggaacgcccccaatgacaacaattccccagctattgaatcttggttctctggtgatggccaatgcaatggcttgcttgcggtatctcctagtgtagctcagattgaaacaacaaagaaccgcagagcttcagattcaatttatgcaactggtgaacgtttcgctgcttcaaactgaatcagatggatgaccactagttgaagcggattgttcgttgttgtagactgtagtattcttttgtagcttatttttgctgcctgcatacaacaagaagcacaagtgtggaattgttttgtatatatgtaggcatgtggtagctgagttgatgttaacttgttaagaaatttttggtttttgcatttccacctcaggaaggtacatatagtggatatgttttcaagcattgtgttctagactgctagtccagatatgtcggcttcattttatgtgttggacaaatagagtactgcataaatacaagtgtgaccacttgtgatcaag

SEQ ID NO: 149691 - DNA, 2343 bp, Zea Mays
gtcggatcgcgcttgcggcttgccgcagtcgatccgaatcgcaacgcccgaatataccactcctccctgcttgcctcccgctgatatgatatccgtccattccaatccccctcttccgctccgcctccctctagctcctctccctctcgcagccatcctcgtccccccaagaatccggacgtcgtttgtcccctccttttctgggcgtttacatctttaagctcaaagagaaaggattatgaaaatggcgcacttgatcactaattgcagctttcagacattctcgagttctcctaattactgccgcaatattgggcaactacagaactcaaaatcttcaaatctgtccctcaaatcttgttccaggagacaaaagaagtcatatgttacctgtgctagcgctgccgtacaaggacagacacaaacacctcttactggtagccagcaagcttatgagcattcatcctccaaacctaaaaaggtaatggttattggtggagatggatactgtgggtgggcaacagcacttcatctctcaaacaaaggttatgaggttgcgattgttgataatcttgtccgccgtgcttttgataaccaactcggtcttgattcccttacccccataacctccatccagaatcgtgtccgtagatggaagtctctcactgctaagacaatccagctctttatcggtgacatatgtgattttgaattcctctcagaagccttcaagtcttttgagccggatgccgctgtccactttggcgagcaaagatccgcgccatactctatgattgatcgttcgcgggcagtctacacacagcataacaatgtcattgggacacttaatgtcttgtttgccataaaggaatacagtgaagagtgccatcttgttaagctaggaactatgggtgagtatggaacaccaaacattgacatcgaagaggggtttatcactattactcacaatggaagaacagacaccttgccttatccaaaacaagccagctctttctatcatctgagcaaagtgcatgattcccacaacatagcatttacatgcaaggcttggggtataagggccactgatcttaaccaaggtgtggtctatggtgtcagaacagatgaaactgcaatgcacgaagagctatctaacagatttgattacgatggggtctttgggaccgcactaaataggttctgtgttcaggctgctgttgggcatccacttacagtttatggaaaaggtggtcagacccggggatatctggacatcagagacactgtacagtgcgtggagctagcaatagccaacccagccaaacctggcgagttcagagtcttcaaccagttcaccgagcagttctctgtcaatgagctagccaaactggtgactgcggcaggagcgaagcttgggctagaagtggagaccaaatcgatacccaacccacgagtcgaggctgaggagcactactacaacgccaagcacacgaagcttattgagctcggcctggtgccccacctgctctcggactccctgctcgactcgcttctcaattttgccattcaatacaaggatcgggtcgacacggcacagatcatgcccagtgtgtcgtggaagaagatgggtgccaagccacggacagtctctgtttagagggtgattcaacttcccctgggttataatatcaaccatggcattgacattattgacatatgtaatgtaataattatgcacgttagtatgatttgctaggtagtgaggtgtttattacgatattaaattatattgttgcccgtgcaactcaagagttcatgtcagttgattctgctgctcactcgagccgccttgaggtcttacaatgctcctgagggttaagctgtcacctgtcacatgttgccatttcgctgatcgaactctggtggaacagatatagatcaagatcttgcaagaattgttattagttttttcggataatggaaattgtattccagcttttttgcattgtcatgcagacagccaacacgaaaacaaaacactaatcagaacatatcaccaacatcaaagaagagagaaacactggttttaaacaatatgaatttaaggagcttcaattcttgcattagatcgccatccatggcctgcgaatatgggcaaatggggaaatagtgtttctagctttagcaaacaatgaaccatgtcacacccggatttaaggacaaatttaggcgcgaatcaaatgtgtgttagaatcaaatctcacacatatgatgacccatgttacagaaacgaatgccacatctttaatatataatagagttttgtacaaaatagtaaaataa

SEQ ID NO: 149692 - DNA, 108 bp, Zea Mays
tcgatgtacgtatatctagagagaacatgtcttatattatgggacaagaataaaatgagttacgcctcgtcttatgggttgaaaggagtaattaaaaatgattttaat

SEQ ID NO: 149693 - DNA, 853 bp, Zea Mays
atgcatatatcgcctggcggcagtgcctatgcatgtgcacgcacggcaaacgtactacttgtccgacatcgatccaaccgtcataaatcgagcgggactccatgggccaaggagctgccaaggcgaagcaagcggcggcggcggttgaggaggcagtgcagaaaagccccgagaagaagaatgacgggaagaaggcgctcaaatccagcgacgcagacgcgctcattgagttcatgaggaagaactacgacagcaaggtgaaggatgtgaaggagttcgatgacttctaccacgccatttacgagctcatcgagaaattttgcgaggaacgtgggcagctgcagtacaggataccacccaaggacgagctcaaggaaaagtacgagaggttccacacggggaaggggcggaacgtgacggcgcaggagttcgagagcatcgccagggccatcctcaagatagacagcttcacgttcggcaaggcggccattgacatcctcgtcgtcctcttcggcgtgcccgtgtgcgcgctcctcaccaagaggatcgtcccgggcctcaacgccatatccgacgacatcgtcatcccggcagccacctccggcgccgtcgtctacctcgccaagtccaacaagctctaaataataataataatgtaacccccaccaaaacaaattaagttgtgtatattattacatatatatatcgtccacttgctttccagaaagtaatttcatctattttaccggaataaatgccagtgagctgtgagtctgtgccctgcttggcttgatcgcgtccagaattgtaaaaacgacttaaaaagagttaattcgatcatgacatattataa

SEQ ID NO: 149694 - DNA, 610 bp, Zea Mays
agcattatcaaggactatagacctttatacgattacaacttaaatcctaaagatttaaaacactaatagaaaatgtccattaagtagctttcatattttaaatgaagcggaccaaacgatgttgctcacctccaaataagttagaccacgataaacaggataatgataaacatttatttgagactattactctaaacgatcaatgtccaacttcgacgtttaccaatcaacgaacatggattataataacaactaacgtaggacaccgatcccatcatataaacatctttcatcaaaagcagcactaacaacctatcaactaaacgttcgagacccgaaacctgttgttcgtattattaattcgaccttgtatcacacacttaaacatattcaacagcgaggaaaacacgttgtatgatgagacgacgtagcgtgaacaacggttctcaccggcgtgggaggcggaacgacgacacgcagggacttcgcgagctgggcgcggcatggggagtactgtagacgggcgacggcggccatgggagacaagggcctcggctgggagcatccatgggaggggtcttggcgagcagcaggaagatccggtcaggcg

SEQ ID NO: 149695 - DNA, 1345 bp, Zea Mays
atggcgacggccttctcgccgtgggacccatgcccatccggggccggctcctggtgccaaaactggatggcacccgcggacgacacgggcggattgccgtggccgccggaggcggcgtctgcgttgacgaggccgagcgccgcggcggcggcggcggcagcggcagcagccgcggcctggcgcgacgccgcggagccccagagccctgccgccagcgaggcgccagacgaggcggaggcggcgccggcattgaaacccagcgagaggtcgtccccccggccggcgccggcgggcgacggaagccagctcgcgatcgccgtggtgtccgacgggaagcgccgccccgacggcgacggcgacgccacgcttactcgtggagggcagagcggacgttctgagctgacaggatcaggcacagtggtcgtctaggctacgcggaaggaaggagagcttcctagctagaaagcgcaagaacacaaggtgctctctataggaggagctactagctaggagtacactgcactccttttctccgtccctcgcatcacctccactccactataaagaaatctctgtctagttgcgggagcactcaaaagacctagtccctagcctagaagctagggagcgacgcctacatactagctagctagggcctaggagcagtacccctaggtgcttcgtctctctctatacgcggggtcagctgtcaattgaagtactactactacttttctctgtccttttcttccttgcttttccatagattaacgggtgaagggcgtggtagtgaacgaccggacgaagaggatcgaatcgtcggcgtggggaccgcctctgagaaattcctctgcgcggcccgggatcgctcgccacccggcctctgccccttgggtagacacgagctctgccttgctgctgccgccgcctgcagtgcaggcccaggtcaggcgtgcaggcgcagcgcgcagggtggcgctggctggactgctctgccgcggggcgcgttaaaggctgtcgctgcggcgcgtccggctgcgcaaaggacatgcgcgccaggcactaggacggcagcctagttgccgcctagatcggcagcagcgcgccccttccaggcgagcttatccgtcttcgcaactcgcagtgaccgtaccaccggctgcggctgggcaatgcgatgcgcgctctgctgtctgctcgcctgcccgggaacacagaacacggctgggtcgctcctcccgggtggtgctgcgggttaatggcgcggcagggtagatccttttttttccatcccactgctcggctggggtagggcagccaaacgagcggtccaagcccatctggg

SEQ ID NO: 149696 - DNA, 429 bp, Zea Mays
atggcgacggccttctcgccgtgggacccatgcccatccggggccggctcctggtgccaaaactggatggcacccgcggacgacacgggcggattgccgtggccgccggaggcggcgtctgcgttgacgaggccgagcgccgcggcggcggcggcggcagcggcagcagccgcggcctggcgcgacgccgcggagccccagagccctgccgccagcgaggcgccagacgaggcggaggcggcgccggcattgaaacccagcgagaggtcgtccccccggccggcgccggcgggcgacggaagccagctcgcgatcgccgtggtgtccgacgggaagcgccgccccgacggcgacggcgacgccacgcttactcgtggagggcagagcggacgttctgagctgacaggatcaggcacagtggtcgtctag

SEQ ID NO: 149697 - DNA, 426 bp, Zea Mays
atggacatggagcacgccgagatcgggcctaggagatcctgcgcgcaggggcaaaggctccctgttggggaggttcacaggggcgtgccatggagcagggaaggtcgcagccaagaggaggtcaagggcgccgacatgctcccagggagctcggccatggctgcatctgctgggcgccatggaaaagcagggggcacgggcgccatggctaggaggaagctcctgcgcgcagccgtgaggaagacaggaacagggagctcgcagggaggagcggcgaccggaaggggagctcggctagcgtccagcttggaggaaggagctcgccgcaggggccgtcgggacctgggcgtccctgctggaatggagctcggccagggaactgctccctgcgcctgcaccagggaaggagggtggggaggaagatga

SEQ ID NO: 149698 - DNA, 649 bp, Zea Mays
ctccctcgccatgggcaacggcctctccccttgtctgtgccccgggtacgcgcgcggcgctgcggcgcggctggtgttctggggcgggtcatcgaggatggccgacgagcggccgtccatcaccgccggggacgtcatggcggagctccctgaccagcacctcgtctgcgccgcggactccttctttatcggcctgccagtcccggccctctctccgtgcgagcggctcgtggccgggcgcacctacttcgtgctccccgcggcacgcttctcctgcagccaggcgctcaccgccgcgacgctctccaagctctcgccgtcctccgccgcgaacgtgcccctcgccggcgcagcagcgtccccgttcgagtacgtcacgggctctgacggtgcgccgctcatcaggatcttgcccgagttcatcgagaaggtgatcacgtcgtgcggcggcggcaagtgcggcgccgtggcggcggagcagctgtgcagcacgccggagctgaggaagcactacatgcagctcgtgcgtgcgcgggcggagaggccgtggtcgccggggctcgagacgatatccgaggccgacaagaggaggaggatgccgtcgccggtgaggctggtcgggctggcaaaggcttcttctagatagccg

SEQ ID NO: 149699 - DNA, 364 bp, Zea Mays
ggcaaagaaggtgcccttccaaggggggcccgagccatcactgagatacccactctggaagagctcagatctaaccttgtgtcaaacccatggggccaagggaccaaaggaactccacaaagggcattccaaaaaaactaaaaaacaacaaatccatgttcaataaaccacttctctgaaatgtggcacatgtaacatgtgaacattggcatagcagaatctaataatttatttctgttgttcccaagataaatgccgaagtgataaaagattatattctattgtagaaaaaatggaggattcatgcaatagtagacaagggcaaacagcctaacaggtcatctgcctccaaatagtcatgagt

SEQ ID NO: 149700 - DNA, 1349 bp, Zea Mays
gtcagtgtgcgttattataagattttgatgcagctcaaaaggctgtccgtttcaatttggatcacacattaattctcctagtagcaatttatagcctaaataaaaaacgcgaatcgaaacggcaatcgatcgtcaaccatgcatgtcaggtaaaacaacacaccatgagaaaactggcagcgctcatgctcatcctaggtggagctctgggtgtctctgcgcgtgtgccatgcgctggcgctgctgctgccgccgcctgcaggagtgcatccataacatccctcccctcaaccttctcttcctccacttcttctccgacgcatcagcagctctctcaggtggcggagtacgtagcagcaccggcggaggcttctgcacctttatccatggcctccatctccgtccccgaccccgtcccttccgcaaccgaggacgccgagaacattaggaaagcagcagtgcaaggatggggccccgacaagaaggcgctgatggagatactgggccaccggacggcggcgcagcgcgcggagatcgccgcggcctacgcgggccgctacaacgaatccctcctcgacagactccactccgtgctctccggcgacttccggagcgcgatgatgctgtggacggcggacccggcggcgcgtgacgccaagcttgcccacaaggccatgaagaagaagggcgagcggtacgtgtgggtgctcatcgaggtcgcctgcgcgtcgacgccggaccacctcgtcgccgtcaggaaggcctaccgcgagtcgtaccccgcctccctcgaggaggacgtcgccgcgtgcccgctctacaaggacccccgcgtcaagcagttcttggtgcgcctggtgagctcgtaccggtactccggcgatctcgtcgacgacgagctggcgagggcggaggccgcggagctgcacgacgcggtggtggccaggaagcagctgctgcacggccaagtcgtgcgcatcgtcagctccaggagcaagcagcagctgcaggccacgttcgagcggtacaggcaggaccgtggcaaggccttcgacgaggtactggaggaacgccgcagcgaccagctcgcggcgatgctcaagacagcggtgtggtgcttgacgtcgccggagaagcacttcgcggaggtgatccggaggtccatcgtcgggctcggtacggatgaagaatccctgacgagggtgatcgtttcgcgcgccgagatcgacatgaagaaggtgaaggaggagtacaaggtcaggtaccgcacgacggttaccagcgacgtcaacggcgacacttccggatactacaattccatcttgctcactctagtaggccgtgagtga

SEQ ID NO: 149701 - DNA, 959 bp, Zea Mays
gacatcatggcaagcatatgacatcaatgggtacacattctacactaaatcaaaagacatgaaaagtgttgcacaaaatagcggtgttcgtatcgatgcttttgacctacatggacagaagaccacatattttggattcatagaggaaatatgggaacttgattatggcccaagcatgaaaatacccttatttaagtgccaatgggtacaacatcccgtggggtgatagtggataactacgaactcacactggtatacttaaagaaagtaggatataaagatgacccgtgggttctcgccgaatgtgttgcacaagtgttctatgtactcgatccagcagatgagaagatgcatgtagttatttctggaaagcaaaaaattgttggagttgagaatgtgggagaccaagatgaggaatacaataagtatgaagagatgttcgtctttaacggtccagagagaatcaagcgtgtggaaaagaaaattgataagaacttaaagccatacatgcggaaaaatggtagttcatgaaaaattgtatgaatcaaattgtatttgttatcatgtatgatcgactatgaattgtggttgccaattaatttaaaatctctctagttatctatgtgtgctattataatttatttaaattgtatttgcatattattgttaaaaaataaatattaattcatttaaattgtatttgcatatttctgttaaaaattaaaattattttcatatttaaattgtattttcatatttttacaatcacatgcggtttttccttagggtccgtttgtgaaaaggatagagcaccacaggcggtcctaaacaaaaaccgcttgtgatactattacatcacaggcgtactgaaccgcctgggacgtcacaggcggttttctaaccgaaccgcctgtgatgtaaaaagtctaccgcttgtatagagccaaattgtactagtg

SEQ ID NO: 149702 - DNA, 1703 bp, Zea Mays
cccatcacctgctatcccgccgggatcgtacgccaattcgccaaaacgatggcggcggcggcggcggcgggcgcggcatcttccatcctctcgtccacgcccccgcgccgcctcaccttccctcccgcccacatccgcaaacccctcgccgcggccgcccccaaggccctcaacctgtcatcgcagaaactccccccgctctcttcatctgccacggcctcgccaccacctccgcccgacggggacgataagccggaccccatcaagctcgctttcgcccgcgctgccgcatacaagaaggggagggacagtcacagcccgagcccgagcccggcgccggccccgcctcccacgccgccgccacagtcttcaccaccgtcgcagccgcaggcttcggtcagtgagcccggcagtaaggaggcttttaagcgggcgttggagtaccgaaacggcaacggggccggagcgggcgcggctggtggtgactccccgctgctgggaggctcgccggattttggtcagaatgccctaattagtgaagaagtctcgtttggcaagagaggagggtacgagtttgatgaggctgattttttgggtctcgacttctttgagaaaaaacgttctaaaggtctaccacctgggctggctccagcttttgagcctttacgagatgacgattttcctgaggtggacataatagttggagaccccagcaaatttgacaagtctcctcgccgaactgaaatccaaccggtagacaacggggagtcaggggaagcatctcaatcgactactaaaccaaatgaagctgacaaggctgggatagcacccccttcaactgttattgagactgaagaagatgaagatgtttatagacccacagttagatcatggggaatgtttccgaggccacaaaatatttcaaaggcgtatggcggtggaagaaatatacgccttggtggagagactcaaagtgcagaagaaaaggcagccaaagataagcgcaccaaagagctaatagctgcatataggaatcgacagaacatggtaatcgatgcaaagacaaaagcagagtgcatcaaggccttgagggaaggtgatgagatgatgaatactggaaggcttaaacaagcattaccttattatgaaaaagtgatggacgctgtggactttaagactgaatttcatggaagggctgctctgcaatggtccatctgtcttgattcactttgcaggtccaaggaagcaatgagcatgtatagcaaacttaaaaaccacccgaatagtgagatcagcaagaaagcaaacatgttcgtgttcagctttcaggcaatggatttcatgaaggtgagcagcattccagtgcccaaaagcacaggctacgagacgtacttcaccaaatttggcagcaagaagaattactacgcgagcttagaagagccggaggtgggaatcgagcagatcgtcccgtacatcatctttcttgtttcgccgatatttttagttgcttttgttgcactgagaaaatccttccaactatgaacagaaatcatggacgagttgctgaggttttaataccgtataggagcacatagcttggcaatagaagattattattatgatttttttgttttcatcaaaagagcaaattattttgtgtagctgagctagggactaatttttaatcccttttctttaggccc

SEQ ID NO: 149703 - DNA, 1527 bp, Zea Mays
cccatcacctgctatcccgccgggatcgtacgccaattcgccaaaacgatggcggcggcggcggcggcgggcgcggcatcttccatcctctcgtccacgcccccgcgccgcctcaccttccctcccgcccacatccgcaaacccctcgccgcggccgcccccaaggccctcaacctgtcatcgcagaaactccccccgctctcttcatctgccacggcctcgccaccacctccgcccgacggggacgataagccggaccccatcaagctcgctttcgcccgcgctgccgcatacaagaaggggagggacagtcacagcccgagcccgagcccggcgccggccccgcctcccacgccgccgccacagtcttcaccaccgtcgcagccgcaggcttcggtcagtgagcccggcagtaaggaggcttttaagcgggcgttggagtaccgaaacggcaacggggccggagcgggcgcggctggtggtgactccccgctgctgggaggctcgccggattttggtcagaatgccctaattagtgaagaagtctcgtttggcaagagaggagggtacgagtttgatgaggctgattttttgggtctcgacttctttgagaaaaaacgttctaaaggtctaccacctgggctggctccagcttttgagcctttacgagatgacgattttcctgaggtggacataatagttggagaccccagcaaatttgacaagtctcctcgccgaactgaaatccaaccggtagacaacggggagtcaggggaagcatctcaatcgactactaaaccaaatgaagctgacaaggctgggatagcacccccttcaactgttattgagactgaagaagatgaagatgtttatagacccacagttagatcatggggaatgtttccgaggccacaaaatatttcaaaggcgtatggcggtggaagaaatatacgccttggtggagagactcaaagtgcagaagaaaaggcagccaaagataagcgcaccaaagagctaatagctgcatataggaatcgacagaacatggtaatcgatgcaaagacaaaagcagagtgcatcaaggccttgagggaaggtgatgagatgatgaatactggaaggcttaaacaagcattaccttattatgaaaaagtgatggacgctgtggactttaagactgaatttcatggaagggctgctctgcaatggtccatctgtcttgattcactttgcaggtccaaggaagcaatgagcatgtatagcaaacttaaaaaccacccgaatagtgagatcagcaagaaagcaaacatgttcgtgttcagctttcaggcaatggatttcatgaaggtgagcagcattccagtgcccaaaagcacaggctacgagacgtacttcaccaaatttggcagcaagaagaattactacgcgagcttagaagagccggagaaatcatggacgagttgctgaggttttaataccgtataggagcacatagcttggcaatagaagattattattatgattttt

SEQ ID NO: 149704 - DNA, 900 bp, Zea Mays
ttgatgaagccaaaacaatccgtttggacatccaaactagtaagtaaaatgggggctttttatgtgctgccgctgggcgtgtaaataatccggacctaggaaacatctccgtgattccagtgtgatctaaatctatagggcatgcatatatgtacatagaatgaaatgaatccaattttttgtggggagcggagcagggcagaatccttgttcctaggcaccgatcctgccgaatccgccggccatcatgagcttgaactcgtcgaaggacacgagtccgtcgccgttgcggtcgacgccctggatcatgcggcggcactgggcgacggaggcggactcgccgaggccgcgcaggacgcgcgcgagctcggcgggggtgatgaggccgttgccgtcggcgtcgaagaccgagaaggcgtggcgcaggtcctcctcgacggcgtcggcgtcgccggacgccgagtccatgagcgccgcgaactcgggcaggctgatgtagccgtcgccgtccgcgtcggcctcctccatcatgcgcgacacctcgtcgtcggtggccgcgtggcccacgctctcgaacagcgccgccagctcggaccgcgagatctggccgtcgccgttcgcgtcgaacttgcggaagacgcgctccgtctcgtccccggccggcggcgacgccctcctcgcggaggggcacggggacgagagagacgaggacgacaagcctggccgggagccaccgcgcttgccgctgcgggcgcggcagaagaaggagcgcaccttgcccatggaactgtgcggcggttcctcgacgcgcggccgggcggtcgggcaaggaattgatgtcgctggtgattgattattggctttgccgacaagattcgatggagaaatcagctggttgat

SEQ ID NO: 149705 - DNA, 1216 bp, Zea Mays
gtgactcaaattcgagcacttatttcaaactagacatataccttcatctaataatgtagcttcgtcgctaaccggtaatataagacaaacataggttaaacttttaaatgaacggttttatctaagcacatgggttaaatctgatttctcacaaaaaccgcttaaacacaaaagcacgatttttataattaatcatgatacatttctaactgcttctggagttcttcagccatggagttgcccggatccagatgtcctcaccacccaccacccacagggcacaaggccaccactcaccagataccgaagccgtagcaaagcaaactagcaaatcaaggcaagtctggaacggccccaccgatccgacccaaagcccaaatcggattcccctcgtttctcatcacgccaccgtttacccgccgccgcactggcagcggcgatggcgtcgtcgtcgtcgcggcccctgctctgccgcctcgcggaactggccagcggccgcgtccgcgccaactaccgcatgctctcatccgccttttcatccactgcctccaccgagagggtttcgcagtcgccggcggagcccgaggcggtgctcatgacggaaggttgcgtccggagattaaaagaattacatgctaaagaaccatcctctgaaggtaagatgctgcgcttaagcgttgaagctggtggatgttctgggtttcaatattctttcgctcttgatgacaagaaaaactcagatgatagggtttttgagactgatggtgttaaattggtcgtggatgacatctcatatgactttgtaaaaggtgccactgtggattatgaggaggaacttatacgttcagcgttcgtggtttcaacaaatcctagtgctgttgggggctgcagctgcaagagttctttcatggtgaaatagcttcaattaccttgaagagatcaataattggaaatagcattctgtagcgaatcatacgctttggatctgagtgtacaattgttattttttggtagttctgaagacgtttcttttttagttttgttactgttggaaacatcatcacaaactgtctggttcaatctgtacccctctaacttgtgatagttgtgatatgatgacaagtttatgtacataatcttgtagctattaacagttgactttatgttgctccttataaaattgcaaaataagacgaacagtatttttgtattgata

SEQ ID NO: 149706 - DNA, 1001 bp, Zea Mays
tcgacacagcagccctcccctcccatgtaatgctccatggtgcacatcaaaccatactgatcgagagagggacacaaagagagagagagagatgagcaaccatcacaggttcaaactatcccatctcatgcctaactcttggttctacaagctgagggacatgaagaaacccaggccagcaagcacaagaaacaggcaaacaacaagaacgtggtctaagagatcaacaagccactactaccatggagccatcagtcccaaaccgcttcttccagtatcaccacacagatcctactgctactacctgaacacaacgcatagtacgtcacttgagaagctacacccctccacctccacctccaccctccatcgtcttaacacaaaggcatcagacatccaattccccacagatcaccaccgccgccgcccagcaagccgcaccatggtcatcgaatccaagcacgagttccaagacttgcagctacgtccgatccgcacaagggcagtgctcaccggatctataagcggaacaagcccgagctcgccgaggctgaggagcagaaggttgccgcctgctcccaatggcgccggtggcatcagtactacgggcagtgctattggtggtggccggcggagaaccgctgctaggaggagcttcgccgtcgtgaaggcgtcggcagatccgctcagggatttcaaggagagcatggtgcagatgatcgtcgagaacgacatgagcgcgccggaggatctgcaggagcttcttgagtgctacttgtccctcaactcgatggagtaccatggcgttatagtggaggttttcagagaaatttggcttcagattgtccacgacattattgatgaagattgagactattatgtgatgtaaataagaaacccaatataatgcatgtgtgtatatgattttacgtacgtatgagtaaacaatgtatgttcatgctaaattattcgaagagggatgtggttgtagtgattgcatg

SEQ ID NO: 149707 - DNA, 101 bp, Zea Mays
caatttaagtgtttcactgcctctaaggcgggacttaggcacttaagctggaataatctgggcggttctgccacattctccatcatgctttcacgagtcgc

SEQ ID NO: 149708 - DNA, 102 bp, Zea Mays
ttaacaacttctcatgcttgtctatctgttcctccataatttagtgcaagagagatgccaaagagaagtaattttgattaattgtagatactacgcacaaac

SEQ ID NO: 149709 - DNA, 561 bp, Zea Mays
atggggcaagcctacccacggcttgtcctcctcgccctcgtggcgttgttgtctgccggcctcttcccgcaggcgttagggaacggcaagggcaaggtgcatggcggcggtgccgtcaacccgctggttgccggcatctgctctcgcgccccattcccagaggtttgcacggccacagccgggcgccatgcatccaagtacccggtcatcgacaatttggccgtgctgaacatgcaggtggccgcgttcgccaagcgcacagcgcaggcgcggaagcacgtcgcggtggcggcccgcactattccaccgccgcaggcacaggccctcaggacctgcgacacgatgtacatgaacacgcaggacgccatcggcgcggcacagcgagccatcgcgttcaaggacacgggcaccgcgaagatcatgctgcagctcgctgtccaggacttcgactcgtgtgaccgtccgttcacccatgccggtgtccccaaccccatgggtaagttcgataaggagctcagccagatggccaacaactgcatgacgcttgcaaacatgatatga

SEQ ID NO: 149710 - DNA, 315 bp, Zea Mays
cccgtgttcagccaccattcttgttctgtcattctcgttctgccaccattcccagcgtttctcattctcatgtttgtctttctcattccccctccccgcaaagcccatttccatttccattcccccgtacagcccacgtctagctaaaaaggctgcaagagagagtagtctgtcattcccgtgttcagccaccattcttgttctgccattctcgttctgccaccattctcatgtttgtctttctcatttccccctccccgcaaagcccatttccattctcccgtacagcccacgtctagctaaaattaaaaaaac

SEQ ID NO: 149711 - DNA, 1573 bp, Zea Mays
gtcagatcagatcaaaccaactctcaacctcctctgcttcttgttccttgacttccttcacactccttctagaaccctctagaagcaatcgcaaaaatgccgctccatcaccctaagcaccgccaccatgacgaagatctcctcccctaccgccgctccgatgacgaggccaagccgcgccggccgtacacccccaccttcccctcctcccccgcctctaccaaccgcctcctcctcttcttcgccgtcgcctgcctcgtcctcgccgctgcctccttcgccttcgccgtttccaccagccgcaaccgtcagtccctgccgcagcctccgcctactgtcgccttccgctgtggccgcgccgaggattcgctccgttccttcctagcggcctcctcgcacggcaacttctctgccggcgacagggagaaggtgctcgctgtcgttggcgtacacacggagcatgggaatttctccgctgcccgacgcgctgcgctccgcgctacctggttcccgctcaaccccgaaggcatcgtaagtttagaacatggaactggattatcatttaggtttgtcgctagacggccaaaggacaaagataaaatggaagatcttcagaaagaggcggatacttatcatgactttttgtttattgatgctgatgaggccacaaagcccccacagacgatgttagcatttttcaaagcagcttaccacatgttcaatgcagaattctatgtcaaagctagtgatgatatctacctgcgcccagatagacttgctgctcttcttgcaaaagaaagacctcagcacaagacatacatcggttgcatgaaaaaaggaccagttgtcaatgatccaaatttgaaatggtacgaaagttcttgggaactgttgggtaacgagtacttcatgcatgcatctggttcactatatgctctttcttctgaggtggttgaagctctagctactgcaaagagtgatagcttaaggatgtttgattatgaagatgttacaatcggcgcatggatgcttgctatgaatgtaaagcatgaagacaaccgagcaatgtgtgattcagtatgtacccctacctccatcgctgtatgggacagtaagaaatgctcaggtacttgtaacgtcgctgacaaaataaagcagctccataacaccactgtgtgctcaaagagcccaacgttgccacctgaggtggaggaggaagaatagaaaccgaaacagttttggcccttgaaaaagctatggcggtgatactccaattagagcactggttttgtcgtcgactgcatttccatactgctgtatcattagtgacctttcaacaccagcgatggagagttcttggagaatcgacaccatcacattacatgtagtatttcgagtctacccaatatgggttcagatgacgtgttgtacttgtaccttttactaatcggtggaaccaatgagggcacagagacattcttggctgtatgatgtagtataaattgtacacagagtgacctatgtggtttcattcttcgctgaccagacggtgggcattccatggtttgttttc

SEQ ID NO: 149712 - DNA, 1568 bp, Zea Mays
gtcagatcagatcaaaccaactctcaacctcctctgcttcttgttccttgacttccttcacactccttctagaaccctctagaagcaatcgcaaaaatgccgctccatcaccctaagcaccgccaccatgacgaagatctcctcccctaccgccgctccgatgacgaggccaagccgcgccggccgtacacccccaccttcccctcctcccccgcctctaccaaccgcctcctcctcttcttcgccgtcgcctgcctcgtcctcgccgctgcctccttcgccttcgccgtttccaccagccgcaaccgtcagtccctgccgcagcctccgcctactgtcgccttccgctgtggccgcgccgaggattcgctccgttccttcctagcggcctcctcgcacggcaacttctctgccggcgacagggagaaggtgctcgctgtcgttggcgtacacacggagcatgggaatttctccgctgcccgacgcgctgcgctccgcgctacctggttcccgctcaaccccgaaggcatctttagaacatggaactggattatcatttaggtttgtcgctagacggccaaaggacaaagataaaatggaagatcttcagaaagaggcggatacttatcatgactttttgtttattgatgctgatgaggccacaaagcccccacagacgatgttagcatttttcaaagcagcttaccacatgttcaatgcagaattctatgtcaaagctagtgatgatatctacctgcgcccagatagacttgctgctcttcttgcaaaagaaagacctcagcacaagacatacatcggttgcatgaaaaaaggaccagttgtcaatgatccaaatttgaaatggtacgaaagttcttgggaactgttgggtaacgagtacttcatgcatgcatctggttcactatatgctctttcttctgaggtggttgaagctctagctactgcaaagagtgatagcttaaggatgtttgattatgaagatgttacaatcggcgcatggatgcttgctatgaatgtaaagcatgaagacaaccgagcaatgtgtgattcagtatgtacccctacctccatcgctgtatgggacagtaagaaatgctcaggtacttgtaacgtcgctgacaaaataaagcagctccataacaccactgtgtgctcaaagagcccaacgttgccacctgaggtggaggaggaagaatagaaaccgaaacagttttggcccttgaaaaagctatggcggtgatactccaattagagcactggttttgtcgtcgactgcatttccatactgctgtatcattagtgacctttcaacaccagcgatggagagttcttggagaatcgacaccatcacattacatgtagtatttcgagtctacccaatatgggttcagatgacgtgttgtacttgtaccttttactaatcggtggaaccaatgagggcacagagacattcttggctgtatgatgtagtataaattgtacacagagtgacctatgtggtttcattcttcgctgaccagacggtgggcattccatggtttgttttc

SEQ ID NO: 149713 - DNA, 124 bp, Zea Mays
atttggaccatctttttagttttttggttaatattgctagctggcctttttgcttatttttgttaagattgtgcgagcaacgtgtgaaatctagaataaggaaaacctaggaaaaaaacatcac

SEQ ID NO: 149714 - DNA, 1218 bp, Zea Mays
catcatttccgctacccaaatctctccgtccacggcgacgccagacggcatccgtcagccagcaacatctccaccacaccctccccgtccccgacgaagaagcacagcggagaggcggccgaagccgacgcctcaccaagtcaccagtagcttctccgcgctcgtgcgcgccttcccgcacttggatgctccctgcgccggcgcctagagcggcggccgtctagcgggcgcccggagggtgaacccaccgatggccgacgctctccttccacgccgcttcctcgcgccgttgtcagtcgtatccggagcctcttcatcagcctcttcgtccccgccgtgtctttgggtgctctcgtcgcccggctccccgcgccggccgcgcctggcggccggtcacccgcaaccccggcctcgccggttcactcggcacaagacttatgcagcagagcgtggtgagcaactgaaatggtgggagaaaaatgctggaccaaatatgattgacatccactccacagtggagttcttggatgcacttagagatgctggagacaatcttgttattgttgagttctacggaacctggtgtgcttcatgcagggctctctttccaaggctctgccggacagctttggagaaccctgatatattgtttctaaaagtgaattttgatgaaaacaaacctatgtgcaaacgactgaatgtcaaagtccttcctttcttccatttttatcgtggagctgacgggctacttgaggctttctcctgttccttagctaagtttcagaagctgaaggatgccattgcaatgcacaacactgctcgttgcagcattggtccacctgttggagttggcgatgttgacttgctggataacgcgagccctcaagagaaacctgcagaagctagcccacggtagattcatgagaatgagctccacctcatccacttctacgtcctgctcattgttttcttcactatagatctcaatgtaatcagttgtggagaacataagtagcctcggttcatgaatcagatgtatggattattgtaacgcattcttgaaagggaaaaacatgtattatagcgtgataactgtaccttttgtgtttgttgtacagaaccatagaattgtacttcattttaggtgaagacgcctttgaacatttaagctcccttgtgggccgttttatagagtcagtcagtccagtatttttgcgc

SEQ ID NO: 149715 - DNA, 1038 bp, Zea Mays
catcatttccgctacccaaatctctccgtccacggcgacgccagacggcatccgtcagccagcaacatctccaccacaccctccccgtccccgacgaagaagcacagcggagaggcggccgaagccgacgcctcaccaagtcaccagtagcttctccgcgctcgtgcgcgccttcccgcacttggatgctccctgcgccggcgcctagagcggcggccgtctagcgggcgcccggagggtgaacccaccgatggccgacgctctccttccacgccgcttcctcgcgccgttgtcagtcgtatccggagcctcttcatcagcctcttcgtccccgccgtgtctttgggtgctctcgtcgcccggctccccgcgccggccgcgcctggcggccggtcacccgcaaccccggcctcgccggttcactcggcacaagctctgccggacagctttggagaaccctgatatattgtttctaaaagtgaattttgatgaaaacaaacctatgtgcaaacgactgaatgtcaaagtccttcctttcttccatttttatcgtggagctgacgggctacttgaggctttctcctgttccttagctaagtttcagaagctgaaggatgccattgcaatgcacaacactgctcgttgcagcattggtccacctgttggagttggcgatgttgacttgctggataacgcgagccctcaagagaaacctgcagaagctagcccacggtagattcatgagaatgagctccacctcatccacttctacgtcctgctcattgttttcttcactatagatctcaatgtaatcagttgtggagaacataagtagcctcggttcatgaatcagatgtatggattattgtaacgcattcttgaaagggaaaaacatgtattatagcgtgataactgtaccttttgtgtttgttgtacagaaccatagaattgtacttcattttaggtgaagacgcctttgaacatttaagctcccttgtgggccgttttatagagtcagtcagtccagtatttttgcgc

SEQ ID NO: 149716 - DNA, 873 bp, Zea Mays
catcatttccgctacccaaatctctccgtccacggcgacgccagacggcatccgtcagccagcaacatctccaccacaccctccccgtccccgacgaagaagcacagcggagaggcggccgaagccgacgcctcaccaagtcaccagtagcttctccgcgctcgtgcgcgccttcccgcacttggatgctccctgcgccggcgcctagagcggcggccgtctagcgggcgcccggagggtgaacccaccgatggccgacgctctccttccacgccgcttcctcgcgccgttgtcagtcgtatccggagcctcttcatcagcctcttcgtccccgccgtgtctttgggtgctctcgtcgcccggctccccgcgccggccgcgcctggcggccggtcacccgcaaccccggcctcgccggttcactcggcacaagtttcagaagctgaaggatgccattgcaatgcacaacactgctcgttgcagcattggtccacctgttggagttggcgatgttgacttgctggataacgcgagccctcaagagaaacctgcagaagctagcccacggtagattcatgagaatgagctccacctcatccacttctacgtcctgctcattgttttcttcactatagatctcaatgtaatcagttgtggagaacataagtagcctcggttcatgaatcagatgtatggattattgtaacgcattcttgaaagggaaaaacatgtattatagcgtgataactgtaccttttgtgtttgttgtacagaaccatagaattgtacttcattttaggtgaagacgcctttgaacatttaagctcccttgtgggccgttttatagagtcagtcagtccagtatttttgcgc

SEQ ID NO: 149717 - DNA, 1232 bp, Zea Mays
tttcttctagattaaattgtgtttctgtgggatccttgccacctctccctcgctttaaatacctctccctctccttccccaacctgcccattccaatattccatccctggttaagaccaacccctccatctccatgcatctccaatgaacaacaactggcagctctccgtgatctatctatctccttccggtagctttttttgcattggccttgcaagtgctttattgctagagtagctgcgcttgcattattaactagataagttagtgatggatctcgcgacgaccccggcgcggcggcggcccatggagcctggactggcgcggcgcctgtggcacgtggtggtcgccgtgtgccacatactgcggcgcggcctctcccccaaacgcatcatgatggacgtccacctcctcctgggccgcggcaagctcgtcgggaggacgctgcgcggccacctcgcgcacccgtcgtcgggccaccacctcgccacctacggcgcgtcgtcctcgtcctcgtccacgctagcctcgttctacggccacccgcgggaggtggagttcagctgcgccaccacgccgtcctacccgcagcagcactacgggcttttcccctccaacaaggcccgcggcggcggcgggtacggcggcctcgacgcggcggccgtggcgcgcgcgttcgagatgctcagcagagccgaggtggacgccgggggcggcagcggcacgccggcgaccgcgacgccgtcgcccatgctggcgtggatcctgggccgcagccccgccggggtccgcccgctgcgcgtcaccgactcgccgttcccggccgtggcgggggacggggacgggtgctgcggcgagcgcgtggacgccgacgccgacgacttcatccgcaagttctacgagcagctcaggctgcagcctaccgccgccacgccggacgcccacctgcgccgccgcggttattagctatagctagctagcgtcctggcgagccttgcttgttcattcaggcatgcgcacacctcagccggcacggcactgcgttgcttcggaatccggccgggcgtcagtgtggtttcgtcttgttccgattgcttgctgcaacattcgaatgttcgttttgttccgtcaccctggatctggcacaagtgattcttaattctctggacaaggatacagttcataacctgccaagaaagcaggagaatcagtgaattaatcccccggtgcca

SEQ ID NO: 149718 - DNA, 1425 bp, Zea Mays
cgcagattttttctggcatcgttatctcctggccgcttcccgcttcttcttcatacgtatgccggcgttctcatctccagccgttgccatctcccttcgtcttctccctccgcctcgcgctgtcgagcttcctccatgcgcagtgcgcccagtcgagcggtccctgctgcgcgccgcggtcttccagtgttccctctgcctgctcgagcgcacgcccagcgccctggattccttggccttcgcgccctggtcctttgcccggaggtccctgttccgctcggcgctctccctgctcgctctggacgcgcagctcccttcgtcgcgcccaggccgcatccagctccagctcgccgaagtccctcccacggccgtctccctcaagccgccgtgagctccatggctgctgcgttcctctctgccgcgcgcccctggagcttcttcgcctgcgcgctcctctgcgtcgagctccctgcgcagcggcttccattccccgctgcaactccagcttcttccttgggccgccgcatcccttgcttttccctggtcggttcctgcacatctcagccatggatgccgtgggcttgttcctaatcacgttagggctagcgcgcaggtctccctcgcctccagcaaccctggtcgctgcatcatccagcgccgagatccttcatctcacccctcccaagaccgagcttgccaaactcctcaatctttttttttctctctgtgtattggttgcgggctggctgatgttcagagctgcatatgacactccttagttgttcgatgaaatgtcccagttaagcttcatcaccgatctcatgaattccgatcgaattggatattgttgtcgtgccctgcgacctcgccttggttccctgtccctgttgtgctcgcccggactcttggccgtcgtcaacgaacctcgcgatcgcggctctctggtgctcaaccggcgactcgctactcgtcttggtccaggtcggcgtatccgcacgtcgttgtgccttcgcttggcacaatttcgtattttgatgatatgtgtcgttgttcatcgcgcgctaagtgcttgatgaacggtctcaactggaatcatcgtcgttttcatgaattttgcatcgactagtaatagtacactgattcgctagttcctactttggttcatggactggattaattatttatattagccatgtcagttctctagacagcagcaaccgggtgttgcggttatattaattgtttggttaaaatgcctcgtgtcatgtgtttgatatattgcttcctcgaagcttgcacaaaaccttgttgggttaagaggttaattaacttgctgtcactcttgttctgattatggggtgaccaaagttagtaagtcgaaatattgtaccagttaaccaagagaagtaatttatgaagttagtt

SEQ ID NO: 149719 - DNA, 1470 bp, Zea Mays
ccgttgcatagtctccctccacaaaaacccaaatgctcctccccagcggccagcgcccgggtaacgcaccagtaccactagtccaccacagtctacaccagcgattggcgcggtgaagcagaagcagtagcggacctagcggtacaggtttacagcagccacccccaccccttcgaggacggaaggcgcgaccgcgagatggtgtccaggacgcccacaaagccgcggccgtcgcccaagaccggtaccggcaccggcatcggcagcgtcaccccgccgaagtcgtccccgacgctggtggcccgtcgctgccttgctctccgccgccgtgtttcccccgccaccgccaagcgccgcgggagcccgctcaagtcgctcgcgtctgcgcccacggccgtcgccgcctccttcgaccgctccatccgctcctgccgccgccgcctcctcaagctcttcgcccgcctcgccgtccttggcagctcgcgcaagcgccgcgctgcctccgcggggttccagcgcctccgctcctcctcggctcctccgcctccgcctccgcctctgcctctgccttcgcagaaccccgcggtccgcgcgcagtccgcggcgctgccgccgccgccgtcgccagggaggcggacgctgttcctggacctcgacgagacgctcatccactcccagacggagccgccgccctcgcggttcgacttcaccgtgcgccccgtcataggtggccatgcggtcaccttctacgtcgtcaagcgcccgggtgtcgaggcgttcctccgcgcggcggcggatgccttcgaggtcgtcgtcttcaccgccgggctgcaggagtacgcctccctcgtgctcgaccgcctggatccagacggggaggtgttcgcgcaccgcctctaccgcggcgcctgccgcgacgccggtgacgggacgctcgtcaaggatctggccgccaccggtcgggcgctggaccgcgctgtcatcatcgacgacaatcccaatgcctacgccctgcagccggagaacgccgtcccggtggcgccgttcgtggatgatgacaacgaccaggaactgcagaggatgacggcgttcttggacgtcgctgcggggtacgaagacacccgggacgccatcagatgctacaaggatctcgtcacggcaacctgagccgctatcccttcttaagccagtttcaggtttaatgttagcacatttttctcagattagtctactggttagtgggaaagagaaacattgctgcggaacaggacgtgtggtaaagctttgattttttcaggatcttcctgaacttcaatgcgagtattatgagaccaaattgaattgttacagtagaatgttcaaatctccggttacaagactccttttcattttggatatataatcaataaattctaccgctttgtgaagcacttttagggagtcagattaaaggtgaacatgagattgcga

SEQ ID NO: 149720 - DNA, 1536 bp, Zea Mays
tctgcaatgaaaagatagacctggtgatatctcagatataggtctccaatatacaaatggaagacgaagagggtggggaactaatatagggggagattggaagaaggcaccaatctttagcctgtacagatgaccacgacctacttagacgcacacagaagaatcgagatacaaaccatatcccatgccatttctcttgacagagaagtacatcttgaatgcaatcccaccaggcacgatggatttcatgaacgcgagacacacacctcgttctccttgaggctgagggtgtcggcgaggaaggtggtcgaattggcgtctgcgcgtagaggaaggtggaggcgtcacttctggacggtgcggacgcagtggttgtgacggtgtcgcctaagacccgcagtcgtcgccaccccgcacctgcgctgacggcgaggagccatcacaagaccgacctaccagcgcgaagctcgaggcagacccgtcttgtgcacacggtggatcggcgccatcgtgggcggttccttcggcgaatcgcttggatagggagacatatttttggtgacgatggagagtgaagaggaaaagggagatgagagagaaggtgagaaggctgtggttggaaaagtacacacgaaactagggataacagcgggtcggattcaggtcgggtataacaaatatacgtccgcgaccgtacccgtgggtattagacatacccgtccgcactgtacccgcgggttaaaaattgtacccgtcgggtatcgggcgggtatcgggtacccgcaggtgaaatattcgacggagccaaccaaccccaccaagtcaaccaaggccatgggccgtgacctacgtgttcacttcaagaacacccgtgagacagcttttgcccttaggaagttgtcactcaccaaggccaaaaggtaccttgaggatgtgattgcccacaagcaggccatcccgttccgcaggtattgtggcggtgttggacgtaccgctcaggctaagtctcgtcactcaaatgggcagggacgctggcctgtcaaatctgctagattcattctagaccttctcaagaatgctgagagcaatgctgaggtaaaaggtcttgatgtcgataccctctatgtgtcacacattcaagtgaaccaggctcagaagcagcggcgcaggacctaccgcgctcatgggcgcatcaaccgttactatttgcagcttaagatcctacctacctggtgcagcttacatgtcctccccgtgccacatcgaactcatcttgtcagagaaggaagagcccgtgaagaaagagttgccttggttgatgacgcttgtcccaaactcccaaacttaaggctttggttgttgcatcctgtaaaacgttatttattactcaacggtagcattgtgtgctcaacaatagtatggcgaggggagctctacaatagtgaggccaggccgggggagctctgcgacagggagacaatgggagccgtgacgttcacgggcaatagaaggccaacatttagggcttttggttag

SEQ ID NO: 149721 - DNA, 1226 bp, Zea Mays
gtgggccaagctcgagcggctcggcccataacgaagccgctagggtttttgcccagtagttggcttgcatagttgcatgtacacaatttctcgcgctcctaccgccgccgcttcgttctctaaccttggctcccgctccctccgcaggagcatctcaacaccgccttgaggaccccccaactcgccggctgcagccatggtaagatctccctcccccttactctctcgcctgttgcatcttcgctgccctgcagccatggatttggcgtcgcccttgcgaactcctgacgtgcaacgggccttgtttctggttccaggtgaaatattcgacggagccaaccaaccccaccaagtcaaccaaggccatgggccgtgacctacgtgttcacttcaagaacacccgtgagacagcttttgcccttaggaagttgtcactcaccaaggccaaaaggtaccttgaggatgtgattgcccacaagcaggccatcccgttccgcaggtattgtggcggtgttggacgtaccgctcaggctaagtctcgtcactcaaatgggcagggacgctggcctgtcaaatctgctagattcattctagaccttctcaagaatgctgagagcaatgctgaggtaaaaggtcttgatgtcgataccctctatgtgtcacacattcaagtgaaccaggctcagaagcagcggcgcaggacctaccgcgctcatgggcgcatcaacccttacatgtcctccccgtgccacatcgaactcatcttgtcagagaaggaagagcccgtgaagaaagaggctgagtctcagatcgcaaccaggaatgcttagagaatgggaacataccttctatgattggctgagtgaagattttggctgattatttgtcgtcccatattgtttacctgagtattgtttgcaagtgctttatcacatggatcacagcctggaattcactggccctgagaattgtctctggattgtttcatttttatgcccatggtatgccaatgctcatgttcagttgccttggttgatgacgcttgtcccaaactcccaaacttaaggctttggttgttgcatcctgtaaaacggtacgcccttggccgcacctgttttggacatattgggcgattgtatgttctgaagcaatttgggctgtattataacgtttctctattgatttatgagttaaatgcacgagcggtcgatccttaaaaatgtata

SEQ ID NO: 149722 - DNA, 1130 bp, Zea Mays
ggttctttttccttggatgaacgtgggccaagctcgagcggctcggcccataacgaagccgctagggtttttgcccagtagttggcttgcatagttgcatgtacacaatttctcgcgctcctaccgccgccgcttcgttctctaaccttggctcccgctccctccgcaggagcatctcaacaccgccttgaggaccccccaactcgccggctgcagccatggtgaaatattcgacggagccaaccaaccccaccaagtcaaccaaggccatgggccgtgacctacgtgttcacttcaagaacacccgtgagacagcttttgcccttaggaagttgtcactcaccaaggccaaaaggtaccttgaggatgtgattgcccacaagcaggccatcccgttccgcaggtattgtggcggtgttggacgtaccgctcaggctaagtctcgtcactcaaatgggcagggacgctggcctgtcaaatctgctagattcattctagaccttctcaagaatgctgagagcaatgctgaggtaaaaggtcttgatgtcgataccctctatgtgtcacacattcaagtgaaccaggctcagaagcagcggcgcaggacctaccgcgctcatgggcgcatcaacccttacatgtcctccccgtgccacatcgaactcatcttgtcagagaaggaagagcccgtgaagaaagaggctgagtctcagatcgcaaccaggaatgcttagagaatgggaacataccttctatgattggctgagtgaagattttggctgattatttgtcgtcccatattgtttacctgagtattgtttgcaagtgctttatcacatggatcacagcctggaattcactggccctgagaattgtctctggattgtttcatttttatgcccatggtatgccaatgctcatgttcagttgccttggttgatgacgcttgtcccaaactcccaaacttaaggctttggttgttgcatcctgtaaaacggtacgcccttggccgcacctgttttggacatattgggcgattgtatgttctgaagcaatttgggctgtattataacgtttctctattgatttatgagttaaatgcacgagcggtcgatccttaaaaatgtata

SEQ ID NO: 149723 - DNA, 1024 bp, Zea Mays
ggttctttttccttggatgaacgtgggccaagctcgagcggctcggcccataacgaagccgctagggtttttgcccagtagttggcttgcatagttgcatgtacacaatttctcgcgctcctaccgccgccgcttcgttctctaaccttggctcccgctccctccgcaggagcatctcaacaccgccttgaggaccccccaactcgccggctgcagccatggtgaaatattcgacggagccaaccaaccccaccaagtcaaccaaggccatgggccgtgacctacgtgttcacttcaagaacacccgtgagacagcttttgcccttaggaagttgtcactcaccaaggccaaaagggacgctggcctgtcaaatctgctagattcattctagaccttctcaagaatgctgagagcaatgctgaggtaaaaggtcttgatgtcgataccctctatgtgtcacacattcaagtgaaccaggctcagaagcagcggcgcaggacctaccgcgctcatgggcgcatcaacccttacatgtcctccccgtgccacatcgaactcatcttgtcagagaaggaagagcccgtgaagaaagaggctgagtctcagatcgcaaccaggaatgcttagagaatgggaacataccttctatgattggctgagtgaagattttggctgattatttgtcgtcccatattgtttacctgagtattgtttgcaagtgctttatcacatggatcacagcctggaattcactggccctgagaattgtctctggattgtttcatttttatgcccatggtatgccaatgctcatgttcagttgccttggttgatgacgcttgtcccaaactcccaaacttaaggctttggttgttgcatcctgtaaaacggtacgcccttggccgcacctgttttggacatattgggcgattgtatgttctgaagcaatttgggctgtattataacgtttctctattgatttatgagttaaatgcacgagcggtcgatccttaaaaatgtata

SEQ ID NO: 149724 - DNA, 1718 bp, Zea Mays
ctcttttcctcttccccactgagcccaaacaggaaactccacaagaggctcaggctgagctcatctgcggcagtagccaaggagtggagtgaggtagctcgctctgtgagcagaaaacaatggagacgatggcggcggctcccgcgccgcagcaaaggacggggggcatcgcgcggaggctggccaggctgctccgccgcaagagctccccggcaggtgcggggatggcgtactccgtcgccggggacgagttcgacgactcgcttgacagctcaatcaactcgctcagcaagctcaagctgtccggcaacctggctgctgcctacacgctggacgccatcttcaagaatgccacggagaagaaggcagcggcggcggcgccgcagacgcagaagcagccgtcgccggcgaaggacgccgcgaagcacgcgttcttggcgaccctattcgcgagggcgtccgcggtgaaggcggcctacgcgcagctgcagctctcgctgcatccctacgacgccgagtccatccaggccgcggacgccggcctggtggcagagcttaccaagctgacgagcctcaagcggcggtacacaagggacccggccgccgcggccaggggcgccggtgccctcgcggcgcacgccgacgagcagctccacctcctgcggacctacgagatcacggcgcgcaagctggaggcggagctccgtgcgcgggacgccgaggccgagcgcgcacgcgccgcgctggccgacgagctccgcgccgtgcggggcctggaggagcgcgaccacccgggccgccgcaccctggacggcctccacctctccggcctcaacgccacccacttcctcaccgcgctgcaacacgccgtgaagtccgtccgcgccttcgccagggcaatggtcgacgcgatgcggccggccggttgggatcccgcggcggcggcggcggcggccgtgcacccgggcgccaggctgtgggaccccgcaggcgacgccaggttcgcgctcgagtcctacgtggcgctgaggatgttcgcgggcttccaccgcaaggacttgggcctgagctccctgcacgggcggggctcccacgaccggcgccgcttcttccaggagttcgcggaggcgagggccgcggctgcggcggatcagctccaggacgcgagcgacgcgcggtgggatgcgctccgggagttcctgcgggacaggtacgtgtccgtggtgcacgagagcatggaggcggccttcttcgggcgcggcggggacgcgctgccgcgcgccgcgtggctccgcgagttcgcggagatggcgcgccgcgtgtggctgctgcactgcctgttctgggcgttcgacggcgccgcgtccgtcttccaggcgcgccctggggagcggttctcggaggtgttcatggtgagcgtccgcgacgcggacgccggcaggagcgggcacgtctccgtcgggttcaccgtggtgccggggttcaagctcggcgcgacggtgatacaatgccgggtatacctttcacacccggagcgccgtccctgaggaccgtcacacttgggcggccttgtcgcacaccggcacacgagggaggcggtggggtttaagggtggcaggcaggcagcaatgacccctgtgcaatttgttatgtttatgtatgtatggatggatccaagtatatgtatctagtatgagcattccatttcgagtctaaaa

SEQ ID NO: 149725 - DNA, 181 bp, Zea Mays
agctcatgtatttctgtgttcaatgcactttcacctcaaatgtgtgtaggaacatgtctgcatgaattttgttttgcacctagctgtagttgggaaatttagaataatataggttcattaggagaatctacttcatacctggtttatctaaccacttgtcttcatctggccttgctaaagc

SEQ ID NO: 149726 - DNA, 945 bp, Zea Mays
atgccgcccaaattggaggcctctcaggtggtggaggtcttcgtccgcgtgacgggaggcgaggagaccgccaaggactggaagggcctccgcgtcaccgtcaagctcaccgtgcagaaccggcaggccaaggtctccgtcatcccctccgccgcggcgctcgtcatcaaggcgctcaaggaacccgagagggacaggaagaaggtcaagaacatcaagcacagcggcaacatcagcctcgacgacgtcatcgagatcgccaagaccatgcgacacaggtccatggccaaggagttggccgggaccgtcaaggagatcctggggacctgcgtcagcgtcgggtgcaccgtcgatgggaaggaccccaaggacttgcagcaggagatcgatgatggtgaggcgaagggccgtcttcacaggtgggacttcgagactgaagaggagtgggccaagtacaacgatcagaaagaagccatgctgaaggctgccttccagttcggggtgaagatgcaggatggcaggaaaaccaggaagcagaacaaggaccagaagctgacgaatgacctccacaagatcaacaagattctggctaggaagaagggcgagaaagatggggtggaagatggcggtcactacgatgatgatttacctagctcaaagaaacagcgtggctgaagctgtcatttttttgttttgtttctcctgctcgtactgtaggcaggcgaacattctatgaagagtcacagtgtcatgtttagctggcagttgtatcctgttgcgtttgtttaaggtgtcctggtaggaaatatgtttatgctgttgagccgaaaccatggaagaaatgtggttgtatatgtatatatatttttctcttagaaagaaaagccagatctttatgttacaattacagtgatgaacctgcaagtatttgatttgtcatattgg

SEQ ID NO: 149727 - DNA, 1705 bp, Zea Mays
aaagcctgtctagaaccaaacacccctctccaccgactgcaaataatccgactcccactgctgggtgccctgtcccctacctcgggttccgcgcagaggaaggtgagacaccaattccactcccaaaccccacgaaaaccctcgccgtcttcgtccaaatcactcgcttgatctctcctctccgaacccggcaaccccttgaactagggttccagcgacccaatgacggacggcgacgacgagtacaagcgcgaggagtcggtggccctgctggtcatcgtcttcctcgccgcgctctcgctcctttccgtcatcgctgccttcgcctactactgctacattactcgcaaggtctcccgtcgcctccaggcgttccatatccccaagcgttccagctcccatcatacgcttcctccccgggccctgccgccgcagcagcaggggacggacaacccgtccagtaactccaccagagatggtgtcggagcggcggcgatgtcggtggtggctgctggggagaggggcgtgcaggtgttcagctaccggcagcttcacgcggccacgggtgggtttgaccgggcgcacatggttgggcagggcagcttcgggaccgtgtaccgcggggtgctccccgacgggaggaaggtcgcggtcaagctcatggaccgcccagggaaacagggagaagatgagtttgagatggaggtggagttgctgagtaggctccgatcaccgtatttattgggcctgattggccattgttcggaaggtgaacactgtctacttgtatatgagttcatggccaatgggggtctccaggagcatctctatccaaacagaggttcatgtggtggaatctcaaaattggactgggacacaagaatgagaattgcacttgaagcagccaaaggtttggaatatcttcatgaacatgttaatccacctgttatacatagagacttcaagagtagcaatattctcctggacaaggacttccatgcaagaatttcagactttggtctagccaaacttggatctgatagagctggtggtcatgtctcaactcgagttttgggcacacaaggctatgttgcaccagagtatgcattggctgggcatttgactaccaaatcagatgtgtacagttatggtgttgtgcttttggaattgcttactggcagagtaccagttgatatgaagaggtctcctggagaaggtgttttagttaactgggcattgcctatgctcactgaccgagataaagttgtgcggatcttggatccagcatcggaaggtcaatattccttgaaagatgctgtccaagtggctgctattgctgccatgtgtgttcaaccagaggctgactataggccattaatggctgatgttgtccaatcgctggttccacttgtcaagaaccgttataatcagaaatcttgcaatcccaatgtgcaaccatcgaagccacttgactaggagaaaagctagtgtttgatctgcagtttgtgctcgtccttctggaacccttctcgagttctcgtctataacgaactactgttgagacagattcacacgcttcctaacaatgatttcgtctgctggtgccctcctgattttgttgttttttgtaggggtgtgttgtgtgcaggtaggttgcaaatttaaaggggatatagttgaacggtcctgagaacttatttgagtc

SEQ ID NO: 149728 - DNA, 810 bp, Zea Mays
aaagcctgtctagaaccaaacacccctctccaccgactgcaaataatccgactcccactgctgggtgccctgtcccctacctcgggttccgcgcagaggaaggtgagacaccaattccactcccaaaccccacgaaaaccctcgccgtcttcgtccaaatcactcgcttgatctctcctctccgaacccggcaaccccttgaactagggttccagcgacccaatgacggacggcgacgacgagtacaagcgcgaggagtcggtggccctgctggtcatcgtcttcctcgccgcgctctcgctcctttccgtcatcgctgccttcgcctactactgctacattactcgcaaggtctcccgtcgcctccaggcgttccatatccccaagcgttccagctcccatcatacgcttcctccccgggccctgccgccgcagcagcaggggacggacaacccgtccagtaactccaccagagatggtgtcggagcggcggcgatgtcggtggtggctgctggggagaggggcgtgcaggtgttcagctaccggcagcttcacgcggccacgggtgggtttgaccgggcgcacatggttgggcagggcagcttcgggaccgtgtaccgcggggtgctccccgacgggaggaaggtcgcggtcaagctcatggaccgcccagggaaacagggagaagatgagtttgagatggaggtaaaaacaattatttttgtgcgtttggatcgttgctactcagcgccgaatgcgggtgtttccacgtgctggctttggggctgggacagaattcaccgcgtcctg

SEQ ID NO: 149729 - DNA, 432 bp, Zea Mays
aaagaggatcgatccatcagctagctatccattggacgcagtccgtgagtgaaaatgagccatagccatagcactaagacatcgtggccggaggtggaggggatgcctgctgaggtggcgaagcgcaagatccaggaggaccgcccggacatccaggtgatccttgtgcctgtcgactccgccgtgaccgatgacttcaacaccaagcgcgtccgcgtcttcttcgacaaggccggcaacgtggcacaagtccccaagatcggctagggcaaatagtgtcgttacttcagttctatccagtcgaagctcatcttagttgtatgcggtgttatatacagtattatgcactcgtattttaactttcaagatgcagctttacgaccatattattcaaaaacggccgagttatatataacccgtatatatttggga

SEQ ID NO: 149730 - DNA, 470 bp, Zea Mays
acaaaagatttaatgcagcatgggattccatgtcaggggcacgtcatgtatttctgctgctctgtcaatttgtaaattacctagaggtggtccgcttaccagtttactatccttctgagcaagaaaaggatgatcctaagctctatgcaaacaatgtacggaaactgatggcagtggagggaaacttgattctttcagaccttgggctggcggagaagcgagtgtaccatgccgcactgaatgaacattgcaaacatgttaaataattcttgcttaacaacttcttccacccctcaatataagtgttcttggctatccaactggataagcatttgttcacatgcttagccaaaatccgttgtatttcggaatggaggtggcagtgtttacattgtgtgctggaactagggtggtaataagctctaaattttacaatataaaataaaattgaaggatcaagctttatttct

SEQ ID NO: 149731 - DNA, 112 bp, Zea Mays
aaaaccgaccatatccacaaaccaaatcctatctctaaaaccgaccctatccacaaaatatatcctatctctacaaccgaccttatccacaaaataaatcctatctctaaaa

SEQ ID NO: 149732 - DNA, 171 bp, Zea Mays
atggacacgcttcatatggccctgaacccaggttttgttcaggagcaccttctggttcagattttggagcaatttattgggaaaagaggagtaacagaggatcaaggatctgtgtctgaagttggagacttgtttaatagagatttttgcaaggaatgggtggaagtttag

SEQ ID NO: 149733 - DNA, 1914 bp, Zea Mays
atggccgttaagcccacacccgccgccgccgccgccctccatggagaccagcaagttgccgccgctctactcgccgccgcgggagccctctgcgactacggtgatgttgtgcccgtgcctggcgttcttcctccttgccctcatcgtcatctccatcgcactcactgtccactttcgcctctactgccacacccctcttgcacacctcatctccccgcaccgctgtccccaccgcatctgacctccggctccgcccgcacctctgccgtcgtcctgcttcccagaggtgcgctccctctgctgccgccgagacgccgatcccttacgggttcccctcaactcgcgacgccggcatgcggggcttacgacgtgctctggggcttcgcggccggaaggttcctctccacctcgtctgcctccgatgaagacgggggttcgttggagcaggaggatgcggcgacgagcaacccggagggagtgggccgcgtctgcgcggccatcgcggacgtcatcgccgccggcgccgacgcgaacctggaggctgcgctatccgcgctctcgccaccgctctgtgaggctgtcgtgctcgctgtgctccaccgcttcaagcacgcacacaggccgtcgtaccgcttcttcaggtgggccaccgcgtccggcggattcacccacaccaccattacctactgcaagatgttactcatcttaggcaagacgaggcagttcgagtcgatggttgcattgctccaagagatggggaaggcggggaccctgtccatggacgccttcaaggttgccattaagtccttcgctgcggctggtgagattaagaatgcagtcggcgtgttcgagttgatgaggaagaacggttttgatgatggggtggagtcattcaattgcttgctcgttgctttggccaatgagggattgggcagggaggccaggcaggtgtttgacaaaatgcttggccagtactctccagacctgcgctcttatactgcactgatgctggcatggtgcaatgcgaggaatctggttgaggctgggcgggtttggaatgagatgctggagaagggaatgaagccagatgttgtcgtccacaacacaatgattgaagggttgctgcgtgggcagaggcaacatgaggccgtgaagatgtttgagctgatgaaggcaaaggggcctccaccaaatgtgtggacttacacaatgttgatatgcaatcattgtaagcgagggaagatggacatggcaatggagtgctttgaggagatgcaggaagccagatgccaaccagatgttgctacctatacatgtttgcttgttggatatgggaatgcaaagcgaatggacagagtgactgctgtgttggaggagatgacacagaagggatgcccccctgatgctcggacttacaatgcactgattaagctgctaacaaataggaaaatgccagatgatgctgcaaggatatacaagaagatgatcaagaaaggacttgatcccacaattcatacttacaacatgatgatgaaatcatatttccttggtgataggaactatgccatgggttgtgcagtgtgggaggagatgcaccggaggggtatttgtcctgatgttaactcttacacggtgttcattagtggacatatacgtcatggcaggccagaggaggcatacaagtatattgaggagatgattaataaagggatgaaggctccacagatagactgtaataagtttgctgcagatttatcgaaggctgggaaactagatatgttgtatgagttggctcagaaagtgaaatttgcagggaaattcgatgtatctaatgcgttttatcagtgggcagatagaatgaagagtcaggtcaagagaaatgtatctaatcagattggcaatagaatgttctaa

SEQ ID NO: 149734 - DNA, 2034 bp, Zea Mays
atggattctacaacggaagaggcctcgccatgtgtggagcggggattcgacgggcttccttatcctgggttctgggagcaggtgacgttgcgttccatggccatcgcggtggtgctcgccgccgtcttctctctggtcacgctgcgcatctacatgaccgttggggtggtaggcgcactcaacatgcccacgaacgtcctgagcttcttctccgtgaagagcctcgtctccctgcagcggcgctacggcatctctgctgcccccttcacgcggcaggagaacatcttcctccagacctgtgtcatcacctgcgttaacactgcaatctcaggtggtttgccaaattatattactgcaatgaacgctcaggtggcaacatctcttagagatgatccggataaagaagacattattgaccgcataccaacaggaaaatatgcgctgttccttttgcttactggtctggtggcgataacattgatgctgccactggcacaggttatgattgtcgactacagattgttgtttccaacaggctcggttgtggctcatcttatcaatagctttcacacgccgcaaggagcctatgcagcaaaattgcaggttgccgctatattcaaaacatttctgggaagcttttcttggtctatgttccagtggttcttcgctggaggcaacaattgtggatttcagtccttccccatctttggactagagctatacaagcacagattctattttgatttctctgcatcgtttgttggtctgggtatgattgtccctcatgttgtaaactttgggttactttttggggccatcacctcttggggattattatatcctttccttcaaagtaaaagagggcaatggtatcacactgacagtcgtacaagtttgagtggaatgaatggatataagattttcattgccgtgacaatgattatcactgaagggatgtttaacttcattaaactccttacggtgagctcaattgacctatacaagaagaggcaacaaaatgattcagggaagatcaaatacatgttgacaagccccagccttagctatgatgatcgtagaaggcttgatgtgtttcttggtcagagaatcccgctccatgtgccggttgctggatatatcggatgtgcaatagtatgctcagtcgtcatcccttggatcttccaacacattaaactctaccacatggcccttctgttcaccattcttcccgttttcaccttctgcaacacgtacggaacaggactcacagactggtcagttgcacaatcttatggcaggttcatacagttcgtcatagcagcatgggttgccgtgcctggtgcggtcatcgctagccttgcagcctgtggggtgtctgttgcagctctgaatgtgtcttcacaagccatgcaagaccttaagactggctatatgacttcgacctccccgagagctgtagtggctgggcacatatatggtgtactgattggttctgttattatcccatccatttttcttgcatttgaggcgaacgccaaaagtactgcacccattggatccaaggattcagagtactcatgtccctctgcagcagtctatcgtgccattgggctacttgggaagcgaggagtgaaggagctcccagatcactgcatcaccctctgtttggttactttcttcatgacactagctattgaaacaattagattggtgtcccaaagaagaaactggaagctacacagtttcatcccatgcatgatagcaatagctctaccattccttgctgggccttacttcaccatcgatatgtgcctaggcagtgtcctgttaatcatatggaacaaaagaaataggccgcatgcagaattactgtcgtcagcagttgcagcaggcttaatatgtggagatggattgtgggttttgccgtcatcagtactcagcatcttcaatgtgcatccaccaatctgcatgaaatttctttccagtggaaaacaagtggatattgcagactcattcctaaatactttaggacca

SEQ ID NO: 149735 - DNA, 2137 bp, Zea Mays
ttcgttcgtcgtcatggacgccacgatcggagagtcggcaccgtcggtggagagggcgttcgaggggcagccgcatcccgggttctgggggctggtgacgccgcgatccatggccgtcgcggtggtgtacgcgttcgtgttctccatggtgtcgatgcgcatctacatgatagtggggctcgtcggcgccttcaacatgccctcgaacatcctctgcttcgtcaccctccggggcctcgtgtccctgctgcggcgctgcgggatcgccgccgccccgttcaccaggcaggagaacgtcttcctccagaccagcgtcatcacatgcgtcaacgtggcggtcgcaagtggttttgcgacgtaccttgttgcaatgacgtctgatctggcgaaatctctgagtgagagtccagacaaggaagacgttgttgaggacgtgccgatggggagatacgggctactgattttcttcgctagtacgctgggaataatggcaatgatacccatggtgaaggtcatgatccttgattacagactgctatttccaacaggctcagttgtagctcaccttataaatagttttcatacccctcaaggagcatatgtagcaaaactgcaggttcgtgctttaataaaagcatttgccggaagcatttcttggtctatattccaatggttttataccggaggtgatagttgtggatttcaggtcttcccaacattcgggctggaactatataagcgcagattctattttgacttctctgcatcatgggttggtcttggtatgattgttccacatgttgtaaacttcgggttgctttttggaggctgcatatctggaggaatcatatatcctttccttcaaagtaaaaaaggtcaatggtatcacactgaaaatccatcatctttgaatggaattaacggatacaaggttttcatgggcttaactatggtggtcactgagggaatttataacttcattacactcatgactgtattgttacttgatttctacaacaaaaagaaagagaatgattcaggggtttctaagtatatgttgaaacaccccagtcttaattatgatgatcgtaaaaggcttgaggtttttcttgataatcatatccctattattggaggagtggttggatacattgtaattgggacaatgtgtgcagttgttaccccttggatctttcaccaaattaagttctatcatatagccatattgttcgtaacaatttttccacttttcttcttcagtaacacatatgtgacaggactcacagattggtcagtttcgacaacctattgcaaggttgtacttttcattatagcagcatggattgccaaacccggtgcagttattgctggccttgtagcttgtggtctagcattgatatcccttaatgtatcttgtcaagcaatgcaagatctcaggacaggttatatgacactgacttctccaagagttgtagttgcagggcatatgtatggtgtactaattgcttctgttattaacccactcatctatcttttcttcaaagcgcatgcaagaaaatctggcccccttggaacaaagaattcgatatacccatgcccctctgcagcagtgtatcgtgccattgccctacttagtactggaggagtaaaggagctacctaaacattgtttcacattctgtttcatcaccatcttcctaacagtaactgttgaaacagttagattggtgtctcaaagaaaagattggaaagtgcagcattacatcccttgtatgacagcaatagcactaccattccttgttggacctaccttcaccatcgattttgctctaggttcagtagtattgatgctttggactaaggtaaatcgacaaagtgcagcattgctatcatctgcagttgcagcaggcttagtatgtggagacggtatatggtatctaccatcatcattattaggtttcttcaatgtggatcctccaatctgtatgagattcctagcaagtggaaaaccagcggagatggcagatgcgttcttaagtacattggggacatgaggaacgccatgaagaacataagcatatataattttattatagggattagtggaagctattgtaaagatgcacacttgtatttct

SEQ ID NO: 149736 - DNA, 618 bp, Zea Mays
atgccctatgtcagcgagagggccagtaacgaccttggcacggcggcaccctgcgggcatcaccagcgtcgactaccaccacggcatcaccggcactctgatcaggcatatgcgtgtcaatcggtgtgtttgttcaaaggcgatgttgcttgtatcgacagtgaaaagatctgtttcaatcatgataagtttatcacattcactaacaaagcacattgcttttctgagaagccattttgccagtgcaaggatgaaacttggtcagagtgtttaccatatggattggcagtgaaaccaaaaaagaaggcgcactactgttcttccatattcatgtcaatgcaacaacagctatgcctggtgagtggagataagtggaggtggcactaccaattccttgatgtaccaggaatgtttggattgttgtattctgacattgtttggttcaacatattcaaggtacagcaggccagcagacaccaggcaatctatctagagaccaacaagatcatggacttcttcaagtttgacgtcggcaacgtggtcatggtgaccggcgggaggaacaccgggcatgtaggagtgatcaagaactgggagaagcacaagggcagcttcgag

SEQ ID NO: 149737 - DNA, 668 bp, Zea Mays
cgcgttcttcaggaatatatataggagtgcaccgtcctcgagatggacactggtcgcgcgccgtgggctggcgttgtcgccgacgtgctcgccgcggtgcgcctcgccgtactggaggtgccctggtggctgtccgcggaggccaaggacttcctgggccggtgccagcctgacgcgatgctccgacgaccggtccacggcggggcagctgctcgagcacccgttcatcgtctccagtctccaccggcacctccgactgctggacgccgccaagagcaggctgttgtcgcctaagagcatgcgtgccagacatgacattctgggagtctgacttggggttggcgcagagcaccgccaacaagatcggtgtgttggcctaccctgcttcagtgctgccggaccaggaccccgatgaggcccttgcgtcgacggcagcggtgccggattcgaggaaaatgagaggacaaatcaggtcgccgagtctctcgacattgacgtcgacggcaccgtacccagaatgtaggagaaaccgacgcttcacctgaccacgagtagcggcatcttcgtgactccgtgtgattcaccctgcagtgatagtgaaactcgatgtaaattgttgcgtgacacaaacaatgcaatggatttccatcttgcgcgcggttcaaata

SEQ ID NO: 149738 - DNA, 125 bp, Zea Mays
ctaaaatgtggtatgccaaagtttggcatagattaagaaaggtagagacaagggtggtaatcgatcgcgatctaaatgtttctttatactttattttagcccttaattaattttagtttaaaatt

SEQ ID NO: 149739 - DNA, 171 bp, Zea Mays
atggatatagtaagtctcacttgggctactttaatggtagtctttacatttttctctttcgctagtagtatgggggaggagtggactctagggatactaccaattgattgagtagtcgaattgtagtatcaactcttttctttaattgatcgttttgcattaataattttg

SEQ ID NO: 149740 - DNA, 606 bp, Zea Mays
gccgcgtccaagcagtactcacactgggttagcagtagctttgatagttgatcgatctctcaaggcagctgacgacgacgacgacgtactctgcccatctgaaggcgttgtccagggcttggagggagcctccgacgtacggagcgggcgggctggggtcgctggcgatccaccatccgacggggatcctcactgcggtcagcccactcgacgcaaagaacttgaagtcgtcctccactatcggcgcggccttgtcggcgccgtagccgttgcagagctggtactccccttgcagctgctgcccgacggtggtcatcaggaacactgacgcgtcgaagtcggaccaccgcgtgggctcgccgtagtccgctatcacttcgccggtcgctatcgcctgcgtatgattaaatgatttttattttcccctctctctcgatcggtgctctcctgttcctgtccagaccagttgcattgcaatccgtccactgtactactgactcccgatatttacctggacgaagtagccgttcgccgccttgatccggaccctgttcttgtcgaaggggcaccgcactatctggaacgtctccggcaggcccggcgtgg

SEQ ID NO: 149741 - DNA, 628 bp, Zea Mays
atggtacgcgtcaacaacagctgctgcaggctgcagctagctattagcatgttcgtcatctctgggctctcgtaccaccagcagccagctgtcagtccaggcgacggcgcatcagctgctccgtccgacgacgacagggaccacaacctcacggtgctcctcaccttcggcatcttcttctccttcaccctactctacctcgtcgccggcgtgatatgcgcctccgtcgtcaccgcctgcgcagtcgcgctctcctgctgctacctaaaggctcgccagcgcgtcgccctgcaccgtagagaggccctgctgctgcacgctgcgcggagccgtgggccgcggacggaagcttcagcggcacttgtcctgtccgcgatcccggcgtttgcgtacaagcgggagggtggtactaccactacgggccgcggcggggacgcggcggggtgggcgcagtgcgtcatatgcctggggctggtgcaggtcggcgaggtggtgcggcggctgccggtgtgccagcatctgtgtggagtgcattgacatgtggctccgctcgcactcaacgtgccccatctgccgcgctgccgtggaagaacccaacgccgccggccagccggtgccaccgccggtt

SEQ ID NO: 149742 - DNA, 1468 bp, Zea Mays
ttgtaaacactctctccactctcccgttggatcaacttgctcaaaaggcaagtaccaacatctatttcctaataacatgatatatgactcaactgttggagctgcaagtgtttttgtggttctaaacacttcaaatcaggtcccattttaattttaggactcaaatataggacttattggagatgctcttataggatgtggattaaaacacactgtttctgactgattttttaaaataagatctcacaactactgtgtttttgtacttatattttgccaatctattttcaaatgatcaggtgtctcggtagcatccctcactgaactctcatttaattggactggcttcattaatgccatgatctcaaatatttctttcacctaccgaagcatctattctaagaaggctatgactgacatggatagtaccaacttgtatgcatacatatcaataattgctctctttgtctgcatcccccctgcaattattattgaaggacctcaattagtgcagcatggttttaaagatgcaattgccaaagttggattaacaaagttgatttctaatttttttgtggtgggcttattctatcacctttataaccaggttgctacaaacacattggagcgggtagcccctttaacacatgccatcggcaatgtgttgaaacgtgttttcgtcattggcttttccatcatcgcattcggcaacaagatcaccacacagactggaattggcacttccattgctgtttctggtgttgccctctactcatttataaaggctaagattgaggagaaaaagcaaataaagagtgcataaggtgttggctgatgtggatgcggttggtttgtcgctttgatggacctctattctctcggtgaacgaacaaacttgcaagatggataaaatcttgctatctcctagtacatttgattgttattcccagtctggtactgaggtgtgcggttgttgttggctaacttgtttatttgaagcaaatttgagcaatgctcagtggcatggaatttccatttctgttttccttcgctcatttattctgacttgacatggtgctattgtaatcttaagcagtagtgtctctagaatgttttccccaaggagatttcagtaccaaatttgaacaatcctcaaactagaaattttgatttccatgcaccccactcagcaattctgacatacaatggtgttcatgtaatcttaagcagtagtgtctcctgatctttccaaggagattttcagtatcgttgatagtacattacgataaaaagcaaaatgcagtgagagcaatgttgccaatcgtgtgatataacctatttgtactaaggtatcattgttgacaggagcaaattaattgtaccaggttgcaaacatgtagcatgcagtttaaatgttacacttatgacatgggtcacatgtgtagatagacaggctaaggtggaattt

SEQ ID NO: 149743 - DNA, 1982 bp, Zea Mays
aatctcagttgtccttgtcccctcgaacgcgcactgttcaaacaaaccctccactgccctccccactctccccttcaccgcgccgcactcccaagtcccaactcccaacaggcctaaatggcggcggccggaacaattcccggcgccgccgcagccattggcgcttctgtgtcccaacgccaacgtcgcgtcggcgctccttctttcgtagctgcctacgtctccgagggcacccgcctcgtctgccggaggcagctccgtccggctccggtcctcgcttcttccttcatctccctttctcatccagcgaggcggcggttcctctgcgatgctgcggccggagcctcctcaggtcccgctggagaagccaagccccagggatttgcagagagatacccagctcttgtcacaggtttcttcttcttcttgtggtattttctgaatgtaatatttaacatcctcaacaagaagatcttcgactacttcccctatccatattttgtgtcagtgagccatctttttattggagtactatactgccttattggctggagcttcggcatcccaaagcgcgcgccaatcaactcaacacttctgaagcagcttgttccagttgcggtttgccatgccattggccatgtaacaagcactgtgtcatttgctgctgtagctgtgtcatttgcccacactattaaagttttacaaattacaacacagctctcgagccattcttcaatgcggctgcttcccagtttatccttggacaaccagttccattgacactctggctgtctcttgttccagtggtgattggtgtctcggtagcatccctcactgaactctcatttaattggactggcttcattaatgccatgatctcaaatatttctttcacctaccgaagcatctattctaagaaggctatgactgacatggatagtaccaacttgtatgcatacatatcaataattgctctctttgtctgcatcccccctgcaattattattgaaggacctcaattagtgcagcatggttttaaagatgcaattgccaaagttggattaacaaagttgatttctaatttttttgtggtgggcttattctatcacctttataaccaggttgctacaaacacattggagcgggtagcccctttaacacatgccatcggcaatgtgttgaaacgtgttttcgtcattggcttttccatcatcgcattcggcaacaagatcaccacacagactggaattggcacttccattgctgtttctggtgttgccctctactcatttataaaggctaagattgaggagaaaaagcaaataaagagtgcataaggtgttggctgatgtggatgcggttggtttgtcgctttgatggacctctattctctcggtgaacgaacaaacttgcaagatggataaaatcttgctatctcctagtacatttgattgttattcccagtctggtactgaggtgtgcggttgttgttggctaacttgtttatttgaagcaaatttgagcaatgctcagtggcatggaatttccatttctgttttccttcgctcatttattctgacttgacatggtgctattgtaatcttaagcagtagtgtctctagaatgttttccccaaggagatttcagtaccaaatttgaacaatcctcaaactagaaattttgatttccatgcaccccactcagcaattctgacatacaatggtgttcatgtaatcttaagcagtagtgtctcctgatctttccaaggagattttcagtatcgttgatagtacattacgataaaaagcaaaatgcagtgagagcaatgttgccaatcgtgtgatataacctatttgtactaaggtatcattgttgacaggagcaaattaattgtaccaggttgcaaacatgtagcatgcagtttaaatgttacacttatgacatgggtcacatgtgtagatagacaggctaaggtggaattt

SEQ ID NO: 149744 - DNA, 1962 bp, Zea Mays
aatctcagttgtccttgtcccctcgaacgcgcactgttcaaacaaaccctccactgccctccccactctccccttcaccgcgccgcactcccaagtcccaactcccaacaggcctaaatggcggcggccggaacaattcccggcgccgccgcagccattggcgcttctgtgtcccaacgccaacgtcgcgtcggcgctccttctttcgtagctgcctacgtctccgagggcacccgcctcgtctgccggaggcagctccgtccggctccggtcctcgcttcttccttcatctccctttctcatccagcgaggcggcggttcctctgcgatgctgcggccggagcctcctcaggtcccgctggagaagccaagccccagggatttgcagagagatacccagctcttgtcacaggtttcttcttcttcttgtggtattttctgaatgtaatatttaacatcctcaacaagaagatcttcgactacttcccctatccatattttgtgtcagtgagccatctttttattggagtactatactgccttattggctggagcttcggcatcccaaagcgcgcgccaatcaactcaacacttctgaagcagcttgttccagttgcggtttgccatgccattggccatgtaacaagcactgtgtcatttgctgctgtagctgtgtcatttgcccacactattaaagctctcgagccattcttcaatgcggctgcttcccagtttatccttggacaaccagttccattgacactctggctgtctcttgttccagtggtgattggtgtctcggtagcatccctcactgaactctcatttaattggactggcttcattaatgccatgatctcaaatatttctttcacctaccgaagcatctattctaagaaggctatgactgacatggatagtaccaacttgtatgcatacatatcaataattgctctctttgtctgcatcccccctgcaattattattgaaggacctcaattagtgcagcatggttttaaagatgcaattgccaaagttggattaacaaagttgatttctaatttttttgtggtgggcttattctatcacctttataaccaggttgctacaaacacattggagcgggtagcccctttaacacatgccatcggcaatgtgttgaaacgtgttttcgtcattggcttttccatcatcgcattcggcaacaagatcaccacacagactggaattggcacttccattgctgtttctggtgttgccctctactcatttataaaggctaagattgaggagaaaaagcaaataaagagtgcataaggtgttggctgatgtggatgcggttggtttgtcgctttgatggacctctattctctcggtgaacgaacaaacttgcaagatggataaaatcttgctatctcctagtacatttgattgttattcccagtctggtactgaggtgtgcggttgttgttggctaacttgtttatttgaagcaaatttgagcaatgctcagtggcatggaatttccatttctgttttccttcgctcatttattctgacttgacatggtgctattgtaatcttaagcagtagtgtctctagaatgttttccccaaggagatttcagtaccaaatttgaacaatcctcaaactagaaattttgatttccatgcaccccactcagcaattctgacatacaatggtgttcatgtaatcttaagcagtagtgtctcctgatctttccaaggagattttcagtatcgttgatagtacattacgataaaaagcaaaatgcagtgagagcaatgttgccaatcgtgtgatataacctatttgtactaaggtatcattgttgacaggagcaaattaattgtaccaggttgcaaacatgtagcatgcagtttaaatgttacacttatgacatgggtcacatgtgtagatagacaggctaaggtggaattt

SEQ ID NO: 149745 - DNA, 100 bp, Zea Mays
cctgttcactaagcagatttaccttgccatggaaaatatcaagcacttccatttttgtccatacaaatgtatacacgaatttgtcacttcgatgtatgta

SEQ ID NO: 149746 - DNA, 1714 bp, Zea Mays
cgctcttccgctccactccaaatccttgctcccatttcaaaacctcttcctcctctcctcgccgcagctcccaccattcccgcagacgccttgtccccttcccagcttcccctccccaccccgccgcacgtccgcaagccccacgccaccgtcatgtctccgaccaccaccccgccgcccgcgcccgtggcagccccgacctccaagggcgccaagcgcagcctcatgtcctcgctcatggacgccactgcgctgctccgctcctcctctttcaaggaggactcgtacgtcgcggccgcgctcccggcgtccgagctccgcgcgctcgccgacctcaaggcgctgctcgccacccacccggaccccatctccatctggggcgtcccgctgaaccctcgctcccctcccgccgcggcggacgacgccgccccggtcgacgagcgcgccgacgtggtgctcctcaagttcctccgcgcgcgggacttccgcgtccgcgacgcccacgccatggtgctccgctgcgccgcctggcgcgccgagttcggcgccgacgccgtgctggacgaggagctgggcttcaaggacctggagggcatcgtcgcctacatgcacggctgggaccgcgacggccaccccgtctgctacaacgcctacggcgtcttcaaagacagggacatgtacgagcgcgtcttcggcgacggcgaccgcctcgcgcgcttcctccgctggcgcgtccaggtcatggagcgtggcgtgcgcgcgctcaccctgaggcccgggggcgtcaacgccatcatacaggtcaccgacctcaaggacatgccaaagcgggagctcagagccgccagcaaccagatcctctccctcttccaggacaactacccggagatggtagcgcggaaggtgttcattaacgtgccgtggtacttctccgtgctcttctccatgatctcgcccttcctcacggagcgcaccaagagcaagttcgtcatcgcgcgcgagggcaacgtcgccgagacactctacaagttcatccggccggagctggtgcctgtgcagtacggcgggctgagccgcaccggtgacctcgagaacggaccaccgaagccggcgtccgagttcaccatcaagggtggcgagaaggtcttcctggagatcgacggtatcgaggccggtgcaacgataacgtgggatctggtcgtcgggggctgggacctcgagtacggagccgagtacgtgccggcggccgaggacagctacacgctctgcgtggagaagacgaggatggtctcggccaccgccgaggagcccgtgcacaatgccttcacggctagggaagccggcaagatggtgctgtccatagacaattctggttcccggaagcgcaaggttgccgcctacaggtacttcgtgcgcaagtcgtcggcgtaggcatgctgatgtcttgtggtggtcgtcgcggccggcaccttgccggcaggtagccgcgagggggaggttaacgtggaacaactggtgaagtgtttacttgggcttgtgggatttggtggggagaggtcaagttaggctgtttaattattagtgctataacgacatgcatgtattatgccatatgtagaatataatgtactccgtaagagctgttgcacttttgtcatcaccactgttataaagctaatgatgagttaagttttttgggctactcgcctctctc

SEQ ID NO: 149747 - DNA, 1667 bp, Zea Mays
acgcgagcgaggcgcggccatcataacgctcttccgctccactccaaatccttgctcccatttcaaaacctcttcctcctctcctcgccgcagctcccaccattcccgcagacgccttgtccccttcccagcttcccctccccaccccgccgcacgtccgcaagccccacgccaccgtcatgtctccgaccaccaccccgccgcccgcgcccgtggcagccccgacctccaagggcgccaagcgcagcctcatgtcctcgctcatggacgccactgcgctgctccgctcctcctctttcaaggaggactcgtacgtcgcggccgcgctcccggcgtccgagctccgcgcgctcgccgacctcaaggcgctgctcgccacccacccggaccccatctccatctggggcgtcccgctgaaccctcgctcccctcccgccgcggcggacgacgccgccccggtcgacgagcgcgccgacgtggtgctcctcaagttcctccgcgcgcgggacttccgcgtccgcgacgcccacgccatggtgctccgctgcgccgcctggcgcgccgagttcggcgccgacgccgtgctggacgaggagctgggcttcaaggacctggagggcatcgtcgcctacatgcacggctgggaccgcgacggccaccccgtctgctacaacgcctacggcgtcttcaaagacagggacatgtacgagcgcgtcttcggcgacggcgaccgcctcgcgcgcttcctccgctggcgcgtccaggtcatggagcgtggcgtgcgcgcgctcaccctgaggcccgggggcgtcaacgccatcatacaggtcaccgacctcaaggacatgccaaagcgggagctcagagccgccagcaaccagatcctctccctcttccaggacaactacccggagatggtagcgcggaaggtgttcattaacgtgccgtggtacttctccgtgctcttctccatgatctcgcccttcctcacggagcgcaccaagagcaagttcgtcatcgcgcgcgagggcaacgtcgccgagacactctacaagttcatccggccggagctggtgcctgtgcagtacggcgggctgagccgcaccggtgacctcgagaacggaccaccgaagccggcgtccgagttcaccatcaagggtggcgagaaggtcttcctggagatcgacggtatcgaggccggtgcaacgataacgtgggatctggtcgtcgggggctgggacctcgagtacggagccgagtacgtgccggcggccgaggacagctacacgctctgcgtggagaagacgaggatggtctcggccaccgccgaggagcccgtgcacaatgccttcacggctagggaagccggcaagatggtgctgtccatagacaattctggttcccggaagcgcaaggttgccgcctacaggtacttcgtgcgcaagtcgtcggcgtaggcatgctgatgtcttgtggtggtcgtcgcggccggcaccttgccggcaggtagccgcgagggggaggttaacgtcaagttaggctgtttaattattagtgctataacgacatgcatgtattatgccatatgtagaatataatgtactccgtaagagctgttgcacttttgtcatcaccactgttataaagctaatgatgagttaagtttt

SEQ ID NO: 149748 - DNA, 1133 bp, Zea Mays
aacctcttcctcctctcctcgccgcagctcccaccattcccgcagacgccttgtccccttcccagcttcccctccccaccccgtctgctacaacgcctacggcgtcttcaaagacagggacatgtacgagcgcgtcttcggcgacggcgaccgcctcgcgcgcttcctccgctggcgcgtccaggtcatggagcgtggcgtgcgcgcgctcaccctgaggcccgggggcgtcaacgccatcatacaggtcaccgacctcaaggacatgccaaagcgggagctcagagccgccagcaaccagatcctctccctcttccaggacaactacccggagatggtagcgcggaaggtgttcattaacgtgccgtggtacttctccgtgctcttctccatgatctcgcccttcctcacggagcgcaccaagagcaagttcgtcatcgcgcgcgagggcaacgtcgccgagacactctacaagttcatccggccggagctggtgcctgtgcagtacggcgggctgagccgcaccggtgacctcgagaacggaccaccgaagccggcgtccgagttcaccatcaagggtggcgagaaggtcttcctggagatcgacggtatcgaggccggtgcaacgataacgtgggatctggtcgtcgggggctgggacctcgagtacggagccgagtacgtgccggcggccgaggacagctacacgctctgcgtggagaagacgaggatggtctcggccaccgccgaggagcccgtgcacaatgccttcacggctagggaagccggcaagatggtgctgtccatagacaattctggttcccggaagcgcaaggttgccgcctacaggtacttcgtgcgcaagtcgtcggcgtaggcatgctgatgtcttgtggtggtcgtcgcggccggcaccttgccggcaggtagccgcgagggggaggttaacgtggaacaactggtgaagtgtttacttgggcttgtgggatttggtggggagaggtcaagttaggctgtttaattattagtgctataacgacatgcatgtattatgccatatgtagaatataatgtactccgtaagagctgttgcacttttgtcatcaccactgttataaagctaatgatgagtt

SEQ ID NO: 149749 - DNA, 1242 bp, Zea Mays
acgcgagcgaggcgcggccatcataacgctcttccgctccactccaaatccttgctcccatttcaaaacctcttcctcctctcctcgccgcagctcccaccattcccgcagacgccttgtccccttcccagcttcccctccccaccccgccgcacgtccgcaagccccacgccaccgtcatgtctccgaccaccaccccgccgcccgcgcccgtggcagccccgacctccaagggcgccaagcgcagcctcatgtcctcgctcatggacgccactgcgctgctccgctcctcctctttcaaggaggactcgtacgtcgcggccgcgctcccggcgtccgagctccgcgcgctcgccgacctcaaggcgctgctcgccacccacccggaccccatctccatctggggcgtcccgctgaaccctcgctcccctcccgccgcggcggacgacgccgccccggtcgacgagcgcgccgacgtggtgctcctcaagttcctccgcgcgcgggacttccgcgtccgcgacgcccacgccatggtgctccgctgcgccgcctggcgcgccgagttcggcgccgacgccgtgctggacgaggagctgggcttcaaggacctggagggcatcgtcgcctacatgcacggctgggaccgcgacggccaccccgtctgctacaacgcctacggcgtcttcaaagacagggacatgtacgagcgcgtcttcggcgacggcgaccgcctcgcgcgcttcctccgctggcgcgtccaggtcatggagcgtggcgtgcgcgcgctcaccctgaggcccgggggcgtcaacgccatcatacaggtcaccgacctcaaggacatgccaaagcgggagctcagagccgccagcaaccagatcctctccctcttccaggacaactacccggagatggtagcgcggaaggtgttcattaacgtgccgtggtacttctccgtgctcttctccatgatctcgcccttcctcacggagcgcaccaagagcaagttcgtcatcgcgcgcgagggcaacgtcgccgagacactctacaagttcatccggccggagctggtgcctgtgcagtacggcgggctgagccgcaccggtgacctcgagaacggaccaccgaagccggcgtccgagttcaccatcaagggtggcgagaaggtcttcctggagatcgacggtatcgaggtacaaacaaatgcagattccagtggatgcaaagaaaccacatggt

SEQ ID NO: 149750 - DNA, 139 bp, Zea Mays
gatcctcctgcgcgtcccggcaggacagccggcgtgcctcgtccgcgcatccctcgtgtgcaagtcctggtgccacgtcgtctccgatcccggcttccgccgccgctaccgcgcgttccaccggacaagattgagaatt

SEQ ID NO: 149751 - DNA, 984 bp, Zea Mays
atggccgccgcgggggaacgtgaagaggaacgctggaatcacctcaatcagagcattgatctgctgtttaccaggctgggcgacgtcgcgcgcgcgcaagagcagatgcagatccaccaggacttgggggtgaaggctatggagcaggttctcaaagatcaagccaccttcgcgcaacaactcgaagccacaagcaaggcggtggatcttctcacacgcgagcgccgaccttcggcggagtgggacacttcctcacagttctccagggaggcgcaaccctctctgcatcagcgtccaccacgtccctctggttaccaccctggtgagcatcatcatcatcaccccccaccggttattcctcgtgattggaatgaaggcatgcaagggtatcgtcataccacacccaagttgaactttccagagtttactgggcgcgatccacgtatctggcgccggcactgtgaggattactttctgttctacaatgttcctgagcacctttgggttacttctgcaacaatgcatatgagggataatgctgggaggtggatggaggtgcagcgcctcaaagggggttttccttcctgggcccaattcatgaccgatgtggaggataaatttggtgcttatgattatgatcatgctatgcaggatttgttcactctaaagcaaactggttcagttgaggaattttatttccagtttcagtctctgcaatttcggctagagatgcataacagtggttttgacagaatgttcttcatcaatcaattcactcgcaatctaaaacccgaattggctgcgatggtccaatctcacatacctcgtacaatggaacaggcagtgcatattgccaagatccaagaagccttattcgatcgtccacaattcaagtacagtaaacctgcatttccacacaaggctcagtttggaatttctggtcgccctgagccaactgtcccaagcgtcccaaaacacagttga

SEQ ID NO: 149752 - DNA, 2025 bp, Zea Mays
cccttcgccgcggagccggaggtgtccgacggagacgctgccgcgggcgccgaccgccgcgcgtgggagccgcccttcgacgcgtcctcgcccgcgccgcccatgtcctacccgatcacgggcctcgccgcgctcgcctctcgcgcttacctgtccgccgaagccaacttccacctccccttcaacagggcttccgttcccgcgccagcctcgccgctcccgcagcgccgccgcgtcctcgtctgccacgacatggaaggcggataccgcaacgacgcggcaccgcagggcggggacaagccggacgcctacgcgctctggcactggcacctcgtcgacgtcttcgtctacttctcgcactacctcgtcacgctcccgccaccctgctggatcaacgccgcccaccttcacggcgtcaaggttttagggacgttcatcgcggagtgggatgagggcgtgaagatttgcaaggagatgctcgcgaccgaggcttctgcacagatgtatgcggaaaggctcacagagctggctcataccttgggatttgatggttggctgattaacattgaggtcaatcttgacgttcacttcatcgataacctgaaagagttcgtcaagcatctaaccatgacaatgcacgatgcagttcctggctctttagtcatatggtatgacgcaatcactgtgaatggtgaccttgattggcaggataagctcaacaagtacaataagccattctttgatgtatgtgatgggctattttctaactatacatggaaggaaaatgacccacaagattcagctacagttgctggcgacagaaaatatgatgtatacatgggtattgatgtttttggacgaaatacatttggtggtggtcaatggactgtatgcaatgtatttaccaagcaaccgtgcagttggtggggccttgttgaaaaatcatggggtattcttcggagctatccagaacagttaccattctactcggattttaatcagggtcatggttatcaggtatccgttgaagggctgcaaatctccaatgattcatggaacaatatttcttgccaaagttttcagcctatgcttaaatacaccagagatcaagttcatctgcaagcctatacggatttcaaggctgaaccttacagtggagggaattgtttgacagtcaaaggatctcttcagcagaacattattttctcagaacagctttttaatggaggacttgccatggaagatggacctgttcatctattttattcgataagagccaatgcaagttctgctttagggttgtccctggatctgtcttctagaaacaagcagggtacttcaaaaattctggttgcagaggacatagcaacattcaccagaaagaaacaaaatcacaagtatggatcatatgttaaagccgataaggtggagctacacgctccagataaccacggttgggtcctttacaaagcaactgtttcttccagtgctgggcacacattaactggtatcaacattgtctgcacattgaaatttactggcgaaatcagtccagaatcagaagatggtagcatcttggtagaagatgtcgatggaacttcactgtatcaggcatcactaggccacctcagtattcgaaatactgacaaaaacacagagttccctccagcagaatcttggataactgaaggagattacatctcgtggtcaaaatgctctaacggatctgaactcgtgaatctgaaaatcagctggaagctgaagaaccctgatcaaccacaaccaccattcagcaagtacaatatctatgtggagaagttaacggcagattcagacttgaaagttcccagtcccaaaagctatcttggagttgctagtgtcgatgccttctatgtgtcgggcttagaggtctccaacgaagtcaccggtctgaaattctttatccaagcgtttgcacacgatggaagctggcaagaacttgaggaatgtccaaagttctttttattccctgttcactctgaatga

SEQ ID NO: 149753 - DNA, 371 bp, Zea Mays
cccagcctcagaaaggcccaacagaaatcacatgcttctttacctctggtgtccgtgctactggcccaagccgagggcagtcttggctccaaaaccaagtggcaaggaaccttcacctcgaatggttctcatggcccctagaattgaggcatgttgaggtgtacgtccaaatgcatatgctggaaaggtagtatattagctgcaactgtttggcagcagaaccagttgcaactgtttgttaacagaaccagctggtggagacaatccagagcctcgagttgtggttgctttaggcgattcatttgaacccgtcctgtcccaggtaatagaaagctctgctatagcaaatatacgtgtagccttttgtctca

SEQ ID NO: 149754 - DNA, 310 bp, Zea Mays
ccgctcttggagccaaaataatgtggtcatgtggcttgtacgttgaggcaaataaactttatagctcattgaggcacaatgttctgcttccatgcttagggtcaagaaatattactactattatttcattgttgaagtggcacttacgattttgattatgctaccatgcaggtttgctttgttgcgcaatttggtcagtctgttgttcgagcagactatcttatcctccgcaagggttttataatggtatgtcagttctttgctcttaaattctgagtagactatacttggccttcagtgtgtttatttg

SEQ ID NO: 149755 - DNA, 1038 bp, Zea Mays
gctcaccgccaccagctcggctgatccaggccgtccgtccgcccggcggcaggcgcgcacgcggaagcctccaacgcacgcaaaccggcggcgctcgcttcccccttcatcaccgggcccgactccagcatctactgggactgggatcccgtaccccagccgggccccgccgtgcgcgcgcgcgcgtcagagtcgcaccaacctccgccgccgtgacgcctggcaaggctggagcctcagccagtcagccactcagcctccacccgaaattcccgtcccccctccaccatctcgccgcttttccaccctcgtctgctgctgttggtaggagagtacttgtcaattgcttttccaccctcctcctccgccaacccaattcttgccttccggctaccgctgctcctgttaggagtacttgccaattactattggaatcaccttcgccgcctcctcgagaaccaattctagcctaaaacccgcagtgatccgcccaactcccgacccactcatggtcgatcggcgcggccgctgaactgcctgcggcgggggcgagaggacgcgggtcgaggcgggcgatggccgggctggcggggaggcctggttcctggggcggcctggtgctgcgggtggggcaggctctcttcgccgccgcctgcatcggcgtcatgggcagctcgctcggattcgccagctacaccgccttctgctacttgattgcgtcaatggggcttcaaatgctgtggagtttcggacttgcatgtcttgatggatatgccattagagccaataaagatctcaccagtcccattctattgagcttgtttgtcgttggagactgggtaacagcaatcctgtcattcgccgcatcaagctcagctgccggtgtagtaatcctatttcaaaaggacgtgctcttctgcagaaggtatccccagctcccctgcggaaaatacgagctcgccacggcgttcgccttcctgtcttgggcgctcagtgcgacatcagcattgatcatgttttggctcctggctgcgttct

SEQ ID NO: 149756 - DNA, 908 bp, Zea Mays
gctcaccgccaccagctcggctgatccaggccgtccgtccgcccggcggcaggcgcgcacgcggaagcctccaacgcacgcaaaccggcggcgctcgcttcccccttcatcaccgggcccgactccagcatctactgggactgggatcccgtaccccagccgggccccgccgtgcgcgcgcgcgcgtcagagtcgcaccaacctccgccgccgtgacgcctggcaaggctggagcctcagccagtcagccactcagcctccacccgaaattcccgtcccccctccaccatctcgccgcttttccaccctcgtctgctgctgttggtaggagagtacttgtcaattgcttttccaccctcctcctccgccaacccaattcttgccttccggctaccgctgctcctgttaggagtacttgccaattactattggaatcaccttcgccgcctcctcgagaaccaattctagcctaaaacccgcagtgatccgcccaactcccgacccactcatggtcgatcggcgcggccgctgaactgcctgcggcgggggcgagaggacgcgggtcgaggcgggcgatggccgggctggcggggaggcctggttcctggggcggcctggtgctgcgggtggggcaggctctcttcgccgccgcctgcatcggcgtcatgggcagctcgctcggattcgccagctacaccgccttctgctacttgattgcgtcaatggggcttcaaatgctgtggagtttcggacttgcatgtcttgatggatatgccattagagccaataaagatctcaccagtcccattctattgagcttgtttgtcgttggagactgggtaatcactaaactcatttttggaactctggtcatctaatattttggactgtctgctccattttcttta

SEQ ID NO: 149757 - DNA, 1364 bp, Zea Mays
aaccgacccggcctagcggcggcggcccactccagtacgcgtacgccaccacgcgcacgccaccctccaacccaagcaatcaggcgccgcgcagaggtagtaaggcaaggaacgcggggccgcggcacacgcaaaattccccatcccccaaggaagccacgccctcgcgcaccagcgcgaccggaccacaccggcaccgcccgtctgaccgacgcaacccagccgtccagacgcgccgccgaccgtccttccaccaccacgcccgcgccgtcgcacgctccctagggttccgcagggccggggatcgccggagatggactggagcgcggtgacggcggaggacttggtggacgcgctgcgggaggtggactggtccatgccgccgcggcctgtcccggagttcttctcccgcttcaccgtcccacgctcctactccaagtggaccagccgcctcaagtgcaacctctactactacaggacaaactatttcatcttgatcatgttcatccttgggatgggcttcctttggaagccagttgctatagttgctgcttttatgactggacttagcatcgcatttctcaatgatagttttgcagtcactttcaatgagaaagtcacaaggaccgtaagacaattttcaccacatttagctgcaaagttgaggccacctataactcctgttcttcgcggtcgaccaagctctaagagatcaattcatatttgtgggcgacctcgctgggtgtttgtcctgttcttttctgcagtgagctgtatactctggttgacctcatgcagtcttctcacagtcctctgggcacttctcattgctctatttgcaactgtgctccatgcaagcttcagaacaccaaatctcaaagcacgtctgaatacattcagagaggaattccgggctgtttggcggaattatagtgagctttaagggtttcctttgtttctctcatgttcatgggtaatgaaggtgtctggtgccgttgtttgtgagctgtgctaggagatctagttgaaggtgaaacgccattgcacattacatggactacttgctctcttgggaggtgggattctggttgggttgactccgaatgcgatgctatgccagcacacgatccttcaagaacagtagttttctttcgtacttctccctaaccgagcattagagagaggacagcatgtaaaggatgtaaaaatgtacttgttctcgatcaaaaagtatgttgtttgttgaaattattactaatttgtattgcatcctcttttggatcatttgttaggtgactatcattttgcttcagcatttttgtcgagttagttacatcaaataaatcaaaaattctaactctatt

SEQ ID NO: 149758 - DNA, 1500 bp, Zea Mays
aaccgacccggcctagcggcggcggcccactccagtacgcgtacgccaccacgcgcacgccaccctccaacccaagcaatcaggcgccgcgcagaggtagtaaggcaaggaacgcggggccgcggcacacgcaaaattccccatcccccaaggaagccacgccctcgcgcaccagcgcgaccggaccacaccggcaccgcccgtctgaccgacgcaacccagccgtccagacgcgccgccgaccgtccttccaccaccacgcccgcgccgtcgcacgctccctagggttccgcagggccggggatcgccggagatggactggagcgcggtgacggcggaggacttggtggacgcgctgcgggaggtggactggtccatgccgccgcggcctgtcccggagttcttctcccgcttcaccgtcccacgctcctactccaagtggaccagccgcctcaagtgcaacctctactactacaggacaaactatttcatcttgatcatgttcatccttgggatgggcttcctttggaagccagttgctatagttgctgcttttatgactggacttagcatcgcatttctcaatgatagttttgcagtcactttcaatgagaaagtcacaaggaccgtaagacaattttcaccacatttagctgcaaagttgaggccacctataacgtgggtatcttagtttctgatgtttaattttttctttatatttttttgtggcaactacagagtgatgctaatgtcatttttattagtcctgttcttcgcggtcgaccaagctctaagagatcaattcatatttgtgggcgacctcgctgggtgtttgtcctgttcttttctgcagtgagctgtatactctggttgacctcatgcagtcttctcacagtcctctgggcacttctcattgctctatttgcaactgtgctccatgcaagcttcagaacaccaaatctcaaagcacgtctgaatacattcagagaggaattccgggctgtttggcggaattatagtgagctttaagggtttcctttgtttctctcatgttcatgggtaatgaaggtgtctggtgccgttgtttgtgagctgtgctaggagatctagttgaaggtgaaacgccattgcacattacatggactacttgctctcttgggaggtgggattctggttgggttgactccgaatgcgatgctatgccagcacacgatccttcaagaacagtagttttctttcgtacttctccctaaccgagcattagagagaggacagcatgtaaaggatgtaaaaatgtacttgttctcgatcaaaaagtatgttgtttgttgaaattattactaatttgtattgcatcctcttttggatcatttgttaggtgactatcattttgcttcagcatttttgtcgagttagttacatcaagtgatactttattttctttccattcgatcacttttgtgactatcattttgcttcagcatatttgtcgtgttagtt

SEQ ID NO: 149759 - DNA, 1120 bp, Zea Mays
aaccgacccggcctagcggcggcggcccactccagtacgcgtacgccaccacgcgcacgccaccctccaacccaagcaatcaggcgccgcgcagaggtagtaaggcaaggaacgcggcgcgaccggaccacaccggcaccgcccgtctgaccgacgcaacccagccgtccagacgcgccgccgaccgtccttccaccaccacgcccgcgccgtcgcacgctccctagggttccgcagggccggggatcgccggagatggactggagcgcggtgacggcggaggacttggtggacgcgctgcgggaggtggactggtccatgccgccgcggcctgtcccggagttcttctcccgcttcaccgtcccacgctcctactccaagtggaccagccgcctcaagtgcaacctctactactacaggacaaactatttcatcttgatcatgttcatccttgggatgggcttcctttggaagccagttgctatagttgctgcttttatgactggacttagcatcgcatttctcaatgatagttttgcagtcactttcaatgagaaagtcacaaggaccgtaagacaattttcaccacatttagctgcaaagttgaggccacctataactcctgttcttcgcggtcgaccaagctctaagagatcaattcatatttgtgggcgacctcgctgggtgtttgtcctgttcttttctgcagtgagctgtatactctggttgacctcatgcagtcttctcacagtcctctgggcacttctcattgctctatttgcaactgtgctccatgcaagcttcagaacaccaaatctcaaagcacgtctgaatacattcagagaggaattccgggctgtttggcggaattatagtgagctttaagggtttcctttgtttctctcatgtaagtacctctttggcgtctaggtcctcagtttatcaatacctgtatttcccgcatcatttgtttcaatggcataccatttcagtgggccaatgtggcctgcgtattccctaattgtagatcctccacttccattgcttgttgattaaatgtattttcatcacaggttcatgggtaatgaaggtgtctggtgccgttgtttgtgagctgtgc

SEQ ID NO: 149760 - DNA, 306 bp, Zea Mays
ggcctacatggtcgacgacccggccgtctccagcgtgaatgcgtgatactggggttcgatgctcccaggaaggagtccggcgccaacaagaggcaatacttcccttcttccttcatttgggctgaattctgcctgcataggagcctgcggagagacatacataatcattaacggcttggaataatttcttgtttgtcgatagtattacctcctgctcgagtgatctggcatgcaaattgcttgattagcagtgcccctatttggttgagaaggaactaaggtagaatagaactagtagtagtatga

SEQ ID NO: 149761 - DNA, 2381 bp, Zea Mays
agaggtagagccgacagccgagcgagcccgggagccgaacacctccaccagcagcaaaagcaccaccaccaccagaaccgagcgcacaaaagcgcgcggccgggacgcgggagaaagcaacgggcagcctgtactgccggctgctgcagctaccctttcagtcccaattccagcccccggccaggcgctcgcaaagtgcgggagccgccctcttcgctcgtgggctctctctctctctctccgcgttctcgctccaggtcgtgtacgatccgccagtacgtacgggccccggcggcgctcgtgcgcgggcgacaacatgtcctcggcggcgggcggtggatacggggccggcggcgcggagcatcagcacctgttgctggggcaggccgcgggcgcggggcagctctaccacgtgccgcagcacagccgccgcgagaagctgcggttcccgcccgacgacgcggccgactcgcccccgcccactgcctggccggcgcccccacccttctactcctacgcttcctcgtcgacatcgtcctactactcgccgcatagccccacgctggcgcacgcgcagctagtagcacacgcgctacctgcgggcgccggggtccagatcccgagccagaacttcgcgctctcgctctcttcggcgccctcgaaccctccgcccgcgccgcggaggcagctcgccgcgggggtagccacggggccgtacggcccgttcacgggctacgcggccgtcctcgggcggtccaggttcctgggccccgcgcagaagctgctcgaagagatctgtaacgtcggcggacggcccccgcacctggaccctctctccgacgagggtatgttcggcatggagcatggcatgggcggcgttgaccgcgctaccgctgaggcggtcgctgtctccggcgccgagcagcagtggaggaagaccaggctcatctccctcatggaggacgtttgcaggcgatacaaacaatactaccagcagctgcaatctgtgatctcctcgtttgagacggtttcggggctgagcaacgccgtcccctttgcttccatggctcttcggacaatgtctaagcatttcaagttcctgaaggggatgataatgagccaattacggaacacaagcaaggtcgctgccagtgatggtattggcaaggatgatatggcgaactttgcgcttatgggtggtggagcagaccacctgaggggaaacagcgtgaacacgttcagccaggctcacaacatttggaggcctcaaagagggcttcctgagcgtgcagtgtctgttcttcgctcatggctgttcgagcacttcctacatccgtacccaactgatagtgacaagcagatgctggctaaacagacaggcctaactaggaaccaggtgtcaaactggtttatcaacgcaagggtgcggctctggaagcccatggtggaagagatccacaacctggagatgcggcagcagctgcagaagaacacgtcggcggtggacaagacccaactcggcatgcagcagctgatccagcactcgtcggcaaactcccggcagcgggggcaaagcagcggcggcacgacgagaaaccaagacgagctgcccccgcggatgccccacgacatggcaggccagggccagcagcagcagcagcaggtgagcttcgcttacgctgggctccccgcgcaccaccacggcctcgcgctgtcgcacccccagcagcaagcggaagcggtcagcgccgtcggcggtggcgtttcgctcacgctgggccttcaccagaacaacaaccggacctacgtcgccgagcctctcccggccgcgctcccgcaccgtttcgggctggaggacgtgagcgacgcctacgtgatgcaggggacgacgtcgttcggcggccaggaccgccatttcggcaaggggatgggcggccaccattttgtgcatgacttggtcggctgatctcgttcttgcgactgttgtcggcatgcattgtatcatactattgttaggggcagcacaggcacgcacagtggaagagaccagaatatttgacagtgtggatgagggctatagagggcacgcatggcccgtagcgttgaagatctgttccagttgtatgtagagttgatgagccctatttgttctaatcccagctggccaagtcgtgtgttgacacatgtaccactatttttctctgacatgaaattgtgaagtggagtttggaaacagtggctagttcttgctcctgaaggctgaaatgtttatttttttcttcaaattatgaccgcgcgccttatctttcttgatgttggatatatgtggttagcctttccgtgcactccattaaactagaaaaggaggaggttggtggcag

SEQ ID NO: 149762 - DNA, 2316 bp, Zea Mays
ctcctccctccctcgcccgcctgcctttcgcttctttttaagcctttatttactaccactactatactcctctctctttctcactcgtcacaagctctctttcatcgcatccacaccattccacttccaccccacgaggatccagcctgcctgtccctctcgccgcacgccacgaccgtagtcgctcgccggcgtgtctagcctagccggggcctgggcctccgcgctcgtgctcccgggaaacaacgaccgacgcgtcctcatagtcatagaggcagctaaggcagccacgcattcgtcgctcgctcgaccggcgatggcgagaggtgacacggcgagcgaggcgctgacggcggactcagccgacgaggaggggcgccgcgggagcagctccagcgccagctccgacgccgcctccagcttctcctgcacgtactccccggccccgcccgacgagtggcacaaggtggccatcatcaagacctgcgtgtctgtgtcggccgacgccgcgggcggcggcggcggcaaggaccagaagccgcgcggcgtcgtcgccgcggccgacaggcacggaggagcatcagagatggagatgatgaaggagcggttctccaagctgctgctcggcgaggacatgtccgggagcggcaagggcgtctgcaccgcgctcgccatctccaacgccgtcaccaacctctgcgcgacggtgttcggccagctctggaggctggagccgctgccgccggagaagaaggccatgtggcggcgcgagttggactgcctgctctgcgtcagcgaccacatcgtggagctggtgcccacgtggcagacattcccggatggtacaaggcttgagatcatgacaagcaggccgcggtctgatctgtacatcaacctgccggcgcttcggaagctagacaacatgctcctcgaaatcctggaaggtttcagggacgtcgagttctggtacgtggaccagggcatctgtgcgccggactgcgacagctccgcgtcctaccggagaacgttccaccgccgcgacgacaagtggtggctgccggtgccgcacgtgccccacggcggtctccgcgaggccacgcggaggcagctggagcaccgtcgcgactgcgccagccagatcctcaaggccgccatggccatcaacagcaacgcactggccgagatggccgtgccggtctcctacctcgactcgctgccaaagaacgggcgcgcggcgctgggcgacgtcatctaccggtacatcacctcggaccagttctcccaggactacctcctcgactgcctcgacctgtcgtcggaataccaggcgctggagatcgccaaccgcgtcgaggcctccatctacgtgtggcgccggaaggggggcggcggcgccagatcgtcctggggcatcgtgaaggacatggtcatggacacggagaagagggacctgctcgccgagcgcgcggaggcgctgctcatgtccctcaagcagcggttccccgggctcactcagacgagcttggacatgagcaagatccagtacaacaaggacgtgggcaaatcgatcctcgagagctactcgagggtcctcgagagcctggcctccaacatcatcgcgcggatcgacgacctgctcaacgtcgacgagctgagcaagcaaccagctgacagcatcccgtccgccggagcggacgcgaaggttgcgtgcaagagcaacggcagcaagcaggccacggcggtgcctgcctcgggcacgccgtacgcgacggcgtacgccacgccgagcttctcgccggcgcagctgtcgagcccgtccaagatcgggagggccctgctggtcgaccgccggtcgcaccacgttgccggagctaagagggcaacggcgtccgcggctgatcgcgctggcgtggaggtggtcaagggaatggtggtcgacggcagcagcgccatattcgatatcatcccgatagctgtcccagcaaagatatgaagagtccgctcgtctgtgcggaccagatacgtcatacgtgttgtgttggcgtgaagtagtgggtttactgtagcatccgagggcgatttctcttgttgccgatggcagccctccgcttgcgactgtaatgcttttggtgcggtgtcgtgtagtatgttacacgtagagttttctgtatctgtcagatgttcgttggatgaaagcaccgccgacactggtcgtcggctgtcgcggagtaagattatgtcaccacactcacgatctcactcctatttcaaactactacactttacaaacattgcaatctcaaatgcaaaacaata

SEQ ID NO: 149763 - DNA, 1866 bp, Zea Mays
ccggcgatggcgagaggtgacacggcgagcgaggcgctgacggcggactcagccgacgaggaggggcgccgcgggagcagctccagcgccagctccgacgccgcctccagcttctcctgcacgtactccccggccccgcccgacgagtggcacaaggtggccatcatcaagacctgcgtgtctgtgtcggccgacgccgcgggcggcggcggcggcaaggaccagaagcctcgtgcgtgcccgcgcgtgaaatcgccagagatggagatgatgaaggagcggttctccaagctgctgctcggcgaggacatgtccgggagcggcaagggcgtctgcaccgcgctcgccatctccaacgccgtcaccaacctctgcgcgacggtgttcggccagctctggaggctggagccgctgccgccggagaagaaggccatgtggcggcgcgagttggactgcctgctctgcgtcagcgaccacatcgtggagctggtgcccacgtggcagacattcccggatggtacaaggcttgagatcatgacaagcaggccgcggtctgatctgtacatcaacctgccggcgcttcggaagctagacaacatgctcctcgaaatcctggaaggtttcagggacgtcgagttctggtacgtggaccagggcatctgtgcgccggactgcgacagctccgcgtcctaccggagaacgttccaccgccgcgacgacaagtggtggctgccggtgccgcacgtgccccacggcggtctccgcgaggccacgcggaggcagctggagcaccgtcgcgactgcgccagccagatcctcaaggccgccatggccatcaacagcaacgcactggccgagatggccgtgccggtctcctacctcgactcgctgccaaagaacgggcgcgcggcgctgggcgacgtcatctaccggtacatcacctcggaccagttctcccaggactacctcctcgactgcctcgacctgtcgtcggaataccaggcgctggagatcgccaaccgcgtcgaggcctccatctacgtgtggcgccggaaggggggcggcggcgccagatcgtcctggggcatcgtgaaggacatggtcatggacacggagaagagggacctgctcgccgagcgcgcggaggcgctgctcatgtccctcaagcagcggttccccgggctcactcagacgagcttggacatgagcaagatccagtacaacaaggacgtgggcaaatcgatcctcgagagctactcgagggtcctcgagagcctggcctccaacatcatcgcgcggatcgacgacctgctcaacgtcgacgagctgagcaagcaaccagctgacagcatcccgtccgccggagcggacgcgaaggttgcgtgcaagagcaacggcagcaagcaggccacggcggtgcctgcctcgggcacgccgtacgcgacggcgtacgccacgccgagcttctcgccggcgcagctgtcgagcccgtccaagatcgggagggccctgctggtcgaccgccggtcgcaccacgttgccggagctaagagggcaacggcgtccgcggctgatcgcgctggcgtggaggtggtcaagggaatggtggtcgacggcagcagcgccatattcgatatcatcccgatagctgtcccagcaaagatatgaagagtccgctcgtctgtgcggaccagatacgtcatacgtgttgtgttggcgtgaagtagtgggtttactgtagcatccgagggcgatttctcttgttgccgatggcagccctccgcttgcgactgtaatgcttttggtgcggtgtcgtgtagtatgttacacgtagagttttctgtatctgtcagatgttcgttggat

SEQ ID NO: 149764 - DNA, 807 bp, Zea Mays
atggcttcgggcacgccacccgcgccatcgaggtccgccgccgctccctccgcccgcttgcggcttgcctgcctggtggtgaggcacctggtcgccgcggggcacgacgtgcacgtggtcaccgccgcgcccgagttcgtcttcaccaccgagatcgcctcccctagcctccacatccgcaagtaccaccagacgaccgtggtgcccggggagtccatcctcaagaccgaggcagagtggctcaactccatcaaggccgaccttgtggtttcagatgttgtacccgtcgcgtgtagggcagctgcagatgctggcattcgatccgtgtgcgtcacgaatttcagctcaatttatgcagaagtggatggtaaggagataggcatagcccacatgcgttggcacctttggcggagaatctatgacctgtacttagggaataggcaatttgcagttgttgagaatccaggattctggaactggacctttagcctggtggatgaagatgacaaattgttggctcagattgatcgtaattggaggggcaccggctttgagctcttcacagatgctggccagtatgctatccggtttggtgatgatgtacaaagcgacaagtttgctcacttaccgtttattatatctgggtatgtgggtgcccacttttcccagttagttaatgtctcacaaaagctccagaccaaagaattgcatgttgttcgccagctgactttgcctgaaagggcagtggatcttgctctcgccatttccttggacagtgattacttctctagaagaggtggctggtaa

SEQ ID NO: 149765 - DNA, 501 bp, Zea Mays
atggccagcctgtggcgcgccgtgatggatagcgtcagcggctcctccccctcggcgctggacgcggccccaggtagcggcgtcgagttctggcacggcgcagagcgcgctgggtggctaaataagcagggcgagtacatcaagacgtggaggcggcggtggttcgtgctgaagcaggggaggcttttctggttcaaggaccctgcggtgacacgggcctcggtgccccgcggcgtcatccccgtcgccacctgcctcacagtcaagggcgccgaggacgtgctcaaccgccagttcgccttcgagctctccacgcctgccgagaccatgtatttcattgcggactccgagaaggacaaggaggagtggattaactccatcggtcgctccatcgtccagcactcccgctccgtcaccgacgcagaggtcgttgactacgacagccgcccccagcccccgccgcagcttatgaccagcgaagagagtgcaccagcagcttaa

SEQ ID NO: 149766 - DNA, 912 bp, Zea Mays
atggcggaggattctggcgccatcctccgccacatctcctccgtcaaggatatggtcgacaaggttaatgaagagattgaacaaaacatacagaagaccagggaaatagaatcagagatagtgcaacattctgaaaccgaaaagcactatctcaacaaggagtctgagttgacaaaagaagtatcagttactgagtttgaactcaatggtcttatccaagtggctgcttctgaatcagatttacttaaagtggcagagggaaatttggagttccagaaagttgctcacgatgtgattcggaaaagagtttctgataagatggaaaaattcatcaatgaatctatggggtttcaagccaatatgctcaaaagttcaaatgaggatttagttctcttactgaatgaaaaaagttcactggaggatgaaagtgcgaaattgaaagtgaagataaacagtatacatagttcatccaaggaatacattgcagagattcttgaggaagtgaatacagaaaattcagatcaaagagctgtctccaagcaaggctgggcaccttcaaaagctacatcatttctgtgcttccagatcgaccaagcacctaaggtcaccagcgactttacaccctttctcataggttttgtcaggtgtttgggtgctctccaccaccctgcaaaagatttttcggacagattaggagttcttattgccaatcccaaacctgagaagatcatgtaccagaaatttctagcaaacacaaaactgctgcttgtcactcatcgcaagaagtatgaggactcatacatgtcctcagaagagggaagatactggtatgcttcgatggtgaaattggctctggcaagaagctttagtcatggtttcatggagctttcccaatatagtgaaaaatggtaa

SEQ ID NO: 149767 - DNA, 2300 bp, Zea Mays
cctcgcatttgtccggcctcctgcgggctgcggttgtgcgcgcactgctatttccacacctccccagtgcggcggtggtggcccaatcaaaggccagccggggggcgctcgaggtctctcgttggacacccgccgcggccgaacaagatcatgggcttccaggtggccgcggtggcaccgtcgccgtgcgcgcgctcctcctccgcctcaacgtcgccctcgacctcctctcggccgttgcccgccttccttggaggaggtggccgcgggtgcgccgggctcgcgagatcccggtcacccgtatactggggaaccggtgtgatggtgcggccgccgcctccagctcggacgccagcgaggtgcgcgctgagcgcgagtttggatggtatgggtggcggggacgcggagtttatgaagaggatcgaggagctcgcggcggcggctgggttgcagttgcagccggcgggcgcggtgggctgcggctggcccgcgagcgtggagcggagcgcgagcaacgtcgggctgccgctgtcgctgcgaatgatgaagcggaaaaggcagcaacagctggtggcggcggcgcggcatccgcgctgggacgaggggctgctggtctccgccgccggggagtcggtgggccgcgccttctcctcgatggtgctcattgtgcgggagctgcagagcttcgcgctgcagcagatacgcgacgcggtggtctgcgacgacctgcagggcgtcctggcgcgcgtgcagggcgagatgcacgcctccttcgtctggctcttccagcatatcttcgcgggcacgccggcgctcatgctctccctcatgctcctcctcgccaacttcaccgtccagtcgatgggccacagcgtcgccgctgcagccgccaccatccccccaactccgcctgccgagcgcgcggagccgtcccggtcccggtcccggttcgacgcggcttcggtgaaggcgttctctgtcggcaggacggcctcggtcagcgggaacgacggtgggggcggcaagacgccgcctgtctcgggcgccaccggcgatggccggtcggacgagtcgtccttatatcgaccaagccgtgtgacgccgcagcagccctcggcaccccccggggctgagaccgccgcccaatacgctgcgaacgcggcggaggaggccatctgggaaatgatgctcgcggaggcctccaagatgcaggccagcgcgcgcgccgaggagctgagcgactcggacgtgctgagaggcctcgtcgcgccggtggagactgagctggagaccgaggaccacgccgagcacacgctgacgcagcagagatacgagcaggccgtcgccgctgcgcccaacaattcgctcatcctcgccaacttcgcgcagttcctctacctcgtgcagaacgaccacgaccgggcggagcactacttcgagagggccgtgcgcgcggagccggcggactcggaggcgctgagctggtacgctacctttctgtggaaggcgcggaacgacctcgccggcgcggaggagacctaccaggaggccatcgcggccgaccccgggaacgcccaccacgccgcggcctacgcgcacttcctctggaacaccggaggtgacgacacatgctacccactcgattgacgcgcgcgccggcgccgccgaggatcaacacgatccgggccggtcaaaagaagaaaaaaaatggattcaggaagtaaagttcttgcagcatgcacgggggcggccgcgcccgcgccgcgagacgcctagaccacggcgtcacaccttggcccgggcggtggagtggagctgacacgtgatatcggccctttactttttagtctgattagaagagtgcgtgcgtgcgtgccgtgggcagtggagtgagctgtgatccaggaggacagacatggtggtggcggtggcgctgattcgcccgctccggggaacccgggcaaatggagctcttgacccggcaggggagatcagggtcctgactcccgacgaacttgtcagggccgaccggcggcagggaggcatggacagctggctgtaggaacacgcgttagagtgcagagtcgtcgagggcgacgaggtggtgggatggatcatggatggatgttctttgttctatggctgcggagtatagcaactcgcatcatgtaattatgtagatgtagaaaaataataataatatccgaataagaggtcgtggtaatccacggtgcgtgcaatgtagtagtaccctcggatcttgcgtgcagcgtgcttctctgatcccgatactagctcca

SEQ ID NO: 149768 - DNA, 568 bp, Zea Mays
atggaagtcatggttagggaatgtgagataaattctttcaggtttttcatgacatataaaggcccgttgatggtcaccgatgacctcctcctgcaaggcctaagaaatgcaaaggatggtgatgctgttgccgagggacaacaacaggtgattgtcctctggatagctggtcaaaaaagggcatgctcttttgtgacctccaattgtaaacccaattccaaccttctagcccggagattatttgcagctgttggtgcatgggaagctgacatgcgaacagtgagcgagagaacaaattctacagttgcctggttcagcatcctgtcattgggagtctgtgttgccgtctctgtgctgcagctgtggcaccttcaagggttcttccggaagaagaagctcatttaaattcacgttttatcagtgtgtacttcccgtgttaactaccgtaggtggacaattgtcaaatttatttcaaaaaggaaactcgtatgatggacaaaacaggtcgttggtacatgacttgaaactagcaacctatattccgtggaattgaggtcgaccttccatc

SEQ ID NO: 149769 - DNA, 2094 bp, Zea Mays
gcttcaactccatcatcggtagcctcaagctgaagctccatgcaaatgggcccaagaatacgacgcgaacaggcgagatgcagatgaacaagtgcatgtgcacggatccaagctctctggatgccttgccttgcctatataaaggtccgcagcaccacacatcaccacacacttcaattacgattattccagataagcacgatccgatgatggccccaccgatatccgccgatgccttggtggaggctgcctcggccgtcgccgcgtacccagccatcgcgccgaacagaatgctttgcaaggacgcgccggcgccggccatctctgtcgtctcgaagcagacggtccggcccgccggcgcgtcggcggcggtcggcagtggagacctcaggctctcggtgtcggacatgccgatgctatcgtgccactacatccagaaggggctgttcttcccgccgcctcctcccggcgtgctggcggcctcgctggtgtcgtcgctcgtggcggcgctctcccgcgcgctcggcgtcttccccgcgctcgccggccgcctcgtcacgctccacgacgacagcatcgtgatacggtgcggcggcgacgacgccgccgtcgagttctaccacgcggtggcgccgtctctgtcgctcggcgacttcctggtgcccggcgccgacgtgccgacccgtttgacgaacggcctgttccccatggaccggacggtgagctacggcggccacggccgcccgctcacggcgttccagctcaccgtgctcggcgacggcgccgtgttcgtcggcttcgtcgccaaccacgccgtcgtggacggcacctccttctggcacttcttcaacacgtgggcggggctgtgccgcggcgcgccggtccgggagcccgacttccgccgcaacttcttcggcgactccaccgccgtcctacgcttccccggaggcgcgagccccgccgtgacgttcgacgccgacgcgccgctccgcgagcggatcctccacttcagtgctgccgcaatcagcgagctgaaggcgacggccaaccgctcgaaaagagcaggtcaggaagccgaggctaacggcaagctcgcgcacgacgactccagacttgaagggcgttccggtgaaatctcgtcgtttcagtcgctgtgcgcgcacatctggagggcggtgacgcgcgcgcgccggctgctggctgccgacaagacgacgacgttccgcatggccgtgaactgccggcaccgtctgcgcccggcgatctccccgctctacttcggcaacgcgatccagagcgtggcgacgacggccaccgtagccgagctggcgtccaacgacctgggctgggcggccgcccggctgaacgccaccgtggcgtcgcacaaggacggcgcgatccggcgcgccgcggcggagtgggaggccgcgccccgttgcttcccgctaggcaaccccgacggggcggccctcacgatggggagctcgcctcggttcccgatgtacgacgggaacgacttcgggtggggccgcgcgctcgccgtgcggagcggccgcgcgaacaaattcgacggcaagatgtcttcgttccccggacaggctggggacggtagcatcgacgtggaggtgtgcctcgcgccagacaccatggcgcatctcctcctcgacaaggagttcttgcagtacgtgtcctcccctgcaccgtgaggcggtgacagagtgaatgtgtggcttgttgctgcgcagctacatatagtaactggatttgtaccctttcagcagatatcaagtgcttgccaactttaatgagtttgagtgaccatgtagatgtagagaggctgttctgctgtttccttcgtgatgccgttgtaggctagcagcactagttatggcttccgagcaggtgtggcaaaacggttatgacttatgatagacggatatggtttttaggctcctttgtgttaagtaaccctagttagggttatgtgcacaaatacttgctttgtccctgaggggtctcacctctctatataaggaacctatacaccccctcataatacagagaagagaaagaggccagaggtccaaccctata

SEQ ID NO: 149770 - DNA, 815 bp, Zea Mays
cgcggaacgacgatggtcctaattcaggcgttttgtcgagcaccaagcaagcgttgcacggcaagatgacgtcgaggcgaggatcaaagatggacaaccggcacggcgcgatggcagcttgaacagagacgagaccgacggcgaggttgaagctggagggggagccgatggcgctggggcaagggggtgaggccgagcgccatggggcaagctggaggacgagctcgggcgtggagatagcagaggggcgagcaccacggccaggcgagctggaaacggctgggaacagggaggggctcgcagagaagaagggaacgcgatgctgggagcaggggcctcggctgggaggagctcgactggcggccatggacggagggaaactcgacgcagccaaacttgaggaagaggagggagggacagagcgcgtgccggagctggagaaggagaccgcaatccgtacgccggcgagcagggggagaagaaaagcaagcgccgagcagagaatgagccggacgctgggagcctgggataagaatgatgctgaaaatatccagggagtaagcagtaagcaccgtgcaggaaatatcacaccgcgcgtgcggcagcgataagaacaagaaccgccagcaagaaaaatctttgcgtacatgaagattagggagagaggatggcggggatagggacgccagtagattttttttttgatttttcgattttctctttttcttttaattaagaaaattgcagatattttagaatcgagatctctagcgaccacaaaagagtcacggtaattgcgacagttgattcgattc

SEQ ID NO: 149771 - DNA, 90 bp, Zea Mays
cgcctaaatggcatggcagcggaactctccactcttggagctggcgtggaagaagagaagatcgtggagaagattgctcgcagcgttcca

SEQ ID NO: 149772 - DNA, 309 bp, Zea Mays
ggccaggcaccgagtaccccccgtcctccgtcgcccgccctctgataccatggaataggacaaaccctagacgggtggtctaacaattaagagtgctcaccgagctcattgacgatggtgctatcttctgtaataaacaggtgggattctagtggcccattcaaacctttgcatgtgatgaatccaacccgactgtcttttatccgctccactctctgtagacatttcaggagggatccaaattcatctaagccacttgaaggtctcaaagttattgatgttggatgtggaggtggcattctgtcagag

SEQ ID NO: 149773 - DNA, 1201 bp, Zea Mays
cagtatacagatccatatttgtttatcatttttatcatgttgcaaatctgtgtcgttgatgttttgcatataaaacacattcaggaggaagagaaaaagaaagagaaagaagaaaaggcaaaacaaaagaaagaagaggcaaagatgaaggaaccagaaactgctgaagaagatttagctttgaaggaaatgactgatgctactgctagggaagaactgagaaaagcaaaagaacatgacaaagagaagctctgtaatatcagccgtgccttggctgtgctcgcatctgcatcttctgttagcaaggagcgtcaagagtttctgagcctcgtcaataaagagatagagctatataactccatgctcaaaaaagagggtactgaaggtgaagaagcagctaaaaaagcatatatagccgctagggaagacccagacaatgatgctgaggctgctgcagaagaaaaggtctcgtcggcgttgattgagaaggttgatgctatgcttcaagaattagaaaaggagattgatgatgtggatgcacaaattggaaaccgttggcagctgcttgatagggaccacgatggcaaggtgactcctgaggaggtggccgcagctgctgcctatctgaaggacaccatcgggaaggaaggcgtgcaagagctcatcaccaacctttcgaaggacacagaaggaaagatcctcgtggaagatatcgtgaggctagcatcgcaaacagaggaacacaacgacgacgaagagcaatcacggcagtaggtggaaacagcccgagtatctagatgggtggcctattatttcaggaagaaaactaccaacctctcagttacttgatggctgtgcctggttaatcagaaggcagtacaggcgtttttggtgcccctagtcagagaccccggtagaataactcgttgctgtaaagatggtgtgactgtgacatgcatacaagtgatagggtactctacagagttgtggttcggcaggtagttcgcaaccgaaattttgactggttgctgtgaaagtggaaatacagttcggttttgtcttaaagctaccctcaattctaaaaaaattgtcttctcttgagtctaaaagtagacgggtgactaatgtggaaatgaattaggatgtttatgtactccccctgtttaaattatagagcattttaactttttggagattcagt

SEQ ID NO: 149774 - DNA, 3002 bp, Zea Mays
ggccagcagtgcgtgcgcccttttcttcgctcacattcatcccgcgtgctctctctctctctctctctcgggccgtggcgtcgagtgggcgaccgccgccacccccgtgccgtgcgctctctctctctctctcgtgtcgacgggtgggtgggcgaccgtaggccgccgccgccgcctaggccaggtgcccaggtcgaccttcaacagcgacgagcatccaccagatttctacatgagtgtgatcttcctattgtgaattcagacgcaatcaagtatggcttcaatggcaatcattaggagaaggaagtatttcttggatcatgttaacacacctaccatttcatcgtctgctttctttacattccaacatggaagactcggtttggaggttgagccaagaacagaacagcgatttctcgagcatagttctggggattccaaatgcgagaaggagcaacacaatatgaatttgataaaaaaggatctactaggtcttggtaatgggttttggcaacgtccatcttatgtgatttctctttctcatggtggatttggaaggaatgaatttagattgcctctgagcctgggagctagatctttgctgcagtcggtccgcacagcatcaactgcaacagcaaggcagcctaagatggatacagatgatgaacagagcgaggaccacaagcaaaataaaaggaaaaaggaggcatccccagaagaatgtgatcaggctgtggaaggcctcagcactgcaaaagctaaggctaaagctaaacaggtacaagaatctctgaaggttggccaatcaattatacagaaattttgggcaagagtcctgggtgtgggccctgctcttcgtgctgttgcttcaatgagcagggctgattgggcagcaaaacttaagcattggaaggatgaattcgtttgtacactgcagcattactggttagggacaaaactactctgggcagatgttaggatctcatcaagattgctggtgaaacttgctggggggaagagcctttcaagaagagagaggcaacagctgacacgcacaacagcagatatcttcaggctggttccgtttgctgtgttcatcattgttccattcatggaattcttactgccagtcttcctcaagttatttccaaacatgcttccatcaactttccaggacaaaatgaaggaagaggaagcattaaaaaggaaattgaaagcaaggatggagtatgcaaaatttttgcaagataccgcaaaagaaatggcaaaggaagttcaaacatctcgtagcggagaaacaaaacaaacagctgaagatctggacgaatttttgaataaggttaggagaggtggacgtgtctctaatgatgaaatcttgaattttgcaaagctattcaatgatgaacttactctggataacatgaacagaccacgcttggtaaatatgtgcaaatatatgggtatccggccttttggtacagatcactacatgaggttcatgcttcgcaaaaaacttcaggacattaagaatgatgataaactgattcaagctgagggagttgaatctctctctgaagaagagctccggcaagcctgccgggaacgtggtcatctaggcctgctgtcaactgaagagatgtgccagcagctccgagactggttggacctatcacttaatcatgctgtgccatcttcacttctcatactttcaagagcctttactgtgtctgggagaatgaagccagaggaggctgttgtagcaacactatcttctttaccagacgaagttgtggatacaattgggacagtattgccatctgaagattcagtttctgaaaggaggagaaaattagaattccttgagatgcaggaagaacttatcaaggaggaagagaaaaagaaagagaaagaagaaaaggcaaaacaaaagaaagaagaggcaaagatgaaggaaccagaaactgctgaagaagatttagctttgaaggaaatgactgatgctactgctagggaagaactgagaaaagcaaaagaacatgacaaagagaagctctgtaatatcagccgtgccttggctgtgctcgcatctgcatcttctgttagcaaggagcgtcaagagtttctgagcctcgtcaataaagagatagagctatataactccatgctcaaaaaagagggtactgaaggtgaagaagcagctaaaaaagcatatatagccgctagggaagacccagacaatgatgctgaggctgctgcagaagaaaaggtctcgtcggcgttgattgagaaggttgatgctatgcttcaagaattagaaaaggagattgatgatgtggatgcacaaattggaaaccgttggcagctgcttgatagggaccacgatggcaaggtgactcctgaggaggtggccgcagctgctgcctatctgaaggacaccatcgggaaggaaggcgtgcaagagctcatcaccaacctttcgaaggacacagaaggaaagatcctcgtggaagatatcgtgaggctagcatcgcaaacagaggaacacaacgacgacgaagagcaatcacggcagtaggtggaaacagcccgagtatctagatgggtggcctattatttcaggaagaaaactaccaacctctcagttacttgatggctgtgcctggttaatcagaaggcagtacaggcgtttttggtgcccctagtcagagaccccggtagaataactcgttgctgtaaagatggtgtgactgtgacatgcatacaagtgatagggtactctacagagttgtggttcggcaggtagttcgcaaccgaaattttgactggttgctgtgaaagtggaaatacagttcggttttgtcttaaagctaccctcaattctaaaaaaattgtcttctcttgagtctaaaagtagacgggtgactaatgtggaaatgaattaggatgtttatgtactccccctgtttaaattatagagcattttaactttttggagattcagt

SEQ ID NO: 149775 - DNA, 2961 bp, Zea Mays
ggccagcagtgcgtgcgcccttttcttcgctcacattcatcccgcgtgctctctctctctctctctctcgggccgtggcgtcgagtgggcgaccgccgccacccccgtgccgtgcgctctctctctctctctcgtgtcgacgggtgggtgggcgaccgtaggccgccgccgccgcctaggccaggtgcccaggtcgaccttcaacagcgacgagcatccaccagacgcaatcaagtatggcttcaatggcaatcattaggagaaggaagtatttcttggatcatgttaacacacctaccatttcatcgtctgctttctttacattccaacatggaagactcggtttggaggttgagccaagaacagaacagcgatttctcgagcatagttctggggattccaaatgcgagaaggagcaacacaatatgaatttgataaaaaaggatctactaggtcttggtaatgggttttggcaacgtccatcttatgtgatttctctttctcatggtggatttggaaggaatgaatttagattgcctctgagcctgggagctagatctttgctgcagtcggtccgcacagcatcaactgcaacagcaaggcagcctaagatggatacagatgatgaacagagcgaggaccacaagcaaaataaaaggaaaaaggaggcatccccagaagaatgtgatcaggctgtggaaggcctcagcactgcaaaagctaaggctaaagctaaacaggtacaagaatctctgaaggttggccaatcaattatacagaaattttgggcaagagtcctgggtgtgggccctgctcttcgtgctgttgcttcaatgagcagggctgattgggcagcaaaacttaagcattggaaggatgaattcgtttgtacactgcagcattactggttagggacaaaactactctgggcagatgttaggatctcatcaagattgctggtgaaacttgctggggggaagagcctttcaagaagagagaggcaacagctgacacgcacaacagcagatatcttcaggctggttccgtttgctgtgttcatcattgttccattcatggaattcttactgccagtcttcctcaagttatttccaaacatgcttccatcaactttccaggacaaaatgaaggaagaggaagcattaaaaaggaaattgaaagcaaggatggagtatgcaaaatttttgcaagataccgcaaaagaaatggcaaaggaagttcaaacatctcgtagcggagaaacaaaacaaacagctgaagatctggacgaatttttgaataaggttaggagaggtggacgtgtctctaatgatgaaatcttgaattttgcaaagctattcaatgatgaacttactctggataacatgaacagaccacgcttggtaaatatgtgcaaatatatgggtatccggccttttggtacagatcactacatgaggttcatgcttcgcaaaaaacttcaggacattaagaatgatgataaactgattcaagctgagggagttgaatctctctctgaagaagagctccggcaagcctgccgggaacgtggtcatctaggcctgctgtcaactgaagagatgtgccagcagctccgagactggttggacctatcacttaatcatgctgtgccatcttcacttctcatactttcaagagcctttactgtgtctgggagaatgaagccagaggaggctgttgtagcaacactatcttctttaccagacgaagttgtggatacaattgggacagtattgccatctgaagattcagtttctgaaaggaggagaaaattagaattccttgagatgcaggaagaacttatcaaggaagagaaaaagaaagagaaagaagaaaaggcaaaacaaaagaaagaagaggcaaagatgaaggaaccagaaactgctgaagaagatttagctttgaaggaaatgactgatgctactgctagggaagaactgagaaaagcaaaagaacatgacaaagagaagctctgtaatatcagccgtgccttggctgtgctcgcatctgcatcttctgttagcaaggagcgtcaagagtttctgagcctcgtcaataaagagatagagctatataactccatgctcaaaaaagagggtactgaaggtgaagaagcagctaaaaaagcatatatagccgctagggaagacccagacaatgatgctgaggctgctgcagaagaaaaggtctcgtcggcgttgattgagaaggttgatgctatgcttcaagaattagaaaaggagattgatgatgtggatgcacaaattggaaaccgttggcagctgcttgatagggaccacgatggcaaggtgactcctgaggaggtggccgcagctgctgcctatctgaaggacaccatcgggaaggaaggcgtgcaagagctcatcaccaacctttcgaaggacacagaaggaaagatcctcgtggaagatatcgtgaggctagcatcgcaaacagaggaacacaacgacgacgaagagcaatcacggcagtaggtggaaacagcccgagtatctagatgggtggcctattatttcaggaagaaaactaccaacctctcagttacttgatggctgtgcctggttaatcagaaggcagtacaggcgtttttggtgcccctagtcagagaccccggtagaataactcgttgctgtaaagatggtgtgactgtgacatgcatacaagtgatagggtactctacagagttgtggttcggcaggtagttcgcaaccgaaattttgactggttgctgtgaaagtggaaatacagttcggttttgtcttaaagctaccctcaattctaaaaaaattgtcttctcttgagtctaaaagtagacgggtgactaatgtggaaatgaattaggatgtttatgtactccccctgtttaaattatagagcattttaactttttggagattcagt

SEQ ID NO: 149776 - DNA, 1845 bp, Zea Mays
atggccgcggccgcaaccacgtccacgaccacggcaaccatcccacccggcccgcaccgcaggcgccagcccaacgacatcgagcgcgacgacgacacctgctgcggcggagccggcgtcgatcgccgcttcccccacgcctgcggcgcgcaacacgacgacgacgccgagcgcggcctccaccacgccgccgctgccacgccctgcggcgggactagggcgctgctgttggcgcggaggaggcgagcgtgggccaccgcggcagcggcagcagcaggcgcgccgccccggacggcctgggcctggacgaggggcgtcgtgctctgcctcctcgccctcgccgcggtcgtcgtcgggttccagctgggctcgcaccggggcggcgggagcacggacgcgggcgccggcggtgacggcggcgtcaggctcttgcacttgcacagggtggagacggccgacgccgatgtcgtcatggagtggacggaggagaacctgtcggcacttgcgcgccgctcgcctcagccgccggaaagttttgcgttttggtacccctggtccctggcagagtcagccagtgagcaaactggtggtcatatttggttcggttacgctttcttaaaccaggacatgcttactccagggaaaaacaatgcgactgccggttacctggtcgttgatgcgaacggtggcctaaaccagatgagaatgggaataagtgatatggttgcagtggcgaagatcatgaacgcgtcgctggtgatccctactctggatcatcagtcattctggaccgacccaagcgatttcagagatatattcgacatcgaccacttcaaggagtcgttgaaggaagacattgtgatcgtggattcgctaccactggattatagaagggcgaaaccctacgtgagagcacccacctcctggtccagggcttctttctatagagactgcgcgaaagtcctgaggaagttcaaagtggtgaggtttacccacacggattcacggatcgtgaacaacggcctcgctccttctctgcaaaagctccggtgccgcgcgaattacagggcgctccagtacaggaaggagatccaagggctcggcagcactctggtggatcggctgaggaatgggtccgccgagcattacatcgcgctccacctaagatacgagaaggacatgctggccttcaccgggtgcaaccacaacctgacgctgcgcgaggcagcggagctgacgggcatgcggttcaaggtgcggcgctggaaggagaaggacatcgacagcgaggagaagcggctgcagggcgggtgccccatgacgccccgcgaggcggccgtgttccttaaggctatggggtacccctccgccaccaacatctacatcgtggccggcgagatatacggggagcatagcctggacgcgctcaaggctgagtaccccaacacctacacgcactacagcctcgccacggtggacgagctggagccactggagctctaccagaacaggctcgccgccgtggactacatcgtcgccctgcagagcgacgtgttcgtctacacgtacgacggcaacatggcaagggccgtgcaagggcacaggagatttgaagggttcagaaaaaccataaaccctgacaggctgaagtttgtggagcttattgacaagctggatgaaggttccatgtcctggagtgagttccagatcgtggtgaggaagcaccatgagaacagactgggaggtccatatgagaggttgcgtggtgcaagtccaaggcaggaggaatacttctactcaaatccggtccccggatgcctctgcaaaagggttcagagtagatga

SEQ ID NO: 149777 - DNA, 237 bp, Zea Mays
ttttttattaattataattcatgatgacatcttgaatacgcctctggtcattgtatcacgacgtttcagacaacaaagtacggctaaatgcaggttaacatggctgtatgaaaacgttaattattaatacctgagatagcagtattctccatatttgcagtgagttcagagaattgattatattttaaacgaccattgtgataacttctaattttctagaatttatgtgtagttcac

SEQ ID NO: 149778 - DNA, 929 bp, Zea Mays
atgcctaatggtggctgggttcatgatgatgaggacatagttgatggttacatacatgtagttctcatttatcaagtgggacatcttgtgaggacgagatgtggttctgtgatttcagaacatcttgtgaggacgagatgtggttctgtgactgttgccgtgtacggagacgaggacaagccagcgcttataacgtacccggatgtagctctgaactacatgtcctatttccaaggatttttcttctgcccagaagtggcgtctttgctgctacacaacttctgcgtctaccacatcaatccccaggggcatgagatgggagcagctccaatgtcgtcagatgtgccggtgccatctgttgctgatctcgctgatcaagtcgcagatgtgcttcatttcttcaggtggagggaagaagttttgttgaagtcccctcttagtgtggtggagattggcaaatgacctgaaaagatgctggagcaaacgagccttcataggaaccatcacaagaaccatcacaaccagtatatgatagtttctacgtagtcgtcttgtgctattttcaataagtggatgaccatcctcaactgtgtcgagtactgaagttcaagttacacaaggtgaagcagcacaagtgatgcatgcagtagtagttgaagggtggcaggcattagcagtgcaaggcaataccaacaaagtttaggctacatctagccaagtgagcccaagtgaaggttcaggtgtttgtatgcttaaaaagaagttgacactaaggaaactgctgcaatgtaggacgaattaagtttcttgtacttctgtgaacttgtattggtcgccaccttgtagttctatgaacttgttccagtttcaatttctgtggacttctgtgagcaatttcagttcgtgtgaacttccatgaatgtcctata

SEQ ID NO: 149779 - DNA, 2124 bp, Zea Mays
accaaccaaacagttccttcgccgatttaagccacgtgactgccaatccggccaggctctccgtgcactacttgtctcctccctcgctccgtccgatgtgcctgctggcacagcgccacctaccaccctcagctcgacccaactccctcgtcagtcgtcgccccgcgtcgcgtggtcctaatttaagccaccaactgccgatcaacggcgctcgcccgcccgcccgcccgccagcccgcgcacgccgctcgctccccactcactgccatgggcctggctcgccgcgcgacgctcccgtcgatccctgccgcgctcctctgatagtcacagctagccaggcggccccgcttgccgtgtgtcgggctcggcttgtcccacgcgcgggcgcggagcgggttgttggatcaagctgaccatggcgtcggtcaggtcgtgcgcgtccgtgaagtccgccgtgaggagtcctgtcagttacagatccacgagggccgtggcggccggctcgggaaggctgcgcgtacgctcctcgtcgctgcaggcgctcgccggctgcgccagcggcggcggcggcttcggcttgctcggcagcgatgatgggccgagggtcaggcggggcgggcgggaggtcctcgccacgtgcagcgcgagcttcgacggggtccgccccgccgtcgtggcgggcgccgccgctcagcccgggtcggcggcgttccccgagcgggccaaggtggtggcgctggtggccaccatcatgctgctctgcaacgccgaccgggtcgtcatgtccgtcgccgtcgtgccgctcgccgcccagcacggatggtccagctccttcgtcggcatcgtccagtcatcgttcttatggggatatgttttctcatccatggttggaggagctttggcagacagatatggcgggaagaaggtgatggcaggtgctgctgcgctatggtccttggctacaatcctcactccgtgggcagcctctcgctccaccatcatgttgcttgctgtacgtgcactatttggcctcgcggaaggtgttgcatttccgacgatgagcaccttcttaccgaagtggttcccaacacatgagcgtgctactgccgttggcatttccatgggtggattccatcttggaaatgtcataagcttcctagcaacaccaatcatcatgtcacacataggcctctcgggaacatttgccttcttcgcatcgcttggttatttgtggatctctgtatggatgatgaacgtagaaagtgacccacttgacagccatactataagcaagtctgagttgcaattaattctagctggaagagctggatctaaagtccaaggcagtaataaattcccatcccttagggaattgttctcaaggactgaattcttggctgtcactttggccaatgtggtcaacaactggggctattttgtcctattgtcgtggatgcctgtgtacttcaaaacggtttataacgtcaatctgaaacaagcagcgtggttcagcgccataccttgggcagtcatggctatgtccggctatgttgcaggagcctctgcagatttcctgatcaaatctggtttccccataggactagttcggaaaattatgcagtccattggttttatggggccttgcgtggcattgctatgcttaaggtttgcccaaactccatcagttgctgcagttctcatgaccattgccctgagcttgagttctttcagccaagccggatacttttgcaatatacaggacattgctcccaaatacgctggatctttgcatgggatgacgaacggcatagggacggtggccgccatagttagtaccatcgggaccggctacttcgtccagtggctagggtccttccaggcattcctcaccctcacggctgcgctctacttcagcgccaccgtcttctacaacgtctacgcaaccggagacctgatttttgactgagacaagacatgctaatgctaggattctttcgtgtagacgcagaatcccaaagtgtaccaatatttattatttatttgtacctcccaaggatggaataaaatagaggctgattgtttgccaagcttaaaattcgtgtgcaaaccagggtttacaaaagc

SEQ ID NO: 149780 - DNA, 106 bp, Zea Mays
attaaaactaataatataatagtaccacatattaatatgaaattaatgcctaaatacaatatgcgcctaatccctaaatcacatattcactaatacattaatgaaa

SEQ ID NO: 149781 - DNA, 2434 bp, Zea Mays
gaccccgtgattcctttccaactttcgctgtctcctctctcgctctacatcctcaaaaccactccctccgcccttcacagctaccacgccctgacgccccgagcggagtgtaccaccgccgtgcgtgtccaagcaatgtgagggcgcgccgcggctaagccaggtgcccagggtaacacgcgcgacgacgcaatgacgctgcggatggagccgccggtgccgccgccgcggcggtcggtgtcgacgacctgcgaccttcaccctgaggagaccttcacgggcttctgcgccgcctgcctccgcgagcgcctcaccgggctcgaggccaacgccgccgcggccgccgcgccgggccgcaagtccacctccgctatccgctcgctcttttcccggccgttcgccgctgccgccggcggagggccctcgggctccggtgccgccgcgctgccggacctccgccggtgcaagtctttctcctgcgggagcgggggcgacgcgctggcagccgccggcggggcgtacgagccgcagcggcggtcgtgcgacgtgcgcgggcggagcactctctgggcgctcttccaccaggacgaccgcgagagggtccgcgacggcacagcgttcgtcgccttcccggcctcgtcctccaccgccgcggccgcgctcgccgccgaggtccttgcgccgccgccccctccgccggcctgcgtcgctgagatgttcttggaggaggagattgctgtcgccgaggattccgacgagattgttccggtgatggagcccgtcttggtggccgacacctctgaggagatggagacgggggtgaatgcggcgcgggatgttagggccatgaaggatcacatagatctcgagtcttcgcagtcgcagcagcccaagaagccgccgcccaaggagatggagatcgccgggagcttctggcttgctgcctcggtgttcagcaagaagtggcagaactggaggcgcaagcagaagctcaagaagcaggaggccgcgggcagcaaggctgctgcggcggcaatgcccccaccggagaagccctccaagccatcgttcctccggcgcagccgcttccgccgtggtgaagccggctctgagttcgccggcgggcggcgctcgtgtgacaccgatctaagattctccctcgacgccgggcgcatgtccgtcgacggcatgggcttcgcctgggaccaaccccgtgcgtcgtgggacggctatctgttcggcgccggcgccggcgccggcattgccctcggccgcgcgccgccgccgctctcccgcctgcctcccatcctctcggctatggaggactcccccgccggcatcgtggagcgctccgacggtcaaatccccgtggaggatgactcccagccggagcccgaccccgacgcgaacgtccctgggggctcggcccagacgcgagactactacatggacacgtcgagccggaggcgccggagccttgacaggtccagctctgtgcggaggtccttcgaagtcaccgacccaaagccagtggcagtgccagtaccagtacctgttccagcgaccgcaccggccgccatggtcaacggcaaggaatcccctctaatgggcagctcggagttctaccacttccaccacgccgaagacctgttcgaccaccggttcagcaccaactcactcgtcgaggacttctccgccagcctggacgccgccttccccggccccgcgaagaagccgccgcggcggtggcgcaaggcgtggagcctctggggcctgatccaccgccgcgccgcggggcgcgggaacggcgcggaccgcgcgttctcggagccgtggccggagctgcgcgtccgcgggcacagcggcaggatgcagcggtgcaacagcaacgcgtgcgcgcggagctccttcagcagcaacagcggcggcgggctgggcagctcgaggcgcagctacgtcgtggacgcccacggccacgcgaagcggaggcgcgaggagggcgcggcgctggagcggaaccgcagcgcgcggcactcgccggggccgggcaccgccgacagcggcatgctccggttgtacctcacgccggttcggagcgccagcggccgccggaccgccgtcttccctgtgaaaggcaggcggccgctgaggtcgccgtcgttggcgcggacgatgctggggctgtactgactgctgagtactgacgacggcgacctgcttatttcagtaggcagtagctgatggcttttacatgttcaggcattcgggggcggtagtataaccaaaattcgtttacatctttgttgtgtagtgcaggtgcagtgatccttttgttcattcggaggctggatacaatgggaggttttaatctcgtaagagcatcttcaatagactctttattttttctctctatttaactatctatttacatttt

SEQ ID NO: 149782 - DNA, 384 bp, Zea Mays
atgggtggtgatccaacactagttatagcatcattgtctatatccatccataccgcaaccaagggcactgtttcaccaccatccttcgaatacacgcacgcgctcaaccatgctgtcgcccaacctcacacacgctcaaaaatttatccaaacgtccacgaacaagcacgggaggtcgtcgtcctaggcaaagtaaggaaagatctcatttctcaccaggtctcggcgatggaggcgaacttggcgacctctgcagggttcagcgacgaggaagtgggacctccaccgctcgacctcgatggacctcgaggcggagatggagggggcggcggcagcggcggcggggccgaggatgagaccacggaggcgtacctgctccattga

SEQ ID NO: 149783 - DNA, 1146 bp, Zea Mays
aagaagaagaaatgccccgcgacccacgtcccctccggccctccctctatctttcgctcgctctcggcgacagctgggtgaccgtcgtcgccgccgcccttctccaggtgcccaggtcttcgcaggtccctttgccgcctcttcgccgccgacgagcaccagccagaaaagaagctgaaccatggggaagagaaagtcagctgctaagccacctcctaagaagcggatggacaagcttgacactgtattttcctgcccatttgcaaccacgggagtagttttgagtgccgaattgacatgaagaatctgattggcgaagcatcttgtagaatctgtcaggaaaacttcagcacaactattaatgcactcactgagcctattgatatatatagtgaatggattgatgagtgtgaacgtgttaacactgttgaaggcgacgatgatgcgtgagcttgccccatgcggatgaaactgttacctacaatcgtaatgtaatgtgctggtattctcgaatgccatagcccatagtcagccatggcttggaataacgtagtggctgactgatatgccagtaggcaccttatctagtacttacagaactacaaaaagtttgtactatacatgtatggacaaccttataagtggctatgtgtgtacctatcctaacgctcatcccagatggtgtatcggcgtttttctgtgagattgttttcaagcaagggttgttcattcattgggtcttctcaggacaaagagaattatgctacagtcaaccagatggccgctgttgcgccgacaatacaggggtcatccagttcattttaagggctttgtagagcaaatgcaaccagaatataatttgcagctaaagatattcataggtagaattgttttcagttcattcaacgctgaaagcagtttcggtttggaggctgagctttggatcattggatggcacttggcagctttggcacctggagtaccgctcattagtttttcatcaagtcgtttatttcttgtgcacattgctggagtggagactcggagatcgagatcaagactgtacgcatcataaaccgatcagtgtattcttagtgtattcttcgtagtagaaaataagcagcagcaggtatagctgctttacgc

SEQ ID NO: 149784 - DNA, 1150 bp, Zea Mays
aagaagaagaaatgccccgcgacccacgtcccctccggccctccctctatctttcgctcgctctcggcgacagctgggtgaccgtcgtcgccgccgcccttctccaggtgcccaggtcttcgcaggtccctttgccgcctcttcgccgccgacgagcaccagccaggaagaaaagaagctgaaccatggggaagagaaagtcagctgctaagccacctcctaagaagcggatggacaagcttgacactgtattttcctgcccatttgcaaccacgggagtagttttgagtgccgaattgacatgaagaatctgattggcgaagcatcttgtagaatctgtcaggaaaacttcagcacaactattaatgcactcactgagcctattgatatatatagtgaatggattgatgagtgtgaacgtgttaacactgttgaaggcgacgatgatgcgtgagcttgccccatgcggatgaaactgttacctacaatcgtaatgtaatgtgctggtattctcgaatgccatagcccatagtcagccatggcttggaataacgtagtggctgactgatatgccagtaggcaccttatctagtacttacagaactacaaaaagtttgtactatacatgtatggacaaccttataagtggctatgtgtgtacctatcctaacgctcatcccagatggtgtatcggcgtttttctgtgagattgttttcaagcaagggttgttcattcattgggtcttctcaggacaaagagaattatgctacagtcaaccagatggccgctgttgcgccgacaatacaggggtcatccagttcattttaagggctttgtagagcaaatgcaaccagaatataatttgcagctaaagatattcataggtagaattgttttcagttcattcaacgctgaaagcagtttcggtttggaggctgagctttggatcattggatggcacttggcagctttggcacctggagtaccgctcattagtttttcatcaagtcgtttatttcttgtgcacattgctggagtggagactcggagatcgagatcaagactgtacgcatcataaaccgatcagtgtattcttagtgtattcttcgtagtagaaaataagcagcagcaggtatagctgctttacgc

SEQ ID NO: 149785 - DNA, 2254 bp, Zea Mays
aagaagaagaaatgccccgcgacccacgtcccctccggccctccctctatctttcgctcgctctcggcgacagctgggtgaccgtcgtcgccgccgcccttctccaggtgcccaggtcttcgcaggtccctttgccgcctcttcgccgccgacgagcaccagccaggtatgcgcaccccttctcggtccttcctgctgcgcgaaaccgagcgcccgaaccctaatttgagctatctgtattcggatctaacccaattacaagagcgcgcatgtattatggctcctagcttccattttttacacatgcatgtcctttgctgggcccgcccctgtccgaaccctaacctaagctatttggatctgatttagttacgagtatatatgtgtatttgcatctatttggatcttgcggttcctaaggataacggctgagatgtcgtttatgaaggtgctcgatgttttgattgttttctccaccacatcctaagctatgtcttctataataactctcttatataataagtatcacacaaaaaaattccctataatgtttacgtaatttgcacatcatcgtttattgtaaagtaactcaaatacgtaacagagcgtgcccaagggtgcacgcttgctactagtatgtattagccaccacacagattacagtagacttcattgtatgcatctgttgcagtggagtcattgtatgcatctgttgtgtgtattgttgccttgtggcttgttacttacagctacaactgaatatgtctgtacatctcaaggttgtttaggagacttaattactgtaatttgggttggtttgaaggaagaaaagaagctgaaccatggggaagagaaagtcagctgctaagccacctcctaagaagcggatggacaagcttgacactgtattttcctgcccatttgcaaccacgggagtagttttgagtgccgaattgacatgaagaatctgattggcgaagcatcttgtagaatctgtcaggaaaacttcagcacaactattaatggtatgccaaacctatgtataaaattgtactggttgctcctaatttcacttctatgaactgtactaatttgcatcgaagaaagtttggtcccaaacaactcgtgaactcgttttcttattattgggctgatggacaaggcaacgtgaaatttttcatggtacctgggaacagaacatagcctacaaactgcagaaccattcccatttcatcttgtagtcttgtcttgctaataatggactttgtgggttgtctgttccctgtgtaattcatttgaccatgatagttcttgatcatgtgatatcatagaatgtgtcaaaaacttcatcacatcaaaattaaaactggatagaacactatacataggtaatagtagaattaaatgttaagaagtatttctttatgtttattttaattactaattgttttacgtgatgtcttttcttgcagcactcactgagcctattgatatatatagtgaatggattgatgagtgtgaacgtgttaacactgttgaaggcgacgatgatgcgtgagcttgccccatgcggatgaaactgttacctacaatcgtaatgtaatgtgctggtattctcgaatgccatagcccatagtcagccatggcttggaataacgtagtggctgactgatatgccagtaggcaccttatctagtacttacagaactacaaaaagtttgtactatacatgtatggacaaccttataagtggctatgtgtgtacctatcctaacgctcatcccagatggtgtatcggcgtttttctgtgagattgttttcaagcaagggttgttcattcattgggtcttctcaggacaaagagaattatgctacagtcaaccagatggccgctgttgcgccgacaatacaggggtcatccagttcattttaagggctttgtagagcaaatgcaaccagaatataatttgcagctaaagatattcataggtagaattgttttcagttcattcaacgctgaaagcagtttcggtttggaggctgagctttggatcattggatggcacttggcagctttggcacctggagtaccgctcattagtttttcatcaagtcgtttatttcttgtgcacattgctggagtggagactcggagatcgagatcaagactgtacgcatcataaaccgatcagtgtattcttagtgtattcttcgtagtagaaaataagcagcagcaggtatagctgctttacgc

SEQ ID NO: 149786 - DNA, 1041 bp, Zea Mays
atggcgagttcgggggattcgagcatcgctgtggcgcttgaggcgcaggcgcagaccatggccgcccaagctcggctgctgaagcagatctgtgaccgcctcgacgcgcaagaccgccattgggagacgcttgagaagacagtggcgggtaacatcgcttctatcggcaccttggcgaccaagctgcaagaggtggaggttcatgctgctgttcgagcggacatggctcggtcgttgtcgcatcaggtggagactcaggtgggggaattccaatctctgacatgggagcgcattgatgtcgtcgacgaggccttatctgggcgtgtggccaaccttgaatcggctacggcggttctggagtcttggaggccatacgtcgagcgctctatgggcgtcgcccaagccagcgtggagtctcttcgtgcggaggtcgcgcgtatgtccgaaccctgggggcggccgcaccacgcatctcctccacgtcggccggatgcgtcgatgccatacataccgccggtggcgcgtccgtctgctcctcggatgaacgtcgacgcaccacgcggacatcatgatgcttaccaccgccgggaggaaggccctgggtatccctatactcacggcttactcccgcacaatggtcctttgccttctcgtcagttgccgaatgccaaggttgctgactctcctgctactgctgaaaagaccactcaagataagctggcttcgttgtttgcatatcgaaaagctaaaggcctttgttataaatgcggcttgcaatatgccaagggacatcgttgtgctgatacagtccagttacatgtggtggatgaactgtggaagttactggatctgtctgaccaacaggaagatgatatatctgaagcatccgcagaacttcagttgtgtctgtctcaagctgctgtgactaatatttcagcacctaaaacagtaaagtttgtgggtggtattcaaggaattgatctgctggtattattggattcgggcagttctcattcatttcttagttcccgggtggcctag

SEQ ID NO: 149787 - DNA, 620 bp, Zea Mays
cccctggctgtggtcttcatccgtcccgccgcgccaccgtccgtttgcgccgtcggctctagggtttgttcttctcctccctcctccccgtattccccatcgcgacttctcttctccccctcgccctccctccccccactcccccattctcatccatgtaacctgtgcggtaagatttgcaacatcgtttcccaattttccctggtctgtaaccctagcttcactgtctcctgttcgtggctccatggatgcggcggctgagctgtgtgcgtgtgctctgaagtgctccgctgccgttgatgcagctcctgacaccgtaagcgcttcgtttaccgcggcggttgtagctgatgacttctgtgccacatattctcgaggtgacgaagttgtttctccatatgatgttattcaaaatgctgcgctacggagtaaaagctaagtgtgcattcaatcacgcttgtgccgccgtcgtgtgtggtgaggaggcgttggcatccccgagtaaggtttgcattcagctacttcttacctgaagcagtgaatatctcctgtgtacaacgttgtaatatgtacatttgttactgtctgaaaaacttgaattgatggaattattatgagat

SEQ ID NO: 149788 - DNA, 4491 bp, Zea Mays
ccaaggtttaaaagtcatccgactaatcgtgattagtcggccttatcgctgaagtaagcatgattaggggcttcgactcgactagggtgactaggaagcaattagttgtcctagtcactgactaatcgcgattagtcgcccgattaggggttatgtccaactagcttatgcctgttttgggctagtaattcgtcctctgttctatgggacagcggccggcccaccatctctgcagaaagtagaaaacatgtgtttccctacctgtaccacagtagccgcacagtagtcgtcgtcccttctccagcgcgcggctgtgtcccctcggctccagcggccctctgctccgactgcgccccctctgctccgactgcgccccctctgctccaggcctccatcgtagtccactctagcgcgcgactgtcctgcactgatccactccacctcctccatcagacttcttcagagtgaatcagttcagacttcggagtctattctaaacttcaaaaatcagaacttcagagttcagacttctgagttcacagttcagactttcaaagtctgtactcgacgactaatcatgattagtcatcttatcgatgctcaggcgactagagtcgactagccgactttaaaaccttggagcccacgatgaggttgtggccttccgtaagaagaccaatgccatgctcgatgtggctcaggctgcgtgaaaggagcctgccaacacatgcgcttgtgtccaaacagccacccttaagcaagagaaggccaccgtcgctgccctcaagcagaaggttgtcgccatctggcagagtacatccccccacgattgtcagcccccatcactggacgaccccgttgtagactacaaggctgccactgccgccatcctccatgtctagacagtcgttcctgacatccaatcgttggtgatggtcatcctcgtccgacaattgcacctgctagcatgatcaggttttgcttgctctcaatcggtacgtcctcttcggtcacatcatgtcagacacttggtcgtacaccaaatcatgttgggatcaatgaacaacatcgtcatcaaataagtctcgggcatcatctcccacgagctgtgtcagatcgccagggagcacaatggcatgacacaccgctcctagcccgctctcaagtcgtctaactaatcatgattagtcgcgttgatcgatcgtatgggctagataaagtggctcgacacgatcaggtggactagaaaactagtcgccgactagtcatgactagtcgtctgactaggtgatctgccaactagcccacaatcagatgggttgatgaatggatgatggtaataacatgggctttgaggccgtctcttgagaatttttggcccactagggttcagaatactcttctcttatctctcttctctcattctcatcgatacatgagtgcctctttcctctttcatcttgtctccgcaccgccagctgccaaaccgtcgcaccgcctggaccaccgtcttcagatcatcgccgtcagggactatcgcctagaatgtcgtcgccagggactgccgccgggccccagcccgcaaccgacgacgcctagagccctagagatgagttcctcgtcagatggtacgcctctgctaatctgctctgttctctctttgggataagcaacgttgtgttgattcacttgaatgttgacctgcagcagtgtttctagcctgctgctctagcctctaattgtctagcagtctagcatttattactattagtgcttggccaattggccctcatgatgttgcatgatgtggatcaacgacaacagcatgatgtggtacaagtattgattcttgagccttgtagtggtggcatagctaatgccatgacttcatctaatcttgcagatgagtcttccatagcagagaagaccatagctacactgccgacggaaatggcagatatggctaagaatcctaagagaaaggctcaatcttcagacctaggatggaagtttggattctagccattcaatgcatttttgcaagaagattgcccctgcaggaatcaaaaggttcaaacaacacattgctgggggttttggtgatgtggaaaagtgcccaaaagcacctgaggtagttaagaaagagatagcagcctacttgacgaagatacaattggaaaatgaagaggaaggtgaagaagaggagtaagggcagcaagaagatgcacaagaggcaaacccagcactaagttctgggcaaaaggaaagcaagcaaggaagaaaattgctcatgctgctaatagttcctttatggtttctgctcttgtgaaaccacaaacacagaagcacacgaagtcaataagtgacatgctctgcaagacaccggaagtagttgcagaaaggcataaatccaagacctcaacctactcttgagcatctaacaaagaaagataagaggccaaacaaattgttgatgaccatgtagctgatttcttgtatgagaatggtatctcattaaatgtggttaactttggaaattgggaaattttgcttgagtctattgaacaatatggtcctagataccggtcaccttcataccatgaggttaggggtccattgcttgatagggctgttaacaggacaacggaacttaggaagaagcaagaggatgcttggaatgagtacggttgcatactcatgtttgatgggtggacagacacgaaccactgtcatctcatcaattttctttttttttatcgaacacgcaggagaactgtgcatctttatattaaagggttaccctatattaaaggggaaaggagacaaacccaaagggttttacaaggcagagatcctgccaaaagaacaaaaaggaaaagaaaaacaacacaaaaaaacagaacaagaccaagggtctagatgtctaaggacccaaccacattcaaagacctagcgagatccagggatccaaggcccttagcaccagccataacccaacaaactgattcatccagggatctcatcaattttcttgccaacagtccaacagggtcctttttcattggatcgttggatgcttctagtgaggttgtcacggacaatggagccaacttcaaggcgacgagaagaattctaatggagaggatcccaactctattttgggcactgtgtgcaagccattgcttggatttgatgctagataatattggaaagcatgcaaaggcacaagcagggtctaagtcttttgttagtgatgagtggcatcaaaacaagttgcctgccaatagtgaaggccaacaagttgaaaacattgtcctttctattccgttttggacaaagttggaaaaatgcttacaagcttcacaaccacttcttattgctcttaggatagcagatgggaatgaaacaccaccagctcctgggatcatggcagccatggatgttaataagtgcaccatcaatgattcttcaaaagacaagccacaattacttaaggagatcatggattgctatgacaagagatgggatacccaaatggagcaaaagttatatgaggcagccttgttcttgaatctagcctagttctttcccataagagaaaaggataggagacaggcttcgaggctaaggtccacatttaatgatgttttatagaagatgacaattgatgatgatgaacaaagtaagataagtaagcaagctgatgattatgagaggtccgaaggtgattgcttctcaaaggcattagcaataagagatagagatcaaaaaatcctagtaagttttatcctcactcatgactcatctaaattattcattcttctattttttcgctaagtggtgactgatgaactaaaacaaattattaattaaatgcagttatttggtggggatcatatggtggtcttgcattcgagctccaaagtttagcaaaaagaattgtgagcctttgttgttcgacatctggctacgagcgcaattgaagctcgttttctcttgtatgtgcaccttttttgttctttttttattgtgaagttgctacccagaccaccaattagtgtgttttcttcttttttatgtaggtccataccaaaaagagaaaccgcttagagcataaaaggttaaacaagttagtgtatgttagctacaagcgaaagatgtccaacaagtttcaaaacattagagagctcgtttcaaagggcaagaagcagtaggacgagtgaatgactaactactgctgactaggggcgattagtcaccctaatcgtcgactagtcgaccttattgcccctatggcgtctaggatcgactagatgatttaaaacattgatctctaattacatttttcttctccagtatgtgagcattaaacagaaagtcaaaagcattgttttcagatcgtctgatcgatgccactgggcgatcagacgattagtcgtgattaggcgacgatcagggcgattagtcgccccagatcgaccctaatcgtcc

SEQ ID NO: 149789 - DNA, 714 bp, Zea Mays
atggcttcagggtcttctaggggcaagggtgcggtaaatgagagacgaaaggatggagggaagttaactccaatgtgttttgatggccctcttggtccagatttttttgaagaggcggtttttaactttccagttcaaagtaaaaaagatttcaacaaagagcattcattggtcaaggagaattgtgggttcactagatgggtagatcctcgtccgatttttcctcatgcggaatacatatcctacctacagaataggatatttgatctagagagagaagtaagcaacagaaatgatgaggaagaaagagacaaaaacaatggtggtgctgcacaggtgcaaatggacaattttttgagcttgtatcatggaggcaatgtggaacaagatccgtatggaaatgccaagttcattgacatgcgacacgtgccggtactattcgatgctatgaagacccatttgcaactcatggaggttgtggtgcgtccggttgtagtagaccgtccccctaaagactttgatcgtgctatcgatgacgtgccaactgttcctgatgctcaatctggccccaatttgatcccattaagtcagccaggagatggtctgcagacagatttagctgcgtgtatccctttggcacaaaccaattgcagtaagtcttattgtcattacatcttcattttggaccatgagcactttgctcattccatttga

SEQ ID NO: 149790 - DNA, 853 bp, Zea Mays
ttttctgtcccacgatggcacgatatttaagttgcaccatgttttgtacatgctgatccgagtgcatttatttgtctttaaagataaagatgttataggcatttctgcagtttccaggatgaaggtaatagctgcctacctgcttgctgttctgggtggaaacacttccccgactgctgatgatgttaagagcattctggaatcagttggtgctgaagctgatgaagaaaaactagagttcctgctcacagaactcaaagacaaggacataacagaagtgattgcagctggaagggaaaggttatcctctgtgccttcaggtggtggtgcaattgacatgggagctccagcagctgtagctggcggtggcgcagcacctgctgaagaggcaaagaaggaagaaaaggttgaagagaaggaagagtctgatgaagatatgggtttcagcttgttcgattaaaacaccactgccagtttacagtttctctcgcgaatggtctcacaatattcgctggtttccacaaaataagattgtcaatagctactacgtacttatgctattctgcatgtgatgtacgagtgtgcatcttcaagaatctttaagttgaatggtcccataataatattgataacaatgtaaattgtatgtcctgtacgtactttggtatcgcgacatctcagtgtgcatcttcaaggatcataagttgaatgttatcattaaggtcagtttggttcagataaatttaattgttagttatagctaaacattgccttggtgtcgcaacaactgagttgaatattgtgactgttcgaataaatggtgggggatattgatgatttttttattaaaata

SEQ ID NO: 149791 - DNA, 996 bp, Zea Mays
atatcggatccgttgcttagcaagtcctcacgtgcgattagcctcttggtcgcggggtttcccccctgtgtgagggattttatccgattctagcggcctagattcgtttgcctcggaccgggatgaatcctggcgtttcaatagagtatatataaaactctattattgacagaatggtccggaaaccggtaccatccgccgccgcagccatccgcttcttctcttcggttcagctctcgaggcatttctgcagtttccaggatgaaggtaatagctgcctacctgcttgctgttctgggtggaaacacttccccgactgctgatgatgttaagagcattctggaatcagttggtgctgaagctgatgaagaaaaactagagttcctgctcacagaactcaaagacaaggacataacagaagtgattgcagctggaagggaaaggttatcctctgtgccttcaggtggtggtgcaattgacatgggagctccagcagctgtagctggcggtggcgcagcacctgctgaagaggcaaagaaggaagaaaaggttgaagagaaggaagagtctgatgaagatatgggtttcagcttgttcgattaaaacaccactgccagtttacagtttctctcgcgaatggtctcacaatattcgctggtttccacaaaataagattgtcaatagctactacgtacttatgctattctgcatgtgatgtacgagtgtgcatcttcaagaatctttaagttgaatggtcccataataatattgataacaatgtaaattgtatgtcctgtacgtactttggtatcgcgacatctcagtgtgcatcttcaaggatcataagttgaatgttatcattaaggtcagtttggttcagataaatttaattgttagttatagctaaacattgccttggtgtcgcaacaactgagttgaatattgtgactgttcgaataaatggtgggggatattgatgatttttttattaaaata

SEQ ID NO: 149792 - DNA, 984 bp, Zea Mays
atatcggatccgttgcttagcaagtcctcacgtgcgattagcctcttggtcgcggggtttcccccctgtgtgagggattttatccgattctagcggcctagattcgtttgcctcggaccgggatgaatcctggcgtttcaatagagtatatataaaactctattattgacagaatggtccggaaaccggtaccatccgccgccgcagccatccgcttcttctcttcggttcagctctcgagtttccaggatgaaggtaatagctgcctacctgcttgctgttctgggtggaaacacttccccgactgctgatgatgttaagagcattctggaatcagttggtgctgaagctgatgaagaaaaactagagttcctgctcacagaactcaaagacaaggacataacagaagtgattgcagctggaagggaaaggttatcctctgtgccttcaggtggtggtgcaattgacatgggagctccagcagctgtagctggcggtggcgcagcacctgctgaagaggcaaagaaggaagaaaaggttgaagagaaggaagagtctgatgaagatatgggtttcagcttgttcgattaaaacaccactgccagtttacagtttctctcgcgaatggtctcacaatattcgctggtttccacaaaataagattgtcaatagctactacgtacttatgctattctgcatgtgatgtacgagtgtgcatcttcaagaatctttaagttgaatggtcccataataatattgataacaatgtaaattgtatgtcctgtacgtactttggtatcgcgacatctcagtgtgcatcttcaaggatcataagttgaatgttatcattaaggtcagtttggttcagataaatttaattgttagttatagctaaacattgccttggtgtcgcaacaactgagttgaatattgtgactgttcgaataaatggtgggggatattgatgatttttttattaaaata

SEQ ID NO: 149793 - DNA, 971 bp, Zea Mays
atatcggatccgttgcttagcaagtcctcacgtgcgattagcctcttggtcgcggggtttcccccctgtgtgagggattttatccgattctagcggcctagattcgtttgcctcggaccgggatgaatcctggcgtttcaatagagtatatataaaactctattattgacagaatggtccggaaaccggtaccatccgccgccgcagccatccgcttcttctcttcggttcagctctcgaggatgaaggtaatagctgcctacctgcttgctgttctgggtggaaacacttccccgactgctgatgatgttaagagcattctggaatcagttggtgctgaagctgatgaagaaaaactagagttcctgctcacagaactcaaagacaaggacataacagaagtgattgcagctggaagggaaaggttatcctctgtgccttcaggtggtggtgcaattgacatgggagctccagcagctgtagctggcggtggcgcagcacctgctgaagaggcaaagaaggaagaaaaggttgaagagaaggaagagtctgatgaagatatgggtttcagcttgttcgattaaaacaccactgccagtttacagtttctctcgcgaatggtctcacaatattcgctggtttccacaaaataagattgtcaatagctactacgtacttatgctattctgcatgtgatgtacgagtgtgcatcttcaagaatctttaagttgaatggtcccataataatattgataacaatgtaaattgtatgtcctgtacgtactttggtatcgcgacatctcagtgtgcatcttcaaggatcataagttgaatgttatcattaaggtcagtttggttcagataaatttaattgttagttatagctaaacattgccttggtgtcgcaacaactgagttgaatattgtgactgttcgaataaatggtgggggatattgatgatttttttatt

SEQ ID NO: 149794 - DNA, 1012 bp, Zea Mays
atatcggatccgttgcttagcaagtcctcacgtgcgattagcctcttggtcgcggggtttcccccctgtgtgagggattttatccgattctagcggcctagattcgtttgcctcggaccgggatgaatcctggcgtttcaatagagtatatataaaactctattattgacagaatggtccggaaaccggtaccatccgccgccgcagccatccgcttcttctcttcggttcagctctcgaggtacgcgtgcgcggatcccaatctttcttcctcatctttatactagtcgactactagacttgatgccaaacgattttcgtgtatttgcacggtcgcgccggaagctaaaacacaagtattctgttttgcaattattgcacgattccgtggtagaatggaaactgtttcaggttgccaatgaaattcgtgttggtggatttggacgctatgatttgtttgattgtctcatatcctcatcggtccgtctctggcatgttgcctctttctgagggctgaggaggtggtatatactccgcgcctcaggtccttgttttctaagatcacggctaaccttttcaattcgatttagttttttttttgtgtgttttggaaggaaacagtacatattaagcaagcaacgcgatcttgcaattagctttcttttcccagataaagaaacttgcgcctttcagggcacgaatctaagatcaaagcgatgtatttattatctcagggagggttaggatgagtaggccattcgtggtgggggtggcttcggcttaatattcggattcaaatccttgtattccagctgctctttaggttctgcggagctgtttatatggattaatgaatttttggagtttaactcacatttaactatcaagtatcaactacatattcctaaagatatagatatggatccaaattgattgttatgttcctacttgaattgacttgttattgtaagcttgccaatcctgcaatgtgtttccttgtttcattatggtc

SEQ ID NO: 149795 - DNA, 915 bp, Zea Mays
atgttgaaagaagttccaaaggatgctgtagaaacaactaatgcaaagttggcatctcaaattagaagcaagattgaagaattaatttaccgtgctgaaggatcaaacaatgggttacaaacactttgggatagtattgttgcatttggtgaagatctttccatattgctaccagagagaatgacaagtcaagttcaaaagatcgagtcctttgttggttgttcaatccctagccatgttattatacagccacctaatgaagtcaaatctgtgggtaggtgcaaacgaataaaacctggtcagaaagtaaagaagcccggtgacaatgtggagaagaaacagaaagttcctcgtatgtgcagtgggtacagggtagctgttgatgcatcagcacaggaagaaaccctgcttggctttgctatatgggagccatcccatgggccttacaaaacaatgaactatccttggaggaccttcaccaaagttagtggagcattgaggcactgttcctttgctgtaatggcattacatggttgcatactttcagaaattcaggcaccaccagaaagcagaagagtattttctgcagagattcaaagagtgggacaggaaggagctaaagtattgcgcgagcttggaagcagagttaagacaatgaccaagctgagttcttcaggtattctgttcgaagtgcacatggcagctgaagagctgcaaaaaaagattgatgagaagtcatatcttctggtgaacactgaaagatgggatgctagcaagcaagctcaaggaatcaaagaagttgtaaatggtacccgtgctgtggaaacggaaaacaagaacaaagaaatccttttacacaggataaacacgtttcagagaaacgcaaaggcaaaactgcagtcagataactgctaa

SEQ ID NO: 149796 - DNA, 1227 bp, Zea Mays
gcatatcgtacagggcgaccgagggagcaaactgacccgtctatggtgttgagggcttgcgcaatggagggcactttcggcgtgccgtattacgagtggctcaagccgcggtcctcctcttcgacgccgccgccatcgccgtcgtcctcgtctacgtcctcgacgacagtctcagcaccatcgatcgaccaactagccgccgccgctgccgatgtcgtcgtccatgatgagcgcgacgccatgatgtgcttgccgcttcttggcaggcttgaagggagggcgacgactcgtgatcttggccataatccgatcaaagaagaggaggccgccggtgttgacctgagcatcggcctgccggcgccggtaactggcgccagcggctactgttctgaagcggcgccttcgtcgcccgtggacgaggatgaggatctcgaggaggaagaggacgagaaggcaaggaaacgtgacagtgacgagtgcaaggtggaaggagcaggtggagagcgatatcgcagtgagatggtggtggtgtccggtgagagaccggccgattacatgcgtgtgggtggggaggagggcatcgtcggcagccgcggccggcggtactggatcccgactccggcgcagatactcgtcggcccggtgcagttcatctgccatgtctgcagcaagactttcaacagatacaacaacatgcagatgcacatgtggggccacggccgcgagtaccgcaggggcccggagtcgctcaagggcacgcaggcggcgacgctggcgctgctgaagctgccgtgctactgctgcgcgcccgggtgccgcaacagcgtggcgcacccgcgcgcgcgcccgctcaaggacttccgcacgctgcggacgcactacaggcgcaagcacggcggcgacaagcgcttcgggtgccgccgctgcgccaagcccttcgccgtcaagggagactggcgcacgcacgagaagaactgcggcaagcgctggttctgcgcctgcggctccgacttcaagcacaagcgctccctcaacgaccacgcccgctccttcggcggtggcggccacttctacgtcacgccgccgggccaccagcaggcggccgtgccgccgctgctcaagcccaaggagcggatcgtcatacgcttcgatcaggcagcagcgccatggaatggagcccacgcgcccatatgcatgacagacaggttaacagcaccgcatgtatag

SEQ ID NO: 149797 - DNA, 1523 bp, Zea Mays
catcagtacatatactcaggtagcgcaacctggcctggcccggcccggcccagagaggagcgcgcccatatcgcttccctgagggctgaggccgagagcgaagcggagcgagcaccggacgagaggcatggccatggcgcgggcggagctccgcaccgtgaccgtgcgctcttccccgcttccgcgctgcgtcctctcccggctgctgccgttgctcctctcagtctcagccatcggcgctgcgtcggcggcgccactcaagttcgggatcaactacgggcagattgcgaacaacctcccgcagccgacgcaggtgtcgggcctcctgcagtcgctgaacgtgaaccgcgtcaagctctacgacgccgaccccatcgtgctgacggccttcgccggcacgggcgtcgagttcatcatcggcaacgatgacctctacaacctgaccgacgcacgcaaggcccgggcctgggtggcgcagcacgtccagccgttcctccccagcacgcgcatcacctgcatcaccgtgggcaacgaggtgctctccggcaaggacacgaccgccatgcagagcctcctcccggccatgcagaccgtgtaccaggccgtggtcgccctgggcctcggcggccaggtgaacgtctcgacggcgcactcggtcaacatcctggccagcagctacccgccgtcgtcgggcgccttccgggaggagctcgggcagtacatccagccgatcctcaacttccacgccgaggtcggctcgccgttcctcatcaacgcgtacccgttcttcgcctacaaggcgagccccgggagcgtgtcgctgccgtacgtcctgttcgagcccaaccccggcgtggtcgaccccaacaccaacctcacctacgacaacatgctctacgcccagatcgacgccgtgtacgcggccatggaggccatggggcacagcgacctcaccgtcaggatctccgagaccgggtggccgtccagaggggacgaggacgaggtgggcgccaccgtggccaacgccgccgcgtacaacgggaacctcatgaagaggatcgccatgggccagggcacgccgctcaagccgcacgtgcccgtcgacgtcttcgtgttcgcgctcttcaacgaggacatgaagcccggggcaacgtcggagaggaactacggcttgttttaccccaacggcacgccggtgtacagcctcggcttcaacggagcgtccttcagcccatcgccgacgtactcctcttcttccaagctggtgattacatttcagatggcagttgttgtcctactcgccagcttctccatcctacacactgccgtgccgtgccatgcgtgaagattattgctatttttttgactaacccatctgtggcttcattgtacattaggctagctaccagaacccatattagtctgacttgatgtaaagcatgcgacagtagtgctgtccagctcaattgataatgcgtattatatttgttttctaaaaaaatgaaattacaaatgtccatttc

SEQ ID NO: 149798 - DNA, 643 bp, Zea Mays
tttccctcttctcgtttagtatgttgatgctggtcgacttggaaagaagcgtggagtgggtgtatattcatatggacacatgtcttcatccgtcaagccaaagtcgtctccgtaaacatgagagcaaccattgagcaaataaaatcagatgtatgttataattgtacatcagagaaacagaagcacgacctgattcagagttactcaattggatgcttcaagtcgtgcaaattcgcaatggcaggctttgctgctctatgtagaaagatgattcaatgttttaatctgataaatggaactcatgaaacatttccccaagttgcattctgctcgagagagtgggagaaacggcaaacgtctgcaccatatgtttctcctttgtattgtaatattctataagctacaaacaacatatctcactctaaacaagatgaaggaaaccagtgagtttctattgcggttaggtgcaacatggatcattacgctatattttggttgtaactgagttgtcatatgggccaaatttcactgtttttcttggatctaggagcaaaggatgatctattggtttgtaacctttcttgtattaataactgatgatttacacctccagtttcctaacctgaggaagcacatatttgtc

SEQ ID NO: 149799 - DNA, 234 bp, Zea Mays
gtgtgtaccttggcaagagccatgctccacaggcttaggaaaatcttgagacccttagcgacaagaccatatccactaacgaagatatttatatcactatgttcaccatttgcaaggaaccctccactccaattttctacacgtttagtggtgctttgagtggagaggagtcaaatttatgatcttgcagtctactttttgatacttttaatatttttctagaattagaaggtt

SEQ ID NO: 149800 - DNA, 102 bp, Zea Mays
tttcttcgaacagaatcttcaatatgagaatctgattatccaaacacgtagattctcacgaacagcttttctgcacagctggtgaaccaaacacctaaattc

SEQ ID NO: 149801 - DNA, 955 bp, Zea Mays
gtttactgtgatttgagttgttgtgattgcatttgtacttatttgtccatattagtactttcaatttgttggatgcatacgtgatgccatgtgagtatcgtcatttgtgcaaatccattgttttgaatctgtccagtatgctcgttgatgttcgattactttgtactggtgctttggttcaagaaataaatccatcgtgaggcggaatgaagaagcgccggtgcaagagctccgattcaagaaattaatacattccccattctttgcagtttagtttatgtttcaattccaagtttatttgttgatgtatctttgtaacaatttttttgcagaggaataaggaagcaaaaggatatagacataaggttgtgaagttttgggatctactcagcctagtgtacaataaagaccaagcaaatggagagggtgctaaaacagcagctgaaagatcaaaggaaatggcaaaagagaatgataccggaggcaaggatgctccatattctatatcttcctcgagtagtttagaaatacaaagatcagatgattcatttaactctgtggtgtgataagtttgacatgcttacatctgcattgaaagatgacggtccgaagctaccctcttccgccgaagttctcgccgcattacaagaggttgagggacttgatgaagacacataactttagctttatgacatcctcacctctaatgcacgcaagtttgagtcgatgatggcactcccaatggaaaggaggaagaggtggcttatgatgcagctaaggaagtgaaacaacttatatgtgaatttagatctctgtgttgaactgattgtgtgaacttgtctttgtgaaacttttgtgcgtgaacttgatggctatgcgaaactgttgtgtgcgaatttgatggctttgtgaaactgctatgtgaagatttgatgcctttgtagaacttttatgt

SEQ ID NO: 149802 - DNA, 727 bp, Zea Mays
agtgcgtcacggccgcgcgaccattcttcaccttgtcactcgcaactgggccgtctctggattctttctcgagttgctacgcgcgcgcagaagctccgatccatggcactgtcgcctagaggttgcacggttctcatggccctgctgctcgtggccgtggtcactgcccttgcggcgccggccgtgacagcagccggcctggagtggacgcccagcgagcgccacaaagcccgctctccgaaggccccgaccgcgctgccttcggcggctgcgccagccggggcgcctcccaccccggggctgtaccctccccatgggatggcagcggcggcgcctggccctacgcagggagcggaggctcccgccccatcgccttaccacaacgacggtgcggctgctgtgccgttcgcgtgctcgagtgtgctcctggtcgtcgccggcgtggccgctgcgatagtggtctgaaactacgaatgcggcactgatcgatatgtgaatcatgttgtaccgcggcacccaattccactggtgctctatcaatgtttcatctttcttttatcatgctctatgcggtggtgatggtgttcttgtgctgcggtgctggtcataatgtaatcaatgctctcattactatctgaacaatttgtgtatcgcagaaaaggaactacgaaattgttgtaaatttattagagaaataagtgacatgcttccttcatatttaaataaa

SEQ ID NO: 149803 - DNA, 213 bp, Zea Mays
caatagtctcgttgatgggtctgacatcacttgtcgaagatgtcaaaaacagcattttgacagtgctaggttcctatggtacccatcgaacgcggaggtggacgaggcgcttgtaagactggatatagaggaagagcagcacgtcgcggatgtcggcggcagcaccatccatggcgccgtccccaagcacggggtcctcggccgggagcatcg

SEQ ID NO: 149804 - DNA, 2556 bp, Zea Mays
gatcttggcaaacccacccgtctgttctcgtcgtggcggccgccctgtcgccgtgtccccaatccggctccgacaatcccacgcccagcagtccagctccagcaccatcagcgccgccctgcccctgtccctaatcccacgcggccacacccaggacccagcggcctgcgggctgcggcagtgcggctagcacaccacccgtccagccgtccagccgatctaggtctctatgtgtcctttgagtcttctctccatataaattcatcataaaagctcaaaagacctagatcggctttttcccccttgttcggcaaaggcgtttcggggtgttcatcgtggattgatcgatcatggcggagggggagacatcggcggaggaaaagaggaggcggacggggccaccagaggcgcaggagttggaggagacaaagaggaggcggacggggccaccagaggcgcaggagttggaggagcgcctggactctctcagggacaaaattgcggccgcaaggcttgtcgctggcagccgattcggcgaggagcagcgacggtccttgttgcgggagtggttgcgcctcgcatctgccaagttggatctggatctctcaggcatgagcgagttggaccgatcggcagaggcgttgccttggttggtgccgccggaggaggcagacaagaggacgacacacacgcggcaagaggtgcaggagttggaggagcgcatgacctgtctgcagttgctatccgaggacgcagcagatgacaggattctcgccagaagggagcttggagcagcagccgacgagttcctgctccgcttgacgacgcgtcaacgggccttggcgcgcgagtactcgcgcctcgccaacctgaagaggcctcccgatctctccggcatgactgaggccgaccggggggcggaggcggagaggctgagggaggagatgttgcagaaggcgcgtcaactccaggaccagggggacatgagcggcgcccgcgagtctgaaggtctggcacgcatcatcgacttcgatgtcaagcagggtggcgaatacctcaacagtatctgctgtgtcggcaacatctacaccttcgaccacacagaggagtcgcccgttggtccgatgagatttaccaacagaccctggcaagacaagatgtgtgtgaattgtgcgtcgataaacatcctatctgtcaagattgcatgctcggatatcgacttccccatccaagtctatggcaccgttgttgccagggactgcatcgactacaagtgtgtttacctcttccgccgagataatgaccattgccaactcatcagctctaatgaagaatcattgatcttgactggcccaaaacggggacttgcattgtggtacgatgctgattatgttcagactgatctctgggtcaaggatcgtcaagggcattgcaaacaattcagtaaggggatcgtgaggatcccaggcaatcaagtgtttgacaaatgtgagcctgaaacagtatctcttgctaccaggctcagtactgtggatgtgacatatgacgttgtggaatgtgcggtggaggcaactgttgcagctgaagttacacagggggaattctatggagcatgactgcccacaccaccagagcaagaggaggattgtgctgtttgatagccaagtaggaggtgataaatgtcatggtttgattcaattgatgcgacctgttgtatcggtctctgtgatggacaagctgaaaattttcgcaacgaccgctgctggtgtctctacaggcgttgaagttactcctagatggaacggtggacacgaattcgtactcactttaggtgacgctacgatttgtgtgaaggttacttggtcgatggtagatccacggctttaaatgggttcgcctgttcgttgttaagcatcatcggtggaagtgtagtagtgttgcattggaagggtttattctactcttgttatttgtctaaatgcatcattttttttgtgtggtggtggtggggttgtgttgctgggttctcaggtaatattttaaataaaacctgaaaatccaggcagagctcaccttttggtgcggccatggtggtcttcaccttttgctgggttctcatgcttgtttgaggcagatatgatgagtggctacaaacagactggagcgttcaggtgtgcgagcatccagagctgaacggaattgtgattctaactgactagaaactgaagagcctcctttcagttttaaattgtgcatcggaattgtagaattgttatcttagctttcaaggcatcggcacttcaaccttcggtttactcgtgtgtgaagtcgtagaaacattggccctttcgttcgttctcttgggagagttccagtggcgatgaagcttttcagttttcacagctcggatgtgagcaaatccattagctcctgcactgcatggtacggtacctgctacgttttgaacatttgtgaagcattcaattttttttttttttttgcctttgtttaagacagactgcttatcacaaagcatcctctgtcggttcaagatat

SEQ ID NO: 149805 - DNA, 1344 bp, Zea Mays
tgacgcccgcgtgaaaccagcgtctcgtgcatcctacggccaccggctttccccattttgtccttaactcaaacgcgcaagccaccccctcttcgcttccgttcctgtcctctcctctgtccctctacggtgcttctgctcgccggcccaaaatcgcctcatcgaccacgcccccttccaggctcccgtctccatgggtctcctctcaaacaggattgggagggagagcctcaaggcgggggatcatatctactcctggagggcggcgtgggtctacgcgcatcacggaatatatgtgggcgatgataaggtgatccatttcacaagaggaagaggacaggaggtcggaacaggaactgtcgtcgatattattcttgtgagttccaccccaaaacgaagcaacacgccttgcccggtgtgcaccgacgaaaccagcgacagcagcacagagacgaacggcgtggtatcctcctgcctcagctgcttcctagctgggggtgctctctaccgtttcgagtacgcagtcaacccggcgctcttcctcgccaaagcgcgaggagggacgtgcacgctcgctccctctgaccctgacgacacggtggctcgccgcgccagatacctgctgagcaacggtttcaggtgctacaacctgttcaagagcaactgcgaggacttcgcgatatactgcaagactggccttcttgtcgctgagcagggcgttgtcgggcagagcgggcaggctatctccatcatcggtggacctctcgccgcggtggtctcgaccccattccgcttggttaccacgaacatctatgggatggcggtgatggccgtcggggtgtactgcgcgagcaggtatgcagctgatattggcaaccgccgtgatgtggtgaaaatggaagtcgaggacctgacggccggactggccagcggcaggatatgtgctgtggagaacatcgcccagctggtggctccggaggcagaaggcccggccgatgccacggccacggccacgctggctgcttaacggaccattgtgccattgttgctgtgagagagatgtgcgtcagccaacatgtgtgctattgctttggcttatttgtgttcagaatccacttaaactcggtcgaagtgagctttccgttcggcaacgtctgtactcttacgaatctcgatcgtgtatgtctttaagtattgtgttgtgtttcaaagataaaaaaaggtgacctttgtgtatgattttttatacacgttgtctcttagctgcattgatagtctaaggtctcagaattgtaccatgcaatcatagtgtaccatgcaatcatagacgacctgttgcctaca

SEQ ID NO: 149806 - DNA, 1652 bp, Zea Mays
gaaagaaagaaaaaaaaaaggggttgcaattttgctgggagcctgggacgctgagtcagacccccaccgatggcgtccgaatcctccccgcccccggcgggggcgccaccgcctggtctgggagacaagctagcggtgttctgggacgagggcatgctggcccacgacgccggccgcggcgtgttcgactcgggccgcgaccccggattcctggatgtgctcgaccaacacccggagaacgccgaccgcgtccgcaacatggtctccatcctccgccgcgggcccatcgcgcacttcctctcctggcactcgggccgccctgcccacgcctccgagctcctctccttccactcctcagaatacatagaggagctcgtccagacgaacgccaccggagccaagaagaagctctgtgagggcacgttcttgaacccgggctcctggggtgcggcgcttctagcggccgggaccacgctctcctccgcgaagcacatactagacgggcaggggaacctggcctacgcgttggttcgcccccctggccaccacgcgcagcccgaccacgccgatggctactgctttctgaacaatgccggacttgctgtgcaactggctctggattccgggcgcgcaaaggtcgccgttgtggatattgatgtgcactacgggaatggcaccgcggagggcttctatcggacagacaccgtgttgacgatgtctcttcacatgatgcatggttcttgggggccatcgcatccgcagagtggctccgtcgatgagattggtgagggcaaggggcttgggtacaatctcaatatacctttgcctaatggaagtggagatgctgggtatgaatatgcgatgaacgagttggttgttccatcgattgataagtttcagcctcaactgttgtttcttgtggtcggccaagattccagtgcgtttgatcccaatggaagacagtgcttgaccatggaaggctacaggaaaattggacaaataatgaggcgcctggctgatcgccattgcaatgggcaaatactggttgtccaggaagggggttaccacatcacttattcggcatattgtctgcatgctacactggaaggagttttggatctggaagccccgctgcttgatgacccaatcgcttattatccggaggatgataaatacactatgaaagtcgttgacatgataaagagctactggaaggaatcggttcctttcctaaaggaaatttagaggaaataatgttcgcgccctcaatgttcaaattgcaggaaactccacattcctggacatcttcaattgaattgggaagaacattgcacgtctacgttttcaggccgtttaagattatctgattgacagtttcacgcctaacattgtacaggatagattaagaacattgtttgctgctgctcttgaatttctgcaatcaggatctcgtcagcctatttttgataaacagtcgatcttttttttttccctgagatgcttttggcggcagtagaaggtaggcggtgcttgagagtgacagagggccatgtaaccaggggataaatcttgattgactagtccaagcaaagggtgatgctcgctaccagaacttgaatgtgtttttttttcccatcaggttcatcctaggc

SEQ ID NO: 149807 - DNA, 1474 bp, Zea Mays
gaaagaaagaaaaaaaaaaggggttgcaattttgctgggagcctgggacgctgagtcagacccccaccgatggcgtccgaatcctccccgcccccggcgggggcgccaccgcctggtctgggagacaagctagcggtgttctgggacgagggcatgctggcccacgacgccggccgcggcgtgttcgactcgggccgcgaccccggattcctggatgtgctcgaccaacacccggagaacgccgaccgcgtccgcaacatggtctccatcctccgccgcgggcccatcgcgcacttcctctcctggcactcgggccgccctgcccacgcctccgagctcctctccttccactcctcagaggagctcgtccagacgaacgccaccggagccaagaagaagctctgtgagggcacgttcttgaacccgggctcctggggtgcggcgcttctagcggccgggaccacgctctcctccgcgaagcacatactagacgggcaggggaacctggcctacgcgttggttcgcccccctggccaccacgcgcagcccgaccacgccgatggctactgctttctgaacaatgccggacttgctgtgcaactggctctggattccgggcgcgcaaaggtcgccgttgtggatattgatgtgcactacgggaatggcaccgcggagggcttctatcggacagacaccgtgttgacgatgtctcttcacatgatgcatggttcttgggggccatcgcatccgcagagtggctccgtcgatgagattggtgagggcaaggggcttgggtacaatctcaatatacctttgcctaatggaagtggagatgctgggtatgaatatgcgatgaacgagttggttgttccatcgattgataagtttcagcctcaactgttgtttcttgtggtcggccaagattccagtgcgtttgatcccaatggaagacagtgcttgaccatggaaggctacaggaaaattggacaaataatgaggcgcctggctgatcgccattgcaatgggcaaatactggttgtccaggaagggggttaccacatcacttattcggcatattgtctgcatgctacactggaaggagttttggatctggaagccccgctgcttgatgacccaatcgcttattatccggaggatgataaatacactatgaaagtcgttgacatgataaagagctactggaaggaatcggttcctttcctaaaggaaatttagaggaaataatgttcgcgccctcaatgttcaaattgcaggaaactccacattcctggacatcttcaattgaattgggaagaacattgcacgtctacgttttcaggccgtttaagattatctgattgacagtttcacgcctaacattgtacaggatagattaagaacattgtttgctgctgctcttgaatttctgcaatcaggatctcgtcagcctatttttgataaacagtcgatcttt

SEQ ID NO: 149808 - DNA, 1008 bp, Zea Mays
tcctaatcgatcagcacatatagaataatgattcccataacaggacatcaactccatacatcaaatgaaattcattataggcataaacacaaccaccatgtatagacgattgtattcaccgtgatttcctcacctaactttcttctccactaacatcaatccatacacataaacacgacatcgaccaaatcactgcaagtgacacatgcatttcaataagtattatacctacaaccatgacacacacatgctactgtcaagaggaccaacataattaaaacatccaactaatccatctgtccaaccaagaagagaaatagtgaaccagctcaccaatacaaaatgctactcagatccacaatatcaacaacgaatcccaattcgaacatttcgtcgaacacctggcgggcgtcatattggaccatgcttcttcatcaccaaatcctgggatttccccctcacatctcacacataagcacacacataatcacaatcaaccacaaaccacatgtatcaattaaggagataagtagcacaagacaaagggacctcaccgatgactatgaactgcacaagtcgacaacgaggcatccatggagggaggtgttgttgttccctatgccatgggagaggtcggctagggcaaccataggaagtaacaagggaaggggcgtgtctagggggatggctcggccacctgggagagctacacgcgaccatggaagggagccggggactaccggcattcatggtcaggggcggaagctgagggaagggcaagacgcgacggatgccggagctaggggaaaaagcaggggcgtcgagtggaggtgtggcggccggggaaggacacagggactaacggcagccatcaccggcgtcgagcaggggagggcaagcgcgtgtaggagacaaaggctgggaatcggacgtggagaggataagggcatgggcaggagagtcgtggggataagaacctggacgatgggagcttcaggaaaacactag

SEQ ID NO: 149809 - DNA, 492 bp, Zea Mays
gttggtagtgcttgtatgtagttccccctgggataagcttcaccgtgaccagtgggtggacaatctttgttatctctatgtcgccgtgaccaaactcgcctaaggtgtttctcggccgtcttctagtttctagccaactcaccgacatgtttcccatgtctgtgccccacgttcgtgtaaaaccagattacgccgctgtccgagactgccgtttgttgtcgttgtctttgaaattgtgatcacgctgccggcgtctcgcccctccgtggccaggacttggagaacgccgtggcgccgtcggtgaacaccgtctggaatgacctcaccatggcggacctagtctggagctggttgcgagcacgctcatgggttgttccgcttcgtgaactgaattgtgaagagggagcttgttccagtgttgttgattcagtggtgaactccatctaactacttatcataatagaagatctcagatctcctcctgtaataagg

SEQ ID NO: 149810 - DNA, 1784 bp, Zea Mays
cgtcacgctcgcagcaccggccgttttctacgggcggtgcagtggacgggagtagtaccctttctttctcttcgaagaaaatgcggcggcgtgtggtataaaccccgcccgtcacgccgggccgtccgtgcgtttccttttgtcttcgcttgcttcctttcgaaagtccttgcgtcacactcgccgatcgatcgagtctctccggattccagagaggcccaactgccgaagccatcgatcgccgccacctcttcgagcagaatagttgagaatggctgacgaggatatccagcctatcgtatgtgacaatggcactggaatggtcaaggccggtttcgctggtgatgatgcgccaagagctgtcttccccagcattgtgggaagaccacgccacaccggtgtcatggtcggcatgggccaaaaggatgcctacgtaggtgatgaggctcaggccaagagaggcatcctgacactgaagtacccgattgagcatggcattgtcaacaactgggatgacatggagaaaatctggcatcacaccttctacaacgagctccgtgtttcgcctgaagatcaccctgtgctgctgaccgaggcccctctcaaccccaaggccaacagagagaaaatgacgcagattatgtttgaaaccttcgaatgcccagcaatgtatgttgctatccaggctgttctttcgttgtacgctagtgggcgaacaactggtattgtgatggattccggtgatggtgtgagccacacggttccaatctatgaaggatacacacttcctcatgctattctccgtttggatcttgcggggcgtgacctcaccgaccacctaatgaagatcctcacagagagagggtactccctcactacgagcgctgagcgggagattgtcagggacataaaggagaagcttgcctacgttgcccttgattatgaacaggagctggagactgccaggagcagctcctctgtcgagaagagctacgagatgcctgatggtcaggtcatcaccattgggtcagaaaggtttaggtgccccgaggtgctgttccaaccatcccttgttggcatggaatcgcctggcgtccatgaggccacgtacaactccatcatgaagtgtgatgttgatatcaggaaggatttgtatggtaacgttgtcctcagtgggggatctaccatgttccctgggattgccgatcgtatgagcaaggagatcacgtccctggctcctagcagcatgaaggttaaagtgattgcgccacctgaaaggaagtacagtgtctggatcggtggctctattttggcttctctcagcacttttcagcagatgtggatctccaagggagagtatgacgaaactggtccgggcattgtccacatgaagtgcttctaagtttttttgggaaatttttccaaaaaaaaaaagaagtttctggggaagttcgacatggtacgtcaggcgttaccggctcattgtgaaccaatacatgaactgccatgataaggttataagcagaaataacagtagcactggctccaattcctgaagatgagtctggtgcgccctgctgtatgaaatggatcccactcgtatattcgtcaccgcgccgcactggtgtaacgtgttgcctcagagtttgcttttagctggttccttttttaaaaataagtactgtttttggttggctaccagtcattttgaacttcagtagcaaattatcttatttaatgcttgctttttcatatttgatgtttgatccgtcatagcaacccgc

SEQ ID NO: 149811 - DNA, 1779 bp, Zea Mays
cgtcacgctcgcagcaccggccgttttctacgggcggtgcagtggacgggagtagtaccctttctttctcttcgaagaaaatgcggcggcgtgtggtataaaccccgcccgtcacgccgggccgtccgtgcgtttccttttgtcttcgcttgcttcctttcgaaagtccttgcgtcacactcgccgatcgatcgagtctctccggattccagagaggcccaactgccgaagccatcgatcgccgccacctcttcgagcagttgagaatggctgacgaggatatccagcctatcgtatgtgacaatggcactggaatggtcaaggccggtttcgctggtgatgatgcgccaagagctgtcttccccagcattgtgggaagaccacgccacaccggtgtcatggtcggcatgggccaaaaggatgcctacgtaggtgatgaggctcaggccaagagaggcatcctgacactgaagtacccgattgagcatggcattgtcaacaactgggatgacatggagaaaatctggcatcacaccttctacaacgagctccgtgtttcgcctgaagatcaccctgtgctgctgaccgaggcccctctcaaccccaaggccaacagagagaaaatgacgcagattatgtttgaaaccttcgaatgcccagcaatgtatgttgctatccaggctgttctttcgttgtacgctagtgggcgaacaactggtattgtgatggattccggtgatggtgtgagccacacggttccaatctatgaaggatacacacttcctcatgctattctccgtttggatcttgcggggcgtgacctcaccgaccacctaatgaagatcctcacagagagagggtactccctcactacgagcgctgagcgggagattgtcagggacataaaggagaagcttgcctacgttgcccttgattatgaacaggagctggagactgccaggagcagctcctctgtcgagaagagctacgagatgcctgatggtcaggtcatcaccattgggtcagaaaggtttaggtgccccgaggtgctgttccaaccatcccttgttggcatggaatcgcctggcgtccatgaggccacgtacaactccatcatgaagtgtgatgttgatatcaggaaggatttgtatggtaacgttgtcctcagtgggggatctaccatgttccctgggattgccgatcgtatgagcaaggagatcacgtccctggctcctagcagcatgaaggttaaagtgattgcgccacctgaaaggaagtacagtgtctggatcggtggctctattttggcttctctcagcacttttcagcagatgtggatctccaagggagagtatgacgaaactggtccgggcattgtccacatgaagtgcttctaagtttttttgggaaatttttccaaaaaaaaaaagaagtttctggggaagttcgacatggtacgtcaggcgttaccggctcattgtgaaccaatacatgaactgccatgataaggttataagcagaaataacagtagcactggctccaattcctgaagatgagtctggtgcgccctgctgtatgaaatggatcccactcgtatattcgtcaccgcgccgcactggtgtaacgtgttgcctcagagtttgcttttagctggttccttttttaaaaataagtactgtttttggttggctaccagtcattttgaacttcagtagcaaattatcttatttaatgcttgctttttcatatttgatgtttgatccgtcatagcaacccgc

SEQ ID NO: 149812 - DNA, 1316 bp, Zea Mays
gatcaccttttgacaggtgctacatgggaaaaatgaaattgttattacagattgtatatcgttgggtaaccttgtaggaataggaaacgttgtaggaatatatgtgggcgatgataaggtgatccatttcacaagaggaagaggacaggaggtcggaacaggaactgtcgtcgatattattcttgtgagttccaccccaaaacgaagcaacacgccttgcccggtgtgcaccgacgaaaccagcgacagcagcacagagacgaacggcgtggtatcctcctgcctcagctgcttcctagctgggggtgctctctaccgtttcgagtacgcagtcaacccggcgctcttcctcgccaaagcgcgaggagggacgtgcacgctcgctccctctgaccctgacgacacggtggctcgccgcgccagatacctgctgagcaacggtttcaggtgctacaacctgttcaagagcaactgcgaggacttcgcgatatactgcaagactggccttcttgtcgctgagcagggcgttgtcgggcagagcgggcaggctatctccatcatcggtggacctctcgccgcggtggtctcgaccccattccgcttggttaccacgaacatctacgggatggcggtgatggccgtcggggtgtactgcgcgagcaggtatgcagctgatattggcaaccgccgtgatgtggtgaaaatggaagtcgaggacctgacggccggactggccagcggcaggatatgtgctgtggagaacatcgcccagctggtggctccggaggcagaaggcccggccgatgccacggccacggccacgctggctgcttaacggaccattgtgccattgttgctgtgagagagatgtgcgtcagccaacatgtgtgctattgctttggcttatttgtgttcagaatccacttaaactcggtcgaagtgagctttccgttcggcaacgtctgtactcttacgaatctcgatcgtgtatgtctttaagtattgtgttgtgtttcaaagataaaaaaaggtgacctttgtgtatgattttttatacacgttgtctctgcattgatagtctaagttctcagaattgtaccatgcaatcatagtgtaccatgcaatcatagacgacctgttgcctacacgctgccacggtggacggtccaatgcgcaaccacgaactgtttgatgcctactgtggacgatccagtaacctgttacgaaccgtccgacatttcgtagagccgatcttaaggttctacgcatcacgtgaagacctaaagggttgttagtatttggcaaaaaaaaaaaaa

SEQ ID NO: 149813 - DNA, 457 bp, Zea Mays
ggatgatcaggccagtccatgcattgacaactctgagggagattgtgtgcatgagtgtaactttgaggccttgtcgaaattaatggttaaggacttggtgtttcctgttaacatgcatcttggccagcacttcactaaaccaccaccacgttattctgagggtgcattgattaaaaagctagaagaacttgtaattgggaggccatctacttatgcatctataatgaaagtattactgactgcagtagggagaccaaggccagacttctggcgatgctttcttgatggaaagcagttatacgatcaagtgactggtgatgtgatttgccatggtgagaaaaacttcttacaagatgggcgcaagagctttcctagtggccacacttcgcggagtagggaagccactgtcgatctcttcttgaagtcagctgagtatttggactgtgcagttcatcat

SEQ ID NO: 149814 - DNA, 312 bp, Zea Mays
atgtcaccttcgtcggcggtggcgacaggtgattctggggaatccacgggtttcaagttgaccaaacagagtggatacagtcatgctcaaagttggcaagctgtgtcaacaagcaggcccccatctgctactcgcttcatgggcatgcagcaacgccttcagccgacgcagcttgggaaggatgcacctgcagcaggagctgcacgtagagttagtgctcaacgaaagatgatcgaggttgagtctgttgcagcagctaataaacaagagattcgagaagtagtgaagaagtgatttcgtgctgaggtgatt

SEQ ID NO: 149815 - DNA, 102 bp, Zea Mays
aatccaacaacctgttgaaccatcatcagagcccactttaagtcatagaagcatctgtaccgtttctgttatgctagaattaaatgttcctttgaatcctat

SEQ ID NO: 149816 - DNA, 144 bp, Zea Mays
gtcagaatggctgctacactagcttcagtctattcattcccattgacttcaatattgcttctctttgagctgaagaaggattacatgattttgctttctttcatgactaaattgttctactaccgtggacaattgtttgtttag

SEQ ID NO: 149817 - DNA, 163 bp, Zea Mays
aaaggtctgccacttatattagcttttttccaaagcaaggaattgatactaatgttttccctcacctctctatcagactgccacatcaacattttattgctctaatggtcatcctaattagctctaaaaagatctcatcggaagataggtatgtgttttattc

SEQ ID NO: 149818 - DNA, 249 bp, Zea Mays
tccttttggcaactaccctattacctactacctacatatacagctcaaactgctggtctccttggaaaaaaaacacctatctgagcacatacatctcagctggtgtagttccttagaaacccaagccctccaaacagggttgaagcaccagatctcctggggcttggttctgctgagtttcgcacgccactcggcaactcagaagatccttccttcattgaacttgctctgctgtacacacccggttga

SEQ ID NO: 149819 - DNA, 675 bp, Zea Mays
aagaaacaagagaaatataaggatgctaaacagagtgcaatagatcttttcaatgacatgcattgcagcaagaagaaaggtttttctgaaaatgtaaagaaagcaattgttgacatggaagcaatggtgacaacaccagttgaggatggacaatagcagaagtctcctatggaagtagtttctgaagtgctaggggcttcagtttgtttctatataatgttggtctgcaagataactccaagaaaagctctacaacaactatttctgcaaaggtgcaagaacttcataatcaattcgagtctgagaggctagaaaaagatggacttcaagaagaagtagaaaccttagaggctcagacacaagcctcaaaggagaccatggacaatatgaagagatcgatggaagaaaataatattctcctctgtcagctgttgagcttcaatcgaagacaagcgcccccatcttaagtttactatagtatcatgttatattagttatggattcaggttttataaatttggaatatgtttaaactttcatactttgagttgaagttataggatttcctttggattttaagttacatgaacttatataatcatatggtttgaagttataaatttatctcttggatgaattgtgtgaatgttgaactaaataatgcaatgttttggt

SEQ ID NO: 149820 - DNA, 304 bp, Zea Mays
gtcgtccttctagggccatgttgtgccagcccaagcgtcaacgtcggcctcaagtagtcacgtcgactgtcttaggtccctgctcccctccccttccctcccctgctgctgcccgccgccaccaccagttggcagaccacctatcggccaccgctgcacatcgcccgtctggctgttagcaccggcacgcagcgcccgacgtcctgtgcgtagcagctaggcacacggcgaccaagcgtctagtggatggtaggatgtcattagacattgatgcatccaaagattggagtgtcttaggataatt

SEQ ID NO: 149821 - DNA, 492 bp, Zea Mays
gaagttacgaccacgacagtcgaagaaaaagagcatgctgagccaaacgaaaaaacggaggagtttggcaaggaagacgctgatcacggcgaggagaaggaaacgccgccgccgacggaggcccctgaacttccggcgtctactccggcgagcgtcgcctgacggccgatgcacacccaaaccgacggcgttcttactacttccatttttttttgcttgcagaatgtttggaggcatgggcgggatcccaaattcccaatggcacaattgtactgccgtttttttttgacaacagctctacttttcgatctgtgttgtcttgttttcccctctcgccatttctcgctgtttcgtacgagtactgtcgttggtttggagagcgtgtgaactaatgtaatgtttgacgatgaattcaaaattcaaaaaggtacaatgaattcaaaaaaaaaagaaaaaaagtagaatgaatccatgcatgtgtgtgtatatcaa

SEQ ID NO: 149822 - DNA, 216 bp, Zea Mays
atggggaactgcgggacaaagcccaagaccagcgacggagacgacgcgcctccgcccgtcgaggcgcaggtagcggcgggggcggccgagggggagcgcaaagacgacgaggaggtcgcggcgccggaagggacgagccaggcccttgtggcgccacaaactgaggtgcgcaaaaatgatctcagcttttctgaaccatttcggccttttctgtaa

SEQ ID NO: 149823 - DNA, 270 bp, Zea Mays
atggcgaaggctcgcgacgagacagagcgtgagccccaggcgccgccgccggcgatgatggcgaagcaaggcgaggaggagaaggaggccgcgccagagcgcaagccggccggggagcgcagcatggcgtaccagatcttcgcgggcctctacgtgtgcgcctacgtcttctgctggaggacaggcgagctcatcttcctgaatgcgcaggatgctctcgacaggctccggcgacacgttcgcgacaagctcttcaaccgaaaacgatga

SEQ ID NO: 149824 - DNA, 741 bp, Zea Mays
tgaattgaatgtgtctgaagttttattaagaataatagtgcttgctcaagctattggtatctactcgtttttttcttctttttttttgtttaactaaaacggttgaatctatgttgttgtggacttgtggtccttgtgaatggtttgcagtatggttgctgatgtccatcgcaccttactatacgggggcatatttttgtacccagcagaccagaagagtccaaacgggaaactacgcgttctgtatgaagtcttcccgatgtcattcctgatggaacaagctggaggccaggctttcacaggcaaacaacgggcgcttgaacttgctcccgctaaacttcacgacagatccccagtgttcctcgggagctacgatgacgttgaggagatcaaagcactgtacgcttcaatgtcaaacagcggttgacctttctgcctgaggaaacgagcgagatcaaaagcaccgtacgcttcagagtcaactgcttgatctttatagattgtaataaaataataaaagagtttgtaaaaaaaaacaacaacactgcttgatctttctgcatgaggataaaaagcgcatagtttccccggttggatatatccatcagatatttattatgttgttgccttctacacaaatttaacgtgctttcgtgattccttaatgcaactttggattcatgtacggagggagtttatgtgaagacatattacttggtgcagtttatctccaacaaaata

SEQ ID NO: 149825 - DNA, 1717 bp, Zea Mays
cgccgtcttgttgctccgctccggccgtgacacgagcgcaccagccaccgccagcccctcccccgtcgactcgagccacaggacaaggcatcccaaccgccgcccatctcctatcgtcatctgccgatccctcctcggttcctcacagtcacagagcctcacgtcacgtgtacctcccccaacccaacccagcccaacccagcccaaaacctagcgggcgaggggccggggaaccgaccgccggacgcggagatggaccacgcggcggaggcgcagcggacggacctgatgacgatcacgcggcacgtgctcaacgagcagagccgccacccggagtcccgcggcgacttcaccatcctcctctcccacatcgtcctcggctgcaagttcgtcgccgccgcggtcaacaaggccggcctcgccaagctcatcggcctcgccggagagaccaacgtccagggcgaggagcaaaagaagctggatgtactgtccaacgaggtcttcgtgaaggcgctcgtcagcagcggccgcacctgtgtcctcgtgtctgaagagaacgaggaggccatcttcgtcgacccggccctccgcgggaagttcgtcaatcctttgctcctccatcccgacctcgtaaaagttccgcaacgccgtactgtcgctttccctgatcgcgtgttagttctctctctctctctgttcaggtactgcgtctgtttcgacccgctggatggctcctccaacatcgactgtggtgtctcaatcggaacggtgtgtcactgtcactcccgatctttgggatttacatggtcaaagacaaggacaacgtgaccttggaggatgtgctgcagcctggaacaaacatgcttgctgctggctactgcatgtacgggagttcatgcacgcttgtgctgagcactgggaacggagtcaatggcttcactctcgatccttcccttggagagttcattttgactcatccaaatatcaagataccaaggaaagggaagatctattcagtcaacgaagggaacgccaaaaactgggatgggcctacagccaaattcgtggagaaatgcaagtatcctgaggatggttcaccgcctagatccttgagatatatcggaagtatggttgctgatgtccatcgcaccttactatacgggggcatatttttgtacccagcagaccagaagagtccaaacgggaaactacgcgttctgtatgaagtcttcccgatgtcattcctgatggaacaagctggaggccaggctttcacaggcaaacaacgggcgcttgaacttgctcccgctaaacttcacgacagatccccagtgttcctcgggagctacgatgacgttgaggagatcaaagcactgtacgcttcaatgtcaaacagcggttgacctttctgcctgaggaaacgagcgagatcaaaagcaccgtacgcttcagagtcaactgcttgatctttatagattgtaataaaataataaaagagtttgtaaaaaaaaacaacaacactgcttgatctttctgcatgaggataaaaagcgcatagtttccccggttggatatatccatcagatatttattatgttgttgccttctacacaaatttaacgtgctttcgtgattccttaatgcaactttggattcatgtacggagggagtttatgtgaagacatattacttggtgcagtttatctccaacaaaata

SEQ ID NO: 149826 - DNA, 1592 bp, Zea Mays
cgccgtcttgttgctccgctccggccgtgacacgagcgcaccagccaccgccagcccctcccccgtcgactcgagccacaggacaaggcatcccaaccgccgcccatctcctatcgtcatctgccgatccctcctcggttcctcacagtcacagagcctcacgtcacgtgtacctcccccaacccaacccagcccaacccagcccaaaacctagcgggcgaggggccggggaaccgaccgccggacgcggagatggaccacgcggcggaggcgcagcggacggacctgatgacgatcacgcggcacgtgctcaacgagcagagccgccacccggagtcccgcggcgacttcaccatcctcctctcccacatcgtcctcggctgcaagttcgtcgccgccgcggtcaacaaggccggcctcgccaagctcatcggcctcgccggagagaccaacgtccagggcgaggagcaaaagaagctggatgtactgtccaacgaggtcttcgtgaaggcgctcgtcagcagcggccgcacctgtgtcctcgtgtctgaagagaacgaggaggccatcttcgtcgacccggccctccgcgggaagtactgcgtctgtttcgacccgctggatggctcctccaacatcgactgtggtgtctcaatcggaacgatctttgggatttacatggtcaaagacaaggacaacgtgaccttggaggatgtgctgcagcctggaacaaacatgcttgctgctggctactgcatgtacgggagttcatgcacgcttgtgctgagcactgggaacggagtcaatggcttcactctcgatccttcccttggagagttcattttgactcatccaaatatcaagataccaaggaaagggaagatctattcagtcaacgaagggaacgccaaaaactgggatgggcctacagccaaattcgtggagaaatgcaagtatcctgaggatggttcaccgcctagatccttgagatatatcggaagtatggttgctgatgtccatcgcaccttactatacgggggcatatttttgtacccagcagaccagaagagtccaaacgggaaactacgcgttctgtatgaagtcttcccgatgtcattcctgatggaacaagctggaggccaggctttcacaggcaaacaacgggcgcttgaacttgctcccgctaaacttcacgacagatccccagtgttcctcgggagctacgatgacgttgaggagatcaaagcactgtacgcttcaatgtcaaacagcggttgacctttctgcctgaggaaacgagcgagatcaaaagcaccgtacgcttcagagtcaactgcttgatctttatagattgtaataaaataataaaagagtttgtaaaaaaaaacaacaacactgcttgatctttctgcatgaggataaaaagcgcatagtttccccggttggatatatccatcagatatttattatgttgttgccttctacacaaatttaacgtgctttcgtgattccttaatgcaactttggattcatgtacggagggagtttatgtgaagacatattacttggtgcagtttatctccaacaaaata

SEQ ID NO: 149827 - DNA, 1697 bp, Zea Mays
cgccgtcttgttgctccgctccggccgtgacacgagcgcaccagccaccgccagcccctcccccgtcgactcgagccacaggacaaggcatcccaaccgccgcccatctcctatcgtcatctgccgatccctcctcggttcctcacagtcacagagcctcacgtcacgtgtacctcccccaacccaacccagcccaacccagcccaaaacctagcgggcgaggggccggggaaccgaccgccggacgcggagatggaccacgcggcggaggcgcagcggacggacctgatgacgatcacgcggcacgtgctcaacgagcagagccgccacccggagtcccgcggcgacttcaccatcctcctctcccacatcgtcctcggctgcaagttcgtcgccgccgcggtcaacaaggccggcctcgccaagctcatcggcctcgccggagagaccaacgtccagggcgaggagcaaaagaagctggatgtactgtccaacgaggtcttcgtgaaggcgctcgtcagcagcggccgcacctgtgtcctcgtgtctgaagagaacgaggaggccatcttcgtcgacccggccctccgcgggaagttcgtcaatcctttgctcctccatcccgacctcgtaaaagttccgcaacgccgtactgtcgctttccctgatcgcgtgttagttctctctctctctctgttcaggtactgcgtctgtttcgacccgctggatggctcctccaacatcgactgtggtgtctcaatcggaacgatctttgggatttacatggtcaaagacaaggacaacgtgaccttggaggatgtgctgcagcctggaacaaacatgcttgctgctggctactgcatgtacgggagttcatgcacgcttgtgctgagcactgggaacggagtcaatggcttcactctcgatccttcccttggagagttcattttgactcatccaaatatcaagataccaaggaaagggaagatctattcagtcaacgaagggaacgccaaaaactgggatgggcctacagccaaattcgtggagaaatgcaagtatcctgaggatggttcaccgcctagatccttgagatatatcggaagtatggttgctgatgtccatcgcaccttactatacgggggcatatttttgtacccagcagaccagaagagtccaaacgggaaactacgcgttctgtatgaagtcttcccgatgtcattcctgatggaacaagctggaggccaggctttcacaggcaaacaacgggcgcttgaacttgctcccgctaaacttcacgacagatccccagtgttcctcgggagctacgatgacgttgaggagatcaaagcactgtacgcttcaatgtcaaacagcggttgacctttctgcctgaggaaacgagcgagatcaaaagcaccgtacgcttcagagtcaactgcttgatctttatagattgtaataaaataataaaagagtttgtaaaaaaaaacaacaacactgcttgatctttctgcatgaggataaaaagcgcatagtttccccggttggatatatccatcagatatttattatgttgttgccttctacacaaatttaacgtgctttcgtgattccttaatgcaactttggattcatgtacggagggagtttatgtgaagacatattacttggtgcagtttatctccaacaaaata

SEQ ID NO: 149828 - DNA, 905 bp, Zea Mays
cgccgtcttgttgctccgctccggccgtgacacgagcgcaccagccaccgccagcccctcccccgtcgactcgagccacaggacaaggcatcccaaccgccgcccatctcctatcgtcatctgccgatccctcctcggttcctcacagtcacagagcctcacgtcacgtgtacctcccccaacccaacccagcccaacccagcccaaaacctagcgggcgaggggccggggaaccgaccgccggacgcggagatggaccacgcggcggaggcgcagcggacggacctgatgacgatcacgcggcacgtgctcaacgagcagagccgccacccggagtcccgcggcgacttcaccatcctcctctcccacatcgtcctcggctgcaagttcgtcgccgccgcggtcaacaaggccggcctcgccaagctcatcggcctcgccggagagaccaacgtccaggcaagcacggcaccaccacacacacactgactcgcccgccccgacgatcaccatccactccgcgcctttcgtgcgtactctgctgaattactgagcccccccctgacggtgggcccggggcttatcacagatggacctcttcctagctgcatgctgcatctttttagctgaacggaacctactaccatgcatcgaatccatcgatcactatgctctctaacgcaagaatagactgctcttgctcttcaatcaacagttcaacacacgcacgcacgatccaaacgatattcgtctatctggcacagtttttttctctcttcagtttacctgctctagctgctcgtcgttgacattcaggagccaccccaaaaaaaaaatacagggcgaggagcaaaagaagctggatgtactgtccaacgaggtcttcgtgaaggcgctcgtcagca

SEQ ID NO: 149829 - DNA, 1577 bp, Zea Mays
acgagggcagttcggtcactactgccggcggcgtctcgctttccaactccgccaccacacggcccacaccacgccaactgcttccgcaaggccgcgagagctttgcgtaaggtaaacttcagcgagcagcatccgtcccaccgaccgcaatgccggaggacaaggagtacgcgcccgtgccgctcggccaggcggcggccgaggcggcagcgcctgactccgaggaccctgccaagtcgccgccgcgacccagctcgcccggcacgtccactcgcaaggcattctttgctgttcttcaaagctgggtgtcaagaaaatttatgactggatgtgtagttcttttgccaattgctgtcacattcttcatcacttggtggtttatccaatttgttgatggttttttcagcccactctatgcaaaactggggtttgacatattcggccttgggttcttgacctccctggtgtttatacttcttgttggaatctttgtgtcttcttgggtgggttcaacggtcttctgggttggagaatggtttataaagaaaatgccctttgtaaggcacatatactctgcatcaaagcaagttagcactgctgtttcaccagatcaaaatacaacagcattcaaagaagtagcaatcattagtcatccccgtgttggtgaatatgcatttggattcataacatcaaccatggttcttcagacagacaaaggtgatgaagaattgtgtagtgtttatgtgccaaccaatcatttatatattggtgacatctttttggtaaactccgccgaaattataaggcccaatttgtctattcgtgaaggcatagaaataattgtttcaggaggaatgactatgccgcaggtgatcatgtcactggaaccaacacctcggaagagccagaacgtccgtttggacagagtgaggacagtatgactgtatgaggcatgcatgaaagtgatgggtgtttcaggatggcttgttggttatggattcaaagctggggcatggagcttgagacaatcaatttgtagattgcattcagaacttgcgcattattggcagatacatgacaacctcacactaacttgcgttgctatcagttggtgacacgaaaattgcagctccacttacaattacaagcacgacatgcacttttaactgatctccagctgcgtgctaggtcgtgtttgctgaacgtgattcaatgctgcatgtgcatctaccagtggtacttgtgtatatgattttttttttatactacggttgtcagcgtgctcggggaaggctatagtcctggagtctgccaagacgcatggaagaactgtgatgaaaaccaacctgttcttggggccttatgcctcaaggacctcccttggcttttacaaacacaagtgtccaccccaccatttagaacaagtataatatggctgggctttaaacagctccatgtcaccaaaatcctagatggtaggatgagaacatctcgagaacattcgagagcaaagaaagtaggtgcttcatgaagaacttggctttggcgcattatacgaggagaaagagtgtgattgc

SEQ ID NO: 149830 - DNA, 1658 bp, Zea Mays
ggaaccctgctacgtacacgtacgtgtctacagctgcccatgcccgcatcgatacggataggtgcgcatttaatacaccaccaccacaacaaaaatacgacccgtatatgcatgggcatggcgcggacgccgacgcatggcgggtcaaacgcacgacgccgccgacgcactatatatccgtcgcactgcttaccctacgctacgtcgtgtccgtgtgtgccgtgtccgtgtgcgcgactagctagctagtgctgtgcacagtgtactcatctcatctctatctatccgcgcacgcaggaggagagcaggcggcccacgacgtgcagggcgcggcggccatggagggccactactcgcccacggcctccgccgccgaggcgggcggcgagcggcggttccgcggcgtgcggcagcggccgtggggcaagtgggcggcggagatccgcgacccgcacaaggcggcccgcgtctggctcggcacgttcgacaccgcggaggccgcggcgcgcgcctacgacgaggccgcgctccgcttccgcggcagccgcgccaagctcaacttccccgaggacgcgcgcctcaccacggcgccatccgctgcggtcgctccggcggcggcgggatccacgacgacgatggccgtggcggcctcggcgggcgggtcgtaccagcaggaggccagcgccgccgtcgtctctgcagactacctgcagtaccagatgatgcttctgcagggggccaccagcggccaaggcagcagcagtcatggcgggtatcctctgtactacgactatggcggccacggcggggctggcgctggcgctggtggtggtgccatgagcagctcctactctttccccgcctccacggttaccgtggcttctgtgccgtcgtcctctgcctcctccgctcccagctatggcgaggcggcgcagtgggcaggcagctggccggagagtagtgcgtggagctatccggcgaccacggcttcttggtctggatcaagccagtatgagtatccaccgtcaactcgtccacctcaatagtccatgctccatgtttcatttcatataagacgtatacacggccttcctttttttcccccatctactccacaaagaacaaagcttttgtggttcagaagacacagatagatagatgattttgttcaagatgcatgcatccgtgcaagatccaagagaagaggttgcgagattgtgtttcttctttgcttgtggtggtgttgaatcctgtatcgatcatgtgataatgattctggttgcaactaaatcgaagacgcacgtgataataaataatatctcattaagaaacactttttttttttctctcgatggaggcatgtgccgctgaggtcctatcatctgatctggagctagcagacgtggatcggtggcctctgaaattaaaaaaaaaaaacagaacctcattcaagttttggtcataattagtttccaccacgcgatttccagttttttttcccaatatatatctctcctcctatcacgcgttatctcgttttgtcagaagtgggtgaaaaaacactagaatctgcatgagtacggtgtttgcacattttgttctcactctcaatcttttacttttacatttcttggtgtatttcgagtttgaatagccac

SEQ ID NO: 149831 - DNA, 432 bp, Zea Mays
atgcagaaagagagtttcagggaacctagaggatttgggttcatccaatactttgatcctgaggatgcttctaatgcaaagtaccatatggatgggaagatgctgcttggaaggaaaattgctgttgtttttgtagaggaaaacaggaagaagccttctgacatgagggccagggaaaaaataagtggcagaggccgttcttatgatgggaggttgcgctcaaggtcacctgggttgtacgattctcctagggtagatcacggtcccaaagccgaagctactcgccagcacttcagcgaaagcactattcaaggatatctgaacgtgtactatgtgggtattccaaaatctctgatgagtgaagtaagttgtgaaccaatgaaccttgatgttggacgtgctgaccagtgcgcaggtgcctatgtggtgtga

SEQ ID NO: 149832 - DNA, 197 bp, Zea Mays
tttgacttcatgtgacttattttagaaacttgagctcacaagctttcttttatttggtctctatatggtggaattatgtcattttataatctctgttcgttcagtcagtcgttgtgaactctcatctaatcactcacttcattggttgtgttgtaccaagacatattgcatagagtaaacaataacatcagttagcc

SEQ ID NO: 149833 - DNA, 1201 bp, Zea Mays
ctgaaattcttgaagcccacggctctaaaaaggcgtcatgagaaaattttggagttttcccctgatccaaattgggctgaagttttcaaagcccagctgaaaaccctgttccttccgaccttggccacctcgtacgcatcggcatcgcgtcgcgcccgccgctctcctctcctgccggcctgtccaacttcaaaagagcacgcgcttctgccccccgccctcctgcaccgctctccttccccgacgatggatcccgcagccatgttgagatccccgtgctctatcgtctcgccgggctccttattaaccgccccacttctcccagtacgcctcgccgtccagccacgccgccgagtgcctggttttattgcgccctccggcaggccgtccgtcgcgcggcgcgccgcggccggagacaagttcgaggccgagacgcccatagagaaaagtttccctcccttcccaactgtcatggacatcaaccagatccgtgacatcctgccacataggttcccgtttcttctggttgacagagttattgattacaaaccaggagaatatgctgttgcaatcaagaatgtgacaataaatgataacttcttcccagggcatttccctgaacgacccataatgcctggtgttctcatggtcgaggcaatggcccaggtcggaggaatagtgatgttgcagcctgaagtgggtggatctcgagagaacttcttttttgcggggatcgataaagtgaggttccggaagcccgtgatcgctggagacaccttgataatgagaatgactctgatcaagctgcagaagagattcggaattgcaaagatggaagggaaagcttacgttggcgccgacctggtatgcgaaggggagttcttgatggctactggatcagaatgaatgcaggagacacatggattgatgaatacataatatttcaagtttttactgtgaaatcagctttccagtctaataagttttgaactgtgtctgtaatagcggtgtaatgtcgttgctagtcttagtgagtgttgctgtgttggtgtgtatgagtaacagggctctaaggttacaaccactgccaatggaatgaaacaaatggaaactgacagcgcgtttggttgtttttagagcgtttttatgcgtttgcgttaaaaattgttttgtttggcctccaccgcaatcgggcaccatg

SEQ ID NO: 149834 - DNA, 286 bp, Zea Mays
cagatggctggaatggctagagtaggagatgttgttgttggagaattatggttttctttgctatatgacccaattattcacaattcgaacaaaatcattatgccagcttctacgtacgaatcgcacagtatttgtcagtcttattcaattcaattttacagctggaacaataacaatgaacaatcttatgcaggtacagtaaccacattattcttcttaatttgctttgatgttgcatatttcagttatactcgatatgtactcttagaattttgacatagagact

SEQ ID NO: 149835 - DNA, 907 bp, Zea Mays
tatagggcaccaaccatttcatcctctccgactccgacatcgtccggtccgatacgccacaggatcgaccaccaatgcagactgccgtggcggtgctgttatcaggcgtggtggcgctgttcggagtgacgagcgccgtgctggcgttcatagccgaggcaaagaggctcacagcggatgaaatccgcgtgtcaggtcgcgagtgcgtgtacccggccaacgccgctcacacgctggggatatgcgccatcttcctgcttgccgcggcccagatcatcgcctcggtggccggtggctgctgcggctgctgcaggccaccgggcggcggcggtccttctcccagtcccagctccactaggcgacgcgtcgtgggagtcatcgcctctgtcctctcatgggtagcggcggcgattgctgtggtctacgactgggtgggcgcggcgctgaacgcgcccgtgacgcgcgaagccaggctcgcgggctccgacgaggagtgctacctactcaggggcggcatcttcgtcagggcggccgtgctcagcctcgtcgccacctcgcttgggatcatgtcctgcatcttgctccgcctgccgccgccggctacgcacgcgccggaacaaggccaccgcgcggtcgggctgccgcagtggcccgcgcaagagacgtacccgtaccccgcgcacgggtacgcccacgcatcggaccccaagttcgctcctcctgctcctcacggtcaggcgaacgagcaagtgtacgtgtagtgcgtagatgacgtgatgagtagtgatggtgtgatctccgtattattttttccttttgttttgtacgtaggtaatatgtgcgtcgtgattactagtgatggtgtgctctctgtattaattttttcttttattgttagtttggcaat

SEQ ID NO: 149836 - DNA, 1195 bp, Zea Mays
ttaaccaagaaatataactactaaaagggaatatcattgacttaatcatataatttaacctactttcgcgttactaactcaccatacctcacataggtttatccatatattcctcgcataataaatatttaaacctaaccctcccattattaattcgatcattcatcggatacgaatcaccgatttaatcttctcacataacctatgtcgttaatcctaaacttagctacgcagcacgacgacttcgcaatcgtggatacaattgccatgctacctgtagccccgtattcctacaagcgttatataaatacgtgcttagctacaagcaggatattcatcgcgacgtacacacctatcaattcattcatcaaaccagtcaataaaatagcaaattagctcaccatttcaatatttgactcgaatccgcgaggttgctaatgattttccgatgcagacaatttgtcgagcgcttgacaggtactatacgaactttggtttcaggtgttttgttgagcgcctggcgagcaccaacgttactgttgccaaagctggcgagcaccaacgttactgttgccaaagctgtcgctacctcctagcagcaaggtaccaccaccaggtgtgccagcagagaacccatcagcgccactcgaacctcccaatacaccaaagcagagctcgacgctggagccggaggtcgagcgcacaggggaaagacgcaagaaccgagcggcaagggagaagaaaccgagctggagctcgcaggggagtttgccgaggagggaaatgggcagggacgatgcggtgaggggagcaggagtcagggcgccgagcgggatccgagccagggccagggagatgggcgccaccaccttggcgggcggcagaggacgcgctggggaagaagcactacggcaagcgaacgtcagagcgctcggtccgagctggttgacgcgagcagggaggagcagagccgagcggagggctgctcgcgcggccccaggcgccaggagagagccgcggacgagggaggaagaaagctccctgccgagcttgaggggcgcggcctgcagaggagcgccggcgagcagctaaggagacgaagcgatgtccaaggctgcgtgctggagaatggagatggcacaagcggctgggaattcaccggataggaactgctggagataaaggagaacggttg

SEQ ID NO: 149837 - DNA, 951 bp, Zea Mays
ctcctcgggtttccccgatctcttcctccccctctatctctccctctccctctccctcttcctctctcctaccacatctccagccctcttctcggcccgacggcgttccaccccctaccctcttttcccgccagcgccgttccttcctctgcggtagccctgcgtgaagcacacggcggtggtcctcgtcaaccaaatcgtcgccacatcgcgttctccccggcgaggatctgtaggcgagctcgccgtccatatccgcccaagccacccccagctcgtcgcagtagcagcaacacaacaaccatgagtcttgcttgtcttgtatgccatggcatgagcagctcctcacactctcttagaagctactcggtgtcaagttcagaggaggaaagccgatgtggagctgctgtggcctgcttagctcgaagagtaacaccagctggaacttctactagtgctgggacatcgaaagtgaccccctttccacccattgtgagtggtcaagttggcacggagggcactcctcgacttcaacgcagccgtgctgtgtccagggaccttgttagagattggaactttgacgaagtaattgtcgcaaattagggtaaccttcaacagttgtcagctgggctttgtgctctatttatcagggaggagattccttcatttgatatatatttcttttcatagtagacgtctggaagtccattactatatacttaatgacttagacgaggaaatgctcgagagggataatatctttcaggagcgatatctggattgttgcagttatatatgctcgcgtatctatgtagctaggataaatgtttaagtgtcttttcctattttcaaatatgtataagttgacatgtacctttatgtatattattatgaacgaatccaacttctgacctcgatctgatattgaaaacggaagtgatgttttggtgc

SEQ ID NO: 149838 - DNA, 287 bp, Zea Mays
ctagacaaagtaggataattttgtattaggaccatgtgattgtacaatttgccaataattatgagaccaacacccttttgaaaaagaagggcaggaaatgtgcagatcagttgtctgatacttgtaatgcaaaaacttgcatgttgatatgaacttagttattacaggtttttcaacatcaattaaaaaattgacatgcttttattgtccgaacatacaaaaatgtgtagcttttgcaaaggtctattcatagtcataaactttaaaaaaatgttcatttctatgtt

SEQ ID NO: 149839 - DNA, 2007 bp, Zea Mays
cggctgaccgcagcgacggcaggagaataggagatacgattgtgccgacctaatccagcggcagccaggcactcaccaaggaaacctttttaaatctggccccttgacgcgcagcgggagaggctcatcaccccgtgtgccctcgcctcgcctcgccccgccgcccgccccaatcgaccaatcccgtccatatcaaaaaaatgggaattgtcgccgccgccaccaccgccgccgccacgtgcacgtcccgactcctccaccaccacgcaacctatcaccggcaccagctcaggtactctgcgagtccgtttcctctctcgctgcactgtggctccggccggcgtgaggcggcggcccgggcgctcctgcccgaccgcgtcaccccgttctcttacggcgtggatgaggacgcggatgaccacccgcgcgaggagtgcggtttagtcggggtcgtgggcgacccggacgcgtcgtcgctgtgctatctggggctgcagaagctgcagcaccgcggggaggagggggccgggatcgtcgccgtgggcggggacggcaagctcaagtccgttaccgggctgggtctcgtggccgacgtgttcggggacccgtcccggctcgcctcgctcccgggtcccgccgccatcggacacgtgcgctactccacggccggcgccgccgcttcgctgcgcaacgtgcagccgttcctggccgggtaccggttcgggcaggtcgccgtggcgcataacggcaacctcgtcaactaccaggcgctacggaacaagctcgaggccagggggtccatcttcaacacgtcctcggacacggaggtcatcctccacctcatcgcgacgtcgctgtcgcggcccctgctcgcccgggtctgcgacgcctgcgagcgcctcgcggggtcctactcgctcctgttcctcacggccgacaagctcttcgccgtgcgcgacccacatgggttccgcccgctggtgatgggccgccgccggaacggcgctgtcgtcttcgcgtcggagacctgcgcgctggacctcatcgacgccacctacgagcgcgaggtggagcccggggaggtggtcatggtcgaccgccgcgacatgtcggtcgcctcggcctgcctcctcccgcaccgcccccggcgcgcctgcgtgttcgagcacatctacttctcgctgcccaactcggtggtgttctcgcacgccgttcacgagcgccgtaccgccttcggacaggcgctggccgaggagtcccctgccccgggcgccgacgtcgtcatcccggtgcctgactcgggcttctacgccgcgctcgggttcgcacgcgcgtcggggctcgagttccagcagggtctcatccgttggcattacagcggccgcagcttcatccagccgacgcaagcgatccgggacctcgccgtgaagctgaagctcgcccccgtgcgcggcgtcatcaccggcaagagcgtcgttgtcgtggacgactccctggtgcgcggcaccacctcgagcaagatcgtgcggctgctccgagacgccggcgcgcgggaggtgcatatgcggatcgcgagcccaccagttgtgggctcctgcctctatggcatcgacacgccgagcgagggcgagctcatctccaatcggatggacatggatggcgtgcgccgggagatcggcagcgactcactcgccttcctctcgctgggcaagctgcacagcatctacggcgaagagtcgagggactactgcgacgcgtgcttctcgcgcaagtaccctgtgctgcccacactagccgacccggccgccgagccggaggagtgagccgggagcagatgagctctgctctgctctgcttcgtctgccatacttctaggttgctgtcgctggattcagccctgttccgagtgttggacaattgtgcgcggctgtagttttatatgacgataaagcgctatgtcatggtactctaataaaaaaaataacaaaagccaaaaatttagtacgg

SEQ ID NO: 149840 - DNA, 723 bp, Zea Mays
cagagccagtctctactcgcctctctctcgcgcaagccacagtagagcaaccaaccataccaccggcccgtgtcgatctctggcctctctcgtgcaaggaattaagcaggcaagaggccaaccttcttccagcatggccaaggcgagcagcaggctgctcttctcgctctcgctcgtcgtcctgctgctcctcgtggagaccactacttctccccatggacaggctgacgccatcgactgcggcgcgagctgctcgtaccggtgcagcaagtcgggacggcccaagatgtgcctgagggcgtgcggcacctgctgccagcgctgcggctgcgtcccgccgggcacctccggcaacgaggacgtctgcccctgctacgccaacatgaagacccacgacggccagcacaagtgcccgtgatccatccaccgtggttcccagcatcagcagctttgccaaaaagacatgatacctacatatatataagagtacctagctgctgctgctctactaccttgttggttcattatattgtgcgcgtgcatgcatgaataaataaatgaacatattagggcatgtacaacccagatacggctgcacggtactccaagtacaagatacaactaaaacacaacacaatacagtggtcatgtctaaaacatgtgtcttacgatattcattgtaccaatcagagtattcaataaattaaagtgaccaatcagata

SEQ ID NO: 149841 - DNA, 1643 bp, Zea Mays
attcctccaacctcgcaaacatgacacaaccacaacaataaaaaaaaacagatcccagcctccatttccaaatccacacctggcccggctgccccaaatgcgtcggcatcgcgccgtcgctgctgcacaccgtcgatgactcccgccccttcgaacgccgccggcgacctcttcgctgccaacctcacgggcgcgctccttgcggttgcctcctccgccttcattggcgtcagcttcatcgtcaagaagaagggcctacgccgggccgccaccgccggcgcccgcgcaggtgttggaggctatgggtacctcttggagccactgtggtggattgggatggttacgatgctgattggggagattgccaattttgtggcctacatgtttgcgccagctattcttgtcacccctcttggtgcgctcagcataattgtcagtgctgttctagcccatttcaccctgaatgagaagctgcagcggatgggtgtgttgggctgtgtgctctgtataatcgggtcaaccataatcatcctccatgcacctgaagaagagacaccaagctcagtgacacagatctggcagttggcaacacaacctgcctttctttgttatgcggcttctgcattgactatctcactgatcttgatatttcactgtgcaccccgttatggccagacaaacatcgtggtgtatgtgggaatttgctcagtgataggatctttgacggtaatgagcatcaaggcagtaggcattgctatcaagcttacaattgagggcataaaccaggctggctatttccagacttggctgtttgcaactgtttcagctacatgcataattattcagttaatttacctgaacaaggcattggatactttcaatactgcagttgtttctcccatctactatgcgatgtttacatccctcacaattttggcaagtgccataatgttcaaggactggtctgggcagagtataagcagtattgcctctgagatttgtgggtttcttactgtgcttactggtactgttgtactgcattctacaagagaacatgatccaacccttacttcagatctgtatgctcctctttccccaatatattggcatatccaaggtaacggtgaaacaggaggaaagctgaaagaggatgatttactctctggcaatttcatcactgtggtgcgacaagactactttgtctagagaccttccacgatgctcaatgttctggattaaaagaaaagagaacaacactacggaaggatcctactgatgcccagtgtactgcggcttccccactgtgctcatgaacagacattttttcctgccttccaaacaggcccttagaatttgttgaaaagttccagtttgatcacaggcatctgggccgatgccttgtagtaagatgtaagcaatccgtcctctggccgggttgagcaaggcttggctgcagtgtatcagggtggtgcagctgatgtatttatactgtacaatctagtgtgaatgtatgaactagagctatcagaatctgcacagatatttcatgacagactctgtccagcatgttaagttatatattgctcctgacttgtgaatactttgttattacttcctggttcaaagttatgatgcgatgtaca

SEQ ID NO: 149842 - DNA, 819 bp, Zea Mays
gcattaactttaaaatttaggtagcaatatttacgatgttgatatgcatttccacatcatgttaaactttcaggcattggatactttcaatactgcagttgtttctcccatctactatgcgatgtttacatccctcacaattttggcaagtgccataatgttcaaggactggtctgggcagagtataagcagtattgcctctgagatttgtgggtttcttactgtgcttactggtactgttgtactgcattctacaagagaacatgatccaacccttacttcagatctgtatgctcctctttccccaatatattggcatatccaaggtaacggtgaaacaggaggaaagctgaaagaggatgatttactctctggcaatttcatcactgtggtgcgacaagactactttgtctagagaccttccacgatgctcaatgttctggattaaaagaaaagagaacaacactacggaaggatcctactgatgcccagtgtactgcggcttccccactgtgctcatgaacagacattttttcctgccttccaaacaggcccttagaatttgttgaaaagttccagtttgatcacaggcatctgggccgatgccttgtagtaagatgtaagcaatccgtcctctggccgggttgagcaaggcttggctgcagtgtatcagggtggtgcagctgatgtatttatactgtacaatctagtgtgaatgtatgaactagagctatcagaatctgcacagatatttcatgacagactctgtccagcatgttaagttatatattgctcctgacttgtgaatactttgttatt

SEQ ID NO: 149843 - DNA, 2736 bp, Zea Mays
atgaagggagcaatgccgccgcgccagttcatggtgccgggccctggggggccgatgctgccaccgcagcagcagttcgggctggtggagacgcgccccccgctggcggccgtgctgcggccgcgcttcaacatcccgggcctccacccgtcagcggcggccgccgccgcggcctcgggcgcgggcaagatcgcctccacctatgacctcgtcgagccgatgcggttcctctacgtgcacgtcgtcaaggcgcgagacctccccgcggtgtccgccacgggcgccatcgaccccttcgtcgagggcggccagccacaacccgtcctggcagcagtcttcgccttctccgccacgcacctccagtcccatctgctcgaggtcgccctcaaggccaaggatctcgccggcgacgacctcgtcggccgcgtcgccttcgacctcgcggaggtgccggtccgcgtgcccccggactcgccgctcgcgccgcagtggtaccgcctcgagaccaagcgcggcgagaagctgccgcacggcgagatcatgctctccgtctggctcgggacccaggccgacgaggcgttcccggacgcctggcactccgacgcgcacgccgccgcgggcccggcggccgtcgcgtccacgcgcgccaaggtatacttctcgcccaagctcgtctacctccgagtcgcggccatcgccgcgcaggacctcatcccgcatgacacctcgcgcccgatgagcgcctgcgtcaagctgcagctcgccggccagctccgccgcacgcgccccggcgcaccgccggggacgcccaacccgatttggaacgaggagttcatgttcgtcgcgtcggagcccttcgacgagccgctcgtcgtcaccgtcgaggaccgtgtcgcgccaggccgcgacgagatgctaggccgcattttcctgcccctcgcagcagcaatgccgcggcacgaccacttcggcaaacccgtggagccgcggtggtacagcctcatgcgcccctctgatgatcctgataagaaggaagtcaagttcgcaagcaagatacagattcggatgtcgcttgattttgggtaccatgtccttgacgagtccacctactacagcagtgatctgcagccatcatcaaaacctgcaaggaaaccaagcattgggatgcttgagctgggagttctgggtgcgcgaaacttggtaccgatgaagcccaaggatggacgcaccacggacgcctactgtgtggccaaatatggaccaaagtgggtgcgcaccaggactattcttgacacgctgaatccacaatggaatgagcagtatacctgggaggtctttgatccttgcaccgtgatcacagtggtggtgtttgacaatggtcaaattgggagcaagaatggcggtggcccagatcagcggattgggaaggtcaggatccggctctcaacactggagacggacagagtgtacacgcatttctaccctctgctggttttaaatccgagtggactcaagaagaccggcgagcttcatttggctgtgcggtttacctgcacagcttgggtgaacatgatggcgctgtatggtcgtccgctgcttccaaagatgcactacacgcagccgatcgctgtgatgcaactggactacctgaggcaccaggcaatgcagattgttgcagccagactcagccgcgctgagccgccgctgcgcagggaggttgtggaatatatgctcgatgtggattcacatatgtttagtctccggcgcagcaaggctaatttccatcgtatcacctcactgttctttggttttctggcaatgctcaagtggtacgacggcatcaggagctggtggaactcgatcacgacggtgctagtgcacatgctgttcctgatactgatctgctacccggagctcatcctgcctaccatcttcctctacatgttcatgatcgggctctggaactatcgtttcaggccaaggcatccgtcgcacatggacactaagctgtcccatgctgagctgacacaccctgatgagcttgacgaggagttcgacacattcccttcctccagaccagctgaaatcgtaaggatgcgctacgacaggctgaggagcatcggaggccgtgtgcagaccgtggttggggacctggcgacacaaggcgagagagcccatgctttgctgagctggagggaccctcgggccaccgccatcttcgttttcttgtccctggtggtcgccgttgttctgtacgtgacgccgttccaggttctgatggtgataggcatgctttacctgcttcgacatccccggttccgcagcaggatgccctccgtgcctttcaacttctacagaagactgcctgccaggtccgatatgctcctttgagatcacagtattcggcgtgagagaatcgggtgcaagtctttacttatttatgtctgttctgctcggttccttctgattagtatcagatcagatgtgaatataccagatgagttcgtatattagaggtcatttagtgtcccaggaataaggtgttggtttaatggttcatttccttttgagtttttgggatagtgaggggaggtttttgggtgcagaaatgtaatgttaactccgggctattagcatagaactaaaggcaggaacaatattatcccccgtgtattatgtttgtactatttgtgtcaattttgtttgtgtttcagtgatcttttccttgctgtttgt

SEQ ID NO: 149844 - DNA, 76 bp, Zea Mays
gagaaatgttattaataacatgcctagaagaaatgttgttcatgtgcctaggaaaacaaatagtgaaccttctaca

SEQ ID NO: 149845 - DNA, 938 bp, Zea Mays
agccgctcgagccgatcagcgagcgggcctctgggagaggtagggagccatggggaggtcgccgtgctgcgagaaggggcacaccaacaagggcgcgtggaccaaggaggaggacgagcggctggtggcgtacatccggtcgcacggggaagggtgctggcggtcgctgcccagcgcggcgggtctgctgcgctgcggcaagagctgcaggctgcggtggatgaactacctccggccggacctcaagcgcgggaacttcaccgacgacgaggacgagctcatcatccgcctgcacgccctcctcggcaacaagttcgtgagccgtctgccgtctgtcgacgagacagcgtccttcttctctgtgtctacctttattttctcgacggcgctgcctgacgtcacgcgccgcgctcgcaggtggtctctgatcgccgggcagctgccgggccggacggacaacgagatcaagaactactggaacacgcacatcaaacgcaagctcctggcccgcggcatcgacccgcacgcgcaccaccgcccgcaggcgctgcaccacgtggcagcagcagccctcgtcccggcccccgccgcgaagccgaagccgaagccggcggagtcgtccgacgacggcgggcgcagcagctgcagctgcagcggcagcggcagcagcgcgggggagccgcggtgccccgacctcaacctcgacctgtccgttggtccgccggacgcgcccacctcgccgccgccgccgtgcctgtgccaccgcgcctgggaagcgtgcggctgccaggcaggctgacggctgaggcagcaagagttcagattttttttttgttaggcagttgaaacaaggctagtgtgaaccgagaggagatcagtagctaggacactgtctcagagaaagaaagaaaaaaaaaaaccaaaaggattcttgaata

SEQ ID NO: 149846 - DNA, 694 bp, Zea Mays
agccgctcgagccgatcagcgagcgggcctctgggagaggtagggagccatggggaggtcgccgtgctgcgagaaggggcacaccaacaagggcgcgtggaccaaggaggaggacgagcggctggtggcgtacatccggtcgcacggggaagggtgctggcggtcgctgcccagcgcggcgggtctgctgcgctgcggcaagagctgcaggctgcggtggatgaactacctccggccggacctcaagcgcgggaacttcaccgacgacgaggacgagctcatcatccgcctgcacgccctcctcggcaacaagtggtctctgatcgccgggcagctgccgggccggacggacaacgagatcaagaactactggaacacgcacatcaaacgcaagctcctggcccgcggcatcgacccgcacgcgcaccaccgcccgcaggcgctgcaccacgtggcagcagcagccctcgtcccggcccccgccgcgaagccgaagccgaagccggcggagtcgtccgacgacggcgggcgcagcagctgcagctgcagcggcagcggcagcagcgcgggggagccgcggtgccccgacctcaacctcgacctgtccgttggtccgccggacgcgcccacctcgccgccgccgccgtgcctgtgccaccgcgcctgggaagcgtgcggctgccaggcaggctga

SEQ ID NO: 149847 - DNA, 259 bp, Zea Mays
gaaactacgtttgatgttgaatcgcaaccccctcgttcacacgacagggctagccttgatgtcccatatctccctggcatactgggcgatggtccgatcgctactgaatttgccactcccagcgaattgtgcaaaatttaagagagctaggttcttgagatcaattcagattttggagctccaggtgattttgttctcaataataagcaaagcacatctaaacaggtagcagtgcagctagcactagcaagtagaagcg

SEQ ID NO: 149848 - DNA, 471 bp, Zea Mays
ttccacacatagtgcaagtcgacgcagcacacgcgctacacaaatatgttccacagaatgattcaagcaaagaaactacgacacagattagacctgtcgtccgatctggcctgataaaggctgatgctagtgctgcaaaacgtggaactagcgctaagatcataatttacacaaggggaagcatcctattttacatcagtagctagcatcgggcgacctaagggtgaactaatatagtgtttggttccagagccagttgggatagagcggctctatactagaaagcggctccgtctgggagattttggaaaaccagttggttcaacatttggacatattgtttcttttttagagccactctgtcctatgtagaatcaatccagacagcaacaaattaaaagcagagcgactctgtcctaccatactccgaaaccaaacactacctaaatgcatagtacctaaatgcatagg

SEQ ID NO: 149849 - DNA, 339 bp, Zea Mays
atcaggcgagcaggtggtcgtgcagccacccccgcatcgcgttgaacgcgtcctcggcgtcgccgtcctcctccaccgactgcggccggtgcgcgaacccgtggcccctgccggcgtacaccgccgcccgggcgcctctcgcgcgcccctccagctcccgcaccgtctccacggggcacagcgggtcgccgtcgccgcacacgaacaggacgggcgccgcgacgcggtcgcccagggacgcgtccatccgggacccgtagaagcagacccccgcgctgaagcagctctcggcgtcgcgcgccagcgtctccacgaggcgcccgccgccgtagcagaacc

SEQ ID NO: 149850 - DNA, 1556 bp, Zea Mays
gtatatagatagatagatataaatgtagatatttataagaattttttcagacatagttttttacgatatatctaaacatgcatcgagaaaaaaaaaatctaagccacgcgtcccgctctcactggctggcgcctgcgcactgggatccatagcaggcaagcgttgtagggtactagcagcgggccagcagcacaggaaacaggaaaagcaagaaagtcatacacatacacacacgcatccgcagcactccctcctcggtccctcctctgcttcacacagaccagtgcgcgctcaattcccccctctagcgcctccaccgcaccaaaccggtccaacgggacctatgctctagcctcagagcaaaccaccgcctgaattgtgcggcaattgggggaggattcgcggcaggcagggcgcggatccgttggcgggatgattgcggctgtcaacagagtgccggcgggctggggcgaggatgagatgtccgtgctgccacggcacaccaaggtggtggtcaccggcaacaaccgcaccaagtcggtgctcgtgggattgcacggggtcgtgaagaaggccgtcggcctcgggggatggcattggctggtccttactaatggaatagaggtaaagctgcagcggaatgctttaagtgtgatagaacctccgactggcaacgaggatgatgataaatttgattgtgaaaacatgcagtggaatagttcagatatggcctccgatgatgcactatcaccaaagccacagcggtcacggagcaggcagcataggggtttccacagaaaatccatcagccgttcaatgtcatgtgactcccactccaagacgtctgtttcatcttcctcaagagctcacacggtgcgactttcgcttccttgggttgtggacttgacatcatttggttggaatccaacaatcactttacagtaatctgtgttgatgactttatatctagttttgctcagtcgtattattttcggaccacatgtccacattgcttctgctgcttgtatctttacattcttttgaccggtaacactgcagaaagttgacctaagcaagctagaactgactgcactgctgagatattggcgtcacttcaatctcgatgcatgtcctaatccatccagagagcagttagttgatgctgttcaaaggcacttcacagcccagcaattggatgagttgcaggtcattgtcggctttgtgcaagctgcaaagaggctaaagacgactatgaaagtggcctgactgtgaagcctgaacttcaactaacagattcaagagaggatgtagcatgtttgatgaatgttgccgtgctatgtaatatatatgcatgaagttctttagattcaggtggctaggttaatggacaactagactatgttagcctcatctgatgtagatatgcagtatcctgtctaaagatgtttcaacctctagctcagttctttcctgctgactggatgtggattgaaatgacaagtttaaaacaagttattttgtcatccttttcgatgttccaacattatatttagccc

SEQ ID NO: 149851 - DNA, 1357 bp, Zea Mays
gtatatagatagatagatataaatgtagatatttataagaattttttcagacatagttttttacgatatatctaaacatgcatcgagaaaaaaaaaatctaagccacgcgtcccgctctcactggctggcgcctgcgcactgggatccatagcaggcaagcgttgtagggtactagcagcgggccagcagcacaggaaacaggaaaagcaagaaagtcatacacatacacacacgcatccgcagcactccctcctcggtccctcctctgcttcacacagaccagtgcgcgctcaattcccccctctagcgcctccaccgcaccaaaccggtccaacgggacctatgctctagcctcagagcaaaccaccgcctgaattgtgcggcaattgggggaggattcgcggcaggcagggcgcggatccgttggcgggatgattgcggctgtcaacagagtgccggcgggctggggcgaggatgagatgtccgtgctgccacggcacaccaaggtggtggtcaccggcaacaaccgcaccaagtcggtgctcgtgggattgcacggggtcgtgaagaaggccgtcggcctcgggggatggcattggctggtccttactaatggaatagaggtaaagctgcagcggaatgctttaagtgtgatagaacctccgactggcaacgaggatgatgataaatttgattgtgaaaacatgcagtggaatagttcagatatggcctccgatgatgcactatcaccaaagccacagcggtcacggagcaggcagcataggggtttccacagaaaatccatcagccgttcaatgtcatgtgactcccactccaagacgtctgtttcatcttcctcaagagctcacacgaaagttgacctaagcaagctagaactgactgcactgctgagatattggcgtcacttcaatctcgatgcatgtcctaatccatccagagagcagttagttgatgctgttcaaaggcacttcacagcccagcaattggatgagttgcaggtcattgtcggctttgtgcaagctgcaaagaggctaaagacgactatgaaagtggcctgactgtgaagcctgaacttcaactaacagattcaagagaggatgtagcatgtttgatgaatgttgccgtgctatgtaatatatatgcatgaagttctttagattcaggtggctaggttaatggacaactagactatgttagcctcatctgatgtagatatgcagtatcctgtctaaagatgtttcaacctctagctcagttctttcctgctgactggatgtggattgaaatgacaagtttaaaacaagttattttgtcatccttttcgatgttccaaca

SEQ ID NO: 149852 - DNA, 588 bp, Zea Mays
atgaaggaggataatgcagactggtgcgatgaaaatgttaagatagcttgtgaaatatttgctggggaagtaagagcaaagaacagatcaggttctcacttaaacaagcttgggtacaacaatgtaatggtcaagttcaaagagaggacaaggaaaacatacaacaagctacagttcaaaaataaatgggacaagctgaaaaaagattatagtaattggaaacaattgggaaaagagataggatgtggttgggaccctaacaagttgtatgttgcttcagattggtggtggaagaaggcaaacatatttaaagacaagtcacttcaaaatgcagaagaattgagtgtcatgtttgaagatcttcggaacatcggtgatgatcattgggccccaacccgtggtgagctaccccaagacactgaagcacaaatacaagatgccatcaacattgaagatgaaaatgctagtgattgtggggaagacacaccatctagttccacatccaagagacgttgtgtggttgtgacagataaaggtaaaaaaacaaaagactacgagaggacaatggatgcaagactagatgtctaa

SEQ ID NO: 149853 - DNA, 1148 bp, Zea Mays
gttcctgagagggttctatatgaaattctatttcagatctctgggcaagacaaaccctcattaaatggcaatattcctgtaattcctagtttaaactctgtaccacagccaaagcctcctcatcaacatatgaggtctagtgatacccctttgccacaacatacagcagtgagtggcaggagtgctgggtatggtatctcacaaaatcattcatatgacactcacactcaagcaccgtcaagtgggttaccgagtagaggactaagcaacggtacatatgaatatagtagacgtgtatttggttctgttctgaatgatgttagccgtcgagctaccagggaaccaattccatacccgtcctgctagcatgttgagccctggtggctgtgactctatatgctgacagaaaaggtctctgaagatgttgtctgttgtctcagccatcagtaaggctatctctgtactcaccatttcatgcctgtaaatatgggttatggtggtaggacatatgcttgtctgttgggttgttctgttttttgtattgtagtgatacttttccctgctggttaggtccctctcattccctagtgtgaatgtcattcctccactaatatggctgcactaggaattaccaggcttagttgcatgaatgggtggcaatatgctcgcaatggtgttttaacattaagtgccattagctatttcaatgttatagcagggcgcgtttgtgtttgacatattagtatttggtggagtttgtgcttttcatcctgcatatgggacatctgaaggagagacatcgttttaaaagaaaattgtaaaataagtctcacaatttatgatgtttgatcatatgaatatttagttatatatgacttgtttgcttgagctatgtgtctgtcgcagcacaagcattcattatcgctcaactggctctcatggtgatcaagttatagattttctgtgacctggctactgtctggtctttgtgagttgatctgttgtcatttccatgttcattagtttggaaaagttggtgctgctggattttcacctaactgctgaattatctagactagtcggttgcccgtgcgttgtgacggcccacaacaatacccacgtaaactatctaccggaaagatctcaat

SEQ ID NO: 149854 - DNA, 1232 bp, Zea Mays
gttcctgagagggttctatatgaaattctatttcaggtaggtcgtgttgtagacctacacatactcgtgacaaggaactagccgacccaaaggttatgctttgctgagtatgaaacagaggagattgcccagtatgccattaagctattttctggccttgttcgacttcgtaataaaacacttagatttgcgatctctgggcaagacaaaccctcattaaatggcaatattcctgtaattcctagtttaaactctgtaccacagccaaagcctcctcatcaacatatgaggtctagtgatacccctttgccacaacatacagcagtgagtggcaggagtgctgggtatggtatctcacaaaatcattcatatgacactcacactcaagcaccgtcaagtgggttaccgagtagaggactaagcaacggtacatatgaatatagtagacgtgtatttggttctgttctgaatgatgttagccgtcgagctaccagggaaccaattccatacccgtcctgctagcatgttgagccctggtggctgtgactctatatgctgacagaaaaggtctctgaagatgttgtctgttgtctcagccatcagtaaggctatctctgtactcaccatttcatgcctgtaaatatgggttatggtggtaggacatatgcttgtctgttgggttgttctgttttttgtattgtagtgatacttttccctgctggttaggtccctctcattccctagtgtgaatgtcattcctccactaatatggctgcactaggaattaccaggcttagttgcatgaatgggtggcaatatgctcgcaatggtgttttaacattaagtgccattagctatttcaatgttatagcagggcgcgtttgtgtttgacatattagtatttggtggagtttgtgcttttcatcctgcatatgggacatctgaaggagagacatcgttttaaaagaaaattgtaaaataagtctcacaatttatgatgtttgatcatatgaatatttagttatatatgacttgtttgcttgagctatgtgtctgtcgcagcacaagcattcattatcgctcaactggctctcatggtgatcaagttatagattttctgtgacctggctactgtctggtctttgtgagttgatctgttgtcatttccatgttcattagtttggaaaagttggtgctgctggattttcacctaactgctgaattatctagac

SEQ ID NO: 149855 - DNA, 1336 bp, Zea Mays
atggccgagatagaagacgcgatgggtgcgccgccaatggtgacgacgacggagtccgagggcacgaccacagatgaggacgtgcatctttcgccgacctgcatctgcggcggcgcgggcggagctggtgggggaggccgcatcaagatcctctgcagcttcggcggccgcatcgtgccccgcccgcacgacggcgtgctcaagtacgtcggcggggagacccgcgtcctcgccgtgcctcgctccatctgcttccgcgagttgaagaagaaggtggaggacatgttcaagacggaggtcgcggccatcaagtaccagctgctctccctcgccgaggaactcgacgtgctcgtctccgtcacctgcgacgaggacctggtccacatgctggacgagtacgaccgcctcgaggcgaagcgctcgccgaccacgtccccgcgcttccgcgtctacgtcttcacgccgcaggccaccgcgccccacccgtcggccgccgcacccaccgtgccctcgtctacccgctacgctggtctgtcgcgcctccacccgcatcaccaccaccatcagcagcaccgccaattccagccggagcgctacgtggccaccgtaccagcctcgcccgacgggagcccgccgttctccgcccagccgcacggcgccgtctcggcgggcaactccccgcgcgccaacgcgttgggcgttgggttcgggatgcagcgcgtccggagctcgccgaacctcagcaccctggacgcggcggcgcggcgcttgcatcagcacggcgtggacggcagcatatcgggctacgtgagcggctcaccaaggcacgccggcgcggggcccatgctgttgcagaacaatttccaccactaccagcaccagtacccgacggcgcccgtgcccgtgcccgtgcctgtgcccgtgccgcaccacggtgggcggtacgacgcgcgcgggtacgtccgggtaggcaactacctggcgccgatggtgcccgctgccaggccgctctcgaggggaggaccggcgccgcacagcgacatggtgacgccgaagaagtctgctattgtgtgggactgacccggccggtcgtacgccggaggggcctcttgtgagttgagtgtttgagactgagatgtgtaaatagacggtcggatggatggatggatgcacgcggccttattttagctgttgcgtttgtgtccacgctgaatttgtttgtccgttttctactggtcgtgttcacggccttgttttagctctcccatagtctgaaatttatttttcttaaatcactgtactaacttttaagaaaaaaaaataaattattgtacta

SEQ ID NO: 149856 - DNA, 417 bp, Zea Mays
atggtggaagaatctttagcgggcgtagctggtggtccttcaacagcgaggcgacttcgattggcggtgacgcgacgactcttcttgaatggcgaggccactgttttacccattagattatctttagtagtggcgccggccgtgacaacggtagcagcagcggcgccccttcgcgaggtcgccgtcacgataggaggggacgaggctgctggcctagagcttgggtcatggtcaccgttctctatggactgtgggctcgacgtagccgataccgacgaagacatcagcagcgacagcatacctgggagacgggagacctgggtcactgggtgcgggagagtggagacctgggcgagggcgactggccgacctccgaccgccgattgcgagctgcagcggtgcggcctggtgacctag

SEQ ID NO: 149857 - DNA, 890 bp, Zea Mays
cctgcttcccaccccaccaataacaaactgacggccatcgtctatcagacgacacgagcagagagagttaaacaaatttccctggccaaatcttggatgcttccaacagcgttcacctactccattgtccatggctgtggctgtgtctgtgtgcatgcggagcggagagcactcgagagtttcgctcgcaccggctccatttgcgaacctactacacatagcgagcaactccccagattagccataccagcccagccgcaggccttccatagccattaaccagaaccgaccgagcaacagaggtggaggagagagcgcgctgagagatggatggctacagcaacctggccttgtcccctccgactccgactccgactccgacggcgagcggcgctcccagggcggcgaggccgtcgatggagctgaccaacacgaaggagaccaaggcgtgggagggcctggccatcggcgcggtcacgctggcccggaccttctccacgggctcgcacaggttctgcaggtccggcagcgagaggaggaaccatagccggagcggcctgctgaggcgggccttctccatgcgccgccaccccgcgggcctcctcggcgccggggacgggtactggaggatccacgacatggacggggacagcgaccgcggcggtggcggtggcacggtcgtcgtcgaggagcacggcgagggcgaggaaggagacgaagacgaagcagcggctgccgaggaggaggtgcagaagaacaagaagacggagcagcgagacgaggacgcggcggcagggaaagggaaggaggaagcggccgccgagcggagggacaagaagaagcggcggggtggcatcttcaaggcgtgcaagaagcttttccggttgtag

SEQ ID NO: 149858 - DNA, 2626 bp, Zea Mays
atagccacgcgatccccacacccacacaaccgcacctcgcacccattgaccagacggcggcgctcatctcctcccccacggttctccccatcggcctgctggcttctccccggcttccccgatactgatcctcatcactcatgtctgctgaagttgctggaggacacccttatttcctctcgtgctacttctggttcatatactgcataaaattccgagattttacttgatacaagtggaacactcagagttttgtgcgaatacttcctaccatgtgaatcagttgtagctggtgaatttggcaagactcaatttctctcatctgagttcagaaacgtttgcttggtctcctgcttcccttgagtcttgccaaccatagttttctctcatctctttctgtgacttgaccaacatctcttttggtcctgtcagtctcgcaatactcccttccaaagacttgtctagaggttggattgccctgctctctgctggcactgcagcctgctgaagtctttacttgctgcattctgtgctcacttttgaaagctgctctcttctgctctgcgttgttgatttctgcactcaagcttctcttgcctgtgcactcaagcttctctcttcctgggcaactagtgatctccttgaagcatttcagcttttacctagagatctttctgttgttgaaggcaagagaggctttagggtgatggcgcaaactagcctgcctcctggttttcgtttccacccaaccgatgttgagctcgtttcctattacttgaagaggaagatcatgggaaagaaacatatcgtggatgctatagcagaggttgatctgtacaagtttcctccctgggatctatgtgacaagtcctctcttcgaagtaaagatcttgaatggttctttttttgtcctcgtgacaagaagtatcctaacgggtctaggacaaatcgtgccacaccaaatggttactggaagactagtggaaaggatagaataattatgcttaactcccgcaccgttgggatgaagaaaacattgatatttcatgaaggcaaggcccctaagggcgacagaactgattgggtgatgtatgaatacagaatggaagatgaggatttggtttctgctggtttctcaaaggatgcttatgtactctgcaaaattttcaagaaaagtggccttggtccaagaatcggagagcaatatggggctccatttaatgaagacgaatgggataatgcagaagtcgaaacttctctgtttcctttgacttgttcagaagtgaatccaacagagggacaacgtgctcagcctactgtcctggctggtgctcttctggaacccgaaccacctctacataattcatcttctacatgtgctggagaggaatcatcatttggtcatgccactgctgaggacttaacttttagccatagtgttgctagctctgctatccaagatacacctgctcggatgtcaggagacggtgtggtttctgtgaacaacatatccaatgtggccaatgacatgcgtagtcctcgtgactgtgatgaatttctatcggagttgtctagatttatgaatgattctcctctgcgtaacactcctcttggagagtgctctggtcttcctccgatgtctgaagctgaggctcatgcttttgaagtcaactcttttggcctctacaatgaattatcagagcttgttgggttaggatgcgcggataacaacttaaacaccagcaatgtggaaactacggattatctcatgttgccacctgacagagaactgtcggctaatgattacatggaactaaacgatctccttgctcctgacccaagcttccccagtgaattttctgctcaggacaatcaatatatgcagcatcctcttgctcagtacaatggacattatgatctgtcaggtccttcggagccaacaatgcctagcattttcgatgtttttcctcccaataatggagtcctcgcaacagatgatccagccaactacttggacccagccatgcagttccctttctcatgattggttaccatttgtcatggaggtacggatgtttatacctgctctttttgtgcttgaacttgtctggactgcttcggtgttgcaacttgcagctcgctgttgctacaactctatccaccctgaacgtcaaggacgtcattgatgtcatgcctgggctcatgaaatcgtctgttgctcttctgaaccaagccgaccttggctggtatttcttggaagcacggtgcttggaacaatctgcatcgactgctgtatgctcccaactggttgagctaacggccaatctcggctcactctgctgaggagatcatagcctgtaaatctttgattatgctgttacttgtgtgtatcgcaacctgcctgattaccattgtcttgtgttgagttttgacaatatgcaaaccataataatgtcgtaatatggaactcgtttatcatgtttattccatcctcccgttatgtgagcttttggatggtcgatgctttctaagctgtgacgttctcttctgtgttatgtggatttccttaaaacagggctaggtttcaactattttgtggtctctgttttaacagtggctttcaaaa

SEQ ID NO: 149859 - DNA, 2432 bp, Zea Mays
atagccacgcgatccccacacccacacaaccgcacctcgcacccattgaccagacggcggcgctcatctcctcccccacggttctccccatcggcctgctggcttctccccggcttccccgatactgatcctcatcactcatgtctgctgaagttgctggaggacacccttatttcctctcgtgctacttctggttcatatactgcataaaattccgagattttacttgatacaagtggaacactcagagttttgtgcgaatacttcctaccatgtgaatcagttgtagctggtgaatttggcaagactcaatttctctcatctgagttcagaaacgtttgcttggtctcctgcttcccttgagtcttgccaaccatagttttctctcatctctttctgtgacttgaccaacatctcttttggtcctgtcagtctcgcaatactcccttccaaagacttgtctagaggttggattgccctgctctctgctggcactgcagcctgctgaagtctttacttgctgcattctgtgctcacttttgaaagctgctctcttctgctctgcgttgttgatttctgcactcaagcttctcttgcctgtgcactcaagcttctctcttcctgggcaactagtgatctccttgaagcatttcagcttttacctagagatctttctgttgttgaaggcaagagaggctttagggtgatggcgcaaactagcctgcctcctggttttcgtttccacccaaccgatgttgagctcgtttcctattacttgaagaggaagatcatgggaaagaaacatatcgtggatgctatagcagaggttgatctgtacaagtttcctccctgggatctatgtgacaagtcctctcttcgaagtaaagatcttgaatggttctttttttgtcctcgtgacaagaagtatcctaacgggtctaggacaaatcgtgccacaccaaatggttactggaagactagtggaaaggatagaataattatgcttaactcccgcaccgttgggatgaagaaaacattgatatttcatgaaggcaaggcccctaagggcgacagaactgattgggtgatgtatgaatacagaatggaagatgaggatttggtttctgctggtttctcaaaggatgcttatgtactctgcaaaattttcaagaaaagtggccttggtccaagaatcggagagcaatatggggctccatttaatgaagacgaatgggataatgcagaagtcgaaacttctctgtttcctttgacttgttcagaagtgaatccaacagagggacaacgtgctcagcctactgtcctggctggtgctcttctggaacccgaaccacctctacataattcatcttctacatgtgctggagaggaatcatcatttggtcatgccactgctgaggacttaacttttagccatagtgttgctagctctgctatccaagatacacctgctcggatgtcaggagacggtgtggtttctgtgaacaacatatccaatgtggccaatgacatgcgtagtcctcgtgactgtgatgaatttctatcggagttgtctagatttatgaatgattctcctctgcgtaacactcctcttggagagtgctctggtcttcctccgatgtctgaagctgaggctcatgcttttgaagtcaactcttttggcctctacaatgaattatcagagcttgttgggttaggatgcgcggataacaacttaaacaccagcaatgtggaaactacggattatctcatgttgccacctgacagagaactgtcggctaatgattacatggaactaaacgatctccttgctcctgacccaagcttccccagtgaattttctgctcaggacaatcaatatatgcagcatcctcttgctcagtacaatggacattatgatctgtcaggtccttcggagccaacaatgcctagcattttcgatgtttttcctcccaataatggagtcctcgcaacagatgatccagccaactacttggacccagccatgcagttccctttctcatgattggttaccatttgtcatggagctcgctgttgctacaactctatccaccctgaacgtcaaggacgtcattgatgtcatgcctgggctcatgaaatcgtctgttgctcttctgaaccaagccgaccttggctggtatttcttggaagcacggtgcttggaacaatctgcatcgactgctgtatgctcccaactggttgagctaacggccaatctcggctcactctgctgaggagatcatagcctgtaaatctttgattatgctgttacttgtgtgtatcgcaacctgcctgattaccattgtcttgtgttgagttttgacaatatgcaaaccataataatgtcgtaatatggaactcgtttatcatgtttattccatcctcccgttatg

SEQ ID NO: 149860 - DNA, 105 bp, Zea Mays
gacggtgatgtattggactttactctggaagagactaccatacatactcccatttctaatattttttcaatagacttgaacgtggtgcctacaatagacgatgat

SEQ ID NO: 149861 - DNA, 2007 bp, Zea Mays
aactagtgtgtgaaatatctcctacaatatatatccggctctctctgtgtgcgtgctctaactgcagcggagcctcacagttgttcgtgtgctgtgtatttgtcactggtggtgctgtgcagaccaagctactgcgggagggagaagggtgtgtgccggcccgccgccaagcactgctacccggccggcggccatggaggtgagctccgtggagttcggtcatcacgcggcggccgcctcaaagtgctttgacgacgacggtcgcctcaagcgcacagggacgatgtggacggcgagcgcgcacattatcacggccgtgatagggtccggggtgctgtcgctcgcgtgggccatcgcgcagctcggctgggtggcaggccccaccgtcatgctgctcttctccttcgtcacctactacacatcggccctactcgccgactgctaccgctccggcgacgcctgcaccggcaagcgcaactacacgtacatggacgcggttaacgccaatctcagtggcgtcaaggtctggttctgcgggttcctgcagtacgccaacatcgtcggagtcgccataggctacaccattgccgcctctattagcatgctggcgatccagagggcgaactgcttccacgtggaggggcacggggacccctgcaacatctccagcacgccctacatgatcatcttcggcgtcgtgcagattttcttctcgcagatcccggacttcgaccagatatcgtggctctccatcctcgccgccgtcatgtcgttcacctactccaccatcggcctgggcctgggcatcgcgcaggtggtgtccaacaagggcgtgcagggcagcctgacggggatcagcgtcggcttggtcaccccggtcgacaagatgtggcgcagcctgcaggcgttcggcgacatcgccttcgcctactcctactcgctcatcctcatcgagatccaggacaccatccgcgcgccgccgccgtccgagtccaaggtcatgcggcgcgccaccgtcgtcagcgtggccgtcaccacgttcttctacatgctgtgcgggtgcatggggtacgccgcgttcggggacaacgcccccgggaacctcctcacgggcttcggcttctacgagcccttctggctcctcgacgtcgccaacgccgccatcgccgtgcacctcgtcggcgcctaccaggtctactgccagcccctgttcgccttcgtcgagaagtgggcgcgccagaggtggcccaagtcccgctacatcacgggcgaggtcgacgtcccgctcccgctcgggaccgccggcggccggtgctacaagctcagcctgttccggctgacgtggcggacggcgttcgtggtggccacgacggtggtgtccatgctgctgcccttcttcaacgacgtggtcgggctcctgggcgcgctggggttctggccgctcaccgtctacttccccgtggagatgtacatcgtgcagaagaaggtgcccaggtggagcacgcggtgggtgtgcctgcagctgctcagcgtcgcctgcctcgtcatcaccgtcgcctccgccgcaggctccgttgccgggatcgtctctgacctcaaagtgtacaaaccgttcgtcaccacctcctgatcgaccgtacgtcctagcttccgtgcagttcaaaacacatacgcacgaacagatcattaattggcgcctagtatatatgtgcagtctttaattaaattaactaggcattaatcgatcgattaccactacgtcgttctagtgatgcgcgtagcttgcatcatcgctcgctgatttaatttccattgtttttctttgatgatctggttagccgaaatggctagtgaattaagagaaaacaaatagtagcagtactgtgtgagtaatcccaagtcaaatacgttattgaagttgtcggcggtacaaaacgcttgtaaaatgtttgtgtttcaattaatcaagaagaattgtacgtgtttcatatatgaggaaaagaaaaa

SEQ ID NO: 149862 - DNA, 1235 bp, Zea Mays
ccaggcttcttccttctccatccctcttctctctcttgcgcgggccccactctgctttctctcccctttctcttcctgcgttgcagccgccaggccacgctcgcccagcccctgtgccacgacctcgccaggagcagcagccgtgcagcccgcgcgctcaagccggccgccctgcaccgcgccatgcgcgcccaaccccgcgcagctccgtcgcgctaggaacaggcgccgtgacccgagctgccaggcccgaccctgaagccgcgacagccgcgccctgcccctgcgcaatcgacaccgacgcgccaagacccagacgagcagccacccgcgcccaggagaccaagcaggcgaccctgaccggcgtccggacccctgcgcgagccgagcgccagcagagccgaccccgagcacgcgcgcgacgccctgcctcccgcaccgaccgaccccgcgcgaagcccgagtgcgccgtccgtttcttctgcgttaaggaacttcactgtgacgtttctttcttctcccttctctcccccatttactctctcattgaagctccataaacgccattgatggtcgattgaagtcccgaccgcctcttcctctcccccttcttctataaaagccacgccaacagagcattccttcccctacccgagctcgccagccccttgctcctgtttatttgcacagcgtcgcaccctgcttgctgctccctgcctgaggctgctgcacagtcgctcgccattttcgccgtcgtctgggctcctccgtgcccttctgccattggctggcagaagtacgccccgtagtttcctatcgcgccacagttgatttcttgctccaactcggctctgcctcgtgccccgatgccgctaccgaaattccttgctgttgtgctgccgcaactgcttctttgcttgccaccgtctgacaccaccgtctgtcaccgcgctcgccggtgatcttgacgccgcccgtcgacctcctactcccacaaccgacggtcgtccgtgccactgctccctcgctggccccttctgcttgttggcatccctgcgcaggaacaaagacgaggtagaagaagatgattccgtgctacgattaattctatttagctgtttgcaatagtctttgttgtttagatgtaaaagattatttctagcttaaattaaatatggatctgtgttattaactttataatcatgtgataagcatataggaatatctttttgcat

SEQ ID NO: 149863 - DNA, 1923 bp, Zea Mays
gtttcgtgttcatacgagctagaataattaatatccaataataataagtcagatttcaacatatattgcatgtaatgtatagacaggttggccagtaaaaagaaaaagaaaaaagataaaaacgtagggcctagtgatcagcacagcatgcagaattgcagatgcggcgcacatgcgaacgtaacaaacacagcaacacgcccacgctagcggtttccatttccggccctgcaatcctgcaccggcgcgaaagccccctcacggcctcacctccactccggtgatggccgcctctcctttacttctcagatctcagtgctcacgccgtccacggtccactagttgcatcggctcccgcataaagatccacaccacttgagcagcagctagctcaagggaaggagaaggctggaagtggaaagaagtgggttcttgcttgagctgagctcttgctgcccttgaatctgttagggagtggagaacggagtatggggcgcggcaagatcgagatcaagaggatcgagaactctaccaaccggcaggtgaccttctccaagcgccgggccggactggtcaagaaggcacgggagatcggcgtgctctgcgacgccgaggtcggcgtcgtcatcttctccagcggcggcaagctctacgactactgctcgcccaggacctcgctgtccaggatcttggagaagtaccagaccaactccgggaagattctgtggggtgagaagcacaagaacctgagtgcagagatcgacagagtcaagaaggagaacgacaacatgcagattcagctcaggcatctgaaaggcgaggacctgaactccctgcagcccagggagctgatcgctattgaagagggcctccagaatgggcagaccaacatgcgcgagaagcagatggactactggaggatgcacaagacgaatgggaagatgctggaggacgaacacaagatactgacttttaggatgcaccaacaggctgttgatctgagcggcggcatgagggagctggagaccggataccatcaggtccagcacgacagggatttcatttcccagatgccgttcaccttccgggtgcagcccaaccaccccaacctgcaggaagacgagtagctacagcctgctggatagtgttctgcatgccgctctgaactgaagctgcaggaagacgagtagctacagcctgctggatagtgttctgcatgccgctctgaactggagctcctcacctgcagcttctatctcgcgtttcatcattcagcgttagctgggtatctttcttttcatggcaccctggatgaagtctgtcagttgttactacgatgtggtcttgtcttgtgcgtctcttttgactttgctgggctgaggtcttgtcttgtgcgtctcttttgactttgctgggctgatttccgtgcatgtagtgatgatgatgttggggcgaaggcggagacgctacccttggctcgatgccttcgtcgccttcgtcgtctcgcttcaccaacgatgccaaagacgtcggtccgatgaggacttcgcgactggacttcgcgggcgtccttcgcccttctccattgcgagacgaaggcaagactccgacgatgtctgctagcctcacgtcctcatcgggtccggaagcccaagggagattcggtccactgtaacgggccccgcaaggataagcgtgttacgggcctcatctgtaatagtcttttctgtaatgacggtctgtaacctcccctggggaatattctaaggatactttgggttcccgagggcataaacgtcatttttttagcgcggtaggcactcgggcacctataaatacccccgtacagtacccttgaggggacagattaacagagctattgtcgttccccgttgaaccttgcgaactatttcttcactctcc

SEQ ID NO: 149864 - DNA, 1789 bp, Zea Mays
cctgcaatcctgcaccggcgcgaaagccccctcacggcctcacctccactccggtgatggccgcctctcctttacttctcagatctcagtgctcacgccgtccacggtccactagttgcatcggctcccgcataaagatccacaccacttgagcagcagctagctcaagggaaggagaaggctggaagtggaaagaagtgggttcttgcttgagctgagctcttgctgcccttgaatctgttagggagtggagaacggagtatggggcgcggcaagatcgagatcaagaggatcgagaactctaccaaccggcaggtgaccttctccaagcgccgggccggactggtcaagaaggcacgggagatcggcgtgctctgcgacgccgaggtcggcgtcgtcatcttctccagcggcggcaagctctacgactactgctcgcccaggacctcgctgtccaggatcttggagaagtaccagaccaactccgggaagattctgtggggtgagaagcacaagaacctgagtgcagagatcgacagagtcaagaaggagaacgacaacatgcagattcagctcaggccagtgtttctgattcagatctgctcccgatctctagctgcgcgcgcacttcactagctcgctgttcgtgtgtgttcttgttgtgattgtgctagcgtgtccgtgacctgtgacggtgcaggcatctgaaaggcgaggacctgaactccctgcagcccagggagctgatcgctattgaagagggcctccagaatgggcagaccaacatgcgcgagaagcagatggactactggaggatgcacaagacgaatgggaagatgctggaggacgaacacaagatactgacttttaggatgcaccaacaggctgttgatctgagcggcggcatgagggagctggagaccggataccatcaggtccagcacgacagggatttcatttcccagatgccgttcaccttccgggtgcagcccaaccaccccaacctgcaggaagacgagtagctacagcctgctggatagtgttctgcatgccgctctgaactgaagctgcaggaagacgagtagctacagcctgctggatagtgttctgcatgccgctctgaactggagctcctcacctgcagcttctatctcgcgtttcatcattcagcgttagctgggtatctttcttttcatggcaccctggatgaagtctgtcagttgttactacgatgtggtcttgtcttgtgcgtctcttttgactttgctgggctgaggtcttgtcttgtgcgtctcttttgactttgctgggctgatttccgtgcatgtagtgatgatgatgttggggcgaaggcggagacgctacccttggctcgatgccttcgtcgccttcgtcgtctcgcttcaccaacgatgccaaagacgtcggtccgatgaggacttcgcgactggacttcgcgggcgtccttcgcccttctccattgcgagacgaaggcaagactccgacgatgtctgctagcctcacgtcctcatcgggtccggaagcccaagggagattcggtccactgtaacgggccccgcaaggataagcgtgttacgggcctcatctgtaatagtcttttctgtaatgacggtctgtaacctcccctggggaatattctaaggatactttgggttcccgagggcataaacgtcatttttttagcgcggtaggcactcgggcacctataaatacccccgtacagtacccttgaggggacagattaacagagctattgtcgttccccgtt

SEQ ID NO: 149865 - DNA, 1832 bp, Zea Mays
cctgcaatcctgcaccggcgcgaaagccccctcacggcctcacctccactccggtgatggccgcctctcctttacttctcagatctcagtgctcacgccgtccacggtccactagttgcatcggctcccgcataaagatccacaccacttgagcagcagctagctcaagggaaggagaaggctggaagtggaaagaagtgggttcttgcttgagctgagctcttgctgcccttgaatctgttagggagtggagaacggagtatggggcgcggcaagatcgagatcaagaggatcgagaactctaccaaccggcaggtgaccttctccaagcgccgggccggactggtcaagaaggcacgggagatcggcgtgctctgcgacgccgaggtcggcgtcgtcatcttctccagcggcggcaagctctacgactactgctcgcccaggacctcgtctgtccattgcccctctcattctttttattcttttgcttgtttattatcgtccttcttcttttcttgtgtgcaagcaaaactgatcgcaaagacccaaacttggttggaaaggcaaaactgagtaaaaaacacgattaagcgtaaaattgaggacaccaataaaaatgagggcaccagcctaaaaaacccaaatttggtttggtggcaggctgtccaggatcttggagaagtaccagaccaactccgggaagattctgtggggtgagaagcacaagaacctgagtgcagagatcgacagagtcaagaaggagaacgacaacatgcagattcagctcaggccagtgtttctgattcagatctgctcccgatctctagctgcgcgcgcacttcactagctcgctgttcgtgtgtgttcttgttgtgattgtgctagcgtgtccgtgacctgtgacggtgcaggcatctgaaaggcgaggacctgaactccctgcagcccagggagctgatcgctattgaagagggcctccagaatgggcagaccaacatgcgcgagaagcagatggactactggaggatgcacaagacgaatgggaagatgctggaggacgaacacaagatactgacttttaggatgcaccaacaggctgttgatctgagcggcggcatgagggagctggagaccggataccatcaggtccagcacgacagggatttcatttcccagatgccgttcaccttccgggtgcagcccaaccaccccaacctgcaggaagacgagtagctacagcctgctggatagtgttctgcatgccgctctgaactgaagctgcaggaagacgagtagctacagcctgctggatagtgttctgcatgccgctctgaactggagctcctcacctgcagcttctatctcgcgtttcatcattcagcgttagctgggtatctttcttttcatggcaccctggatgaagtctgtcagttgttactacgatgtggtcttgtcttgtgcgtctcttttgactttgctgggctgaggtcttgtcttgtgcgtctcttttgactttgctgggctgatttccgtgcatgtagtgatgatgatgttggggcgaaggcggagacgctacccttggctcgatgccttcgtcgccttcgtcgtctcgcttcaccaacgatgccaaagacgtcggtccgatgaggacttcgcgactggacttcgcgggcgtccttcgcccttctccattgcgagacgaaggcaagactccgacgatgtctgctagcctcacgtcctcatcgggtccggaagcccaagggagattcggtccactgtaacgggccccgcaaggataagcgtgttacgggcctcatctgtaatagtctttt

SEQ ID NO: 149866 - DNA, 1580 bp, Zea Mays
cctgcaatcctgcaccggcgcgaaagccccctcacggcctcacctccactccggtgatggccgcctctcctttacttctcagatctcagtgctcacgccgtccacggtccactagttgcatcggctcccgcataaagatccacaccacttgagcagcagctagctcaagggaaggagaaggctggaagtggaaagaagtgggttcttgcttgagctgagctcttgctgcccttgaatctgttagggagtggagaacggagtatggggcgcggcaagatcgagatcaagaggatcgagaactctaccaaccggcaggtgaccttctccaagcgccgggccggactggtcaagaaggcacgggagatcggcgtgctctgcgacgccgaggtcggcgtcgtcatcttctccagcggcggcaagctctacgactactgctcgcccaggacctcgtctgtccattgcccctctcattctttttattcttttgcttgtttattatcgtccttcttcttttcttgtgtgcaagcaaaactgatcgcaaagacccaaacttggttggaaaggcaaaactgagtaaaaaacacgattaagcgtaaaattgaggacaccaataaaaatgagggcaccagcctaaaaaacccaaatttggtttggtggcaggctgtccaggatcttggagaagtaccagaccaactccgggaagattctgtggggtgagaagcacaagaacctgagtgcagagatcgacagagtcaagaaggagaacgacaacatgcagattcagctcaggccagtgtttctgattcagatctgctcccgatctctagctgcgcgcgcacttcactagctcgctgttcgtgtgtgttcttgttgtgattgtgctagcgtgtccgtgacctgtgacggtgcaggcatctgaaaggcgaggacctgaactccctgcagcccagggagctgatcgctattgaagagggcctccagaatgggcagaccaacatgcgcgagaagcaggcaataatccttcctcgtccagttgctcctgagcttattagtgtcgcttgcagcacacaagcacggcacagttcattaggggaagggttttgtttctgatgttgctttattctactgttgctgtagatggactactggaggatgcacaagacgaatgtacgagctctaatcttgaattctatcctttgttcctactctatacatcctgggatactttttttttctttttcttttgaaagaagtcgttgagtaattttttttacagaaaagtttttgcagcttcgggtcattaacagtcatttgtgattggttacaggggaagatgctggaggacgaacacaagatactgacttttaggatggtaattctccccatctgaatagcagttgaaactttgcttgatcatccttcctcctttcaactccttagcataacttatcagtatgcaatattctaaacaaactcaatgttccgagctaaccgaagaaactgcacaaccacgctgagcaaatttccaaggacatgaaaattcttgtcttgggatttctagttggaacgcaattctgctc

SEQ ID NO: 149867 - DNA, 2219 bp, Zea Mays
actccattttaccactccttgtctcactctccgccacaacgtcagccgccccgcgccgagcagacctcctccactagccgccgggccgcacaccaaacgctcctgggaatgccgacgccgacgatggtcaggccttttccgctcttcttcttcatcgtcgtcgtcttgctggtccggtcgccggcgggtgcggcggccgacggcggcgggaacgcgacgacggattcctgcccgctagatctgggctacgtgcggacattcccatgggaccctttgccgtgcgcgggaggcgcgcccaacgtgacagcctgctgccagacgctgctctccctgttcggcatcggcctcgccgagcgcctccgcggcacgggccgcttccgcctcccgtccgcggcggcctctacggcctgcatcgagagcttcacggacctcatctccgccgcgccggcgagcctctcgggttcctccttggtggcggaatgcttcccggacccgagccagttcgccatcacctcgtcctactgcgccggcgtctccaccgctacggagttcgtggccgccgtcgggaacgactccgcccaggccctcaactcctcctgcggccccgacctcgcctcgccggcgacctgcgcgctctgttacagcgccggcgtcgccgccaccgcgcatctcaccagcgccgcggccaacgatagcaagtcgggctcctgcttctacctcactgtcctgtacgccgctggcatctccaactccgccggccccacctacccacccaccgccgcctgcgctcttggacttggcctcttgtcccctgcccccacgccgtcgaagtccagccacgccgccgtctacgccgccaccatcccaatcgcattcgtgctgctcgcatcgctcttcggcttctttctttggaggaagcgaacgcgtgccaatagcaagaagaagaagaaccataagatctgcgaggaggggtccggagaccgccggtcgcacctgcggcccaacacagggtcggttttcttcgacattgccgacctcgccaaggccacgggtggcttcgccgagcgcaatctcgtcggtcgcggcgggttcggggccgtgtaccgcggcgtgctcgcggacgggtccgtggtcgccgtcaagaagatgctggacccggacatggagggcggggacgaggagttcgccaatgaggtggagatcatcagccatctcaggcaccggaatttggtgccgctccgtggctgctgcatcaccgacgaagacgtcgaggaagggaagcagaggttcctcgtctacgacttcatgcccaacggtgcgctcgaggacttcatcttccgggacagggaagctgctacgaagctgcccccattggcttgggcccagcggcggagcatcatcatggacgtcgcgaggggtctcgagtacctgcattacggcgtaaaaccggcgatttaccacagggacatcaagtcgactaacatcctgctcgacagcgagatgcgcgctcgcgtggcggacttcggcctcgcccggaggagccgtgaggggcagtcgcacctcacgacgcgcgtcgccgggacgcacggctacctggcgccggagtacgcgctgtatgggcagctgacggagaagagcgacgtgtacagcttcggcgtgctactgctcgagatcatgagcgggcggcgagtcctggacatgacggcgccagcgggtcccgtgctgatcactgactgggcgtggactctcgtcaaggccgggcaggcgagggaggtgctcgacgaggcgctgtccaccgccgagagcccgcggagcggggtcatggaaaggttcgtactggttggaatcctgtgcgcgcacgtgatggtggcgctccggccgaccatcggcgacgcagtgaggatgctggagggagacatggacgtgccggagctgccggaccggccgctgccgtacggacacaacgccatgttcagcgaagctggtagtaccttcagcatctcaccggcgttcagtggtccgttggccccgttcatagacaatggggacatgctgaggtgattgatgaagcaggccgagttcgttcgattgcagaaactagataagaatcacaggtgttgtagatagctgttattctgttaagggttgctgtttgttgattgattgaaattcatcttttgtagtatacgttgaattggcaaatgaacgacattcacatc

SEQ ID NO: 149868 - DNA, 1008 bp, Zea Mays
atcaaatctccaaccgtaatttcctctccctgctagccgccgctctctcctccttccccttgcttctctcccatgcagcgccgcccagcccttgaagccgacccggccgcccgagctcaagccccgagctgcgcagccacccagccccacccgcaggtgccgcgacccggccacccgcgtccgaccgcaccaggaagccgccaggacccgctgccgtgcccctgcacctgcacgcccgcgacgcccaggcgcgactgcctcgcgccgccatccgccgagccccaggcgcgcaaccccgggagccgaaccaagctgaccgccttgcccttcctcgacgcgcgaaactaggagcagccgcgccagccgtgactcgaccgaccccgcgcgtccacctcaccgtgaccgacgcgccctgcgcacatcctcgccgcgcgactcgaagcgcaagtgccgcagtccgttcgtctcacgatttactggagcattactacatccgtttcctttccccattattctctctggtaacgtcgccattgatggtgccataatgctgccgacgcgtctctctggctgactctccatcttctctctcttctctataaaagacagcagagcctctctctattttcccgtacccaagctcgcccctctctcactctgttgctcgccgtcgtacgtcgtcgccggagctcgctgttcctcgccggagcttgtaccccaccgtcagaacgctcaccaacgaccacgtccggaatccctgcccacgcgcgcgcagcagcaccccggcaaccgtgcccacgccgttcgccgtcatccgttcatcccaaggtcgaagacaacccgaaatatttattttctaaatcatgttttgaatttattgtgagttattgttgtaatattatgatgatgcgatttggtgattcgtatatgattgtagggattttgttttatacgtgtagtcaaaatcgaaccccgcgacaatgctttaatatgtgtatgattttataa

SEQ ID NO: 149869 - DNA, 2934 bp, Zea Mays
atggggaaaggggcgaggaggcgcagccgtgcgtctggcgccggcgggggtggacacgggagcaagcgcccgcggcgggccgaggaggaggaacaggaggaagaggaaatggaaccgctggtgggggaggaggaggaggtggcggcgctggagggggaggactattgcttcgtctgcaaggacggcggtgacctccgcgtctgcgatttcaggggctgccagaaagcttaccatcctgcttgcgtggggaaagatagcggcttcctcaattcagatgaagaattcatctgtgaatggcatacttgctttatttgtaaagggcgttcacgttattattgcttttgctgtccgtggcaagccttttgtcaaaattgcgtgaaacaagcagaattcgtcccagtcttgaggaagacaaagggattctgcaccaactgtttaaggatggcaatcatgattgagaagaatgttgatgttgactccgatggggagagggttgatttcaatgacagggcaacttatgaatttttattcaaggagtattgggaggagatagttaaaggcaaggagagcatgactctggataagcttgaaaaagcatatgcttttctgaaagaaaaactaaactgcaaacaagatctagatttagaaaaggttcatgatgaagaacacagttcagatgatgattttgtgggcaatagtgatgacgacgatgacaacaagccatcttccacaaccaaatttaatggaacatcgaatacaatgaaattcttcctgagggaagataggccaatgaagaatggctatgtgggctggggttcaaaagagctcatggagttcctttcctctataggcaaagatacattgaattccctagatcaacatggtgctactgaagttgtgaaggtgtacattcaacaaaaaggtctcttagcaagagataagaaaaaacttgtcatatgtgatgacaagctcaagattttgtttaggagatcaaaagtgaggtacaacaggatatatagcttgttaggtaagcatattgctgtgaatatgacatcagaggatgaaacttttgctaactctgatgataacaatgaaacatttgtgagaaagaaagctcgtattgggaactacagttccagtactccaaagtgtactccagaaataaacaagagatgttttgctgctcttgttcgccataacattgatttaatctacttgaagaaatctttggttgtggatctactaagggagccggatacatttggcagcaaagttattggctgttttgtgagaataaagattgatctcaacgattatagtttctacatgcataaaaaggtgcaccaacatagaaagttgtatcagcttggactagtaacaggcaccagtaaatcccctgaagaatacaagataaatgatgtatcaacagatattcttttatgtatttccagcatacctgacatcaaaatttcaagtttgtcagatgaagaatacgaagaggaagaatgtcaagaccttcggctgctggccaagaatgaatcctttaaaaggcctactgttggggatctagaggagaaagcaagaagtttacgtagggagatagtgaatcattggatcagtaaagaactccagaggctagaaagattaattgacagggcgagtgagaaaggttggcgcaaggaaaagtttgaataccttgataagaaacaactcttgcgcaagccatctgaacaacaacgtttacttgaagaggtgcctcaagttattccagagacagaagataataaagatactgaatttcaagttacaggacaagacaaacctattcaaaagagtactgtcgctttacaaggtaccaatggagagagcattgtttctttgaaaaaaggctcagaagaaaaatgtacatatgtgacaagggcttcttttttgaagagccacacagggaaaaaatccaaaggtactgatggggagagagatctttccttggaaagtttatcggaagaaaaacctgaagttaataaggcccacaccgatggtggtacagctgtaatacacaatcaaaatcggagcactacagctgctattgctgcgctaccaaagtatttgcatcgccatgctgccactgaagccaataatgctggtgatatttcatctgttcaggagctggatggtgaaggtgttaaagctagcacggatgttgatacaactggaacagatgtccagcacgggagcattgaagctactaaagccaacgctgctggtgatgcacctggagcattttttcaaaagcagtgtgctaaagctgctgatgttattaccattgacgacgatgacgaggacaacagtcatcgttgttataaagaagaacaaacagcagtagttgatcttgaagctgattatgctggggataaccatcccgtgcagcttgaggcaaatagtcgaggccataaacacgtgaaggtgaaggagcgcatttggtattacattgatcctcagggtgatgagcaagggccatttacaatgcagcatctgagcatctggtggagcaatggcttcttccccggcgacttcagggtctggagaacaggccaaactagtaatgacgccatcttgctcgtggacgcactgcagatgactaggtaggctagttaggagcctcgtagaagactagatgtatttatgtatcgcggaaaaagcgggggggcttcgaggcagatatatgtgttctgctggggtgtacatccttctgtgttatatgatatgatgatgacatcctatccccaccatcacctcacccaccaatcaaaaacatcttgccaaacaaaacaatggttgtttgatggcaaagaggatttgttgggatgaaatatttgtggactattcagtatccctgtgctgtgacaatgctactgaaaatctggttctttggca

SEQ ID NO: 149870 - DNA, 2873 bp, Zea Mays
atggggaaaggggcgaggaggcgcagccgtgcgtctggcgccggcgggggtggacacgggagcaagcgcccgcggcgggccgaggaggaggaacaggaggaagaggaaatggaaccgctggtgggggaggaggaggaggtggcggcgctggagggggaggactattgcttcgtctgcaaggacggcggtgacctccgcgtctgcgatttcaggggctgccagaaagcttaccatcctgcttgcgtggggaaagatagcggcttcctcaattcagatgaagaattcatctgtgaatggcatacttgctttatttgtaaagggcgttcacgttattattgcttttgctgtccgtggcaagccttttgtcaaaattgcgtgaaacaagcagaattcgtcccagtcttgaggaagacaaagggattctgcaccaactgtttaaggatggcaatcatgattgagaagaatgttgatgttgactccgatggggagagggttgatttcaatgacagggcaacttatgaatttttattcaaggagtattgggaggagatagttaaaggcaaggagagcatgactctggataagcttgaaaaagcatatgcttttctgaaagaaaaactaaactgcaaacaagatctagatttagaaaaggttcatgatgaagaacacagttcagatgatgattttgtgggcaatagtgatgacgacgatgacaacaagccatcttccacaaccaaatttaatggaacatcgaatacaatgaaattcttcctgagggaagataggccaatgaagaatggctatgtgggctggggttcaaaagagctcatggagttcctttcctctataggcaaagatacattgaattccctagatcaacatggtgctactgaagttgtgaaggtgtacattcaacaaaaaggtctcttagcaagagataagaaaaaacttgtcatatgtgatgacaagctcaagattttgtttaggagatcaaaagtgaggtacaacaggatatatagcttgttaggtaagcatattgctgtgaatatgacatcagaggatgaaacttttgctaactctgatgataacaatgaaacatttgtgagaaagaaagctcgtattgggaactacagttccagtactccaaagtgtactccagaaataaacaagagatgttttgctgctcttgttcgccataacattgatttaatctacttgaagaaatctttggttgtggatctactaagggagccggatacatttggcagcaaagttattggctgttttgtgagaataaagattgatctcaacgattatagtttctacatgcataaaaaggtgcaccaacatagaaagttgtatcagcttggactagtaacaggcaccagtaaatcccctgaagaatacaagataaatgatgtatcaacagatattcttttatgtatttccagcatacctgacatcaaaatttcaagtttgtcagatgaagaatacgaagaggaagaatgtcaagaccttcggctgctggccaagaatgaatcctttaaaaggcctactgttggggatctagaggagaaagcaagaagtttacgtagggagatagtgaatcattggatcagtaaagaactccagaggctagaaagattaattgacagggcgagtgagaaagtttgaataccttgataagaaacaactcttgcgcaagccatctgaacaacaacgtttacttgaagaggtgcctcaagttattccagagacagaagataataaagatactgaatttcaagttacaggacaagacaaacctattcaaaagagtactgtcgctttacaaggtaccaatggagagagcattgtttctttgaaaaaaggctcagaagaaaaatgtacatatgtgacaagggcttcttttttgaagagccacacagggaaaaaatccaaaggtactgatggggagagagatctttccttggaaagtttatcggaagaaaaacctgaagttaataaggcccacaccgatggtggtacagctgtaatacacaatcaaaatcggagcactacagctgctattgctgcgctaccaaagtatttgcatcgccatgctgccactgaagccaataatgctggtgatatttcatctgttcaggagctggatggtgaaggtgttaaagctagcacggatgttgatacaactggaacagatgtccagcacgggagcattgaagctactaaagccaacgctgctggtgatgcacctggagcattttttcaaaagcagtgtgctaaagctgctgatgttattaccattgacgacgatgacgaggacaacagtcatcgttgttataaagaagaacaaacagcagtagttgatcttgaagctgattatgctggggataaccatcccgtgcagcttgaggcaaatagtcgaggccataaacacgtgaaggtgaaggagcgcatttggtattacattgatcctcagggtgatgagcaagggccatttacaatgcagcatctgagcatctggtggagcaatggcttcttccccggcgacttcagggtctggagaacaggccaaactagtaatgacgccatcttgctcgtggacgcactgcagatgactaggtaggctagttaggagcctcgtagaagactagatgtatttatgtatcgcggaaaaagcgggggggcttcgaggcagatatatgtgttctgctggggtgtacatccttctgtgttatatgatatgatgatgacatcctatccccaccatcacctcacccaccaatcaaaaacatcttgccaaacaaaacaatggttgtttgatggcaaagaggatttgttgggatgaaatatttgtggactattcagta

SEQ ID NO: 149871 - DNA, 442 bp, Zea Mays
actgggatgctccaatcaagtgccaatgcaccacgagcacgcgcaggccaggaagcccgtcgccctctctccgctcagatgacgctaataatggcctcgtcgagcctcgcccgcctcttggtggccttgttgctgacgtcgttagccctccttttgtgtcgatgcgttggtgcacgactatgctggcgaacggttcgcgatcgatggcaatgccttcgtcctctacggcggcagcgagggagtctatgcctccgctaaggcgggcgcgttcatccgatacgtttttgaaaccaccttcgagaaagtcacgttcagaaggatgcccgagtcggcgaccgcgaccgaggaggacggcatctgcacgaccacggtcacaacggtcatcttcaaggccggcgattgcgacaccgttgggggtgcggacgtctccatcgccggcggg

SEQ ID NO: 149872 - DNA, 806 bp, Zea Mays
aattcggacgcctggtctataaaacaaccgggtccttgcgaattcggcgcaagtccaaagacccaagggcacaagcagaagttgcggttgtacttttcttcctccgccgtcggctcagatctctgcgtgcgggctagcgatggcgtcgttctcggaggctcccccagggaacccgaaggcgggcgagaagatcttcaagaccaagtgcgcgcagtgccacacagtcgagaagggcgccggccacaagcaaggtccaaacttgaatggtctttttgggaggcagtcgggtaccaccacaggctactcctattccgcgggaaacaaaaacaaggctgtgatctgggaggagaacactctgtatgactacctgcttaaccctaagaagtacattcctggaaccaagatggtcttccctgggctgaagaagccgcaggaacgtgctgatctcattgcgtacctgaaggaagcaactgcgtagtataatgacacgcctttgccatgaagagaaaattcgttttgcagtttaataataaacatttttagacaatttgggtcactctggttggacagggtacacaatccacgtctcagtatttttgttcttatggtctcggtattgaatgcctaggtgagttttttttagctgtgcacaaaaaaacagttaaactcgatggtatctcaactgctggagaaatgctagtgccctatttttggctgtggaattggaaatctggaatgcatccattttgaaagacttggttgttgggatatgattctgctcgatgtgatggatatcctggatgaat

SEQ ID NO: 149873 - DNA, 904 bp, Zea Mays
aattcggacgcctggtctataaaacaaccgggtccttgcgaattcggcgcaagtccaaagacccaagggcacaagcagaagttgcggttgtacttttcttcctccgccgtcggctcagatctctgcgtgcgggctagcgatggcgtcgttctcggaggctcccccagggaacccgaaggcgggcgagaagatcttcaagaccaagtgcgcgcagtgccacacagtcgagaagggcgccggccacaagcaaggtccaaacttgaatggtctttttgggaggcagtcgggtaccaccacaggctactcctattccgcgggaaacaaaaacaaggctgtgatctgggaggagaacactctgtatgactacctgcttaaccctaagaaggtatggtgaacaatcccattaactacttggtatgcttagcctcatcagtgttcctttgcacatggaagggaacatagttattgttatgaagttttattcttttgggctctaatcaacaagaatacaaatgtgtcctgtagcaccaataactgtatgtcgaacttgctgaccaatatcacgttcagaaataacttgaggcttgtaaactcgagggttagggtcgcatccttactagtagcaatcactaggaaatttgtttgatctggtctttgtaggcctaacttccctcagctttgaacttacttaggaactagttatactagtttgttggatttggttatgcagttgtttaagttatatgctggtaaacagctggaatttgcatccctagtgtcagctgttactatctatacataatgttaaacactgaaataattcttccgtttgtcttttttctgcccacaatgcccctctgtctctccctgtggctctctttgtcctaggacctgactctgagct

SEQ ID NO: 149874 - DNA, 2029 bp, Zea Mays
cgcctcgcaccccccggcccaaattctacgcctcctccttctccttggcgcatttcttggcgttgccctagcccccgctggctcgccgtcgcttctggcgcgcgctatgccatgagcggagacctcgacgacgggcacggcgccgccgccgtcggcaacgttgttgcggcagcagcaggaggagaggcggccgcggaggtggcggtgggtgcaggtgcagcagcccgcgaggcggccgtggacgcgcacgacaacgacgtggtgatgccggggttccgcttccaccccacggaggaggagctcatcgagttctacctccgccgcaaggtcgaagggaaacgcttcaacgtcgagctcatcgccttcctcgacctctaccgcttcgacccgtgggagctcccagcaatggcggtgatgggcgggaaggagtggttcttctacgtgccgagggaccgtaagtaccggaacggagaccggccgaaccgggtgacggcgtccgggtactggaaggcgaccggcgctgaccggatgatccgaggcgagaacagccgccccatcgggctgaagaagacgctcgtgttctactccggcaaggcgcctaagggcgtccgcagcagctggatcatgaacgagtaccgcctcccgccaccacctaccgacgccgatcctttcattcccaagtccgagatctctctctgccgcgtctacaagcgctccggcatcgacgacacccacgggcagtcatcctccagcacccaattcgcttcctcggcgcggcggacctcgtcccgcactggtgcgccgacggtcattcgtcacggatcgtcgccgtcgccgtcgtcgacgccactgtcaccgacgcagcagctcagcagcttccatctgctccaaggagaatgctcgtctgcgtcaccgccggcgcccatgatggaccaagtggtcaccgtgcacagcgcgccgcagcagcttctgactcacccaagcccatgtacgtacgcgccggcgacaacgatctcaatctcaacagcggaagctgtgccggaatgggcacagggcgcggaggctgcctttgcctcctcgtactcgctcttcaacatggccgccgccgccgggcctatggcggccggcagctcaaggtcgtccgtcgacgagctgagcacgctggttggtcacagccaggcctacgccaacctctcggccgcgacgggcggccacctcctcccattactgacgccgccgccaccgccaatgctacaaacgatgccgcttggtgcgctgccgatcgtggcgccgccatcgtcttcagtcgctgacaagcttagctgggactggaaccagatacctgacacgacaggacgggattacaataacacttctggttttaagtgagcccaaaactcactgttatatatatatatatgttctgaaaacctgccatcagtgtaggttaacatatatacagctcatgcatgtccactagtaaatacgatcaagaatactaataaatgatgaggattatattcagaactactgaagatatgtgatctctaagcataatgggatcactaaaaacaattgcatgcaggtttaactactccttattccatgtgtccctttaacaactagtagtagtattaagagttgctgtattttttaaaaaaatcccaaaaggttttggtaggtttaattttacagttaattaaactactgcaaggagctaagacacatgaaataatgtaaggatgattggacgcagaccgttgcagcagggtttgtttctttctgcatgattgggaggacgacttgcaggggggtggacaaggttagataaaaagcttcgcatatatgcccacaggagtggtgtattctttcagatccagtcttggcatccatggaatgattcatgtgattattgcgacagcttttgttctttacctttgctacagtgtttggtcgtcattgctctttacttggtgctaactgtcacagagtatatattgtttgttccttttcttttctgctgatgctt

SEQ ID NO: 149875 - DNA, 116 bp, Zea Mays
atgaatatttactacgcagtaacaatattgattttaccatgtttcatacttttataattagttatttatttattctatactacttattaataaggtaagagtagtctgccgttttg

SEQ ID NO: 149876 - DNA, 2249 bp, Zea Mays
aaaataaaacctcacccctccttggtctgcggccctttgtcctgtctcctcccacccttgcctccgagtcacctcctcccttggtctccgccgtcgctgcctccttgccggaaccctaaatggaccccggcgccggcgcacactactccgtccgtaccgcggaggaggttttccgcgacttccgcggccgccgcgcgggcatgatcaaggccctcaccaacgatgtggagaagttctaccagctgtgtgaccccgaaaaggaaaacttgtgcctttatggctaccccaacgaaacatgggaagtaactttgccagcagaggaagttcctccagagatccctgaaccagctttgggtataaactttgctagggatggcatgaatgagaaggattggttagcgctagttgctgtccacagcgattcctggttactagcagttgcattctactttgcagcccggtttgggtttgacaaagaggccagacggcggctcttcaacatgataaataacttgcccacgatatttgaagtagtgactggggttgcaaataaacaaaacaaggagaagggccccaatagtaccagcaaaagcaacaaaacaagttcaaaaatgacatcaagacccgagtctcattccaaggcgacaaaagtggcagtgccccctaaggatgacgatgatgagagcggtgaagaatatgaagaggaagagcgtgataacaccttatgtggatcatgtggaacaaatgacggcaaggacgaattctggatctgttgtgatagttgtgagcggtggtaccatgggaagtgtgtcaagatcactcctgcacgtgctgagcacatcaagcactacaaatgcccagattgcaacaacaagagggcaagagcctagcgtcaagccctggtgtgaccctggagtgaagtaagcgtcaaatcattgatgtctgcagatatatgcctacttgtctagcttgtagacttgcttttcatttcgcatgaacgctattgattcactcggttgccctctgcagctcatattgctcgggcttaattgtgtttaatgttttataagcggttgttgttgtagtaccaggcagtcttgcagacatgtgatagacgtttttggactcggcttaactgaccgttctacattgctagtctagtactctagtttcagttgatcgttgccatttgacttttcacaatggcataggtgtttcgatttttgactgaccatgtttaggttttaatcctcaaacctttgatcgattgctttgttcaaagccaatatatgtcaaaattatacttctgcaattttgtttaatcactggacaggatatttaagattttgtgagctaagaataagagcaactaaaaactttttatacctcctgctgtacggtacaaatagagatttgattaaaagaatcccctttagtaacactttttaggtactctcttcaatatcttttagaggcacattatatctagatttatcttgttcttcattaatattgcatcttaaaagagtgtcttgcaatcttctcaactggctttgcaactcctgctcttcattgttttcaatcagttgaggaaacttatcctttggaggcacatcccacacatttatcatgccagagtcttgtatatttgccatttttaatcaccatactcttgccattcatataaatttgtttgactttcagaagattattccatacaggtgaatcttattgtttttcttaagctgtactttacctctgttttaaatacttctttctgacaatttcctgtcagatttcagtgtcattttcaatcttccaccgccatttgcaaagaggactaatgttcattcttttcaaatctttgatcctcagacccccttctcaaaggtgtaaagatgttaagcaggggggcctattatccctagtcttgtttaattttgttgatgactggcttgactagaatggttgtcaaggcacaacataatggtttcaaaatcatttttttctctggcatggttgtcaagacccattatccttagtcttgtttcataatggtttcagggctgatagaacatattatactcagaggggtagctatacttcaatatgctgatgacaccattatttgtgtaaagcatgatttggagagagcaagggatatgaagtttctgttgtacttatatgaaatgttggtaggcttaaaaatcaattttaatagaagtgaaattgtggtggtaaatgataga

SEQ ID NO: 149877 - DNA, 629 bp, Zea Mays
ggaaacttatcctttggaggcacatcccacacatttatcatgccagagtcttgtatatttgccatttttaatcaccatactcttgccattcatataaatttgtttgactttcagaagattattccatacaggtgaatcttattgtttttcttaagctgtactttacctctgttttaaatacttctttctgacaatttcctgtcagatttcagtgtcattttcaatcttccaccgccatttgcaaagaggactaatgttcattcttttcaaatctttgatcctcagacccccttctcaaaggtgtaaagatgttaagcaggggggcctattatccctagtcttgtttaattttgttgatgactggcttgactagaatggttgtcaaggcacaacataatggtttcaaaatcatttttttctctggcatggttgtcaagacccattatccttagtcttgtttcataatggtttcagggctgatagaacatattatactcagaggggtagctatacttcaatatgctgatgacaccattatttgtgtaaagcatgatttggagagagcaagggatatgaagtttctgttgtacttatatgaaatgttggtaggcttaaaaatcaattttaat

SEQ ID NO: 149878 - DNA, 1312 bp, Zea Mays
aaaataaaacctcacccctccttggtctgcggccctttgtcctgtctcctcccacccttgcctccgagtcacctcctcccttggtctccgccgtcgctgcctccttgccggaaccctaaatggaccccggcgccggcgcacactactccgtccgtaccgcggaggaggttttccgcgacttccgcggccgccgcgcgggcatgatcaaggccctcaccaacgatgtggagaagttctaccagctgtgtgaccccgaaaaggaaaacttgtgcctttatggctaccccaacgaaacatgggaagtaactttgccagcagaggaagttcctccagagatccctgaaccagctttgggtataaactttgctagggatggcatgaatgagaaggattggttagcgctagttgctgtccacagcgattcctggttactagcagttgcattctactttgcagcccggtttgggtttgacaaagaggccagacggcggctcttcaacatgataaataacttgcccacgatatttgaagtagtgactggggttgcaaataaacaaaacaaggagaagggccccaatagtaccagcaaaagcaacaaaacaagttcaaaaatgacatcaagacccgagtctcattccaaggcgacaaaagtggcagtgccccctaaggatgacgatgatgagagcggtgaagaatatgaagaggaagagcgtgataacaccttatgtggatcatgtggaacaaatgacggcaaggacgaattctggatctgttgtgatagttgtgagcggtggtaccatgggaagtgtgtcaagatcactcctgcacgtgctgagcacatcaagcactacaaatgcccagattgcaacaacaagagggcaagagcctagcgtcaagccctggtgtgaccctggagtgaagtaagcgtcaaatcattgatgtctgcagatatatgcctacttgtctagcttgtagacttgcttttcatttcgcatgaacgctattgattcactcggttgccctctgcagctcatattgctcgggcttaattgtgtttaatgttttataagcggttgttgttgtagtaccaggcagtcttgcagacatgtgatagacgtttttggactcggcttaactgaccgttctacattgctagtctagtactctagtttcagttgatcgttgccatttgacttttcacaatggcataggtgtttcgatttttgactgaccatgtttaggttttaatcctcaaacctttgatcgattgctttgttcaaagccaatatatgtcaaaattatacttctgcaa

SEQ ID NO: 149879 - DNA, 853 bp, Zea Mays
cttcgatgcgaaccagccgcgtccgacccgtcgccacgggctactactactacaaaagccaaggccaaacaggcacggcaagtcggcaaccaccgcaccaccagcgccaggccgccaagcgccagcaccaccgcgccgcgcccaagcaggcaagcaccactgacccaccaggccaccaccccaccgcttcgagccgagggagaaggcggcgcggggcggcgcgctcaggtcggagatgaggggcggatccagacgggcctcggtcgccctgtttctcctcgctgcgtccgggatctgtgcccagttcaccgcagtgctagctggtgatcctcaaacattcaatgacgataagaaggctgaagctcagcccaagggccatactggcaagacagttttgttcgtcctcctaggagtgggggccgtcgttctgttgtcatttttcattttcaagtattggcagaagaagaaaagggaggaacaacatgcacgtctactaaagctatttgaagaggatgatgacattgaggttgagcttggtcttagagactgataatcttcaatgtacagcaagagtatctcggctgaccaggttttgctggcttgccttcagagcattttcacgttaatgtaaagaatttgttgtatttaaacttggtagacccccacaagaaagttctgttgtacttccactttatatgaacatctctgcgtgcagggtgtgcttgagaatagctctaaggaggaagtatcaaggtttgcagatcatcctttgatttttaaagttttctgaatatatatctgtgcatgtagtaaagaaattcatagactatggtaatcatatcctctggtgtga

SEQ ID NO: 149880 - DNA, 431 bp, Zea Mays
ccatatacgttctgccttgatagaatgatagttgatacgagaaattatcacgagcactgggtgcaatcttaagccatcagaatacaataatagcttttgataattgtgatgttgtttcctgacaccaggcaagaccaacttacaggtgaccatatatggcgtggacggcaaagaaaaatagacaatccgataacagctaacacagtcaaaacctcactgtcaatacaagagtttggtcattcttatttcttgttgcagcaaataggtctcaagggaaaagcaaaatcaccgaaacaaccatataactcttttaagcatgcactagctcctgaaggtgtgctaatcagggctcagtggtggtccttcgtctcaaacaagccatcagggcctgcattacacaattgtatgatgcatcagaaatggaaaagcaa

SEQ ID NO: 149881 - DNA, 833 bp, Zea Mays
tagatgcatcatcatgccctgcatgaacagaaaccatcaattgagaagaaccaaggccaggtccaggtcctagattcgtagttgatgatcttgtagcgtggaagggcataccaaagcacttctaatgtggccatcatgctggattgatcacaaacataagcctaatgtagattctataccaaaattaacaaaacgcggagtagtagaactgcaagtttgtaactgaaaaaacacaatatatcacaatcaaagaagtgctatcaactaggtgcggagcaagatcgacatctgagtatctgagtcaccagtctcacgaaaagcgcggcgccccaaatccaaatcgcatcccatcaacaggtaagaatcggatcaacggaaaggatgcgacctggaatactgcacatgcgatgcgaatcgcccaaacattcaccttgccaagcctaagcccagcgattcgaaggcatcacatacacacgagaagggcctcaccggcagacgacgccttgctatcggcttcctcgccgctggcctcgccaccgacggagccgtccttcctcgtgccccccgacgcgcgcaccgccaccaggggcgcccacacggggctgcgcctccagaacctccgcccagccgatgccgtcgacggcgacgcaagggagggcggcgctgggtgccgcggcgtgaggcagggtccgccggccttggcgttgttgagggcccacatgtcggtgagcgaggcctcggtcgctccggggaccggggggcgggtcgccggccgggtcggagtggaaatggaagcgcacgaggcgagtccgcaagtgatggatgaatgtatg

SEQ ID NO: 149882 - DNA, 905 bp, Zea Mays
cattaatcggcttgcttgtttttggttcgtcatgcgattggttcaacccagcagaggtatcccctgttggggtagatgcatcatcatgccctgcatgaacagaaaccatcaattgagaagaaccaaggccaggtccaggtcctagattcgtagttgatgatcttgtagcgtggaagggcataccaaagcacttctaatgtggccatcatgctggattgatcacaaacataagcctaatgtagattctataccaaaattaacaaaacgcggagtagtagaactgcaagtttgtaactgaaaaaacacaatatatcacaatcaaagaagtgctatcaactaggtgcggagcaagatcgacatctgagtatctgagtcaccagtctcacgaaaagcgcggcgccccaaatccaaatcgcatcccatcaacaggtaagaatcggatcaacggaaaggatgcgacctggaatactgcacatgcgatgcgaatcgcccaaacattcaccttgccaagcctaagcccagcgattcgaaggcatcacatacacacgagaagggcctcaccggcagacgacgccttgctatcggcttcctcgccgctggcctcgccaccgacggagccgtccttcctcgtgccccccgacgcgcgcaccgccaccaggggcgcccacacggggctgcgcctccagaacctccgcccagccgatgccgtcgacggcgacgcaagggagggcggcgctgggtgccgcggcgtgaggcagggtccgccggccttggcgttgttgagggcccacatgtcggtgagcgaggcctcggtcgctccggggaccggggggcgggtcgccggccgggtcggagtggaaatggaagcgcacgaggcgagtccgcaagtgatggatgaatgtatg

SEQ ID NO: 149883 - DNA, 1839 bp, Zea Mays
agtttttttagaaaccactctcatcctctcgcaccgcaccgttcgcttcctttcgtcaactccactcctcttggccgccgcattacctcctcttcgccgctgccgccaccgctccaccgggcagccagccagccatggatgaggagtacgacgtgatcgtgcttggcacggggctcaaggagtgcatcctcagtggtctcctttccgtcgacggcctcaaggttttgcatatggacagaaacgactactatggaggagattccacctcgctcaaccttaatcagctctggaagaggtttagaggggaagacaagcccccagcacatctaggtgcaagcagagactacaatgtggacatggtgccaaagtttatgatggcaaatgggacattggttcgaaccctcatccacactgatgtgacaaagtacttgtcattcaaagctgttgatgggagctatgttttcagcaaagggaagatttacaaggtccctgccactgatatggaggctctgaagtcccctttgatgggtctattcgagaagcgcagagcaaggaacttcttcatttatgtccaagattacaatgaagctgatccaaggacacatcaaggattagaccttactagggtgacaactagagaacttatagcaaaatatggtttaagtgatgatacagtggatttcattggacatgcacttgctcttcatagagatgatcgctatcttgatgaaccggcacttgatacagtgaaaaggatgaaactatattcagagtctcttgcgcgctttcaaggaggctcgccatatatctatccattgtatggtctgggtgagctaccacagggttttgcacgattgagtgctgtttatggtggtacttacatgttaaacaagccagagtgcaaggttgaattcgatatggaggggaaagtgtgtggtgtcacatctgaaggtgaaactgcaaagtgcaagaaggtggtctgtgatccttcgtatttaccaaacaaggttaggaagattggtagagttgttcgtgcaattgctatcatgagccacccaatccctaatacaaatgagtcccactcggttcaaattattttgcctcagaaacaacttggacgtagatcagacatgtatgttttctgttgttcatacacgcacaatgttgcgccaagagggaagttcattgcatttgtgtctgcagaagcagagactgataacccgcaatctgagctaaagcctggaattgatctacttggttctgtggatgagatattatatgatatttatgacagatatgaaccagtgaatgaaccatctcttgataattgctttgtcacaacgagctatgacgccaccacacattttgagacaactgtaacagatgtcctgaacatgtatacaatgatcactggaaagactgtggatcttagtgtggatttgagtgcagctagtgctgctgaagaatactgatttcagtcataatgtttatcaaagatcacatcattggggacagcacatgaccaaacttcaatgagtggctagtatgagtttagtcggttccagattataccatgccgacttctactgtacctcgtgaatcgtgatgtctattgggcacttgttgctgacagaactgtgcacaatgttgatccaatttgatggatggtggtggttctgttatttactagtcggtcaaaacactaaacggtggccatcatggctgtgtgatgtatcataactgttcagtaaatttgtgttcttctgcccggagttctgctcgatgctattgcgggcggcccgaggtgcttgctctactgtgaatgaatgaagtttgtca

SEQ ID NO: 149884 - DNA, 1705 bp, Zea Mays
atggacgaggagtacgacgtgatcgttctgggcacggggctcaaggagtgcatcctcagcggtctcctctctgtcgacggcctcaaggttctacacatggatagaaatgattactacggaggagattccacctccctaaacctgaaccagctctggaagaggtttaggggggaagacaagccaccggcacatctaggtgcaagcagagattacaatgtagacatggttccaaagtttatgatggcaaatgggacattggttcgaaccctcatccacactgatgtgacaaagtacttgtcattcaaagctgttgatgggagctatgttttcagcaaagggaagatttacaaggtccctgccactgatatggaggctctgaagtcccctttgatgggtctattcgagaagcgcagagcaaggaacttcttcatttatgtccaagattacaatgaagctgatccaaggacacatcaaggattagaccttactagggtgacaactagagaacttatagcaaaatatggtttaagtgatgatacagtggatttcattggacatgcacttgctcttcatagagatgatcgctatcttgatgaaccggcacttgatacagtgaaaaggatgaaactatattcagagtctcttgcgcgctttcaaggaggctcgccatatatctatccattgtatggtctgggtgagctaccacagggttttgcacgattgagtgctgtttatggtggtacttacatgttaaacaagccagagtgcaaggttgaattcgatatggaggggaaagtgtgtggtgtcacatctgaaggtgaaactgcaaagtgcaagaaggtggtctgtgatccttcgtatttaccaaacaaggttaggaagattggtagagttgttcgtgcaattgctatcatgagccacccaatccctaatacaaatgagtcccactcggttcaaattattttgcctcagaaacaacttggacgtagatcagacatgtatgttttctgttgttcatacacgcacaatgttgcgccaagagggaagttcattgcatttgtgtctgcagaagcagagactgataacccgcaatctgagctaaagcctggaattgatctacttggttctgtggatgagatattatatgatatttatgacagatatgaaccagtgaatgaaccatctcttgataattgctttgtcacaacgagctatgacgccaccacacattttgagacaactgtaacagatgtcctgaacatgtatacaatgatcactggaaagactgtggatcttagtgtggatttgagtgcagctagtgctgctgaagaatactgatttcagtcataatgtttatcaaagatcacatcattggggacagcacatgaccaaacttcaatgagtggctagtatgagtttagtcggttccagattataccatgccgacttctactgtacctcgtgaatcgtgatgtctattgggcacttgttgctgacagaactgtgcacaatgttgatccaatttgatggatggtggtggttctgttatttactagtcggtcaaaacactaaacggtggccatcatggctgtgtgatgtatcataactgttcagtaaatttgtgttcttctgcccggagttctgctcgatgctattgcgggcggcccgaggtgcttgctctactgtgaatgaatgaagtttgtca

SEQ ID NO: 149885 - DNA, 704 bp, Zea Mays
agcactttttggatcactctacgtacaaagagagaatatccaacgagatgtatatatactgaaaccctctgatccagtgggagccagccaaccaaaccaaaactcgcgtggaccgagaccgaaactagtagtgagtagtgaccgaacccaaccatttcccaccaaccccagccgtcctgccgttcacggttcacctcacacttcgcggttcgctgatggaaggcctcgtcccgctgctctacaaggccatcaaggagcggcggagcaacgcgggcggccgccgtggctaccgcaccggaggtgccctcccctcctccgcgcccgtggacctggacgactccgagcagaggaggcagtggctgcagctgcaggagctgcggtccccggcccacgcggcggcagcggtggcggtggcggagaccgaggggtcgctgctgcaccggcggaacctgtcgctggaggagctggccggcgaggtgggattctcgcccgaccggcggctccgggtgccgctgcccaaggccaggagcgtccgcgccttcgcctgcatgggcgccgcctgattgatcgccgtctacgccgtgtaaaaggtgtggttatatattagttactaatagttgtgctggaattggagaactggaggttgtatatgcaaacgagtgcccttttacttaattttcacgttcttgatgagagcagctggc

SEQ ID NO: 149886 - DNA, 1876 bp, Zea Mays
ctgacttatggtggctgcattcttttggttcctcttaagactgtcgtcgtcctttctgttggcactggttaatccacctcattatatatgtggtagcgtactatatctctcagtctccataacttctttgctactactactagtctattatcaacgaactcatgcttgatcaggttcttgcagatcgtatacatcgtcaacctggttggctccatcaatcactgattacagcgacatggatgctgtgtggttcaccgtctctttcctcgccatcgccgccatagccaccaagatcatcgcaaaacggcgagctacgacgtctgccccaagaagcaccataccagctccgccagtcgtggagggcagatccctcgtgcggttcgtgcacacgctttttaccaaaggtctgcgagccacgatccacgacgagcacgcgaggatggggagcgtgttcaccgtaagtttcttgggactgatgaagacgacgttcctggtggggccagacgtgttgaaccatttctacaacgggccggagtcggatatcaaccatggcaacatgctcgacttcatggtgcccatgttcggcaaggaggtcgggtacggcgtcgatttcgccacccggtacgagcagatccgcttctacagcgatccgctgaaacgcccttccaagctcaggatacacgtcgaccccatcgtccaggaagtagaaggttactttgcaaaatggggagaggaaggcacagtggacctgaagcacgagttcagccagctgctgatgctgatatcaagccggtgcctgctcgggaaggaggtccgcgagaagatgttcgacgagatgcacgctctgttccacgagctgaagagcggcatgcgcctgtccagcgtgctcttcccctacgcccccacgccgacgaaccgccggcgcgacagggcgcgcgccaagctgttaaagatattcagcgaggtcgtgcggtcccggaggaggcggggcgaggaggagaaggagaaggaggaggacgtgctgcagagcctgatcgattccaggtacaaggacgggcgggccacgaccgaggaggaggtcaccggcatgatcatcctcctggtcttcggcgggatggacacgagcacgctcgccagcacctggaccggcgcgcgcctgctcagcaccccggcggccatggctgccgcggtcgaggagcagaggcggatcctcaccgaccacgggcacggggaccgcgtcggctacagtgaattcatgcagatgaccaccctccactggagcatcaaggaggcgctgaggatgcaccctccgtcggcggtgttcttccgcaaggcgcggaggagcttcggcgtacggacgagagacggccgcgagtacgaggtcccgggtgggcatacggtggcgagccccgtgctgttcaacagccacctgcctagcgtgtacaaggaccccgacgtgtacgacccgacccggtttgggcctgggagggaggaggacagggccggcggtaagttcacctacgaggcgtttagctgcgggcggcacagctgcgtcggcgaggcgtacgcgtatctgcagatcaaggtgatgctcagccatttgctgaggaacttccagctcgagctcgtgtcccctttccctcagacagattgggggaagctggtgcctgagcctaaagggaaagtgatggtcaggtacaagaggcagcgcctgctctcagtgcctagctagtagaagatggctagtacaagaagaaactagtgtggacgaagctggggatgtgtgtgtttatcggcctgtactgtagcatgtgtaattatgtttgcctgtttaatctctatggcgatcggcttagaaaacctgttgacacttgaa

SEQ ID NO: 149887 - DNA, 3620 bp, Zea Mays
tcggagaaccactcgaggcctcgtccggttggtgagcgcggcaccccgctcccacaaggcccgtcgcagccgctgactccatcggtcctcactgtcctgtagtctccttggtcacccaacatccgcgcgctgtgcgcagcctcgatctccgatcggcgagatggcggagacgttggccggctggctggtgtgcccgatcatcaagatcgtgatggataaggcaaaatcttgcgcttccgacaggatcaagagcctgggcgacggcgtccccaaggcgctcaagcggatggagcacttgctgtatcagctccgcgccgtgggggccgccgtccagcggcggggctctccgaacggatgcggggacccggacttccgtgagtggctacagcagctcatggatgccgtgtacgaggccctagacgtcgtcgatgacttcgacgactctatgccgccgcctgaatcccccgtcgccagggtcagcaagcggatcttcggcaccgacgagcgcgtcaacaggctcaacgatgtcgtcgacaagctggaagccatctccaaagcctcgccgacactgattctgacggcggaggccaacgcgtcggcgtcgcgcgaacagagcggtcacctgcccccgctcggccgcatcacggcctcgctgcgccaccacaaggacgtggtggttgggcgcgactgggagctgcaaaatatggtgtcctggctcgtcggcgcaggcggcgacgcccaggttgtctctgtccccatcgcggcgatcataggacatggcgggatggggaagaccacgctggcgcaggtcctgttagaggacccgaatgtggtctccacctttgaaatcaaaatctggatccagcctttcccgacggacaacgagcttgagcttgccaagaagatcctcctgggcgccgacgtgggcgtcgacgccttcgacgggctgacgaatttcgacttgctactgaaaaagataaaggagaaagtctcgttgcgcaagttcctgctggtgatcgacgacgtctggaacaaggagaacatgggtcagcatgagtaccgagagatgtggtccaaggtgctggcgcccctcagccacggggaaaggggaagcaggatcgtggtcaccacccgtcaaaagatggtagcgaatttgctgtccgcaagcatggaggtccggttggatgacttgccggccaatgacatctggtctctgttcaagaggtatgccttcggtggcgaggacattgatggtcagccttgtgcactgcaggacatcggaaggaaaattgcccaaaagctcaaggggtctccaatgctcgccaaggccgttgggcagatgcttgaaggcaaccccagtgtctcccactggaggaaggtgcttgagatggacatcttcgacaatgtttccaagacattagagttgtgctaccagaatttaccgggccacctgcaaccatgcttcgcaatctgcagcttattccccaagaactggaggttcaagcgcgataagctggtgaagatttggatggcccttggtttcgtgcaggcagcggatgggaaattggaggatctgggaagtgactacttcgatcagcttgtggccaggtcctttttccataggcagaaggtggggcgtcggagttactattacatccacgaccttatgcatgatttggccaagaaggtttctcggtttgattgtgtgagagttgaagatgcaaagaaggagatccccaagacagttcggcacctgtctgtctgcagtgataccgtggcacagctcaagagccgacctgagcttaaaagattgcacacgttgctgattctcaagagcccttcctcttcgctggatcaactgccaggagatcttttcacagagctgaaaagccttcgagttcttggtttggaagactgcaatatcattcgcctaccggagaggattgggaaccttaagtacatcagatacctggcactttgcaaatcaatcaccaagcttccacaagcactgacaaggctctatcgtcttcagaccttaagtagtcctaaggggtctggccttgaggtcccggaagatatcgtaaacctgacgcgtctgagacatttggacatggatacatccaaaatcaccggcattgggaaactggttcacctgcagggatctgtcaagttccatgttaaaaatgaaaaaggccatactttaggagacttgaatggtatgaatggtcttcgtaaagagcttcatatcaagaatcttgatcttgtagcggataaacaagaagcctgccaggctgggctaaacaagaaggagaatgttaaggtcctggaattagaatggaactcgactggtaagattgtgccctctagtgaggctgatgtcttggatggccttgaacccaaccaatatgttaaaaagcttactgttagaagatatcatggtgatagatcaccaaactggcttaacacaagcttgaaagtgagtgtcttctacgttaaatacctgcatttggtcaactgcagaaaatgggaggtcctgcctcctctggggcagcttccatgcctcaaggctttgcgtctgaaagagatgtgtgcagtgaaaaaaatcagcttccgtgacttctatggaaccaaatcgactgcgtttccatctttggaggaacttgaattcgatgatatgcctcaatgggttgagtggacccaagaagagaagaatatcgatgtgctacctaaactccgtaggctgaagcttttgaactgtcccaagctcgttaggttgccccagctccctctgtccgtgaggaaggtctcggtaaaaaatacaggatttgtttcacagctgaaactatccccctgctcttcctcgccatcaaacgcgtgcaagtttaaattagatacgtgctctgccaccatccttacaaatggcttaatgcaccagcaacataaggaatcaattgctactttggctctgaggaactgtcaagatgcaaagtttgaagagcttgagaagctgacttccctgaagagtctgcaaatatgccattcaagcattaacgatggccagctgggcacttgtttgaggggatcgcgagtacttacctgtctggaattgtccaactgcaacaacatcacatgccttccacagatggaaggttcagactgcttaacaaaaatgcatgagttacgcattcaacagtgttctgaattctcctctctgcgctcactgccaagttttgcggctctagaaagtgtattgattgaaaactgctcgaagatcactgcgggatcgttccctaccgacttcagcagcaacacctctctgagaaaactgggcataatgaattgcgttgagctggagtcgttgccaagcggtttcccatcttcactgcaagttcttcatctaattgggtgcaaagcaagtttgacgaagcaactacaactcaaggatggaccagaatgggataaagtagctagtattcccataaaacaaatccgttgattagaatgttgttatgaagatcaaaaggtgcgtggtgtactaacctggaaactttagttgtttatttcatcattgcttaattggtgatgtcatcttataaaacaatatttgtaatcaatgaaat

SEQ ID NO: 149888 - DNA, 1203 bp, Zea Mays
atagcagcgaccaaaccagttaaccagcccaacaaatccaggcgtgccccgtgcgcgcatccctccgcctcatggcggcatcagcgtctcggcccctcgcgctcctcgcgtgcacctcggcatctctcggcgctgggcggcgggcgtgggctcgcttggctgtctcttcctattcggcgaggtcggcgctccccaggctccgcgggcgccggtcgttcgccacctccgcacggggcgccgtgatggggaacccaggccccggcgccgttgacgccgacgtcgggatggacgccgtccaacggcggctcatgtttgaggacgagtgcattttagtggatgaacaagacaatgtcatcggccatgagtccaagtataactgccatctcatggagaagatagaagctggaaatgtcctgcacagagctttcagtgttttccttttcaactccaaatatgaattgctactacagcaaaggtctgcaacaaaagtgacatttccacttgtctggacaaacacctgctgtagccatcctctctaccgcgagtcagagttgattgaggaaaattgtgcaggggtgagaaatgcagcccaacgcaaactatttgatgaactgggaatagttgctgacgaattacctgttgaccagttcatcctccttgggaggatgctttacatggctccttcagatggaaaatggggcgaacacgagttggattacctcctgttcatggttcgtgacgtgaagctcaacccgaatcctgaagaggtggccgacgtcaagtacgtgaaccgcgatcagctgaaggagctgctcaggaaagctgatgctggggaagatggcgttaagatgtccccttggttcaggctggtggtggacaacttcctcatgggctggtgggatcatgtcgagcaagggactctgcagggggcagcggacatgaaaaccatccataagttgtaagcctgtagtcttgtagatccgcgaagcacgtgctgtgctccgttgagaaataagcgtttctgcaggtgtttgcgctgcctttgttttagccatcattctgatggaaatagtcgataaagtcataatagagtgttcttaaatagggaacagaactatttatattgaaacccgtctatgatgtgtaaatttctaccgaatgaatggaattatggaaatcatagtaattggcgagcaaaagaaa

SEQ ID NO: 149889 - DNA, 204 bp, Zea Mays
tcgccgtgctaaccgtctatgtcgtcaccggacttgtctcctcgaccatcgtggcgttgttatttcctgctgctccatgacatcgtcgagccgttctcagtcgctcgccgttgaagctcccctgttggttgcgtcctgctcgcctttgcgtcgcgcgcatagcgttctgttgttcttgcgcgcgcgaagctctttgctcgtcaa

SEQ ID NO: 149890 - DNA, 1944 bp, Zea Mays
gccagcgtccacctttcaaaattcaaaatccaaagccacaaacgggcccatgcgaagcctacgcgccgatctccgcatcggacggatgtgatcttctgggtttcctcgggaaaccccacgtgccgtccgatccggtgacctatcctcaccaccgtataaaaaaccgcccggcatttcgcctcaccattctcagaacacgcgctcactccccgagtcccgatcgcaaccgccccccacattccccagagttagcccgatcagatcgtttttccctcgaggtgagagtaagatgagggagatcctgcatatccagggagggcagtgcgggaaccagatcggctccaagttctgggaggtggtgtgcgatgagcacggcatcgacccgacggggcggtacatggggacgtcggacgtgcagctggagcgcgtcaacgtctactacaacgaggcttcatgtggtaggttcgtgccgcgcgcggtgctcatggaccttgagcccggcaccatggacgccgtccgcacgggcccctacggccagatcttccgcccagacaacttcgtcttcggccagtccggcgccggcaacaactgggccaaggggcactacaccgagggggcggagctcatcgactccgtccttgacgtcgtccgtaaggaggccgagaactgcgactgcctccagggttttcaggtttgccactcgctcggcggtggcacggggtctggcatgggtaccctgctcatttctaagattagagaggagtacccggatcgaatgatgatgacgttctccgtcttcccatcccccaaggtgtcggacacggtggtcgaaccctataacgccacgctctctgtccaccagctcgtggagaacgccgacgagtgcatggtgctggacaatgaggcactatacgacatctgcttccgcacgctgaagctgactactcccagctttggtgatctgaaccacttgatcagtgccaccatgagtggtgtcacttgctgccttcgcttcccagggcagctgaactctgacctccgcaagcttgctgtgaacctgattcccttcccacgcctgcactttttcatggttggctttgcaccgctgacctcgcgtggctcccagcagtaccgctccctgacggtccctgagctgacccagcagatgtgggactccaagaacatgatgtgtgccgcagacccacgtcatggccgctacctgacggcctctgccatgttccgtggcaagatgagcaccaaggaggtagacgagcaaatgataaatgtgcagaacaagaactcgtcctactttgtggagtggattcctaacaacgtcaaatcgagcgtttgtgacatcccccctcgtggcctctccatgtcttccaccttcgtgggtaactccacctcgattcaggagatgttccggcgtgtaagtgagcagtttacggccatgttcaggaggaaggccttcttgcactggtacacaggcgagggcatggatgagatggagttcactgaggctgagagcaacatgaacgacctcgtctccgagtatcagcagtatcaggatgctacagccgatgaggaggccgactatgaggaagaggaggcggcggcggagtgaggccttctgccatcagttggtgcggggttggctttgtggttttctttgcacttgatgctacctcaacgtatgcaatatctcctgcttgatatatctgctgcttgtgtacgctaccgcgtacgttctgcactcttaataaatatatatgttagttccgtaccagttcctgcgctagtggattggaattctgattaaaatgtttgctgagaagtgtcgtggtgttcttggatgagattctgtgctgccgttgtatgctgttttgaccaaaaattacaatgtttgttgaaaattatgagttcgttctttgtttgttttccagt

SEQ ID NO: 149891 - DNA, 618 bp, Zea Mays
gggctggtttggcagccgcttttcccgccgggatcccggtgttttccctgtgtcgccaatccatgcgctaaatttccacggaccatcgctccatcctgtttggaaaccggccccacgggtatactggcccattctgagcccaacttacgcgtggaaactcgcccgaccttcagacgtagggcggctatccccgagtcccgaatcgtctcttcttctcgcctcctctgtcacggccggacgcgccgccaccactccgccagtcgccgtgcacccctccgccagtcgccgtgcacccctccgccagtgatcgtgtcggaatggagaaggaaatattcaaagccacatcaaattttcttagaagagagaatttactacgtgacacgcgaggagttagcattgaggagcagcttgggatgttcatggtgtaaactaaacatagcttccaagaacatagtgctaagtggaagcaacacttgaagctgacatggagaaggaaaatggaacaacaatccacatgaagcttgtaaaaatggagttaaactaataatttattatagtgtcaaagttcataatgaaaggacttgtactatgtttttatgctataataatttgttgaat

SEQ ID NO: 149892 - DNA, 1338 bp, Zea Mays
cttgctcgttgctcctgctggctgccgctgccgccggcgtcgactcgctcgagtgagctgcaagaattgctctgcccgtccgtcaggagagagcagaggaagaagccgcggccatgagggaggaggaggagcccagctggttcgcgcgcggcgaggagcaggagcagcagctcccgcggccggacgagctgatgccgctcacgcagacgctcatcacgcccgatctcgccgtggccttcgacatcacgacgcacggcgccggcggggcgggccccgtccccgacatcaacggcggcggcgcgtcgtcggccgcgggatccagcggcgggggcgggggcgggggcggcgacgagccggcgcggacgctcaagcgcccgcgcctcgtgtggacgccgcagctgcacaagcgcttcgtggacgccgtggcgcagctcggcatcaagaacgccgtgcccaagaccataatgcagctcatgagcgtcgacggcctcacgcgcgagaacgtcgcgtcccacctccagaagtaccgcctctacctcaagcgcatgcaggggctcggcggcggcgggggagggggcagccactcctccggctccggctccgccaccgacgccgccaccgagcacctcttcgccacggggcccgtccccttcctcccgccggcccaccgcgcgcccgccgccgacacctacccgcccttctcccccatgggctccggcgccgcgcaccaccaccaccgagcgccgcagatcggccacttccaccacccggccgcgcgcccgctcgcccactacgccgccgccgccgggcccggtttcgaccacggcttcctgagccgcgtcgcgccgcccgggatgcaccaccaccgcatggccagcgccgccgccgggatggggatggggatgatcgcgccctcctccttcgccgacgagatggaccgaggcgctggcggcagcggcggcggcggcggccgccgcgagctcacgctgttcccgacgtccggggaccactgaggccgacggctgcgacgggcatcggactgcgactgcgggcggtcgcctccgccctcgttcttcgggtacatagaattccaaattcgttggcttcctgtgcgccccccactctccctctgctgcgcaagcgcaagcgcaaccgccgctgcttcccacagatcggcatacaaatcgagcaaggcacccccccccccccccccccggctcggccacatctcactctcaatctcacatagttcaagaattattgggaattagcaatccgtccatcctactagcgtctcatcgcccaccattgtttctgttggtgttcgtgtactgctgc

SEQ ID NO: 149893 - DNA, 1646 bp, Zea Mays
gcctccggtttcggattccaattccaccggccaccccgagcccgatatcgtcttctaatctcatccgctccgtgccgcaccgcaaaacgcagatccctgcctgcacacggcatccggagttccggactcccctcctcttctcgggcagccgggcgccgcttcgcctcctcctcgcaggcaagaagagcagccagccgcttcgcgatcggggacgcggagaggggaaaggcgagtcgtcgtccgtccacggcagcttccctccctctcctctccgcccccgcttacctagcccggcccctcctacgccccccccctcccgccgccgcacgatgagcacctctccggccgcgtccgccgccgcgtcgcctccgccgcctattgcctccgccgccgaggcctcgcgggcgacggagacgttggtggtcgacgagagggtcgcctcacacgtggacccgttcctcgtagaggcgctcgacaaccctcgccaccgcctcatggttctacggatggaactggatatacgaaactttatgcagaaccctcagctgcaggagttcgaattccagaactttccgacttcttacctacgctgtgctgctcatcgtgttgcacaacattatggcttagagactatagtggcagatagtttagtagaaggctcagttagcaggatcgttgcaagaaaaacaccagagagcaggtgtcctgcaatttcattagcagaagttcctagcaaacaagcaagaaatgatcatgaggcagcagagaagcttaagtttgtcatttatcaaaggcccaaagcattccaaaatggaagcactgatttgggaaacaagaatggtgcaccaaaaactgttgaagagagaatagaggaatataataaagcacgagcacgcatcttcaatggttctgtttctgcagattctgatgctgcaagtgttttgggaactctttgcactggcagagatgagtcagtaaatgttgaaccttctgttgatgaaatcaaagtcagcacgatgaacaaccgttccagagttgctgttttcaaggatactcaaaaggatcgcagtgacccagattatgatcgaaactacaaaaggtatgttaggagcccagttcctgacttcaacttgagcccaggtgccttcaactttgtgcctcagtttatgcagtatggcgttggttatgtgcaatctcctggcatgtctacaaaccagcctgctgtctactttggccagcctgatctaacaatggggtcttctggagctgctgtttacccacattggccaaccccagcaatgatgtatccccattgctatgacaatgttggttcaatgatttctcaggttcctctgtaccaatctttcaaccatggttagtagattctgcttactggaaagttgggaaccgttctctgttgaacttgttatattgtgccgtcctatgttaagtggagttactttagattcgagccatttcgattacagaaaattccaaaaaattcatgtaatgtcgaacgtattagtttgtataatggggagtcctaattcgttgaaactaatatcgtgaactagtctggaactgtaattcgtgtctaatatctagttctcgtctgcaaaaataaaaagtcaaataaaaagtaaaaa

SEQ ID NO: 149894 - DNA, 1766 bp, Zea Mays
accaacgatttggatcctgaaccggcctccggtttcggattccaattccaccggccaccccgagcccgatatcgtcttctaatctcatccgctccgtgccgcaccgcaaaacgcagatccctgcctgcacacggcatccggagttccggactcccctcctcttctcgggcagccgggcgccgcttcgcctcctcctcgcaggcaagaagagcagccagccgcttcgcgatcggggacgcggagaggggaaaggcgagtcgtcgtccgtccacggcagcttccctccctctcctctccgcccccgcttacctagcccggcccctcctacgccccccccctcccgccgccgcacgatgagcacctctccggccgcgtccgccgccgcgtcgcctccgccgcctattgcctccgccgccgaggcctcgcgggcgacggagacgttggtggtcgacgagagggtcgcctcacacgtggacccgttcctcgtagaggcgctcgacaaccctcgccaccgcctcatggttctacggatggaactggatatacgaaactttatgcagaaccctcagctgcaggagttcgaattccagaactttccgacttcttacctacgctgtgctgctcatcgtgttgcacaacattatggcttagagactatagtggcagatagtttagtagaaggctcagttagcaggatcgttgcaagaaaaacaccagagagcaggtgtcctgcaatttcattagcagaagttcctagcaaacaagcaagaaatgatcatgaggcagcagagaagcttaagtttgtcatttatcaaaggcccaaagcattccaaaatggaagcactgatttgggaaacaagaatggtgcaccaaaaactgttgaagagagaatagaggaatataataaagcacgagcacgcatcttcaatggttctgtttctgcagattctgatgctgcaagtgttttgggaactctttgcactggcagagatgagtcagtaaatgttgaaccttctgttgatgaaatcaaagtcagcacgatgaacaaccgttccagagttgctgttttcaaggatactcaaaaggatcgcagtgacccagattatgatcgaaactacaaaaggtatgttaggagcccagttcctgacttcaacttgagcccaggtgccttcaactttgtgcctcagtttatgcagtatggcgttggttatgtgcaatctcctggcatgtctacaaaccagcctgctgtctactttggccagcctgatctaacaatggggtcttctggagctgctgtttacccacattggccaaccccagcaatgatgtatccccattgctatgacaatgttggttcaatgatttctcaggttcctctgtaccaatctttcaaccatggttagtagattctgcttactggaaagttgggaaccgttctctgttgaacttgttatattgtgccgtcctatgttaagtggagttactttagattcgagccatttcgattacagaaaattccaaaaaattcatgtaatgtcgaacgtattagtttgtataatggggagtcctaattcgttgaaactaatatcgtgaactagtctggaactgtaattcgtgtctaatatctagttctcgtctgcaattgctctcggtttagggttcactagaatagtgatgcgcgtctgcacctgttcttaaccatgtggcatggtagtactagtacaaaaagctgccacttgtcagaatgccagcggtgagtactttcc

SEQ ID NO: 149895 - DNA, 1287 bp, Zea Mays
cagtccaacactccaaccaccaaccatctccaccgtgctcaggcgtcgtctacaacgccgcccgcactacccccagcgcatagcacactactcgcagaaacaccgatggcccctgccattgcccagcagcagccgcaggtgcagccgatcggtgtcggtggtcgaaaggtggtggacgaggtttccggctggctgcgcgtgctggacgacggcagcgtggaccgcacgtggaccggcccgctcgaggccctcccgctgatggagccggtggcgccgtacgcgcagccacgagacgggcacacgctgcacgacctgcccggcgagcccaacctgcgcgtgtacctccccgaaatggaggcgggggacggcgcgcgcctgcccgtcgtcctgcacctccacggcggcggcttctgcatctcgcacccgtcctggctcatgtaccaccacttctacgcgcgcctcgcgcgcgccgtccccgccgcggtggtcgccgtcgagctgccgctcgcgcccgagcgccgcctgcccgcgcacgtccacgccggcgtcgccgcgctccgcaggctccgctccatcgcgctgtccgcgtccgagtccgagtccgaggacggcgccctcgacgacggcccggccgccgcgctcctccgtcaggcagccgacgtgtcccgcgtgttcctcgtcggggacagctcgggcggcaacctcgtccatctcgtcgccgcccacgtggcccgggaagcagcggacgacgcgggcagctgggccccgctccgcgtcgccggcggtgtcccgatccacccggggttcgtgcgcgccgcgaggagccggtcggagctcgagacgaaggcggactcggtgttcttcacgctcgacatgctggacaagttcctcgccctggcgctgccggagggcgcgaccaaggaccacccgttcacttgccccatgggtccgcaggcgccgccgctcgagtccgtgccgctgccgccgatgctcgtgtccgtggccgagaacgatctcatccgcgacactaacctcgagtactgcgacgcgctgcgcgccgccggcaaggaagtggaggtactcatcaaccgcggcatgagccactccttctacctgaacaagtacgccgtcgacatggaccccgccactggggaacgaacccgagagctcatcgacgccatcaagagcttcatctcacgtcattgaagaagtgcaatgacgtactgtcccgcacgtgcggatgctgatcgtatgtgctacatgcctacatgatgttcgttttcagca

SEQ ID NO: 149896 - DNA, 124 bp, Zea Mays
ccgaaaaaatcctgtccaaagcgtgacaagggggagcaaaaaagaaaagtcaccggattatagtttcactttgaactaactacgtcaaatattttaaatgctttccatctgtactactggcgtc

SEQ ID NO: 149897 - DNA, 936 bp, Zea Mays
atgccgaattcaacaccaatgcaacagaaagatagttcgatcattccataccccatggtgcaggaaaatatagcaccgacctccacaaaaaccgttgaaacaatcatatcacctcttgcgaaggaactcgacgagggggacgtagacaaaattgttcctcagaatgtcgacgcaaacatcaaaaaggaagcaaaggttgacaccaatgttgaagggccaactacttcaaagaaaattcatcagcgaatcaccactgacaatgtcaagaaaccgtcagaagcagtgacacgctacctgcaaaaattgaagagagtaatgacagatcaatcaaaagcggaatcagcatctcgtggagtatgcacacggtcccaaatagacgatttcgaagtatgggaagaagatggaaggattcatactcgagaatcattacgtcttaaaatcaatatcccgatatacaagaaggaggatgttcctcctaaatttgagaatgggaggccgttcttgacgacggtgcatctttctaagttgtcgactccggagattagaatgcatgagtggatgcaatacatggatgataaaaagaaacaacttaagacagggtttcttgacccgttgatgatatcccaagctcgctacaaagaagttgttcggagacatggagaagaatacaaagacttggatgatgatgaatttgagaaagccgtcaaacagaatcagagaaagaaaatgaagttgctagttggctgcttgtcctctttgtcattttccaaatcactaatgccccatctgcagcccagtactgcaagcagcaaagcaggggaggcttgcagctacaagaccaacattttgaagacaaccaatttgtacgtaaggtcctgcattttccttgaggacaaccaatttctccttaatagaaatccatttcttcaatcataa

SEQ ID NO: 149898 - DNA, 1571 bp, Zea Mays
gttatttgttggttttaaacgttagtaattgctacgaagtagcgtaatttatatggagcgcatccagtttgtattgatgcctgactttagcaatcactccatattttgatctatcttttttataagtttgacttcatgagacttattttataaacttgatctcacaaactttctcttatttagtctctgtatgatggaattatggtattttataatctttgttcattcagtcaatcgttgtgaactctcttctaatcgctcacttcattggtcgtgttgtaccaagacatattagcatggagtaaacaataacatcagttagccaaatcaaaaaatatattatacagagagcggagacaatcaataaaaaatcttgaaatttttttgatagatagtttacgtgggtattattataagccgtcgcaatgcacgggcaaccgactagtgtgttatatatatatgtcggcaccaatggcaactgcgccaactaaaagttcatttcctaaaatcaaacaaaaaagatatatttatgaaaaaaacctaaaaatggctaaaatagaaaaagacggccccacccgcccatggcaccgcccgaacccgaggcaaagcgagcaggagcgcagagcagccaagcgccacacgccgacgcgaaccaaccaggcaaccagatggtagtaggttagctaagctcgggatcggaggagaggtgccccgcgaccctgacgatgacgatgcctcgccgcgcccttctcttcgccgcggtgctcctcgcggcctccgccgccgcggtctccgggttccacctcgccggggacgagagcggcctcgtgaggggcgtgctcacagcggtccgcgagcgggccgaggccgaggccgaggacgccgcgcgcttcgccgtcgcctaccacaacaggaaccagggtgctgctttggagttcactagggtgctcaaatcgaagcggcaggttgtgaccgggaccctgcatgacctgatactggaggcagctgatgctggaaaaaagagtctgtacagagcaaaagtctgggtgaagccgtgggaggatttcaagtccgttgtcgagtttcgccttgctggagactctgaatctgaacccgagccttctgttgcttctgatgaaggctctgggcaaggagttgccaagctctctcttgaagcagacatcatacacgaagaggctcacctgcacaccattgagaatgatggactttccagcgatttcgcatcatccgcttagacatacttggtgtgactaggattccaggcaaggatggaaagcgtgaaagtttaaaatgaaggtttaggtatttagaattctaatagtaggttgctgtcaagctgaaatgctttgcctctatcggaatatgtatgttttgtttggaacgtaggagcatagaactgtatatttcggtatttcacaccgttcatttccatgtctgtatataagactatctccagccatattctcccatatatatttcactacctatactttttattatattttacatttttactacattcattaaaagattcttcttctacctacaga

SEQ ID NO: 149899 - DNA, 1252 bp, Zea Mays
ggagacaatcaataaaaaatcttgaaatttttttgatagatagtttacgtgggtattattataagccgtcgcaatgcacgggcaaccgactagtgtgttatatatatatgtcggcaccaatggcaactgcgccaactaaaagttcatttcctaaaatcaaacaaaaaagatatatttatgaaaaaaacctaaaaatggctaaaatagaaaaagacggccccacccgcccatggcaccgcccgaacccgaggcaaagcgagcaggagcgcagagcagccaagcgccacacgccgacgcgaaccaaccaggcaaccagatggtagtaggttagctaagctcgggatcggaggagaggtgccccgcgaccctgacgatgacgatgcctcgccgcgcccttctcttcgccgcggtgctcctcgcggcctccgccgccgcggtctccgggttccacctcgccggggacgagagcggcctcgtgaggggcgtgctcacagcggtccgcgagcgggccgaggccgaggccgaggacgccgcgcgcttcgccgtcgcctaccacaacaggaaccagggtgctgctttggagttcactagggtgctcaaatcgaagcggcaggttgtgaccgggaccctgcatgacctgatactggaggcagctgatgctggaaaaaagagtctgtacagagcaaaagtctgggtgaagccgtgggaggatttcaagtccgttgtcgagtttcgccttgctggagactctgaatctgaacccgagccttctgttgcttctgatgaaggctctgggcaaggagttgccaagctctctcttgaagcagacatcatacacgaagaggctcacctgcacaccattgagaatgatggactttccagcgatttcgcatcatccgcttaggtatgatgtcatcttcttttgcaagatgtcaattctgctctcttgctgtttggttaattgacctatatgaccacaccagccgagccaagcggaggacaggctgccaatgatgctaatggctgtaaccataatatttttttgaataagttgttactgtagggggtgtctacagtatttattttttctttcatattataagggagaaggataggggtatgtacacgagtttacatatacaggccattacaatgcatgcacccatgtccttacggagtgctgtaaccataatattgctttgatcttgcatagatatcttgtatagtagttcttcagtacatgatgcaaact

SEQ ID NO: 149900 - DNA, 1121 bp, Zea Mays
ggaacgtgctgcccatgccgtcgtcctgatgctgttgctcggatttgaccgcagacgcctccaagtccaagaatgatctgttaccttctatagaattggttacaaaaatgatagaggatgttgagcttctagaagaaaaggctaaagtggccaaacatgaattgtccgttgctgggacaggcattctggcaaaagttgaggagctcagagaaatgataacttatgcgaaggaagcaaatgatatgcatgctggtaaggttttaggcgagaaagctattttaaccacagaggcacgtgagcttctatcacgacatcagaggctttcggatgagaggaataaatatctggtgataattgaagagatacaccaaattcttgctgaaagattggttgctgcacaacaagaaattgcagcagctgagaaagaaaatgctgaaaaggaggctgctgctcaggcagtactcgatgaacaggaaaaaatgatgaattctatcgtagaagaatcaagaaagctgcagaaagaagctgaggagaacctgaagctgaaggaattcttggttgagcgcggtcaaattgttgatatgctgcaaggtgagatggctgtgacatgtgaggacgtttcgttgctcaagcgagtggtagatgagcgcctaccgttgagcaagttgcagcgctcagctatgtcgagcctctcttcttcactgcattcttctcatcacaagagctggacttcctcggataaagccattagatctccagataagcacacccttgctgaacctgcaagcccagtggggaaagatctggatggcaacgagtgcaccgtggaagtgtcagatggcaacgacagtggtgaaggcattttgaagcgcgtggattccaaggaggatgtcgatggatgggagctttgctgaagatgttcaggaatagcggcgttgccagaggatgctgaagcataaactaacaataattgtgtataaacgcatactagcacggtgctaatctaatcgttttcacatgaatcgggaagtctcgctggctcaccacagttgtacgtgagatgagtccaactggcaactgcagcttgatgtggtatatataaaagtgaaggtttcagctcc

SEQ ID NO: 149901 - DNA, 2195 bp, Zea Mays
ttttatccacctcgctttccttcacttggtttctaatacgcaattcgcggggaacccaaaaccctaatcctctctctccacgccgccagagagccgtgtgggagctcggtcctcggacttctgcatcgatctctgctatgagtgctatctaggtttctcagatgggtgacctcaaggaggttttccgctccctccaagaactcttccctgaggttgatcatcgtatactaaaggctatcgcaattgagcatcgtaaagatgttgattccgcggttgttactgttcttgatgaagtcatgccgttcatgacgggttcagctggagtggatggttctgttgggaatttgtcatctatggatggttctgttgggaatttgtttggtaatcacagcacacatgaagtgggaagttcatcatctgtttggcgtgatatatgtatcaatgagattgatgcaagtgtttactctgtgcaatacacttcttatggggatgtcaaaactggcaagcaagaaaacataaacaacacatatgtgggaagacttgcatcaatcgaaggggtcaatgagcaactaaatctacattcttatcctatcccaaatggtggtcaacatgatttgcttcccaaccttgatgtgctatcttcaaataccgatccagagaaaacgttggccaacacagataatgaagttggatacagtggattatttagtgaatgtttttcccaaccaccgacaggggaagatggtggtaatatcatagccccacaaccctgtgatcaagatcctaatggcatgattccagttggggattactttccacagaacagttcaatggagttcttcagtggctatgaggactacaattttgatgacggccttttgcctattggttctaatgatcaaatatcttttcgaattttgggtactgaaaaagatccttttgcgcctgtgctagatgttcctggtcgagataaagaagaatcatccactgagacttctggatttatagaatcctccaataatgttgcagatatgcttcctgatcttaatctgaaccattttacttctacggcttcaactcactcaaaccattctgttagtattgagtctcttgaggattctgttgctgatgccagaagcaataagaatgatctgttaccttctatagaattggttacaaaaatgatagaggatgttgagcttctagaagaaaaggctaaagtggccaaacatgaattgtccgttgctgggacaggcattctggcaaaagttgaggagctcagagaaatgataacttatgcgaaggaagcaaatgatatgcatgctggtaaggttttaggcgagaaagctattttaaccacagaggcacgtgagcttctatcacgacatcagaggctttcggatgagaggaataaatatctggtgataattgaagagatacaccaaattcttgctgaaagattggttgctgcacaacaagaaattgcagcagctgagaaagaaaatgctgaaaaggaggctgctgctcaggcagtactcgatgaacaggaaaaaatgatgaattctatcgtagaagaatcaagaaagctgcagaaagaagctgaggagaacctgaagctgaaggaattcttggttgagcgcggtcaaattgttgatatgctgcaaggtgagatggctgtgacatgtgaggacgtttcgttgctcaagcgagtggtagatgagcgcctaccgttgagcaagttgcagcgctcagctatgtcgagcctctcttcttcactgcattcttctcatcacaagagctggacttcctcggataaagccattagatctccagataagcacacccttgctgaacctgcaagcccagtggggaaagatctggatggcaacgagtgcaccgtggaagtgtcagatggcaacgacagtggtgaaggcattttgaagcgcgtggattccaaggaggatgtcgatggatgggagctttgctgaagatgttcaggaatagcggcgttgccagaggatgctgaagcataaactaacaataattgtgtataaacgcatactagcacggtgctaatctaatcgttttcacatgaatcgggaagtctcgctggctcaccacagttgtacgtgagatgagtccaactggcaactgcagcttgatgtggtatatataaaagtgaaggtttcagctcc

SEQ ID NO: 149902 - DNA, 88 bp, Zea Mays
gtcgccagaacagatggataacatgtctctactatacttaaagcaccagtttcaacggtcgcccgcgtcatatttttacaaaaaaaaa

SEQ ID NO: 149903 - DNA, 516 bp, Zea Mays
atggcccatggctccttgtgctccctgctcccttgcgcgtgggctctgttctgggcgcaggcagcgcgtcctgggcgcgacggctcggcggcccggtgcccggcgcggtggcgcggcgacctggtgccctggcgtggcctaccagcgctgccagttcgacctcgtcgtatgcggccatggcgtggtgtgcgcccggcccgacttttggagcagcccgtggtcggctgctgcgcgcgttccctcggtcgctgcgcgcgttccctcggctgctgcgtgcatccccggtcgctgtgcgcgctgcgcgcgttccctctgctactgcacgcgtcaggtgcggcccggccgcggccatcgcggctcgcggtctgcgcgacggtgcttagcatggcaacacgcaactgccccggcgcggcctacgtacgccatgcgcagccactcagcgcagtagctcggcggtctggcgcgcagcctcggtgcgcccggcttggcagctcacggccaccgtggcctgtgtag

SEQ ID NO: 149904 - DNA, 1063 bp, Zea Mays
taatttagggccctaacaaattgtgaagaagcatttggatcacgatccattactacccttggatggcaatagagcttatttgatgcatgacatgccatgttgattgctttagcccaaatgtattactcgcattatactatcttagcattgagcttgagtatcctattcttcatcttaataaggcgcttttttgtggagtgtacttgacagaaaactcgtgcttgatgcctagatcatcacacaactcataaactcatatgattagtaaggattggaatcctccaattcacgattaaggtgtttactacgtaatttgaccccggcgtgtcggagcccgtattgcatgacccaaccgatgcattcaggacctagacctatatgtaaatgcattgccgtcgacgtgagaggaagcttgagcgcgcccagaccgaaggtccgtgcgctgcccggctgcatgctcatccgcagttccgcacgggccggctaccggcgctgcgacaatcaaggggatgtcgccgcgtggcagcgtcggcggcgggtgcttgtcgccgtcactagtgttgcaaaacatgttattacattatgggctgagcccgcccttgtccgccggcctgcgccgagccgctggagccgcgcccgtgcgcgctggtgagccactcccgcgccgacagggccaggggccgccgcgcctgtgcccaaggccgccatggccaccgctcctggtcgggccgcccaccggcgagtcggggctggggcccgcacgcgcctggccgaggccggggaaggaggccacacccgccgctcctggccgggccacccgctggcgagccggggctgggggctgcgccagccgcaagagaccgcgccatggccgggtctggcccatcgccggggccgaagcgctcggctgctcaggcacgagcaccgcgcgaggccgcgctgtggcctgcctgtgcgcccgcgtggcagcggctggcgcacccgcgaggcggcggcggtggcggcgccctgctgctggtggaagagagagagggccgcgacaagaagagttaggaaaccctaa

SEQ ID NO: 149905 - DNA, 2215 bp, Zea Mays
gataacctaacaccattcattcatctgatctgaaagcatgtggtagaagctacgggagtactgctcgctatacacacaatgcacataaaccaactaaaaaaacttacacctgtaaatcacggctatcaaggcacttacatgtctgtaactatcctccttccccaaaccggaaaagaatagtaagaaacactagtaacaactggacaaaaaacaatcaaagaatcagagaccgccgtttcgcaatctccatccgtcgttcttctgcggtgatccggtatttggcattggcgtctcagcccctccactccgggcactggtcggccggccgcgtgttctgcgacctggccttgatcgggcacggcgcgtacaccggcggcaccatgcagttgtacatcaggcagagcgacaccgtggaagggagcgacgacgacggcgatatctcgatgcccgtcaggaagttgtgctgcaggtacagcacctgcaggccgccggagcccaccagctcctgcaccagccgcgcggggacctcgccgctgaaccggttgttgttcaggtacagctgcccgacgcccgcgaggagcggcgacagctggccccagaaccggttgtagctcaggtccaccactgggatcgtcacgtcgcccgacggctgcaccggccccgcgaagaagttcctctgcagctgcagcacggacagcggcagcgcgaacaccgacgccgggatcgggccctccagctggttcacgctcaggtccaggaagttcagccgggccagccggggcagcacctggtccaccgtgccgctgagcttgttcgcggacagcgacaggtactgcagcccggccggcagggcgggcacgccgccggagagcgcattgtgcttgaggtccagccggagcagcggggacgagtccgggaacgacgggacgccgccggtgagctggttgtggcagaggatgaggttggtgatcgacggcagcgcggcgacggacggcgggatggcgccggagatctggttgaagctcacgtccagcgtccggaggttggacagcgcgctgagcccgtccggtatctggccggagaggaggttcttgctgaccgccaggaagcgcaggttcgagcacgacgcgagcgacgccgggagctccccctcgacgcgcccgggcacgagcgagagctcggtgagcgcggacagccgccccagcgctgcgtccagcctccccgtcagccccggagaccccgcccgcgggtcgccgagcgcgagccccgccacccggtccccgtcgcagaacacgccggggaacccgcacgggtcggccgtgaagtcccacccgtcgaagaacgccgagccgggcatgtcgtccagggaccgccgcaccgcctgcagcgctaggaagtccaccgggtcgaggatccccgccgccggccgcggcgccaccgccacggccgccaagacgacgcacgccacgaccgcgccgagccgcgcggtcaccgccattgccgctcctctctgctttcggtttcgcgcgcgcgcgacggctctggcctctgtgtcacctcctctgcagctgcaacaagaaggaacagatcaaaagcaccgatcaaccgcgtcgtggcgcaaagagcagcgcgagcgagcggcggcgtgggaacctttaagcttgtcgcgcgctgtctttaaaggcgcacggcgagggaggtgctgggcgttggcgagctgcctttgtacgtggctgtccccgtgaggggaggaagtgaggaggagagagatggccttgacgacggacgtacgcccctgctcactcgctcccgcctcgctttctcgtggaggcggaggggcggcgcgtgagcgcctttaatggaggtggtgtggtgggtggtgcttcctccctcgctctcccctagctcactgtggaagcacagcgcagcaacgcacacgtaccgccgcgctgctctccgcactccagtacccccgcaaccgcaacacttcgccgagaagccaagagagaaacagttaagaatgcgcagctgggctcccgcgggcgggcggcgcggtggcgccaatgatggtggcttggtgacgacggatcggacggaggtggagaagacgtggtggtggtggtcgcaatcaattccgcttcgccttgtgagctttgctcgctctcgctctctggtctctggtctctggtccgccgcgagctactccctcgcattg

SEQ ID NO: 149906 - DNA, 1034 bp, Zea Mays
cttgatagtacttgtatacttcatatttatctattttggtatatagaatgatgttatcatttgattttggtctttccagtctgatgtcaatacagtagcatttgctgatgaaaccggccatctcatatattctggaagtgacgacactttatgcaaggtctgggacaggcggtgtttgtccgcaggacaggctgccggagttttgactggacatttgcatgggataacacatattgatagtcgtggagatggccgaagtttcatatccaatggaaaagatcaagcaatcaaactgtgggatatcaggaaaatgatgtccaatgctgatagttgtgcagatggagccccagcctgggactacagatattcaaggtatccgcatcaacataaacagttaaagcatccgcatgatcagtcaatagcgacgtaccgtggacatacagtcctccggacattgatccgttgctacttttctccttcgtatagcactgggcaaaagtacatatatacagggtcgtatgattccaatgtttgcatctatgatgtggtaagtggatcccaggttgcgaagctgaaatggcatcaaatggcgattcgggactgcagttggcacccatttgagcccacgcttgtgagctcatcctgggacggccgggtagtgaaatggaccagcgcacgtgatgaaggggcttctgatgtcgattgagttgagtcgaccgtgcaggtgcagcgcgagtgatctttactgttcgtggttgtgggctaaaaaaaaacatacccaatcttgcactaaaaaaaaggagagtaagcacagctcgtaataaagaaagaagatcatgtgttgcagtggtaatttgtaaatgtaaatactgaactgaaaccatgtgggcaggaccgagtgcataagcacctttgtgaatatggttgttccataaagccttttccatgtcctttggagggagcgtgtttttgttggcatttggttttcgacgttccgttttttttgggtatgggtatgggcaatgcgctttttt

SEQ ID NO: 149907 - DNA, 1015 bp, Zea Mays
ctctacaagcccttttttttttgttatccggtccgcccaggctcttcccattctccggcgcttccctctgtcccttggctcgctctggcgtggttctcccgtcccctggtgcgtgcgcgcttctcgctctctcgtggcggcgactgggcgactatcgcctccgccctacaacagttgctcaggtcttctttgggcccttcgccggggacaagcacccaccggagaaaatcaataaatacatcggcctgaaagaatgggttatggcatgagtaggctagacgatgaatactatgaggctgaagggcagaatactggtggatctggctcagttcaagtgaacgatgagtttgcaacactacataatgatatttttcatatgacccgaatgagatcaggacttactgaaagctacaagtccatgggtaccaacagaggcataatatcaactgccaagttattatctcgaagggaaattgattgttctggaaaggggatgttctcttctggtgaccgtgcatttgttctaggtcgtcatgttccgatgaacaatcctgaattattggataggatggattctcgtgcttacgtttcacagttttctgctgatggtactctttttgttgctggttttcagggaagtcacataagaatatacgatgttgatagaggctggagcatacacaaagacattcatgctaggtgtttaagatggacaatcagtgatgtatccttatcacctgatcagcggtatcttgcctactctagtctggcacctattatccatattgtcaatgttgggaatgcggcaagagaatcctatgctaacgtcactgacatccatgatggattggatttttcacagcatgaagatgttcaatattcatttggaatattttctgtaaaattttcctctgatggacgggaacttgttgctggcagcaatgatgactcaatatatgtctatgatcttcatgcaaacaaattgacattacgtttatctgctcatacagtatga

SEQ ID NO: 149908 - DNA, 180 bp, Zea Mays
acactgatatctgatagcacagtggttgagcacgccagtgcggagctccccatcagggttcaatccatggtgctgcatggttatgtgcccacctccgtggttgaaacagggcagatggttccgcggctgccaaagaagcgtgaacgtgtaagggtcctgcctgtttgccaggaaaggtag

SEQ ID NO: 149909 - DNA, 619 bp, Zea Mays
accggtatgatcgattcgacggaattgcattctcgtggtggctcttcgtcgcaggcgggttgtggtagtagcagccatagtcggcgctctgtatctagcatggaggacgctatgagggagcagcaagaaaggtttcgtgaagagccgcgacaataacaaatgacattcctccaacaacaatcagagtacatggctgcttacaacgcacaggcgcaacaagcaatgaacgcacaacaacaaccatttgttttccctcaatttcagtcgtcgatgcctatgtggggattacatgctccgccacctccacctcagggatgcggggtcatgggccacaacacgccaccaccggtgataccagcaccaggaggagcttatataggggagggagctactacaggagagaatccaaacccgttacacgacttcgtcaacgagttttcgcttctggaggtggtggtcacaattccaacgaccccgatatgtgatggtttgagtttttcgcttctggagggagttattatgttgtaatggactatttgtgaactgtgatgttgtatttgtgaactttgatgtggtgaaccatttgtgaacttaatgttggtaaactacaatgtggttg

SEQ ID NO: 149910 - DNA, 2595 bp, Zea Mays
taataacaataacacgattcatagagtgtgcgaaactaccagtaatagtacatcgaacacagcaacaaaaaaaggccagtgccagtccacccaccactgtactgtacaacacactgtagaatgttagacgatgaattccccctccggagcccggcccagaggggggcgcgcgattgaaggcgaaataaataaataggcttctctccatcaaccagggggggggggggggggggggcgccgcaggccgccgcagaccatcgagctttgtgatcagcggaacgtgagacttgacccgaccacgacgaatgaaacaaaaggtcaccgtgattcctttcctagctactagagttttgtcatcacaacatggggggaggcagctgcctgcctgtcctttttgagcgcaccacttgccttgccatggacagcagcacaaggaagagagcaagcagatcggtacaacgactgtaaagtcaggcttaccatcttcttgtcttgctataaaaacgagtgaagttttccgtggagacgacgacgacgaccatcaccaccaccaccaacgatcagcggctagctgtgtatgtactagaggttagccctgaggaagtcggctatctcctccatgacctcgtggtagtggttcgtgttgggcagcaggtagaagcccacggtggccttctcgcggtacacgagcttcacatggtgtccgtcctcccggaggccgtcggcgtaggccagctgccggtcgcaggtgaggtccaggcccgacacgatgatcaggctcctggggaagggcagccccgcgaggcgccgtccgttgggcccgaacgggttgcacgccgggtggtcccggtcggcgtcctcgggcaggtacgccttccagtaccagtccctgtcctggagcgtcacgaagtacttgccgtccagccgccgctccgactccgtgcgctcggcgccgccgaacatggcgttcagcagcacgttgccgcgcacgcggatcccggccacggccgcgcggacggccacgtggtgggcgatgttgccgccggagctgtcccccgacaggaacacgcgggcgcccccgctcgagccgctgccgagggaaggctgcgacgtcgcccacttgagcgccgcccacccgtcgtcgtacgcgcacgggtaccggtgctccggggcgcgccggtagttcaccgacaccaccacgcccttgctcagcctcaccagccgccggcacaggttgtcgtagatggccgtgccggacgacgagtgcgcgaagctgccgccgtggaagaagaggatgaccgggaacggcgtcgacgccgccggcgtgccgccgaggaagtccaggatgggcagggtggcgccgccgccgccgttgttgttggcggcggcgcggtagatgcggacctccaggccggtcgacgtgtcgatcacgtggtcgaaggaggagaccccctcctgggcccgcgcgtcgggcgccacccgccggtccaggaactcggccaggtcgcggtcgaaggtgccgtccgcccgccggagcatgttgtacgccagcttgaagttggagatgaggacccatgtgtggatcggcaccgccccctgcacaaccacaccacacaacaacaacaaggaacaaacatcagcagcaacagacagttcctcagcaacactcaaacctcctcctcatcacacacacacacacacgccaccctactcttttgcagtttcgtgagaacggcaatgcgagcggccaccggaccttcggccgccgcctgccactgccagcagaaaagatggaagctttggcaatgatttggtcgcttccgtcttgttgggtagccatttccgtgacacccctcgccactccctcccaaactccaaaaaaaaaacaacgggggcaagcgagaagaggataaatttgggattgagcccaaaggggaaaggagcgagcgattgacccgcgaaatcaccggccggcgctggccccgacccaccaccgccccaccgaaccatgcataaagcggcggcacaaatcgggaggcgcgccgccctggcgcatcccaacagaagaaacgcgcaaggacggcggcgcgcatgcccgcgcgaagaaactagtacgtacaggccccaggggacaggaggaagcagcagcggtagccgcttgcgcgcgcgcaccttgcactcgttgcggttgacctcgtcgctgccggccatggcggtgggcgccgctcggctccggaccggaccggaccgcaccgccggcttcactgctgcaagtgcaagatctctgccccccgggcaacaaaagcctggcttggctcaccacatgggcgccggaggcccgaccacggccacgggcaagtgatcccgctgaacccgagaccggcccgagcgcgacgcgccctcccgcgtccccgatctcctatctggggcaataagccccgcctctccaccaacctctgggctcgacgagccaagcaagcagaggccggggaacgagcagcgcgcgggcgcggtagtacgaggagctggagcagcagaagcgctgtaggctgtggtgtgtgtgtctgtgtgtgcaggcccggcacagcgggggag

SEQ ID NO: 149911 - DNA, 1276 bp, Zea Mays
atggtgtccgtcctcccggaggccgtcggcgtaggccagctgccggtcgcaggtgaggtccaggcccgacacgatgatcaggctcctggggaagggcagccccgcgaggcgccgtccgttgggcccgaacgggttgcacgccgggtggtcccggtcggcgtcctcgggcaggtacgccttccagtaccagtccctgtcctggagcgtcacgaagtacttgccgtccagccgccgctccgactccgtgcgctcggcgccgccgaacatggcgttcagcagcacgttgccgcgcacgcggatcccggccacggccgcgcggacggccacgtggtgggcgatgttgccgccggagctgtcccccgacaggaacacgcgggcgcccccgctcgagccgctgccgagggaaggctgcgacgtcgcccacttgagcgccgcccacccgtcgtcgtacgcgcacgggtaccggtgctccggggcgcgccggtagttcaccgacaccaccacgcccttgctcagcctcaccagccgccggcacaggttgtcgtagatggccgtgccggacgacgagtgcgcgaagctgccgccgtggaagaagaggatgaccgggaacggcgtcgacgccgccggcgtgccgccgaggaagtccaggatgggcagggtggcgccgccgccgccgttgttgttggcggcggcgcggtagatgcggacctccaggccggtcgacgtgtcgatcacgtggtcgaaggaggagaccccctcctgggcccgcgcgtcgggcgccacccgccggtccaggaactcggccaggtcgcggtcgaaggtgccgtccgcccgccggagcatgttgtacgccagcttgaagttggagatgaggacccatgtgtggatcggcaccgcccccttgcactcgttgcggttgacctcgtcgctgccggccatggcggtgggcgccgctcggctccggaccggaccggaccgcaccgccggcttcactgctgcaagtgcaagatctctgccccccgggcaacaaaagcctggcttggctcaccacatgggcgccggaggcccgaccacggccacgggcaagtgatcccgctgaacccgagaccggcccgagcgcgacgcgccctcccgcgtccccgatctcctatctggggcaataagccccgcctctccaccaacctctgggctcgacgagccaagcaagcagaggccggggaacgagcagcgcgcgggcgcggtagtacgaggagctggagcagcagaagcgctgtag

SEQ ID NO: 149912 - DNA, 1452 bp, Zea Mays
aaacccgtggcgcggggcagccgagcagggcgcgcctccgccaccacaaagagacttcgcgccacactagcctaatccccgcgctggcccctggcgggcagataacggtcgcggcacggaaagggcgagagagaagggcgccagagcactagtacaggaggcgcggagcaggaggaaacacatggcagatgaaggcgaggagggggtgccgccggccgcgatggtgggggaggcgccaaccgaggactttgggctgcccgctgagctgatggccgtgctaccatcggacccgttcgctcagctggacgtggcgcgcaagatcacctccatcgcgctctcgcaccgcctcggccgcctcgaggccgaggcggcgcgcctgcgctcgcagctcgccgagcgcgacgccgaggccgaggagctccgcgagcgcgtcgagaagctcgactccgcgctcgccgtcgccaccggccgcctccgccgcgctgaggaggaaaaggagacactgctgcgggacaactctgcgctgtccaacaccgttaggaagctgaacagagatgtcgccaagttggaagttttcaaaaagacacttgtgcagtcgctccaggaagatgacagcagtgataatactgctcccagggcaagcgttgcagcaacttcaaacttctctgcgccatcagatgaagattctgcatttccaacttccaaatcatcacagatttcagaaactgcgagttcagtttcagaggaaaatagccaagttgaaccagatgcacctaggccaccccgtccacatgtatttttgccgtcatacaacagcacaccaaggagaactcccccagactcacctccaaggcgttatgcatcggtatcaccgccgaggcgacattcaatctccgttacgtcgatgaatatgtttaatgacaggtcctcaggcttttctagtcagcatagctctccatttgaccctccaagtcaaacaggacgaacaagagttgatggaaaggagttctttcgtcatgtcagaaatcggttgtcgtatgagcagtttggtgcattcctggctaatgtgaaggagctgaacgcacacaggcagaccagagaggataccttaagaaaggctgatgagatctttggtcctgaaaacaaggacctgtacaccgtttttgagagcctaataactcgcaacattcgctaatctcctcaagggttgaagcattaccaatgattactagtgattcatgttttaccggtatattttggttacaatgttcaacactttttttgtatttgaagtctgtagtctgttgtggattcttggtatatagtctatagttctttctttttttttcatgctaatgtccatgtagagtcctctgtttctatgtaagctacaacttatattctaatacaaatgttgtctgatatttcttgaacataaataatagactagaa

SEQ ID NO: 149913 - DNA, 5237 bp, Zea Mays
atggtgctgctcgaggagcccgccgcgcaggccaagcgcctcctcgagcagcggcgtgccgacaaggcggagcgggccgccaagtccatctcccgcatcagcctcaacaagcttgccaccaaggcaaggaagggacgcggatgcatttgcggcagcgacgaggggggtgcatcgtgtggggtgggcgagcatcgtgcggggagggtgatggggccaagaacggacattattgcagttagactggagtggacaactgttgacatgatccttgatagcagggttcttagtgcctacctaactggggcaggaatgaacactgaatctgggattcttgattacatgagctattggctcaagctatcgatagattggaagttggacaaccaggttttagaagttggacaaccaggttcagacataagttttggaatgcagcaacaatctgatggtgatgttcccattgacgagaagttctgggagaaagattttgaaattcctagctgccatcaatgtggactgctaaagcctgatgagttgtgggactggtccggcatgacgctggttctcgatgtactgcttcgccgccaccaccttctgcttggtggcgctagacagcgcctcctcccccgccgcggcggccatcctcgcggagccaccggcgccgccgtctacgtggacgccaccgaggacgagctcttccgcctcaccaccaaggaggggaagttcaccgtggagcgcgagaaggtgaagatcgagatgcagcacttctcccccgtggtgcagttcgagcaggaccccgtgcagatcctagacacgctgctcccgctctacctcaatagccagctcctccgtgccctgcaggagtcgctcgctagcgagctcaccgcccggatgagcgccatgagcagcgccaccgacaatgccatcaagctccacaagaacctctcccgcagatcgatcctgctgctgggcgaaggcgctgattgcgggggcgggggcgtcggggcgagtggaggcgaaggctacggctgggggaagacgctgattgcggatggaggcgctgattgctcgttcccagatccagagcgtggggattgccggatgctggccacgtaccagcctgcatcgcgccatggtgcggaggtggaggggggagcggtgcatcgcgcagaagattttggcgagtggatcgcgctgggtccgacggcgagcagagaagagagcggggcgcagagatggcggccagagagcgcgcagatggtgggcgagagagacagcaaagaggagagttccttggaaccacgtggaccttccaaattctccttccatgatggcgggcgagagagcggagagcgggggcgccggcagaaccgggaaggggacaacgagcggcgaggtgggcaagcgaaggaaggagggatatggtggcaatctgagtctgcggatcgcggcggcggaggggatcggcgggagctgggaggcggcactcggatggtattgggtttcgccggcgccggaggcggcgatcgtggatgggcagcggcggggtcgcggggcgtgggttgtaggagcggtggcggtggggaagccagagtcggagcgggtgcttgcgctggtctccgcgctggggaggaggggagggagcggcgggtagggatgaagcgggggaagggggcaaggaatgggttgctgccgagctcgctgcggatcatatcgtcctgcctcaagacggtgacctccaacgctggctccgtcgcgtctaccgtgcgctcggcgggcgcctccgtcgccgcctccatctcctccccttccgaggacgagaaggaccaggttttgtgggctggatttgataaactggagcttcaaccatcatcattcaagcatgtcctgcttgttggttattcaaatgggtttcaagtgctcgatgttgaggatgctgcaaatgtttgcgagttggtctcaaaacgtgatggcccagttacgtttttacaaatgcaacccactccagttagctctgaaggcattgaaggattcagagcatcccatcccatgcttctagttgttgctggtgatgagacaaatggcctgggtgcggttcaaggtggtcgcttaagtgctcttatcagagacacaaacagtgagcctcaagctggaagttgcatttctaccccaacggttgtccgtttctactctttgaagtctcacacctatgtacacgttcttcgattccggtctgctgtatatttagttcgctgcagtccaaggattgttgctgtagcacttgcagcacaaatctactgctttgatgctgttactcttgagaacaagctcagcgtcttgtcatatcctctgcaaggtgcacctggggtaaatattgggtatggcccgatggctgttggccccagatggttagcctatgccacaaatactcctttattgtcaaacacaggccgtctaagtccacagaacctcacaccttcaccaggagtgagcccatctacttctcctagcagtggcagtttagttgctagatatgcaatggagtccagcaagcaattagcttctggtattattgacatgggatataaaacattttcaaagtaccgccaggaacttctaccagatggttctaactcccctttgtcatcaagcccaggcaggagatctggtaaaattccttccagtgtgcatccactggaagctgacaatgcaggaatggtagtcatcaaggatttcacttccaaagctgtggtctcacagtttagggctcacacaagtcctatatctgctctttgttttgatcctagtggaacacttttggtgacaacctctgttcatggccataacataaatgttttcaggatcatgccaacttgcgttgctaatggcacaggcgcaacgcgctatgattggacagcatctcatgttcatctttataaactgtatcgtggcatgacatcagctgtcatacaagacatctcgtttagtcattttagccaatggatatctattgtttcatctcgtggtacctgccatatttttacattgtccccatttggtggtgatgccagcctgcagccacagaattctcacagtgatgggccacctcttgcgccatgtcagtcaaggccatggtggtcaaagccgtcctttctgatggaccaacagcttcatcaagttccctcaactgtgacaaattcggtagtcagtaggataaagaataacaattctggttggctaaatactgtcagcaatgtggctgcttctgcaagtggaaaactatctgtaccatctggcgctgtaactgctgtttttcataattccatctaccagggttctttgccagttccatctaaggctaatgctttagaacatctactggtgtattcgccatctggtcatgttattcaacatgaacttttaccttcttcaggttctgagtcctctggtagcagcccaagagttggttcaggtcataactcgcaactccaagatgatgagatgcatgttactgctgaaccaattcaatggtgggatgtgtgccgtaggacaaactggcccgaaagagatgaaaacattgcaaacattgtactgtataaccaaagaagcagtatgatggctatggatgtttctgactgtgaagatagcgagcattcggattccactgcatcaaatgatggtatctctgggaaagagattatgagagtccgagaaaggtcaagctggtatctatctaatgcagaagtacagataaactcatggcggattcccatctggcagaaatctaagatttgcttctatgtgatggaccatcctgctgcagagtcggtcgaatcagttagcagtggtggagaaattgagatcgagaagttacctcttcatgaggttgagatcaggagaagggaattgctccctgtattcaagcagttcctatattctgagcgacattctagtgataggaacgttgcaaatggaaggagtaatgcaaatggaggttttcagaatgtcttgtccgtcatcaatgatgtacaatatggctctgtaaaggataatggtgaatatgaaaccaaatcggtggctcctttgtctgggttttacactgatacgagggaaacggttaacacaaatggtctagctacgcaaacattctctggacctggctcagctgttaatcttcagcaagtggggaagcgcaattctattgaatctcctaatgctgcaattttggctggcaaggcagagaatgatagcaatggctatatatccacgccacctgaaacaaatgcatctatcagatccttgagcagctattgtctcttggatggatctgttaacggaatgccgtctcctgcaaatagcgcatcatgcaagcctgaaacaaccaataattctgtgctcagcaatgttgcaagcactgacgtaacaaatgggtgtctcaccactgtcgattctggacagcaggaggcgtctgattctcacagctcagtggagtttacccagtatttccaagagggctattgtaaaatatcagaactcgatgactgccgtgagttaactgaagctgttactgatgctgacagcagcagcagccactgcgagagagagaagcctgaggaagatggggataacgatgacttgcttggaggagtttttgccttcagtgaagaaggttgaacttactatagtgccttgagattgagatacaacagaaaaaaagtgctcaaaacatccagtgtgccatagtatgtagacgatggtgaaattctactaggttttcatggaataaagctgtgcggaatcgatcatctgccatggtacatagtacttttcaaggtaaaccttgcacctagttctcaaaatatgaggccaagattcctccaggcaatttactaatctgcggatccacgttgaaacttggaaggagttggtgttgtcgagaagttgctattgcctgccgcaacaccacttccttatagtgttggtttgtacatataccgtgagacccatttgtttcgtgccatacttccgttccggggcatttgggtggttctgaatcctgtaccttggcagccatatttgttgaccgtctctgccagggcctgtgaatgttccatgtttatttgtacatatacattgtgttttgtcggaaaaaaaggaaaaaaaatctagcgacaattgatgtgatataactttataaacattcagtaaagaaaattgcattcacgatgttatgctta

SEQ ID NO: 149914 - DNA, 99 bp, Zea Mays
ggttgttgccagagaatttataagattgagatcgatagtatgtggtatttgtttttatgtaatcattgtgcactaatattttgtatgtcattgcaacgc

SEQ ID NO: 149915 - DNA, 2215 bp, Zea Mays
atgaaatatattttttcggtccataagaacttgtcagtcaaactatttctctggttgatggccctgtgagattattttaattcttttccaagatcttatttattctcgtctttttctagatatatccatgggtcttatatactttgtgatcttcagggtgcacctgagactatccaagagagattagttgatttacctgctgcatatgtggagacatataagaaatacacacggcaaggttctcgggtcttggctcttgcatacaaattgcttcctgagatgcctgttagcgaagctagaagtttggaaagggatcaagtagagagcgacctaacgtttgctggctttgcggtcttcaactgccctataaggggtgactctggtgctgttttacaagaactcggacaatcttcccatgacttggtcatgatcaccggagaccaagcgttgactgcctgtcatgttgctagccaagtacatatatcttccaaacctgttttgatcttgacacggataaagactggcggttttgagtgggtttcgccagatgaaactgatagagctccatatagtgctgtggaggttgcagtgttatcagaatctcatgacctttgtattaatggggactgttttgaaatgctacaaagtactgaggctgttctccaggttatcccttatgtgaaggttttttcacgtgttgctccagaacaaaaagaacttgtactaactacattcaaaagtgttgggagggtgacactgatgtgtggagatggaaccaatgatgttggtgcactgaagcaggcacatgttggcattgctcttttgaatgctgaaccagttcagaaagtcaactcaaaatccaaagctgaaaataaatctgggaaattgaaaaaacagaagcctggtaatgaagcatcatcacgagtgactccggcaaccaatagttctgctaaagcatcgagcagccgccccttgactgctgctgagagacagcaagaaaagttgcagaaattgttggatgaaatgaatgatgaaagtgatggccgctcagcaccaattgttaagcttggtgatgcttctatggcttcacctttcacagcaaagcatgcctctgttgcccctactcttgacatcatccgtcaggggagaagcaccctagtcactacacttcaaatgttcaagattcttgggctcaattgccttgcaacggcttatgttctcagtgtcatgtacctggatggtgtcaaactgggcgatgttcaggctacaattagtggtgtctttactgcagccttcttcctcttcatctcccatgcccggccactccaaacgctgtctgcagagcggccgcaccctaacatattctgtgcatacgttctgctctccattcttggccagttcgccatgcacatactcttccttatcacagctgtcaatgaagcatccaagcatatgccagaggaatgcatcgaacccgactcagacttccatccaaaccttgtgaatacagtctcgtacatggtgaacatgatgatccaggtggcaacctttgctgtaaactacatgggccacccatttaatcagagcatatcggagaacaagcccttcaagtacgcattgtatggagcggttgctttcttcacagtgatcacatcagatatgttcagggatttgaatgactacatgaagcttgagcctttgccggagggaatgcgtggcaagttgatgttgtgggctattctaatgttttgtggttgctacggatgggagtggctcctccgatgggtgttcccagggaagatgccggcgtgggagaagcgtcagaaacaggcagttgcaaacttggagaaaaagcgcgactagaatccttttttattatttgcactttattctttaccttttgctgctgcccattggttacttggcagtacatactgatcatgttttgtcatagttgcattctaatctgtagcctaggggaattttttggagtgtaggccctaaatgataggaggatacacagggtcggcactttgcatactggtcagcaggattattaaaactttcagttacaatatgaaatcttatatttagatggcaatgatatcggatgatgtacaatgcaaaatacagaagctatcttaggctttcattcttttgctgttatgatcttagtggccctttggaggtacattgtaatgtcgatcattgaaaa

SEQ ID NO: 149916 - DNA, 4033 bp, Zea Mays
cggagacggagtagaaccgcgcagcgaagcagcagcggcaccaaaagccctcgcgttggtcgcggctgccgcccgccgcccaccgccggtcgccactgccggtcgagtcccatcgagccgagtcgctccgcagcgctctccgatccgggtggctgcggcgccggcatggcgcggttcgaggtgaacggcaagtcggtgcaaggcgtggacctgctgcggcggcgccactgggcgtcgcgtctcgacttctggcccttcctcgcgctctatgcgctttggctgctgctcgccgtcccggcgctcgacttcaccgatgctctcatagtcctggccgcgctctccgctgctcacatcctcgccttcctcttcacggcctggttcgtcgatttccgggccttcatcgggtactccaaggtcaagaatatctgtgccgctaacgtgtgtaaggtgactccggctaagtttttggggtcaaaggagattgtacccctgcacatacagagaaatgtggcctcaacttcggttgcaggtgagacagcggagatttactttgattttcggaagcagaggttcatctactctgcggagaaagataactttttaaaactccggtacccaacaaaggagttgatcagtcattatgccaagggcactggttatggaactgaggccaagattagcactgctgtggataagtggggtagaaatgtatttgagtatccacagcccacatttcagaaattaatgaaagagcaaataatggaaccattttttgttttccaggttttttgtgttgttctttggtgcctggatgagtattggtactacagtttgtttacacttttcatgcttttcctgtttgagtctactatggcaaagaataggctgaagacattgactgagctaagacgtgtgaaagttgatagccagattgtgttgacctatagatgtggaaaatgggttaaaattcctgggactgaactactaccaggagatattgtgtcaataggccgctcaactagtggtgaagatagatctgtaccagcagatatgctattgttagctgggtctgcaatagtaaatgaagctattcttacaggagaatctactccacagtggaaggtctcaattgctggacgtagtcctgatgatatgctatctataaagcgggataagaaccatatcctatttggtggcactaaagtattgcaacacactgcagataagtctgtaaatcttcgagcacctgatggtggctgtctagcttttgtattgaggactggatttgagactagccaagggaaattgatgaggactatcttattttcaactgagagggttactgcaaataacaaggaaagtggcctgtttatactctttttgctcttctttgcaattattgcgtctggttatgtgcttgtgaagggactagaggacccaacaaggagtagatataaacttttattgagttgttcattgattattacttctgtgatacccccggaattgccaatggaactttccatagcagtcaacacatctttaattgcattggctcggcgtggtattttctgcacagagccattcagaataccgttcgctgggaaggttgacatatgctgctttgataagacagggactctgacatcagatgatatggagttccaaggtattgttactttggaagatgacactgagttaatatctgatgcaaataagctgcccctccgaactcaagaagtactttccagttgtcatgcattggtatttgtcgacaacaagctggttggtgatcccctcgaaaaggctgctataaagggcatagactggatctacacatctgatgagaaggccatgtctaaaaggcctggtggtcaacctgtacagattgtgcacaggtaccattttgcttctcacttgaagagaatgtctgttattgtccgtattcaggaaaggttttacgctttcattaagggtgcacctgagactatccaagagagattagttgatttacctgctgcatatgtggagacatataagaaatacacacggcaaggttctcgggtcttggctcttgcatacaaattgcttcctgagatgcctgttagcgaagctagaagtttggaaagggatcaagtagagagcgacctaacgtttgctggctttgcggtcttcaactgccctataaggggtgactctggtgctgttttacaagaactcggacaatcttcccatgacttggtcatgatcaccggagaccaagcgttgactgcctgtcatgttgctagccaagtacatatatcttccaaacctgttttgatcttgacacggataaagactggcggttttgagtgggtttcgccagatgaaactgatagagctccatatagtgctgtggaggttgcagtgttatcagaatctcatgacctttgtattaatggggactgttttgaaatgctacaaagtactgaggctgttctccaggttatcccttatgtgaaggttttttcacgtgttgctccagaacaaaaagaacttgtactaactacattcaaaagtgttgggagggtgacactgatgtgtggagatggaaccaatgatgttggtgcactgaagcaggcacatgttggcattgctcttttgaatgctgaaccagttcagaaagtcaactcaaaatccaaagctgaaaataaatctgggaaattgaaaaaacagaagcctggtaatgaagcatcatcacgagtgactccggcaaccaatagttctgctaaagcatcgagcagccgccccttgactgctgctgagagacagcaagaaaagttgcagaaattgttggatgaaatgaatgatgaaagtgatggccgctcagcaccaattgttaagcttggtgatgcttctatggcttcacctttcacagcaaagcatgcctctgttgcccctactcttgacatcatccgtcaggggagaagcaccctagtcactacacttcaaatgttcaagattcttgggctcaattgccttgcaacggcttatgttctcagtgtcatgtacctggatggtgtcaaactgggcgatgttcaggctacaattagtggtgtctttactgcagccttcttcctcttcatctcccatgcccggccactccaaacgctgtctgcagagcggccgcaccctaacatattctgtgcatacgttctgctctccattcttggccagttcgccatgcacatactcttccttatcacagctgtcaatgaagcatccaagcatatgccagaggaatgcatcgaacccgactcagacttccatccaaaccttgtgaatacagtctcgtacatggtgaacatgatgatccaggtggcaacctttgctgtaaactacatgggccacccatttaatcagagcatatcggagaacaagcccttcaagtacgcattgtatggagcggttgctttcttcacagtgatcacatcagatatgttcagggatttgaatgactacatgaagcttgagcctttgccggagggaatgcgtggcaagttgatgttgtgggctattctaatgttttgtggttgctacggatgggagtggctcctccgatgggtgttcccagggaagatgccggcgtgggagaagcgtcagaaacaggcagttgcaaacttggagaaaaagcgcgactagaatccttttttattatttgcactttattctttaccttttgctgctgcccattggttacttggcagtacatactgatcatgttttgtcatagttgcattctaatctgtagcctaggggaattttttggagtgtaggccctaaatgataggaggatacacagggtcggcactttgcatactggtcagcaggattattaaaactttcagttacaatatgaaatcttatatttagatggcaatgatatcggatgatgtacaatgcaaaatacagaagctatcttaggctttcattcttttgctgttatgatcttagtggccctttggaggtacattgtaatgtcgatcattgaaaa

SEQ ID NO: 149917 - DNA, 1201 bp, Zea Mays
aattacaagccgggttgttcatccatgcaaatattgttgcggtgtggagccaaaccagccgaaaagaagggcgataaagatgtagcacgcgaagagcatttatgtacctactcgcacctcctcctccgtcagttctgatctgcttctccagtctccacacaacacaacagagcagaaggcagcacgggcgctgatggcgatgggggaggcgctgcgggcggctgccgctgacgcggtggtgacattcctgtgggtgctgtgcgtctccacgctgggggcctcgacgacggcggtgacgtcctacctgaggctgcagggcgtccacttcgcgctcctggtcaccgtctccctcctctccgtcctcctcttcgtcttcaatatcctttgcgacgcactcggcggcgctagcttcaaccccaccggcgtcgccgccttctacgccgccggagtcaccagcccctctctcttctccatcgcgctccgattaccggcacaggctgccggcgctgtgggcggtgctcttgccatctcggagctgatgccggcgcagtacaggcacatgcttggggggccctcgctcaaggtggatccccacacaggcgccggcgccgaattagtgcttacttttgtcatcaccctggccgtgctcttgatcatagtcaaggggccccgcaaccccatcatcaagacatggatgatctccatctgcactctgtgcctcgtcctctctggtgcagcatacaccggcccttccatgaacccagccaatgcatttggctgggcatatgttaacaaccgccataatacgtgggagcagttctatgtgtactggatatgtcccttcattggtgccattcttgctgcgtggatcttcagggctatgttcctaacaccgccacctaagcccaaggccaagaaagcatgatgaacatcatttggtcatggatgctggatttgataagtcaacatgaattgctagaataagaggaacgccaataagttcctggttcccagcatgttgaattaaattgattaatgtgatactctattactcgtaccatttatcataaggttctttatgcgaatatgaaatatctacctgtgtatatacacatgtactttactgttggttgttgcgtcctgacctgtggaccaaaaaggttcaatatgaatggtcaaaaaggatataatgatcccaaca

SEQ ID NO: 149918 - DNA, 291 bp, Zea Mays
caacaacaccctgctgcatcagcgagcagagacagatagaggtgaggaacagagagagaataaaattggccgccacacgagaatctcgtcgccaccgcccatcccagctctcgtcaccaatggggcctgggtgttaacccagggggcttcgccccatcaacggggtgtgtcgtggtcgagacggaggggatcggccatcctggcaagcctaattgctcatcggagtctgaaatccaccacgagtctgcccttgggcgcggcgagatctctacgccctattcttcggtatga

SEQ ID NO: 149919 - DNA, 639 bp, Zea Mays
atgtacgtcgtcgaggccgtcgtgctgggcctcgcgctctcctgcttcttcctctgcgctatgggtggttcttgcatgtttaggctctgcatagcgaacacggaggaggactggaggctgggaacggagcagtacaagttcatcgatcgaagcaaccctgcgcagattatggctggatctttagcatgttcatatgaatgtccttgttcgagcatgcctcagcctgacccagacgaaaattcagaaaatgataccttaaaatggcagcagcaaggggttcaacttgcattctttctctctacgatctaccggatcagcactagaccccagactagaccacgctctgccaagcaatccatggtcgggaaccccggcgacgtccgcgcggtggtcctggacccggccgccggggccctcgcgggcctccgccgcggcggcgtgctggtggactgcacgagctcctccccgtccctcgcgcgcgaggtcgccgcggccgtggcgggctgccacgccgtcgatgcgccggtctccggcggcgtgctggcggactgcacgagctcctccccgtccctcgccattacagagctctctggtgcgtttctgaagcgaggagaaggagagaagagagagatcttgtga

SEQ ID NO: 149920 - DNA, 1551 bp, Zea Mays
atgatgacgcgacgcttggggcatagcatatggtattggagatgggctcccggacccgaaatccccgccgcacttaagtactacaatcccaggggccaggccaccggcatgttcgcttccatctgccggcggcggctcctccgcctctgccaaatccccttcggcaccggcgcaatccctagcgacgccctcccccactgccactccttagcaaccatcgcggacgctcccgtctccgagccctgtgctgcccttgtctcttgcgggctctcccccgccgccgcggtcgcccacaggctcccaatccgctccaccgccaaggccgacgccgtccgcgcgctcctccgcagctacggcttcaccgacgcggaggtcgccgacctagtccgccgattatcgcagatcctcagcgtcgaccccgaccggatccgccccaagcttgacctcttcgcctccctcggcgtcaagccgcggcggctcgccagatatcctgccctcctcacgcgcagcctcgacaagcacctcgtcccctgcatccagttcctccgcaacattctcagcaccgatgaggacgtctgcctcgccatctcgcgcaccccgcgcgccctctcggctggcctggagaagatcatgcggcccgccttggacaccctccgccgtcttgggctccccgacgagtctatctcgaagttagtagtcatcgagatgggcgtgctcatgatgtcgcccgaccgcatatgccagatcttcgaggccctcaaggagctcggcttgggcgtaacggagaagcgctttccttacggcatccgcgccttgtgctgcattagtagggagaagtggctgcatagggtggccctttaccggagcttcggggtgtccgagggtgagctgcagagagcgttcaagaaacagccgaatatagttaacttctctgatgagatcataaagaagaagatccggttcttcctggatgtgctgaaggttgaactaagcgaagtaatggagcaacctgcgattatagggtatagcttggagaggaacatcataccaaggtgtgccgtgctaagcttgttgatgagggagggaaagattgggcccaacgtcaagttgatttcggcattgcttggtagtgccaacatgttctccacaaggtatgtattgaggtatgccaatgagttgccagatgttgttaaggcatacgagggtaagatcacatttgatggcttcagggaacaggatcttttagttccactgaagctgtgagacaagtttagcaagattatgtcacaagtttaggcgccatgctttccaatgccattgagatcatagcatgctatgattctaacactgtattattgttatgttaattctggacatttttcacataaccatctttgtagcatttccctttttttatcctcgctaacaaatgtaaaaatacggatcttgtgatgctgtcttagttatttgatctggtgagctgaactggttcattgaatctgttatgcttttgaaatatgttgcatgaattaccttagtaactcatttact

SEQ ID NO: 149921 - DNA, 164 bp, Zea Mays
agtgcagaagaaaaaaagatgaatatgtgtgcttctttttactgggaatatgttattatgtatttaaaatttatgttcaaaagaactcaatgaaaatataatatttttatttgatcacgattgaagtaagagtgttctcatttgatttttattgtggttagctg

SEQ ID NO: 149922 - DNA, 337 bp, Zea Mays
ccgctggcgtagacctataatgcagcacaatcttaaaatttagaacgaacaaaagcggcaagaattttaagatagaactactcgcataatttaactgttgttcgaactacaaaggtctaattcaaaaaaaaaacaatggtcaaatttaagtcaaaacatttttcaaatagaatgcgaatatttgttttgaggcaatatcaattagaatttctaccgaaatttcgcatttctcgtttgttacagatgcagggtattcagcataaaactcagcaataattaattataagggtagattttaatttagtactattttcttcttacctaccgtgtggaatgt

SEQ ID NO: 149923 - DNA, 1719 bp, Zea Mays
atggcctcccactcctcttccgacttctgcacggatcccggcggcggcgtcgacgacgacatcgccgccacgctcgggggcctccgccctgccgcgccgtgcaacgctgacgccgccgcgtggcccctgcacggccgagctgcgcacgagaggggcgcggatcgagggcgcgcggcagagggcgagggtgcgaggagagaggagagcgggagcgcagcgtgcggcgccaaggcagcgcagcgggagcacgagcgggacgccatcctcagcctcagcagacgctggacgcacatagttgttttggcagcagttaagtgcaacgtgtcgcgttcgttgtctgataaggttctggacgggcgtgcttatggactggccgctaggcacacaacacactgcttctacagttctatggtcagcgcccagcggtccagtccagttccgccaatccttgatctgcaatctaatgtatttggaagtcttattgttggatgtgtcccatgtgctagaacagatatagatggtgtcattgttagtggagtaaaacaaggaaaaaaatctagaaagaaaaaaatggcaagcgcaagagaaagcaataaagatggatcatgtagtgaatacgagcagctgaagcaagaaaatattgaaagaaataaaaggaggttggcatctcttaacatccctgaaatcgtcaagagtatggagcaccaagtagtagaaaccagagaaattcctgctgcacctatctatatctttattgctttcagacaattcaggatccaagttgcacaggatcataggtgcaattccttttatagacaattcaggatccaagttgctttattctgtgagaaaaatctggctgtagacatttggatccgtgaacctgcacgtactaggaaagagaggacgaccttcggtcagctgtacagaagaagtgacgcatgtttattcgttcttgcaaacacccaggagaaaattgaagtttccgaggatgatccaatcaatgctacaaaaaagaggcctgcaaggggcataactaagatggagggaatattctcaaggtcacctgaaatgccaaaaatcaaaattttactcaatgatcgaggtcagcctattggtaaaagtgctagacaactttcaagtgctattgggtgtcaagttagaaataaattgtctattgctaccacagactggaggcttgttgatataaacaagaagtatgagttgtgggaggatataaagacatattatgatgtagatgatgctgccttaaactgggtgatgcgcacaactggaaagaagtggaagcaatttaaagcatccataaagcaacgatacttcaatcctgaattgtctataaaagaaattccagaatgtcttgataagagggttaatgatgatgattggcactctatgtacaactattggatgtcttctgaatttcgggatcgctcagaaaaagctaaaataaatcgacaaaagctaaagatgcaccatacagtcggcagtgtgacgaggaacaagtttgctgctgaggatgaggaagacaatgaaggatattgtgcttctgaagatgaggaattagatgatgaggatgatcaaatatttcatcagatgcaaggtgcaaactcaccaagatctacaaggcactttgctgaagcttcacactctaaacatgatgatcttgtaatgctctcattcatttcatatattttctaa

SEQ ID NO: 149924 - DNA, 2665 bp, Zea Mays
gccttttcctcctcaacccgacacgctctccgcgccgtcgtcgaccaatcgaatggaggcggagcagcaaaagcagcagccccagcgcccgcgccgaaaggggctgaagcggaagctggaggacgaggcatccgccgccgtcgccgccgccgccacatccgcagcagcatccgccgccgccgcctcgctcggcagcgcgggcgccgacgatgacaacgaggaggaggacggctcggcgggcacccccgagatctgctgccgccactcccacgcggctcttgcccgcgaggtccgcgcgcaggttgatgccctcgtccgctgcgcctcctcgtggcgccacgccgaccgcgccgccgccaagcgcgccacccatgtcctcgccgagctcgccaaaaacgaggaggttgtcaacgtgattgtggagggcggtgccgtggcggccttggtgtgccacctagaagagcctgctgtggcggcgccaacgcaggaggaacaacaactgcggccgtttgagcatgagcctgaacatcaacaacttgtagttgatgctggtgcattacctcctctagtgaaactcttgaaaaggcagaaaaatactacaaattcgagggtggttaatagcgttatcaagagagcagctgatgcaattaccaatcttgcacatgagaatagcaacattaaaactagcgtcagaatggaaggtggaatcccaccacttgttcaattgctagaatcacaggatcttaaggtgcaaagagcagctgctggggccttgcgtactttagcctttaaaaatgatgaaaataaaactcagattgttcaatgcaatgctttgccaactttgatcttaatgctgcgatctgaagatgctgcaattcactatgaagcagttggtgtcattggaaatttggttcattcatcaccaaagatcaagaaggaggttcttaatgcaggggcactgcaacctgtgattggattattaagctcatgttgtacagaaagccaaagagaggctgctttgttgctagggcaatttgcttcggccgactcggattgcaaggtccatattgtgcaaaggggtgcagtctgtccactaattgaaatgctacagtcggctgatgtccaactccgggagatgtctgcttttgcacttggcaggcttgcccaggacacacataaccaagcaggtattgaggactatgtatctgacttcattaaagtaggaggtgtccaaaagttacaagatggagaatttattgtccaggcaacaaaggactgtgtggcaaaaacattgaagaggttagaggagaagataaatggacgagtgttgaaacacttgctttatttgatgcgagtaggagagaaatctgtgcaaaggcgtgttgctctagctcttgcacacctttgtgcccctgaagatcaaagttcagtttttattgataataatggtctcgacttgcttcttgatcttcttatttccatgagttcaaaacatcaacaagatggctcagcagcattatacaaattggccaacaaagctgcagcactttctcccatggatgctgcccctccatctccaacacctcaggtttatcttggtgagcaatacgtgaatagttcaacactttcagacgttactttcttggtagaaggaaagcgattttatgcacacagaattgctttgcttgcttcttctgatgcatttcgtgcaatgtttgatggcgggtacagggaaaaggatgcaagggacattgaaattcctaatatcagatgggacgtctttgaactcatgatgagatttatctatacagggtcagttcaggttaccagtgaaattgcacaggatcttcttagagctggtgatcagtatctcttagaaggcctcaaacgcctatgtgaatatactattgcgaaggatgtgaatctagataacgtatctgacatgtatgacttgtccgaagcctttcatgccgtgtctctgagacatacgtgcatcttgtacattctggaacattttaacaagatctgcaccagagccggttctgcacagctgatccagcgtgttattccagagctccgcaatttcctaaccaaggcactgagttcatcaagaagcccaagtacaaccgacgacaggaacttgcagacttgattttgagtcccaattcattgacactgacaccgtcatctgaccaaagttgctggacatcctgtacagtgaagtttctggcgctgcgcatttgatggcatctgttgtggtacatggtggccggctcctcaaaattaacatcagcagcttaacaaacttttgtaagatttagtggaggatatgggtaaagagaacccgcgtcttagtcatgcctcgaccagcttacactgggataggctgtagttgtgaatggtcttggccgtaattcgtcggtctctgctttgtttctgagttgtgtttgtttcaagttcacagttcagtgtatgcctgcatatgtttaaagtatgaagcttgagcaagttagaaattagcccctgtagtgataaagctgtctgtgtagatccaccgattggagttaccgaaacaactatgtaacatcatagatgacattagatgcatgataattgctggtaaagcttggtcaaaatatgaggtagaaccactgatcatcactta

SEQ ID NO: 149925 - DNA, 2710 bp, Zea Mays
gccttttcctcctcaacccgacacgctctccgcgccgtcgtcgaccaatcgaatggaggcggagcagcaaaagcagcagccccagcgcccgcgccgaaaggggctgaagcggaagctggaggacgaggcatccgccgccgtcgccgccgccgccacatccgcagcagcatccgccgccgccgcctcgctcggcagcgcgggcgccgacgatgacaacgaggaggaggacggctcggcgggcacccccgagatctgctgccgccactcccacgcggctcttgcccgcgaggtccgcgcgcaggttgatgccctcgtccgctgcgcctcctcgtggcgccacgccgaccgcgccgccgccaagcgcgccacccatgtcctcgccgagctcgccaaaaacgaggaggttgtcaacgtgattgtggagggcggtgccgtggcggccttggtgtgccacctagaagagcctgctgtggcggcgccaacgcaggaggaacaacaactgcggccgtttgagcatgaggttgagaagggcgctgccttcgctctgggcctcctagctgtaaagcctgaacatcaacaacttgtagttgatgctggtgcattacctcctctagtgaaactcttgaaaaggcagaaaaatactacaaattcgagggtggttaatagcgttatcaagagagcagctgatgcaattaccaatcttgcacatgagaatagcaacattaaaactagcgtcagaatggaaggtggaatcccaccacttgttcaattgctagaatcacaggatcttaaggtgcaaagagcagctgctggggccttgcgtactttagcctttaaaaatgatgaaaataaaactcagattgttcaatgcaatgctttgccaactttgatcttaatgctgcgatctgaagatgctgcaattcactatgaagcagttggtgtcattggaaatttggttcattcatcaccaaagatcaagaaggaggttcttaatgcaggggcactgcaacctgtgattggattattaagctcatgttgtacagaaagccaaagagaggctgctttgttgctagggcaatttgcttcggccgactcggattgcaaggtccatattgtgcaaaggggtgcagtctgtccactaattgaaatgctacagtcggctgatgtccaactccgggagatgtctgcttttgcacttggcaggcttgcccaggacacacataaccaagcaggtattgaggactatgtatctgacttcattaaagtaggaggtgtccaaaagttacaagatggagaatttattgtccaggcaacaaaggactgtgtggcaaaaacattgaagaggttagaggagaagataaatggacgagtgttgaaacacttgctttatttgatgcgagtaggagagaaatctgtgcaaaggcgtgttgctctagctcttgcacacctttgtgcccctgaagatcaaagttcagtttttattgataataatggtctcgacttgcttcttgatcttcttatttccatgagttcaaaacatcaacaagatggctcagcagcattatacaaattggccaacaaagctgcagcactttctcccatggatgctgcccctccatctccaacacctcaggtttatcttggtgagcaatacgtgaatagttcaacactttcagacgttactttcttggtagaaggaaagcgattttatgcacacagaattgctttgcttgcttcttctgatgcatttcgtgcaatgtttgatggcgggtacagggaaaaggatgcaagggacattgaaattcctaatatcagatgggacgtctttgaactcatgatgagatttatctatacagggtcagttcaggttaccagtgaaattgcacaggatcttcttagagctggtgatcagtatctcttagaaggcctcaaacgcctatgtgaatatactattgcgaaggatgtgaatctagataacgtatctgacatgtatgacttgtccgaagcctttcatgccgtgtctctgagacatacgtgcatcttgtacattctggaacattttaacaagatctgcaccagagccggttctgcacagctgatccagcgtgttattccagagctccgcaatttcctaaccaaggcactgagttcatcaagaagcccaagtacaaccgacgacaggaacttgcagacttgattttgagtcccaattcattgacactgacaccgtcatctgaccaaagttgctggacatcctgtacagtgaagtttctggcgctgcgcatttgatggcatctgttgtggtacatggtggccggctcctcaaaattaacatcagcagcttaacaaacttttgtaagatttagtggaggatatgggtaaagagaacccgcgtcttagtcatgcctcgaccagcttacactgggataggctgtagttgtgaatggtcttggccgtaattcgtcggtctctgctttgtttctgagttgtgtttgtttcaagttcacagttcagtgtatgcctgcatatgtttaaagtatgaagcttgagcaagttagaaattagcccctgtagtgataaagctgtctgtgtagatccaccgattggagttaccgaaacaactatgtaacatcatagatgacattagatgcatgataattgctggtaaagcttggtcaaaatatgaggtagaaccactgatcatcactta

SEQ ID NO: 149926 - DNA, 108 bp, Zea Mays
tcacatcttgtcggcgttttgacctcggggggtcctggaccgacgagtaaattgtcgccgcgtgccccagcccagatgggtcggcgcgagacggagcgcgaaggggga

SEQ ID NO: 149927 - DNA, 119 bp, Zea Mays
aattcaattacatgcaccaccttgcttattaagttaattaaccgtattaacataactttctacggtttaaaaacagttaactctcggaagttagcatatttaatataaaaacataatat

SEQ ID NO: 149928 - DNA, 353 bp, Zea Mays
atgggcaacctccagggcctgaacggtgccaccgtaggcttctcggcggccggcggcccggaggaggcgactgaagaggaggacatgcggggctgcaagggatgcgctcgccggtggccgaagtcggggctaagctggggttgtgcacggtcgagaagatggaggcgaggtgagtcactccatcacactgcgcatgtcaccaaggcacggcctcccatctcgagcctagacttttcaacgaaggttatggatttggcaagcaggggaactcctggagattgtgcctcttggaaaaggcttctttcttgccaactatcctatttcaattttggattgaccattatcgtttgtgt

SEQ ID NO: 149929 - DNA, 2199 bp, Zea Mays
ccgatccggacccgcatataatcgaaccgtggcagactcggactggactcaaacagcgggcttcgtgccgagctcacaggccttgtacttattggccatctatacccggaactcaccgggccggccaccacatccaggagacacacaccaccttcccacaagttcctttggctttccatcctcgccgctgtgcttattattcgcgtccccgagctttcctcccttccacacgccgcggcgcccgatccggagggtctcgagtctcgagaccgctataaatgcgcgccacaccgcccgtcgcttcttcttccacatccgtacgtcttccgttgtaacctgcgcggcgaaacaaacatcagcaggagctgtccattgtcttcgccccggcggtcggtcgacatggagggcggcggcgttggggacgcgtacggcgaggaccgcgccacagaggagcagctcatcacgccatgggccttctccgtcgcaagcggctacaccctgctgcgcgacccccgccacaacaagggcctggccttctcggaggcggagcgcgacgcgcactacctgcggggcctgctgccgcccgcgctggcgtcgcaggagctgcaggagaagaagctcatgcacaacctgcggcagtacgagcggccgttgcaccgctacatcgccatgatggacctgcaggagcgcaacgagaggctcttctacaagctcctcatcgacaacgtcgaggagctgctccccgtcgtctacacgcccaccgtcggggaggcctgccagaagtacggcagcatctaccgccggccgcaggggctctacatcagcctcaaggacaagggcaagatcctcgaggtgctcaagaactggcccgagaggagcatccaggtcatcgtcgtcaccgacggcgagcgcatcctcggcctcggggatctcggctgccaggggatggggattcccgttggcaagctctccctctacaccgccctcggaggtgtccgcccgtcagcttgcctgcccatcacaatcgacgtcggcaccaacaacgaggccttgctcaacgacgatttctacatcggcctccgccagaggcgtgccaccggcgaggagtaccatgaacttgtcgaggagttcatggccgccgtcaagcaaaactacggcgagaaggtcctcacccagttcgaagactttgcgaaccacaacgcttttgacctgctcgagaagtacagggagagccatctcgtcttcaacgacgatatccagggaacggcctccgtggtcctcgcaggcctcttggcggcgctcaaggtggtcggcgggacacttgcagaccacacctacctgttcctcggtgccggcgaggccgggactggcattgccgagctcattgctcttgagatgtcaaaacatactgggtccccgatcgaagagtgccggcccaagatctggctgatggactcgaggggcctgatcgtggcgtcgcggaaagagtcgctgcaggcgttcaagaagccgtgggcgcacgagcacggggcggtggagaccctgctggaggcggtgcggtccctgaagccgacggtgctgatcggcacgtcgggcaagggcggcaccttcaccaaggacgtggtggaggccatggcgtcccagaacgagaggccggtggtcttcgcgctgtccaacccgacgtcgcactcggagtgcacggcggagcaggcgtacacgtggaccgagggccgcgcggtgttcgccagcggcagccctttccccgcggtggagctggacggcagggcgctggtgccgggccagtccaacaacgcctacatcttcccgggcttcggcctcggcgtcgtcatctcgggcgccatccgcgtccgcgacgacatgctgctggccgcctcggaggcgctggcggagcaggtcaccgaggcgcactacgccaagggcctcatcttcccgcccttcaccaacatccgcgccatctccgcccgcatcgccgccaaggtggccgccaaggcctacgagctcggcctcgccagccgcctgccccgacccgacgacctcgtcaagtacgcggagagctgcatgtacacccccacctaccgcagctaccggcgactcctccgacctccctgccccatcgacaatccaaatcccacacaacccctccacaattccagccaaaatacatcaaactctttcaca

SEQ ID NO: 149930 - DNA, 1463 bp, Zea Mays
atggagggcggcggcgttggggacgcgtacggcgaggaccgcgccacagaggagcagctcatcacgccatgggccttctccgtcgcaagcggctacaccctgctgcgcgacccccgccacaacaagggcctggccttctcggaggcggagcgcgacgcgcactacctgcggggcctgctgccgcccgcgctggcgtcgcaggagctgcaggagaagaagctcatgcacaacctgcggcagtacgagcggccgttgcaccgctacatcgccatgatggacctgcaggagcgcaacgagaggctcttctacaagctcctcatcgacaacgtcgaggagctgctccccgtcgtctacacgcccaccgtcggggaggcctgccagaagtacggcagcatctaccgccggccgcaggggctctacatcagcctcaaggacaagggcaagatcctcgaggtgctcaagaactggcccgagaggagcatccaggtcatcgtcgtcaccgacggcgagcgcatcctcggcctcggggatctcggctgccaggggatggggattcccgttggcaagctctccctctacaccgccctcggaggtgtccgcccgtcagcttgcctgcccatcacaatcgacgtcggcaccaacaacgaggccttgctcaacgacgatttctacatcggcctccgccagaggcgtgccaccggcgaggtcacccacagtcatcccttccacttaattgtagtagtaagtaatcgatctctcttgtctgctgggtcattgagacgtgacttgtgtttaggagtaccatgaacttgtcgaggagttcatggccgccgtcaagcaaaactacggcgagaaggtcctcacccagttcgaagactttgcgaaccacaacgcttttgacctgctcgagaagtacagggagagccatctcgtcttcaacgacgatatccaggtagtataggcgcctatagcttatgcagctctgtacgtacgtcgatgctgatttttgttgcagggaacggcctccgtggtcctcgcaggcctcttggcggcgctcaaggtggtcggcgggacacttgcagaccacacctacctgttcctcgccagccgcctgccccgacccgacgacctcgtcaagtacgcggagagctgcatgtacacccccacctaccgcagctaccggtaaggacgacccttgcatggaccatggccggcgcttagaggagtgagttttacacgtacgtacgttgatttttttatgtactgtatttctgtgtacgggtacggcaaactacaccacacccacatatatacggaggtgaagttgattcttctgacaaattttgtttggttgtaaacgagcttagtagtacttacacctcaatcagattaagctcctagagtacttgtgcatctgaaatattccgtcacttcctatatatgagaactgaacgtttacttct

SEQ ID NO: 149931 - DNA, 777 bp, Zea Mays
aaatctaaattttctcctaaggctatagaaggctttttactaggatatgactcaaacacaagggcatatagagtcattgaaagctctcttgtgggttttggtgtttggatgacaacccaattaaaggactaacaagtgtgctaagtgttgaacaggtgcttaatgcaaagctaatagggttcaacacaagtgaacaagtataatgaacactgcttaagtgagactcggtgtgcgtaactcagatacaaccgatcaagccaaggatggaggcaagaagagcttcaaggtaccgagtgcacgggagaagatcaaggagactaggaacccaaagccaggggtgaagaagaagacttgcaaagtcaaggttgatcgagttaagagttatggtgcatcaaggatcactacataaggacatgacttacaaccaatgaggtaacatctacagttatgtggtgtaagtcataaggctcaagatcaagctcgagaaatgaacaagggagttggagctcagatatatcaatctagatcaagtcaagttgacttaatggtttagagtccaacatcgacctcaaacttgccaaattgggtaaaacgatgaaaaaggttaagtatgtaaggtttgagtgttcaaccatgtttcatacacctcttactacaagtttggtgcttggtttgctctctaactctttctgtagagaaagtaccattctgagctctgctggacgagaaacagtaaagctaggagaagaacaagaaagatgtaagtttctaggacta

SEQ ID NO: 149932 - DNA, 1518 bp, Zea Mays
agcgcgcacacctacgtgtcgagccgtcttcatccctccgaccggaaatcaacggaagcggacgcgagaggagactaaccgacctcggatccatcgacgcgtgaagatgtcttcgcccgccgagtactacaaatcacttccacctataagcaaggcatatgggacattgtgtttctttaccaccgtgctagttcagctccagattttgcacccattatttctttacttagattaccccttggtgttcaagaagtttgagatatggaggctattgacaagtttctttttcctggcaccattttccatgaaatttggtattcgccttctgatgatgtaggttaaagttttgctgactactgattataaaatagtgacagttatgaactatctataattgtaaattagctttggttgtttggatttgctttatcgtgttttggcatgcagagcaaggtatggtgtcatgttggaaaagggtgcatttgataagcggactgcagatttcttatggatgatgatatttggtgccatctcactattggtgttgtctattattcccctattcaattcttttttcttaggaatacctatggtcagcatgctcctttatgtctggagccgagagaatccaaatgctcagataaatatatacggcctcgtccaattgaggtccttttatcttccatgggctatgctcttattggatgtgatatttgggtcatcattaatgcctggacttctgggtatcatggttggacatctctactacttctttgcagtgttgcaccctcttgccaccgggaagagctacctcaagactcctaaatgggtacataagattgttgctcgattcaggataggcatgcaagcgaactcacccgtccgtccaccagccaatggcaacagcgggtctggtgtgtttagaggaagaagctataggctcaatcaatagattcacccacctcgtaatgtgatccatggtcggagtggcaatgtagaagcaaagaccagaacgcatagtagggtcaatcaaaattaagggttacccgtcagagattttcttaaaaaacctggacggacggaatggagaacccttccatttgctcatttagttgctaacaatgttcatcgtccatgtttacacatgaatataattctgtaatgacaatttgtgtacacttatgctggacttattgtcgcctctttttagctaggataagaacaaaagatgatgagtttgctcatgctggtgcttttggtccttactgggtggatttgtgcatgctgaacagcagaaggctagatctcgggttattgtcatctggcccaaaaaatgacatcaacaggtttccgtcacacaagatcggagtttgctgataatattgtagagacaatttagactttgcttgatggttgtcatacgtcaatgacgtcgaaagaaaatctgagaacaatacggctgtaaatttcacctttgtgtaattgtatcatagatatcgtcgagaaatcccaaatgca

SEQ ID NO: 149933 - DNA, 1595 bp, Zea Mays
aaatcggcagtggaccaatcgccgctcaccaaggccacctcatcacccagccacgttacatgaccaatcgcctgcgccgtagcgcgcacacctacgtgtcgagccgtcttcatccctccgaccggaaatcaacggtgcgtttgcttctctcctccggaaggttctcggcttctcgcaggcgcggcgaccggcttcaaccccaactcttcttcttcttcctcgcaaacttcgaacgggacgagaaggaagcggacgcgagaggagactaaccgacctcggatccatcgacgcgtgaagatgtcttcgcccgccgagtactacaaatcacttccacctataagcaaggcatatgggacattgtgtttctttaccaccgtgctagttcagctccagattttgcacccattatttctttacttagattaccccttggtgttcaagaagtttgagatatggaggctattgacaagtttctttttcctggcaccattttccatgaaatttggtattcgccttctgatgatagcaaggtatggtgtcatgttggaaaagggtgcatttgataagcggactgcagatttcttatggatgatgatatttggtgccatctcactattggtgttgtctattattcccctattcaattcttttttcttaggaatacctatggtcagcatgctcctttatgtctggagccgagagaatccaaatgctcagataaatatatacggcctcgtccaattgaggtccttttatcttccatgggctatgctcttattggatgtgatatttgggtcatcattaatgcctggacttctgggtatcatggttggacatctctactacttctttgcagtgttgcaccctcttgccaccgggaagagctacctcaagactcctaaatgggtacataagattgttgctcgattcaggataggcatgcaagcgaactcacccgtccgtccaccagccaatggcaacagcgggtctggtgtgtttagaggaagaagctataggctcaatcaatagattcacccacctcgtaatgtgatccatggtcggagtggcaatgtagaagcaaagaccagaacgcatagtagggtcaatcaaaattaagggttacccgtcagagattttcttaaaaaacctggacggacggaatggagaacccttccatttgctcatttagttgctaacaatgttcatcgtccatgtttacacatgaatataattctgtaatgacaatttgtgtacacttatgctggacttattgtcgcctctttttagctaggataagaacaaaagatgatgagtttgctcatgctggtgcttttggtccttactgggtggatttgtgcatgctgaacagcagaaggctagatctcgggttattgtcatctggcccaaaaaatgacatcaacaggtttccgtcacacaagatcggagtttgctgataatattgtagagacaatttagactttgcttgatggttgtcatacgtcaatgacgtcgaaagaaaatctgagaacaatacggctgtaaatttcacctttgtgtaattgtatcatagatatcgtcgagaaatcccaaatgca

SEQ ID NO: 149934 - DNA, 1593 bp, Zea Mays
aaatcggcagtggaccaatcgccgctcaccaaggccacctcatcacccagccacgttacatgaccaatcgcctgcgccgtagcgcgcacacctacgtgtcgagccgtcttcatccctccgaccggaaatcaacggtgcgtttgcttctctcctccggaaggttctcggcttctcgcaggcgcggcgaccggcttcaaccccaactcttcttcttcttcctcgcaaacttcgaacgggacgagaaggaagcggacgcgagaggagactaaccgacctcggatccatcgacgcgtgaagatgtcttcgcccgccgagtactacaaatcacttccacctataagcaaggcatatgggacattgtgtttctttaccaccgtgctagttcagctccagattttgcacccattatttctttacttagattaccccttggtgttcaagaagtttgagatatggaggctattgacaagtttctttttcctggcaccattttccatgaaatttggtattcgccttctgatgatagcaaggtatggtgtcatgttggaaaagggtgcatttgataagcggactgcagatttcttatggatgatgatatttggtgccatctcactattggtgttgtctattattcccctattcaattcttttttcttaggaatacctatggtcagcatgctcctttatgtctggagccgagagaatccaaatgctcagataaatatatacggcctcgtccaattgaggtccttttatcttccatgggctatgctcttattggatgtgatatttgggtcatcattaatgcctggacttctgggtatcatggttggacatctctactacttctttgcagtgttgcaccctcttgccaccgggaagagctacctcaagactcctaaatggacataagattgttgctcgattcaggataggcatgcaagcgaactcacccgtccgtccaccagccaatggcaacagcgggtctggtgtgtttagaggaagaagctataggctcaatcaatagattcacccacctcgtaatgtgatccatggtcggagtggcaatgtagaagcaaagaccagaacgcatagtagggtcaatcaaaattaagggttacccgtcagagattttcttaaaaaacctggacggacggaatggagaacccttccatttgctcatttagttgctaacaatgttcatcgtccatgtttacacatgaatataattctgtaatgacaatttgtgtacacttatgctggacttattgtcgcctctttttagctaggataagaacaaaagatgatgagtttgctcatgctggtgcttttggtccttactgggtggatttgtgcatgctgaacagcagaaggctagatctcgggttattgtcatctggcccaaaaaatgacatcaacaggtttccgtcacacaagatcggagtttgctgataatattgtagagacaatttagactttgcttgatggttgtcatacgtcaatgacgtcgaaagaaaatctgagaacaatacggctgtaaatttcacctttgtgtaattgtatcatagatatcgtcgagaaatcccaaatgca

SEQ ID NO: 149935 - DNA, 2099 bp, Zea Mays
aaatcggcagtggaccaatcgccgctcaccaaggccacctcatcacccagccacgttacatgaccaatcgcctgcgccgtagcgcgcacacctacgtgtcgagccgtcttcatccctccgaccggaaatcaacggtgcgtttgcttctctcctccggaaggttctcggcttctcgcaggcgcggcgaccggcttcaaccccaactcttcttcttcttcctcgcaaacttcgaacgggacgagaaggaagcggacgcgagaggagactaaccgacctcggatccatcgacgcgtgaagatgtcttcgcccgccgagtactacaaatcacttccacctataagcaaggcatatgggacattgtgtttctttaccaccgtgctagttcagctccagattttgcacccattatttctttacttagattaccccttggtgttcaagaagtttgagatatggaggctattgacaagtttctttttcctggcaccattttccatgaaatttggtattcgccttctgatgatgtaggttaaagttttgctgactactgattataaaatagtgacagttatgaactatctataattgtaaattagctttggttgtttggatttgctttatcgtgttttggcatgcagagcaaggtatggtgtcatgttggaaaagggtgcatttgataagcggactgcagatttcttatggatgatgatatttggtgccatctcactattggtcagttatttttactttttgcatttacaatttcaaatttgaccaaaccaagggacattctagaacttttactaaacttgtatacaactctgtattgcttgaatcaggtgttgtctattattcccctattcaattcttttttcttaggaatacctatggtcagcatgctcctttatgtctggagccgagagaatccaaatgctcagataaatatatacggcctcgtccaattgagggtatgtaattcactaccatcaattgcaatgccagtttttgtgcttctcaatcggtgaataggtaggcgaagcataagaatagggatggtgctccaatgggtatccgtggttttcctctatttttaactcaaaaaactaattaggcaattccttccgtcattcttggatatatagttcatcaagttgaagtaaaggagatccatggatctctccacacccatcctaggtgaagcagacctgtgaactttatgattagttgttgatgtactctcttcttttgcagtccttttatcttccatgggctatgctcttattggatgtgatatttgggtcatcattaatgcctggacttctgggtatcatggttggacatctctactacttctttgcagtgttgcaccctcttgccaccgggaagagctacctcaagactcctaaatgggtacataagattgttgctcgattcaggataggcatgcaagcgaactcacccgtccgtccaccagccaatggcaacagcgggtctggtgtgtttagaggaagaagctataggctcaatcaatagattcacccacctcgtaatgtgatccatggtcggagtggcaatgtagaagcaaagaccagaacgcatagtagggtcaatcaaaattaagggttacccgtcagagattttcttaaaaaacctggacggacggaatggagaacccttccatttgctcatttagttgctaacaatgttcatcgtccatgtttacacatgaatataattctgtaatgacaatttgtgtacacttatgctggacttattgtcgcctctttttagctaggataagaacaaaagatgatgagtttgctcatgctggtgcttttggtccttactgggtggatttgtgcatgctgaacagcagaaggctagatctcgggttattgtcatctggcccaaaaaatgacatcaacaggtttccgtcacacaagatcggagtttgctgataatattgtagagacaatttagactttgcttgatggttgtcatacgtcaatgacgtcgaaagaaaatctgagaacaatacggctgtaaatttcacctttgtgtaattgtatcatagatatcgtcgagaaatcccaaatgca

SEQ ID NO: 149936 - DNA, 1130 bp, Zea Mays
agcgcgcacacctacgtgtcgagccgtcttcatccctccgaccggaaatcaacggaagcggacgcgagaggagactaaccgacctcggatccatcgacgcgtgaagatgtcttcgcccgccgagtactacaaatcacttccacctataagcaaggcatatgggacattgtgtttctttaccaccgtgctagttcagctccagattttgcacccattatttctttacttagattaccccttggtgttcaagaagtttgagatatggaggctattgacaagtttctttttcctggcaccattttccatgaaatttggtattcgccttctgatgatagcaaggtatggtgtcatgttggaaaagggtgcatttgataagcggactgcagatttcttatggatgatgatatttggtgccatctcactattggtgttgtctattattcccctattcaattcttttttcttaggaatacctatggtcagcatgctcctttatgtctggagccgagagaatccaaatgctcagataaatatatacggcctcgtccaattgaggtccttttatcttccatgggctatgctcttattggatgtgatatttgggtcatcattaatgcctggacttctgggtatcatggttggacatctctactacttctttgcagtgttgcaccctcttgccaccgggaagagctacctcaagactcctaaatgggtacataagattgttgctcgattcaggataggcatgcaagcgaactcacccgtccgtccaccagccaatggcaacagcgggtctggtgtgtttagaggaagaagctataggctcaatcaatagattcacccacctcgtaatgtgatccatggtcggagtggcaatgtagaagcaaagaccagaacgcatagtagggtcaatcaaaattaagggttacccgtcagagattttcttaaaaaacctggacggacggaatggagaacccttccatttgctcatttagttgctaacaatgttcatcgtccatgtttacacatgaatataattctgtaatgacaatttgtgtacacttatgctggacttattgtcgcctctttttagctaggataagaacaaaagatgatgagtttgctca

SEQ ID NO: 149937 - DNA, 951 bp, Zea Mays
aaatcggcagtggaccaatcgccgctcaccaaggccacctcatcacccagccacgttacatgaccaatcgcctgcgccgtagcgcgcacacctacgtgtcgagccgtcttcatccctccgaccggaaatcaacggtgcgtttgcttctctcctccggaaggttctcggcttctcgcaggcgcggcgaccggcttcaaccccaactcttcttcttcttcctcgcaaacttcgaacgggacgagaaggaagcggacgcgagaggagactaaccgacctcggatccatcgacgcgtgaagatgtcttcgcccgccgagtactacaaatcacttccacctataagcaaggcatatgggacattgtgtttctttaccaccgtgctagttcagctccagattttgcacccattatttctttacttagattaccccttggtgttcaagaagtttgaggttagcttctatttctgttttcccttacgccacgtttggattattggaattgaattccattctaataatagtaatttaggcatatatcaattaagctaattcagttttatgcaaaatatatcggtatattattattagcaagatgtcggagatatttatgtgctatatttttactgtagatgagtgaatcgaggagcgtcctgtaagttacaaagtagatacaaattctactaatacataaaatcatttctcatcctccactccatgaatttgagatagacttatatctgaactttggaaagtagtggaatgtcaaattccaagctaaataggttattttataagcaaattccaattcctataaaatgtagggatccaaacgccccgttatcctaattgcatcacatcgatacagtttaacattattattgcttagttttgactgcacaacattgtaagcctctattgggaaggatgttgtaacatgccacattatctttc

SEQ ID NO: 149938 - DNA, 912 bp, Zea Mays
tacgtcgacaagaatccaactagaacatcaacattgagtggaatgggatggttgaacgagacactaaacactccgagtgaatgtcattcacagcttcgtatgtgcacacagatatttatcgacctccatgatatattggtgcaaaggtatggcttacaagcttcgttgcatgtgagcacatatgagagcatagccattttcttattcatctgtggtggcaatgagtctaatagaagaagtcaaaatcggttcaagcattcaggtgaaccaattagtagaaaatttgaagaggtcctcaatgctataatggctatgggaaaagatttcctaatgccaaaaaatgcaaattttctagaagttcacaggagaataagagacgacagaaaggcttacccacactttaaggattctattggtgcacttgatggtacgcatattcgggtatgtcttccaccagatgaccaagtaagatatattggaaaatcaggaaaacccacgcaaaatgttttggatgtatgtgacttcgacatgcactttacttatgtgtcgacggggcagccaggatctatgcatgacacaagtgtcttatacagtgcaataaaagttgatgaaaaattctttccacacccactaagaggaaagtactatgttgtcaatgcaggatatcctaaccgtcctggttacttagcaccatacaaaggtgaaagatatcacatgcctgaatggcatagaggtatggaaccaagaactcctaaagaaaaattcaatcgtgttcattcgtccatacgtaatgtcattgagagatcattcagagtactaaaaatgaagtggcaaattttatacaacatgcctccgtactccatgtacaagcaaaaaatgattgttgttgctacgatggtccttcataatttc

SEQ ID NO: 149939 - DNA, 252 bp, Zea Mays
ttatgcattgtactgctcattatagtgcctactaagccaaagaaacctactctcatcagtatctagggtcatgaacatctccctttgctccttcttgataaatagcttggtaccaatgaaatgctcattactaccaatccttgccccacagaatacaactaaatccattacttgtttgatagtgacctctcctagtttctttgcagcaagtgcatcagcagaatttgcaatccttgtcacttgttcttgcat

SEQ ID NO: 149940 - DNA, 447 bp, Zea Mays
atgcactacagttctctacaagaagctcaaagctctctttctatgaaagataaggagctggctgaagcaacagagtcgctgaaggagctgggttctgagcttgaaacctcaaaaaagaggattcaagaaattgaagctgaattggattcatcagcaaataagcttcgtaaacttgaagagctgaaggatgaaagaagcttgcatgctgcacaggaggcgaagagggcttcaaaacttgataagatgctggaactggcacagtcaaacatgaaacaaatggaaaaacatattagcagtcttcaagaggaggtaaagggtcatcaagataaggccacatcaccttattacagtttagcaaatgcagagcccatacagacaacactttgtgagcaaactgaaactggacataactcgaatagtatagtatattacaaaagattattctaa

SEQ ID NO: 149941 - DNA, 1171 bp, Zea Mays
aattcacaatgcttacaaaacccatccatcattttagctgttgatacaaagagaagggaatggccgagataaccctagagccgagtgatcttatggcgcaaacaaacaaaagaatagtgccaaagttcactgaaatcttccccgtggaggacgcgaactacccttacagcgccttcatcgcgtcggtccggaaagacgtgatcaaacactgcaccgaccataaagggatcttccagcccgtgctgccaccggagaagaaggtcccggagctatggttctacacagagctcaaaactaggaccagctccatcacgctcgccatacgcatggacaacctgtacctcgtgggcttcaggaccccgggcggggtgtggtgggagttcggcaaggacggcgacacccacctcctcggcgacaaccccaggtggctcggcttcggcggcaggtaccaggacctcatcggcaacaagggtctggagaccgtcaccatgggccgcgccgaaatgaccagggccgtcaacgacctggcgaagaagaagaagatggcgacactggaggaggaggaggtgcagatgcagatgcagatgccggaggccgctgatctggcggcggcggcagcggctgacccacaggccgacacgaagagcaagctggtgaagctggtggtcatggtgtgcgaggggctgcggttcaacaccgtgtcccgcacggtggacgcggggttcaacagccagcacggggtgaccttgaccgtgacgcaggggaagcaggtgcagaagtgggacaggatctccaaggcggccttcgagtgggctgaccaccccaccgctgtgatccccgacatgcagaagcttggcatcaaggataagaacgaagcagcgaggatcgttgcgctcgttaagaatcaaactactgccgctgccgctactgctgccagtgctgacaacgacgacgacgaggcctgatcaatgcaacgacacatcatgatctgctgctgcacttaattactatgttcgtatacaaataaatacacccggcgtacgcggtgttccttatatggtctaaaatgtagccagtaaattttaaactactttatttcttgaggctctataaacaatagatttaaagtgttatgtaaagtttagacaaccttatataaattttagactac

SEQ ID NO: 149942 - DNA, 893 bp, Zea Mays
actcccactccgtcgtcccaccctctcctcccaacgtcatcctctcctcctcactcgtgccaccatctatccctctcctcgcggcaccgctaccatcaattcccttttatccgtaggatcatagtattagcacaacctatacgccagtagaaaaaaagacctggggtgaagatacgctcactcaaacgtttcctgttcctatctagctagtagtagttccaacgaagcaacagttgtacgtcatggcgctcgagcccctccgccatgggctggtgtcgctgctcgtgctgctgctgctgctggttcacgcggccagcgcggcgcgcgcgcgcgacttgcacctggagatggtgaccacctccgccgcgacggcgcgcgccgtgccgtcgtgtgcgagctggcgactcggggtggagaccaacaacatccgggactggtacagcatccccgcggagtgccggggctacgtccgcgactacatgtacggcgacctgttcaggcaggactgcgcggtggtggcacgtgaggccgccgcctacgcagaggggctcgagctcggcggcgacgggaaagaggtgtgggtgtttgacgtcgacgacaccaccctcagcaacctcccctactacgccgacaccggattcggggctgagccgtacaacgccacctacttcgacgagtacgtagcgaacgcgacggcgccgccgctgccggaggtgctgcagctatacgagacgctgctgtcgctgggcatcaaggtggtgttcatcaccggcaggcacgactacgagaaggagcccaccatcaagaacctccgcagcgccggctaccacacctgggataagcttgtgctcaagtacgtaaactttttaatttttgcgtatcaagtaggttaa

SEQ ID NO: 149943 - DNA, 110 bp, Zea Mays
cggaattcagagaaacttctttcagttttagaattcagagaagtgtctttcagtttcaggattcagaatataagggacacttcgctcatccattgaaagcaaaatggccc

SEQ ID NO: 149944 - DNA, 1426 bp, Zea Mays
gtcaatcgttggttcccatgctctctcgtgcgtccatgtgtcttatctggaggcttctaggtgacacttctttcctcctcgcatcctctctctccatcctatgtctcctgcaactcacgctccctccctccctccccaagcatccctgcccacctacggctccggcgacagcggccgccgctttggactccgaatctggccgccatcgctgcaacggtccaggtaagcggctaatctgcttcgttgtgccctgctctgctcctagtcctagcgatgcaagggttttggttcagtttttttccctagggaaaagggaagggaaaagcgaagtgcatgaaatacaaagatttggtttgggattttttgggggcactgctagtgtgtgtcatggcattggaacggagtaaaaagcgagggtttggtttggtatttttggagcactcctgacttagtgtatgtgtcgtggtattttatttcaagatcaatccatttggtcccctattttctcatgtcggctaaacattttccctctcttgatttacagtattatttcagtgcagttttgttaactccttttttcctttagcatgtcttcatttagtttcttattatgcccatccttttattttttactatgaagcaggctttctggaatcacatttcttgagaactatctgttggagagctaaactaggctcttgttcatattatggatcagcaagctaagattgatgctgattttcttgaaccaactgtactcttagatgagacacattaccaggaggggtacataaatggctataatgatggtttggcatctggaaaggaagaggggaggcaggttggtttaaagatgggtttccaggtcggtgaagaactgggtttctttcagggctgtctggatgtgtggacgtctgcaattctcattgatcagaatgccttcacagctcgggtcaggaagaatatcgagcaactggctgcactggtgggcagctatccgctgtccgatccggagaatgaacaaattcaagacgtgatggagaagataaggctgaaattcagggtcaacactgcaagcttaggggcgaagttagagtatgaagggcaccccaaatcatctaaacaagatgctgaggatctgtgagcggtgattgaaattacattttagtttctccgcccttgctgtttaaagctcttcaactcattggcatcatgaggaactgccatgagacatcaatggtctgagtccgaccataaccacatatatagttttaacaatgtctcaagttttgtgttattacctgctgtctgccatatgtaatagtttcctttcagaaggcaaaaacacttccttcccattttctttgaagtacttgtatacactagatcatagcacatgatagagatatgatcaaaagtataataa

SEQ ID NO: 149945 - DNA, 1690 bp, Zea Mays
cggaggtcggagctactgcaagctaggcctacagcaatggcggcctcttcgtcgatccaacgaggcgagagacgaggaaggtgggggagccccgagcgcaccgtggtgtggactgaacccaagcccaagccggcgaggaaggtcgccgtggtttactacctctgccaccgcgacggccacctcgaccacccgcacttcctggagatggagctatcccagcaccagcagtcccactcctcccgccctgctcccggcctctacctccgagacttcaaggcccgcctcaacgcgctccgcggcgacggcatgcccggcatgtactcctggtcctccaagaggagctacaagaacgggtacgtgtggcaggacctcaccgaggacgacctcatccaccccgcccacggcaacgacgagtacgtcctcaagggctccccgctcctcctcttccctcagccaccgccgcagcaggaggatgccgacaagtgggccggccgtcaccgcaagaactggagctccttcgacctgggggactgcgatagtaagctggtcgtcgtggcccaacaccaacagtctgcggccacgcgggtcgaccgggacgacgccgacccgtcgtcgacggagctggccatcgacgagatctcgccgccgccgtcctccagcagcccagacgagccggagagctgcggcagggaggtcggcgtggtcgccggcgggcggatgtgggcgtcggccgtgctgatgcagatcttctcctgcgggtccacggcggccgtgaggcggggccgccacgcgcgcacccgctctgaccttgtgatgtcaagtgcgagcaacaggcgggccaagaaggaggcggatgcggacgcggacgcggacgcgtcagcaagagcggctgaatgcctgtcagtgtcaggcgtcgtggagcgggactacttcagcggcagcctcattgagagcggcaagaagcgcggcggggatgacgcccttcttctcaagcggtcatcctcctgcaacgccgacaggtcttgggcgctttcagttttccagttaaattccatcacgcatcttcattcttacgtgtgctgtcctgtttgcaactgaagcaggggcgccgcgaagctgaagttgccgccggtgccggcgaaggaggtccgtcccgggcgccttgcctcccgaggaagccccgcgcccaacaaaagtatgactaaatccacggtggcccagagcagggacggaggcgaatgcaatggcgcgacggcggacgcggcggggagcacgtagccatgctgctgcagtgtgcagtccatgaagcgcctcggtcgacttgcattgcattgcaggtggcgagacgggcacgacacggtgtcgcgcgcgggcgagtgctccgagatgcggatggacgagtcaactcaaagtcagctgagatctgctactagtaggactagaattagcatgcaagtgcttgtaacggcacagacttgtacttttactcagtcactatatactataaacaataaaaatacggttttctaaggcggtggatttagttttgcaggatacggtctaatgtttgtttaacaactcatgctagttgctactgtcagtcttcaacaactctatctagtggccgacgcaggacaagttaagggagacaaaaaaaacacatgataaaatcaaccaacaccataaacaa

SEQ ID NO: 149946 - DNA, 1430 bp, Zea Mays
gcaagctaggcctacagcaatggcggcctcttcgtcgatccaacgaggcgagagacgaggaaggtgggggagccccgagcgcaccgtggtgtggactgaacccaagcccaagccggcgaggaaggtcgccgtggtttactacctctgccaccgcgacggccacctcgaccacccgcacttcctggagatggagctatcccagcaccagcagtcccactcctcccgccctgctcccggcctctacctccgagacttcaaggcccgcctcaacgcgctccgcggcgacggcatgcccggcatgtactcctggtcctccaagaggagctacaagaacgggtacgtgtggcaggacctcaccgaggacgacctcatccaccccgcccacggcaacgacgagtacgtcctcaagggctccccgctcctcctcttccctcagccaccgccgcagcaggaggatgccgacaagtgggccggccgtcaccgcaagaactggagctccttcgacctgggggactgcgatagtaagctggtcgtcgtggcccaacaccaacagtctgcggccacgcgggtcgaccgggacgacgccgacccgtcgtcgacggagctggccatcgacgagatctcgccgccgccgtcctccagcagcccagacgagccggagagctgcggcagggaggtcggcgtggtcgccggcgggcggatgtgggcgtcggccgtgctgatgcagatcttctcctgcgggtccacggcggccgtgaggcggggccgccacgcgcgcacccgctctgaccttgtgatgtcaagtgcgagcaacaggcgggccaagaaggaggcggatgcggacgcggacgcggacgcgtcagcaagagcggctgaatgcctgtcagtgtcaggcgtcgtggagcgggactacttcagcggcagcctcattgagagcggcaagaagcgcggcggggatgacgcccttcttctcaagcggtcatcctcctgcaacgccgacagcaggggcgccgcgaagctgaagttgccgccggtgccggcgaaggaggtccgtcccgggcgccttgcctcccgaggaagccccgcgcccaacaaaagtatgactaaatccacggtggcccagagcagggacggaggcgaatgcaatggcgcgacggcggacgcggcggggagcacgtagccatgctgctgcagtgtgcagtccatgaagcgcctcggtcgacttgcattgcattgcaggtggcgagacgggcacgacacggtgtcgcgcgcgggcgagtgctccgagatgcggatggacgagtcaactcaaagtcagctgagatctgctactagtaggactagaattagcatgcaagtgcttgtaacggcacagacttgtacttttactcagtcactatatactataaacaataaaaatacggttttct

SEQ ID NO: 149947 - DNA, 1444 bp, Zea Mays
cggaggtcggagctactgcaagctaggcctacagcaatggcggcctcttcgtcgatccaacgaggcgagagacgaggaaggtgggggagccccgagcgcaccgtggtgtggactgaacccaagcccaagccggcgaggaaggtcgccgtggtttactacctctgccaccgcgacggccacctcgaccacccgcacttcctggagatggagctatcccagcaccagcagtcccactcctcccgccctgctcccggcctctacctccgagacttcaaggcccgcctcaacgcgctccgcggcgacggcatgcccggcatgtactcctggtcctccaagaggagctacaagaacgggtacgtgtggcaggacctcaccgaggacgacctcatccaccccgcccacggcaacgacgagtacgtcctcaagggctccccgctcctcctcttccctcagccaccgccgcagcaggaggatgccgacaagtgggccggccgtcaccgcaagaactggagctccttcgacctgggggactgcgatagtaagctggtcgtcgtggcccaacaccaacagtctgcggccacgcgggtcgaccgggacgacgccgacccgtcgtcgacggagctggccatcgacgagatctcgccgccgccgtcctccagcagcccagacgagccggagagctgcggcagggaggtcggcgtggtcgccggcgggcggatgtgggcgtcggccgtgctgatgcagatcttctcctgcgggtccacggcggccgtgaggcggggccgccacgcgcgcacccgctctgaccttgtgatgtcaagtgcgagcaacaggcgggccaagaaggaggcggatgcggacgcggacgcggacgcgtcagcaagagcggctgaatgcctgtcagtgtcaggcgtcgtggagcgggactacttcagcggcagcctcattgagagcggcaagaagcgcggcggggatgacgcccttcttctcaagcggtcatcctcctgcaacgccgacaggggcgccgcgaagctgaagttgccgccggtgccggcgaaggaggtccgtcccgggcgccttgcctcccgaggaagccccgcgcccaacaaaagtatgactaaatccacggtggcccagagcagggacggaggcgaatgcaatggcgcgacggcggacgcggcggggagcacgtagccatgctgctgcagtgtgcagtccatgaagcgcctcggtcgacttgcattgcattgcaggtggcgagacgggcacgacacggtgtcgcgcgcgggcgagtgctccgagatgcggatggacgagtcaactcaaagtcagctgagatctgctactagtaggactagaattagcatgcaagtgcttgtaacggcacagacttgtacttttactcagtcactatatactataaacaataaaaatacggttttct

SEQ ID NO: 149948 - DNA, 873 bp, Zea Mays
ttcatcctcatctcttcctccagctctagccgaactccctcacgccatcctctttcctggtgttcatccctgcggcaaccaccacttgggcgctcctctccctgcccctcccatggcggctccccctggatccctccctgcgcggaccctctcccgtggatggtgccgccccttcctgcagcacgtcgtgctccctcccctggcgccctagtccccaacgccggaaatgccgctgctgctccaccagccgctactgctcctgaacgccagtgccgaccaccatctcccatggcgcaggagctccccaatctcctcttgccagggcgccgtcgctgagctcgccctgccccagccatggacgtcgtcgggccacccgtctcctatctcccctcgccctcatcctctggctgctgccccttcctattcctggtggctgagtcttcttccatggatgctggccgtgctgccctccctggtgctcacctctgccccctgcgttggatggccggttgctcctgccctagattatactcatgcccgaccgtggtacaacagcaacagccatgaaaccccatcgtgtcgcgcccgccctcgacgtgttcgacggaatatcgcagcacgtgccgacccgatctgcagccctggttgcgaggacgtcgaaccccgctaccgtcgacgttgtgcctcgcgcttcaccaatgcgatgaaatgtctgagcgaatagacgacatgcgacccgagtttgattctgccaggttgtttgatgtgtattttactcattgtgatttagttgatgatgtgtttgtatgtgcgaggtgatgagaaaaataaaggagatgcgttgttcgataataaagattaagttaaaatgta

SEQ ID NO: 149949 - DNA, 853 bp, Zea Mays
gccccaagcttttcttgagctccacaaatttccattgccgcgcgcgcgcgtttaagctagctgtgtccaccgatcaactgcaactctcacacacgtccacctgcaattgctgcaaaacaatggctcctcgcagcgcctacgtgcccgtgtgccttgttgccctgctcctgctcgccagccttagaccgtccagcgcgcggctgctccggccgccgatggggcgcgacggcgcaatcgatgtggctatggaggtgaaggacgccgtcgtcgacaagtacgcgccgctcctccttgccatgctgccgagggggccggcgccaccgtccgccccgagcggcggcaccaatgatatcccccggaattaaaaggaaccggtggccgtagtagttgtacacgcatggaccccggccagagcccacaggaagtagataatagttggtgacttttggtggtatgttgttattggttttagtcataacgcataacaagattttggtgtacaaaattcatcagattggggtagaccagtctctacatgcgtatagtataggcgtaaagtctaatagcttctttctttgtatccttgtttattttaagttagctgatatatctacactattatatactacatactccctccgttacttatccaagtcaactaattaactgcacccatcatgccagccgcacacgattaaccggacactatacacatgtgattaacgtgattcgcactagggaaatcaatcggaccagggaaccaaccgcaccagctacgtgcgattaatgagattgatctgcccatcacacgcaacgcgcaacaccaaatattcagtcattcaagatttacttt

SEQ ID NO: 149950 - DNA, 580 bp, Zea Mays
ttctggaatcaatactatctgaaacttgttcgctaatttcattcatatttcacaaactggtacaaacatcacaatagcaccagaatatcagtctagaattgatccacaatcatcatactcgatattgatccacaatctcaatctagaattgtttcctatctaatcagaatacatgtctctgtcgccctcctatgaagcaggtagagagcttcgtggctgtgctctcttgaggaagtcgagatctcacaacggaccgtcgctcgagcactccatggaggcagtctgcagatgaacgaagaacagtcatgcctgctttcggggggaaaaaaaaagaacagacatgccgacggtactgcgagacatggctgtcgctcttggacgggtcccgcagcatccgacatggtgatgccagaccgctatggcagcagttggcgacggggaagggaccttgggcggaagacgacggttaaggcgaaggagcgagtcgcctgcttgccatggcgatggaagcggcggccggcagaggatctcatcccgtagaagcgaaggaccgatgggaattagatgggccacctgtccc

SEQ ID NO: 149951 - DNA, 802 bp, Zea Mays
tattacccgatggcagatataatatttcgtaaataacccgttgaccctgtctatccctacaactttctttctatgttgattccctgtacagtagggttctactgttttccctgtaaaaataaaatattgatatttcaacagcagatgcgatatggagttttgttaatttttggctgttagatccatatgtcatactactttcttatttttaacgattagcagattttggccaattttttccccaaaaaacaaagccttatgccatgatgctgtttactgttgacagcttaagataattgagatacttctgaaaggatgcaataatgcagaggattatgtacaaaagtgcaagaggttgataatccaaaatgcacctatcataatggagaatattaagaagttcctcgagaagagagatttttgcaattctatccatgtctgtggaagtaaatccgttcgcgctggatcacaagtcctcagaagcctttcttcagcctgaagccctgaacttgcacggattgttatgatcatgcaacagatattagtgtaaaaacaagtccaggcgccgctatgtgagtcccgtgtgacatcgactgtacagatttggctgtgtacatgttaaaggaaaacacaactgaggcacaaacctcttctgtttacgggtcatgagcagggtgtgtatttgaactgtatatcattataccttggattggatgtcatgttgctctatatttatacgtaaccgagttttgtaactttggagaagtaatgtatatgatgccaaagcttgatcttccatgaa

SEQ ID NO: 149952 - DNA, 1275 bp, Zea Mays
tagaaatagaaattatggtaacaccctaatacattccctcgctcgcggccttgtacagcatactgtccttgcggcgctgctggctccgccgggtgttgggtcaacgttctcccgtccccccgagcgcagtctcgcgtggttctcccgtcccccgaggcccgagcgtagtctctctcttttgccgtggttctccagtcctccctcatccgctctctttctttctctcgtggcgagtggtaacgacgtcaggtgctcaggtcttgttcaggcccttcgccggcgacgagcacacagcaaatggatacaggagctcaagctatgttcatcatcagtcttgtgctctggtgtactacaagctttgccttggatgatgctgctgctacaaggattccaattgtgggcacattacctctgtcaatgaaagaaaatccgcaattatgccaactttgtgaggagtttgcatcagaggccctcttctatttaaatgaaaatgagacccagactgaaatcattgatacactacaccaagcttgttcaaagtttggctcttttaagctggagtgcacgaggttggtggattattatgtccctcttttcttcacaaaaattgcttcattaagccctgaagaattttgtgcatcagcaagtttttgtgggggggtaacattcattcgtcttccaagacatgaagatacttgcaccctttgccatgaggttgtcgatgaggttgttactaatcttgaagatccaggcatggagcttaagataattgagatacttctgaaaggatgcaataatgcagaggattatgtacaaaagtgcaagaggttgataatccaaaatgcacctatcataatggagaatattaagaagttcctcgagaagagagatttttgcaattctatccatgtctgtggaagtaaatccgttcgcgctggatcacaagtcctcagaagcctttcttcagcctgaagccctgaacttgcacggattgttatgatcatgcaacagatattagtgtaaaaacaagtccaggcgccgctatgtgagtcccgtgtgacatcgactgtacagatttggctgtgtacatgttaaaggaaaacacaactgaggcacaaacctcttctgtttacgggtcatgagcagggtgtgtatttgaactgtatatcattataccttggattggatgtcatgttgctctatatttatacgtaaccgagttttgtaactttggagaagtaatgtatatgatgccaaagcttgatcttccatgaa

SEQ ID NO: 149953 - DNA, 208 bp, Zea Mays
cacaacctttcctttttcaccaaatcacaaaaagaaaatgacggtagatggtccctatggccatgtagaaaacgcaacttgaactgaacgagagatatcacacgcaatcaggacaacacatgaacattccaaggcacagttaatatgtatcacatacaaaccataacgctaaactttttgtgcacgcacctaaccaaccactattatc

SEQ ID NO: 149954 - DNA, 1025 bp, Zea Mays
tatataggatccacatattttttggcttcagcacgaacaaaaagaaccacgtacagtacttagggtccatcctactacaaacactacacaccttactatataggagtattgttcatctccatatgtcatgtatgtaaaggacaaaaccctcatcaatctcgtaattaagtgtacaagactaggtcgcgcactgcacgaccatagcagagcacactaccaagatcgatagatgtgaccaagaccaaagaactggaagatccaacccaacttcgttttaatcaatcatcaggaggcagcggtaccttgccctcctccgaccacggacgctagaagcccgtgcagcctgccggtgcccctgcgggagtgccgggtccggaagcaaagcgtggacgtcggcgacgccgtcgcggccgcaccagcatcttcgtcgtcgttgtcgtcgtctccccttgagttggacgagaaggacgaccgcgggctcgcgagcagcagccggttcccccggctccgggcacactgcacctgcgcgctctctctgggcggcgccggcgccggcgccgacggtgaccgcgacggcacgggcatggtatggctcctgcgcagcttggggaggatgctctgcacgaagctgctaggcggcttggacgagagcagcttcttggaggactgggatttggcgaacttggtcttggccgcgcccttgtagtaggacggcggcggggtgaggggcgggagggtggcgctggacatggcgtgcttgggagtgcccggcgcggactcccacatgaatggcaccgaccccgcggaggcgacgccgtagtagacgcggaaggaggggttggagacggaggaggcgtcgtccttgcagaggaagcgccggttggctgtactcgccctctcctcctccatggcggccaggagcgtcttcgtctggcttgagctcttggggaccattctcgtcctgtcttccttgtccagcattgtcgtccggatcttgtcgagagaatgacgatgtttgacaaagt

SEQ ID NO: 149955 - DNA, 1060 bp, Zea Mays
cagctatattgtcacatgttgacacgatttgcagatatataggatccacatattttttggcttcagcacgaacaaaaagaaccacgtacagtacttagggtccatcctactacaaacactacacaccttactatataggagtattgttcatctccatatgtcatgtatgtaaaggacaaaaccctcatcaatctcgtaattaagtgtacaagactaggtcgcgcactgcacgaccatagcagagcacactaccaagatcgatagatgtgaccaagaccaaagaactggaagatccaacccaacttcgttttaatcaatcatcaggaggcagcggtaccttgccctcctccgaccacggacgctagaagcccgtgcagcctgccggtgcccctgcgggagtgccgggtccggaagcaaagcgtggacgtcggcgacgccgtcgcggccgcaccagcatcttcgtcgtcgttgtcgtcgtctccccttgagttggacgagaaggacgaccgcgggctcgcgagcagcagccggttcccccggctccgggcacactgcacctgcgcgctctctctgggcggcgccggcgccggcgccgacggtgaccgcgacggcacgggcatggtatggctcctgcgcagcttggggaggatgctctgcacgaagctgctaggcggcttggacgagagcagcttcttggaggactgggatttggcgaacttggtcttggccgcgcccttgtagtaggacggcggcggggtgaggggcgggagggtggcgctggacatggcgtgcttgggagtgcccggcgcggactcccacatgaatggcaccgaccccgcggaggcgacgccgtagtagacgcggaaggaggggttggagacggaggaggcgtcgtccttgcagaggaagcgccggttggctgtactcgccctctcctcctccatggcggccaggagcgtcttcgtctggcttgagctcttggggaccattctcgtcctgtcttccttgtccagcattgtcgtccggatcttgtcgagagaatgacgatgtttgacaaagt

SEQ ID NO: 149956 - DNA, 1107 bp, Zea Mays
ccacactttccaaaccctacgcaccaccattatattgatcgatctatgctgctgctggtcgcaaccgcaccgcagcttcacgggccgccctctcccaaaaatcgagcaccagagtgtttcaattccttctccatatattgttggtgttagtttcctgctttccctagtccctcgcaatcaacagatacctcatggacgatcaggagaacgagcacgagaagcatgctgatgctgggactgacgtcgacgaagaagaggaggacgaagatggccacaagcgtgtcgtcgttcttggaccccaagtccccctcaaggaacagctcgagcttgacaaggatgatgagagcctgaggaggtggaaggagcaactcctcgggcaagtcgacaccgagcagctcggagagactgcggagccggaggtgaaggtgctcaacctgaccatcctgtcaccggggcggccagatctagtgctaccgatcccgttcgaggccgacgacaagggctatgcgtttacgctcaaggatggcagcctctatagcttccgtttctccttcaccgtctccaacaacatcgtttcaggcctcaagtacaccaacacggtctggaagactggagtcaaagtggagaaccagaaaatgatgctagggacattcagtccccagcaagagccgtacgtttacgagggtgaagaagagaccacacctgctggcatcttcgcaagaggttcctattctgctaagctaaagttttttgatgatgatggcaagtgttatttggagacgagttactactttgagattagaaaagagtggccagggccagcaacctaatgatatggagcggcggtgttggattcgttaaatgcatacatgttagaactcttagttaagacgagcagaagatctattatattctactgcttcaattctagctagaggatgattgcttcacatgcatatcgtcatgtttaaccaccgtacgtataatttgtttcgagtccattattctacgctatttgcgtattattattgttaattcacattatagaatcagtcgtgtatggagattcaaagatatatttatatacttatgagcttcttattgaac

SEQ ID NO: 149957 - DNA, 2213 bp, Zea Mays
actcccgtccgcttctcccctctcctcgactcctcctcacgtcacgcaccccatctcttctctccccctctcgtctcgtccagtcgtcccccactctacccagctgccctgctctgcgtcgctcgccatggcgtcctccacggggagcttggagcacggggggttcacgttcacgccgccgcccttcatcacctccttcaccgagctgctctccagcgcaggggacatgctaggagccggcgccgatcaggagcggtcgtcgccgagggggctgttccaccgcggcgccaggggcgtgcccaagttcaagtcggcgcagcctcccagcctgcccatctcgccgccgcccatgtcgccttcctcctacttcgccatcccgccggggctcagccccgccgagctgctcgactcgcccgtcctgctccactcgtcctccaacatcctggcgtctcccaccaccggcgccatcccggcgcagaggttcgactggaagaaggccgccgacctgatcgcgtctcagtctcagcaagacggcgacagccgggctgccgccggcggcttcgacgacttctccttccacacggctacctccaacgccgtgcgcgcgcacacgacgacgacgtccttaccttccttcgaggaggagcagcagcagcaagtcgaaaaagccgccgtcccgtcgagcaacagggcgagcggcggcgggaacggcaacactaagctggaggacgggtacaactggcgcaagtacgggcagaagcaggtgaaggggagcgagaacccgcgcagctactacaagtgcacgtaccacagctgctccatgaagaagaaggtggagagggccctggccgacggccgcatcacgcagatcgtgtacaagggcgcgcacaaccaccccaagccgctgtccacgcgccgcaactcatccggcggcggtgcggcggaggagctgcaggccggcaacagcagcctctcggccgtagcggcggccggctgtactggaccggagcactccggcgccaccgccgagaactcgtctgtcaccttcggcgacgacgaggcagagaacgggtcgcagcggagcgacggcgacgagcccgacgccaagcgctggtacgtacgtgatcccgactcccgagcgagcgagattcattattcgctacccgcggttcacaagttgagcgtgtattactactgtttcctcgtgttcctgcaactcatgtatatatgtctgcttgatcaggaagcaggaggacggcgagaacgagggcagctctgcaggcggcggcggcaagccggtccgcgagccccggctggtggtccagacgatgagcgacatcgacatcctggacgacgggttccggtggcgcaagtacgggcagaaggtggtgaaggggaacccgaacccgcggagctactacaagtgcaccacggcggggtgcccggtgcggaagcacgtggagcgcgcgtcccacgacaagcgcgccgtgatcaccacgtacgagggcaagcacaaccacgacgtgcccgtgggccgcggcgccgccagccgagctgctgctgctgctgcggcggcgggttccggggccttgatggccaccggcggcggccagctcggctatcatcatcagcagcagcagcagccatacaccctggagatgctgagcagcggatcgtacggcggcggcggcggctacgcggccgccaaggacgagccgcgggacgacctgttcgtcgactcgctcctctgctagcgtcggggacgcggagtcggtcggtccacccaatctcgctgcggcgggcgtctgtagagcctgcgttacgtgtacggcgcgtgtacgtatacggccgtagcgtacatgctcgcctttgcactcagatgcacaatataacacacagtcacacacacacacacacacacacgacacacgctgtatacactggatcctaggtgtttttttagcttagctaggaatgcaaatttcttgattcgttggagggttttttttctagcacgcggcgcggccggtgcccatctgtctcgcaccgtcgcacgcctcttcatacactctctcctgtactcggctactagtgctactgcatgtagacatgtagtgaatgtgaagtacaaagaatacaatacaacggagtatagtagtgtagtcttgtatgcatatgtaaactactatactctgttttacgaaatgggaaaa

SEQ ID NO: 149958 - DNA, 2243 bp, Zea Mays
agcacgttcacgttccgcctcagagccccactgacattgtggtcccatctgatgtggtccccgtcagtaagtgacgccattgcttgagaagcgcccccaccctagacgctgctggcactaccggccgctacttaaatggcagcccagccgccgagcaaccactcccgtccgcttctcccctctcctcgactcctcctcacgtcacgcaccccatctcttctctccccctctcgtctcgtccagtcgtcccccactctacccagctgccctgctctgcgtcgctcgccatggcgtcctccacggggagcttggagcacggggggttcacgttcacgccgccgcccttcatcacctccttcaccgagctgctctccagcgcaggggacatgctaggagccggcgccgatcaggagcggtcgtcgccgagggggctgttccaccgcggcgccaggggcgtgcccaagttcaagtcggcgcagcctcccagcctgcccatctcgccgccgcccatgtcgccttcctcctacttcgccatcccgccggggctcagccccgccgagctgctcgactcgcccgtcctgctccactcgtcctccaacatcctggcgtctcccaccaccggcgccatcccggcgcagaggttcgactggaagaaggccgccgacctgatcgcgtctcagtctcagcaagacggcgacagccgggctgccgccggcggcttcgacgacttctccttccacacggctacctccaacgccgtgcgcgcgcacacgacgacgacgtccttaccttccttcgaggaggagcagcagcagcaagtcgaaaaagccgccgtcccgtcgagcaacagggcgagcggcggcgggaacggcaacactaagctggaggacgggtacaactggcgcaagtacgggcagaagcaggtgaaggggagcgagaacccgcgcagctactacaagtgcacgtaccacagctgctccatgaagaagaaggtggagagggccctggccgacggccgcatcacgcagatcgtgtacaagggcgcgcacaaccaccccaagccgctgtccacgcgccgcaactcatccggcggcggtgcggcggaggagctgcaggccggcaacagcagcctctcggccgtagcggcggccggctgtactggaccggagcactccggcgccaccgccgagaactcgtctgtcaccttcggcgacgacgaggcagagaacgggtcgcagcggagcgacggcgacgagcccgacgccaagcgctggaagcaggaggacggcgagaacgagggcagctctgcaggcggcggcggcaagccggtccgcgagccccggctggtggtccagacgatgagcgacatcgacatcctggacgacgggttccggtggcgcaagtacgggcagaaggtggtgaaggggaacccgaacccgcggagctactacaagtgcaccacggcggggtgcccggtgcggaagcacgtggagcgcgcgtcccacgacaagcgcgccgtgatcaccacgtacgagggcaagcacaaccacgacgtgcccgtgggccgcggcgccgccagccgagctgctgctgctgctgcggcggcgggttccggggccttgatggccaccggcggcggccagctcggctatcatcatcagcagcagcagcagccatacaccctggagatgctgagcagcggatcgtacggcggcggcggcggctacgcggccgccaaggacgagccgcgggacgacctgttcgtcgactcgctcctctgctagcgtcggggacgcggagtcggtcggtccacccaatctcgctgcggcgggcgtctgtagagcctgcgttacgtgtacggcgcgtgtacgtatacggccgtagcgtacatgctcgcctttgcactcagatgcacaatataacacacagtcacacacacacacacacacacacgacacacgctgtatacactggatcctaggtgtttttttagcttagctaggaatgcaaatttcttgattcgttggagggttttttttctagcacgcggcgcggccggtgcccatctgtctcgcaccgtcgcacgcctcttcatacactctctcctgtactcggctactagtgctactgcatgtagacatgtagtgaatgtgaagtacaaagaatacaatacaacggagtatagtagtgtagtcttgtatgcatatgtaaactactatactctgttttacgaaatgggaaaa

SEQ ID NO: 149959 - DNA, 2236 bp, Zea Mays
agcacgttcacgttccgcctcagagccccactgacattgtggtcccatctgatgtggtccccgtcagtaagtgacgccattgcttgagaagcgcccccaccctagacgctgctggcactaccggccgctacttaaatggcagcccagccgccgagcaaccactcccgtccgcttctcccctctcctcgactcctcctcacgtcacgcaccccatctcttctctccccctctcgtctcgtccagtcgtcccccactctacccagctgccctgctctgcgtcgctcgccatggcgtcctccacggggagcttggagcacggggggttcacgttcacgccgccgcccttcatcacctccttcaccgagctgctctccagcgcaggggacatgctaggagccggcgccgatcaggagcggtcgtcgccgagggggctgttccaccgcggcgccaggggcgtgcccaagttcaagtcggcgcagcctcccagcctgcccatctcgccgccgcccatgtcgccttcctcctacttcgccatcccgccggggctcagccccgccgagctgctcgactcgcccgtcctgctccactcgtcctccaacatcctggcgtctcccaccaccggcgccatcccggcgcagaggttcgactggaagaaggccgccgacctgatcgcgtctcagtctcagcaagacggcgacagccgggctgccgccggcggcttcgacgacttctccttccacacggctacctccaacgccgtgcgcgcgcacacgacgacgacgtccttaccttccttcgaggaggagcagcagcagcaagtcgaaaaagccgccgtcccgtcgagcaacagggcgagcggcggcgggaacggcaacactaagctggaggacgggtacaactggcgcaagtacgggcagaagcaggtgaaggggagcgagaacccgcgcagctactacaagtgcacgtaccacagctgctccatgaagaagaaggtggagagggccctggccgacggccgcatcacgcagatcgtgtacaagggcgcgcacaaccaccccaagccgctgtccacgcgccgcaactcatccggcggcggtgcggcggaggagctgcaggccggcaacagcagcctctcggccgtagcggcggccggctgtactggaccggagcactccggcgccaccgccgagaactcgtctgtcaccttcggcgacgacgaggcagagaacgggtcgcagcggagcgacggcgacgagcccgacgccaagcgctggaggacggcgagaacgagggcagctctgcaggcggcggcggcaagccggtccgcgagccccggctggtggtccagacgatgagcgacatcgacatcctggacgacgggttccggtggcgcaagtacgggcagaaggtggtgaaggggaacccgaacccgcggagctactacaagtgcaccacggcggggtgcccggtgcggaagcacgtggagcgcgcgtcccacgacaagcgcgccgtgatcaccacgtacgagggcaagcacaaccacgacgtgcccgtgggccgcggcgccgccagccgagctgctgctgctgctgcggcggcgggttccggggccttgatggccaccggcggcggccagctcggctatcatcatcagcagcagcagcagccatacaccctggagatgctgagcagcggatcgtacggcggcggcggcggctacgcggccgccaaggacgagccgcgggacgacctgttcgtcgactcgctcctctgctagcgtcggggacgcggagtcggtcggtccacccaatctcgctgcggcgggcgtctgtagagcctgcgttacgtgtacggcgcgtgtacgtatacggccgtagcgtacatgctcgcctttgcactcagatgcacaatataacacacagtcacacacacacacacacacacacgacacacgctgtatacactggatcctaggtgtttttttagcttagctaggaatgcaaatttcttgattcgttggagggttttttttctagcacgcggcgcggccggtgcccatctgtctcgcaccgtcgcacgcctcttcatacactctctcctgtactcggctactagtgctactgcatgtagacatgtagtgaatgtgaagtacaaagaatacaatacaacggagtatagtagtgtagtcttgtatgcatatgtaaactactatactctgttttacgaaatgggaaaa

SEQ ID NO: 149960 - DNA, 601 bp, Zea Mays
caacaacaacaacaaagcctttttgtcccaagcacgttggggtaggctagagatgaaaccccgtatgaaaacctcagagctcaacccccaaagaaaaaaaagggaaacaaaggcaaaggagaaccgaaaaacgacgaaacggggaaacacataaaagagataaaacccacaagaaccagcaagatctaaatgggcacaagaaaaggtcaaacgattaaagaggaaaagcgaaactataaatcaaggttctggcacgtgaattgcacacttccaccccttcctatccacggcgagctctttatcaatattccactccttcaggtccctcttcacagcctctgtccacgtcaaggttggtcgacctctacctctcttcacattcttgggacgcctaattattccgatatgcactggtgcctcctcagatcttcgttggatatgtccaaaccatctcaaacgatgttgcataagcttctcctcaattggcgccactcctaccctctctcgtatatcatcattccggactcggtctctccttgtgtggccacatatccagcgcaacatacgcatctctgccacgcatagttgttggacatgtcgt

SEQ ID NO: 149961 - DNA, 92 bp, Zea Mays
ttctgttaaaaaagtgtccagactgtcgaacagaggagtacctgatcctaacgcaacgcaacgcaacgcagcgcacgtaattctgcagccgg

SEQ ID NO: 149962 - DNA, 1034 bp, Zea Mays
acacaaacaccccttgctcgccgcctatttgtattttccgcgcttctctccttcgctcttttcttttttctccaaaccatcgtcggctgcggcactcctgaagggaggaagccccaagcccttgccgccgcagctgccgcagccagcaacgaaccgtacataggcagggacgaagcgatggagggagccaatggagtcggtgggtcggagtccgagcggaagccgctgtcagaggtggtcggcgactgcgtccagcgctggttccaggacgcgtacaaggaggcgcgcaaaggagacatcgccaaccaggtgcttgtagcgcagatgttcttctcgggttatgggacccccaagaacgagtacaagggaaaacaatggatggatagagcatcaaggttcaggtcttccgctttgaaggttggcatgaaacgtccaggatacaatgcaagtgactcagactctgatgacgatgcaaatgatgacgccaaccaataacactcaattacaaattgagttattagttaggagattcacagggtaaggaagtttggcatacactccttttcacggtttctaatacatactcccctaacccttaaccccatccctaggaattttccttggtgctgggacttcagggtcgaattacttggtggtttatgcatttattagcactgtgtttgaattgtgactgtcacattgagcttatggtgattagatatcctggcctttgtcgttccgtgtgccactgttgcatggtctatagtgcaatggggttcgccaggtgtttaatgacaaaattgaatttatgttttaaggtaattacaaggttgtggttagtctagtgtcagtcccagcaacgcaacctgagtatgctgggactgctgctctcgattttgattcgcttgtgcgagccagcaatcaagtaaatcttgtaaacccatttggacgcttcaaagtacagtgtactcggtacctgcttgaaaaaacaaggggattatgatttgccagtgtttaattatatttattaatcc

SEQ ID NO: 149963 - DNA, 942 bp, Zea Mays
acacaaacaccccttgctcgccgcctatttgtattttccgcgcttctctccttcgctcttttcttttttctccaaaccatcgtcggctgcggcactcctgaagggaggaagccccaagcccttgccgccgcagctgccgcagccagcaacgaaccgtacataggcagggacgaagcgatggagggagccaatggagtcggtgggtcggagtccgagcggaagccgctgtcagaggtggtcggcgactgcgtccagcgctggttccaggacgcgtacaaggaggcgcgcaaaggagacatcgccaaccaggtgcttgtagcgcagatgttcttctcgggttatgggacccccaagaacgagtacaagggaaaacaatggatggatagagcatcaaggttcaggtcttccgctttgaaggttggcatgaaacgtccaggatacaatgcaagtgactcagactctgatgacgatgcaaatgatgacgccaaccaataacactcaattacaaattgagttattagttaggagattcacagggaattttccttggtgctgggacttcagggtcgaattacttggtggtttatgcatttattagcactgtgtttgaattgtgactgtcacattgagcttatggtgattagatatcctggcctttgtcgttccgtgtgccactgttgcatggtctatagtgcaatggggttcgccaggtgtttaatgacaaaattgaatttatgttttaaggtaattacaaggttgtggttagtctagtgtcagtcccagcaacgcaacctgagtatgctgggactgctgctctcgattttgattcgcttgtgcgagccagcaatcaagtaaatcttgtaaacccatttggacgcttcaaagtacagtgtactcggtacctgcttgaaaaaacaaggggattatgatttgccagtgttt

SEQ ID NO: 149964 - DNA, 1571 bp, Zea Mays
gtaccgcatcgtcgtcgtccccagccaacccaacccagcgcaccccaaacgaatccagccccacctcagccgcggcgcggacctcggaatctcagcgccggtgtgctcacggcaccgcagggcgcggcgtggccatggacatggacagggacagcgtggagtgcctctccctcccagacgctgccatggacgtggacaacgtcgacggccacccgcaccacggccatctcggtctcccgctccaccccgcccacctcccatcctctggtgccgggcgcgcgttccccaaggtgaatgccgggggcggcggagcgggcccggctgtagcgggagcggcgggcgcagcaggagcaggcggagggccgccggcgaccagcgtgcacgagctgctcgagtgccccgtctgcactaactccatgttcccgcccatccatcagtgtcaaaatggacatactttgtgttcgacatgcaaggccagggtgcacaaccggtgccctacatgcagacaagagcttggtgatatcaggtgcttagcattggaaaaagtagcagagtcacttgagcttccatgtaagtactgctctttaggttgcccagagatcttcccgtactacagcaagataaagcatgaagcacagtgcagcttcaggccatataactgcccctatgctggctctgaatgtgctgtggctggtgatattccattccttgttgcacatttgagggatgatcacaaagttgatatgcacagtggctgcacgttcaaccatagatacgtcaaatccaacccgcgagaggttgaaaatgccacctggatgctaacagtaagattaaactagctctgaattattctttatctgctgctccatctattttcatatgtgtggtgtatgaactaattactggtcctaaacatcatatatttaaaagtggagggattatctatttcctattgctgatcttgtgatccatgtttacaagtaaaatatgtgtattgtcaagtaatttgactggttgaatgttgcttttcggttcaggtattccattgttttgggcagtacttctgcctgcacttcgaggcattccagctcggaatggctccagtctatatggctttcctccgattcatgggtgatgagaatgaagcaaggaactatacatatagcctagaggttggtggtaatgggaggaaaatggtatgggaaggtactcctagaagcatccgtgacagccaccgcaaggtccgtgacagccatgatggcctcatcatccagaggaatatggcgctgttcttctctggtggtgacaggaaggagctgaagctgagggtgactgggcggatctggaaagagcagacgaaccccgatggagcctgcattcctaacctttgcagctgagcaagggagacgattgaaaagaagaagaaaaaaaagaaagaaaatattgtgttatttggctggcttttttaaaaaattgtcatgctatgttttcattatagcctgctgttaaaatattgtaccagtatgtagggtgtaaaatgctcttgtaaagtaattgtgtatatcgaattc

SEQ ID NO: 149965 - DNA, 1482 bp, Zea Mays
tcccgttcctattcccgggaggagacggtgtcgtctgtctctcgccgttctcgttcgtgccaatccaggcgaaacaaacggcgtgacgagagcggcagagcgtcagcgtccccccgcggccaccgtaccgcatcgtcgtcgtccccagccaacccaacccagcgcaccccaaacgaatccagccccacctcagccgcggcgcggacctcggaatctcagcgccggtgtgctcacggcaccgcagggcgcggcgtggccatggacatggacagggacagcgtggagtgcctctccctcccagacgctgccatggacgtggacaacgtcgacggccacccgcaccacggccatctcggtctcccgctccaccccgcccacctcccatcctctggtgccgggcgcgcgttccccaaggtgaatgccgggggcggcggagcgggcccggctgtagcgggagcggcgggcgcagcaggagcaggcggagggccgccggcgaccagcgtgcacgagctgctcgagtgccccgtctgcactaactccatgttcccgcccatccatcagtgtcaaaatggacatactttgtgttcgacatgcaaggccagggtgcacaaccggtgccctacatgcagacaagagcttggtgatatcaggtgcttagcattggaaaaagtagcagagtcacttgagcttccatgtaagtactgctctttaggttgcccagagatcttcccgtactacagcaagataaagcatgaagcacagtgcagcttcaggccatataactgcccctatgctggctctgaatgtgctgtggctggtgatattccattccttgttgcacatttgagggatgatcacaaagttgatatgcacagtggctgcacgttcaaccatagatacgtcaaatccaacccgcgagaggttgaaaatgccacctggatgctaacagtattccattgttttgggcagtacttctgcctgcacttcgaggcattccagctcggaatggctccagtctatatggctttcctccgattcatgggtgatgagaatgaagcaaggaactatacatatagcctagaggttggtggtaatgggaggaaaatggtatgggaaggtactcctagaagcatccgtgacagccaccgcaaggtccgtgacagccatgatggcctcatcatccagaggaatatggcgctgttcttctctggtggtgacaggaaggagctgaagctgagggtgactgggcggatctggaaagagcagacgaaccccgatggagcctgcattcctaacctttgcagctgagcaagggagacgattgaaaagaagaagaaaaaaaagaaagaaaatattgtgttatttggctggcttttttaaaaaattgtcatgctatgttttcattatagcctgctgttaaaatattgtaccagtatgtagggtgtaaaatgctcttgtaaagtaattgtgtatatcgaattc

SEQ ID NO: 149966 - DNA, 241 bp, Zea Mays
ttgctttccaaagttaccctcccacttattcccaatagcaaaaattgactcagactctactattctgatgcctgataatacatttgctgggtttcagagcagaatcttcagaatacagaagcaacacgtagataacaatgagagaatgagtacactttatctttagccaaactatctacccttgttatgagcaaggtccagaactatacaataaaagttctagacagcgtgagaagaccac

SEQ ID NO: 149967 - DNA, 3028 bp, Zea Mays
gccgtcgccttcttcttccccaaccctattacaaaccctggttcagacgacagtgccaatctccaactcatacccctattccagaccctgattcttccacaagggggcagttgtcggtgatggaggcgttcggcgggttcttcgtggacgagaaggcagcgcgggtggagaacatcttcctcgagttcctgaagcgattcaaggagtctgatggcgcgggggagccgttctacgaggcggagatggaggtgatgcggtcgcgggagtccactaccatgtacgtagactttgcgcacgtcatgcgcttcaacgacgtcctccagaaggccatctctgaggagtacctcaggtttgaaccgtacttgaggaatgcatgcaagaggtttgcgttggagcaccgggctggcgagaaccgtgccccgctcatctcagatgatagccccaacaaagatatcaacattgctttctataacatcccgatgctgaaaaaactgagagagcttgggacagccgaaattggtaagctcacatcagtaatgggtgttgtgacacggacaagtgaagtgcggcctgaactattgcaaggaaccttcaaatgtctcgactgtgggaatgttgtgaagaatgtggagcagcagttcaagtacactgagccgataatatgcgttaatgcaacatgccagaacagaacaaaatgggcccttcttcgtcaggaaagcaaattcacagattggcagcgggtcagaatgcaggagacatcaaaagagatacccgctgggtcacttcctcgttcccttgatgtcattctgcggcatgagattgttgagaaggccagagctggggacacggttatatttactggaactgttgttgcagttcctgatgttatggcactaacttcacctggcgaacgagcagagtgtcgcagggaagctcctcagcgaaaaaacggaggtgttcaagaaggtgtaaagggcttgaagtcccttggagttagggatctgtcttatcgccttgcctttgtagcaaattcagtgcaggtcgcagatggtaggagagaagtggacatcagggaacgggacacagatggtgatgacagtgagagacagaaattcacagaagaagaggaagatgaagttgttaggatgaggaacactcctgatttctttaataagatagttgatagcatatgtcctaccgtatttggtcatcaagaaattaagagggccgtgcttcttatgcttttgggtggtgttcataagataacacatgaagggatcaaccttagaggtgacatcaatgtctgtattgttggtgacccaagctgtgcaaagtctcagttcctaaaatatactgctggtattgttccaagatctgtttacacgtcagggaagtcatcatcagctgctggtctgacagcaactgttgctaaagaaccagagactggtgaattctgtattgaggctggtgccctgatgctagctgataatggtgtttgttgtatcgatgaatttgataaaatggacattaaggatcaggtcgctatacatgaagcaatggaacagcaaacaattagcattaccaaagcaggaatacaggcaactttgaatgcacgaacatcaattttagctgcagcaaatccgaccggaggccgttatgacaagtcaaaaccacttaagtacaatgttgcattgcccccagctattctttcaagatttgatctggtctacatcatgatcgatgaacctgatgaaaacactgactaccacattgctcatcacattgtaagagtccatcagaaacgtgaagaagcacttgcccctgcatttagcaccgcacaactgaagcgttatatttcttttgcaaaatctttgaaacctcagcttagttcagaagcaaagaaagttctggtggagtcgtatgttacgcttcgtaggggggacagtactcctggaactagggttgcttataggatgacagttcggcaattggaagcattgattcggctgtcagaagctattgctcgaagccatttagaaagagttgttctcccagctcatgtccgcctggcagttaaattgctcaagacatccatcatcagtgttgagtcaagtgaagttgatctctctgacttccaagatgctgaagatggaacaaatgtaccttctgagagtgacgccggacagccagctgaagaagatgctgctcctcagcagcagggtgcagaaaatgaccaagcagcggataatggtaagaagaaattggtaataactgaagaacacttccagagagttactcaagctttggttatgagactaaggcagcatgaagagtcagtcaagaaagatggagatggtttagctggcatgaagcaaggggatcttatcatctggtatgttgagcagcagaatgccaaaggggcatatagttctactgcagaggtgaaggaagaagtgaagtgtatcaaggccattatagagagacttatacagcgggaaggccatcttatagtcattgacgaaggtactgcagccgcagccgaagatggcagtggcgcaaggagaacatcagagagtagaatactggcagttaacccgaactatgttattgattagcaacggcatcttaacatgctgttaacccaagccagttgatgtggttagctaactgaagctatgattctggtgatgtgtccgttgtgctctagagttgttgtaccatctccgtcactggtgtgctcgttccaagggagcacatgatctccaaaactacatactacgtttagtgatgcaggataattagcatctgtagtcttactaattttgacccgtgtttccctagtgaattttcgtagcaacagctttgatttatcagtcactgagtgctgcaattttctatttgctttctcaagttcaccctttgttgatccatctagatgggatcagagaatagctgtgctaatttatgttacaatgtcgcagaacccatttatttatttgattgctttgtgaggaagtcagtttattaa

SEQ ID NO: 149968 - DNA, 1333 bp, Zea Mays
cagccggagaccatgtcccactcccctctccctcctccagtcttccaaaatatctccctgcgcttttccgagtccttttccctccaaggaacagaaacaaccggagcttttaccccacccgctttcccctccccgccaggaacaacagggctcctcgcaataattcgtccatccatggcgaagctcgtcaacaagctggtcgattcgttcgaccaccacgaggcgccggcgccggacgtcggctgcgtgcgcgccgtgctggccgagctcgtcctcaccttcctcttcgtcttcaccggcgtctccgcctccatggccgccggggccggcgggaagcccggggaggctatgccgatggcgacgctggcggcggtggctatcgcgcacgcgctggccgctggcgtcctggtgacggccggcttccacgtctccggcggccacctcaaccccgcggtgacggtggggatcttggttcgcggccacatcaccaagctccgggcgctgctgtacgtcgccgcccagctgctggcgtcctccctcgcctgcatcctcctccgctacctcagcggcggcatggtgaccccggtgcacgccctgggcgctggcatcagcccgatgcagggcctggtgatggaggtgatcctcaccttctcgctgctcttcgtcacctacgccatgatcctggacccgcggagccaggtccggaccatcggcccgctgctgacggggctcatagtcggcgccaacagcctcgccggcggcaacttcaccggcgcgtccatgaacccggcgcggtccttcggtcccgccatggccaccggggtctggaccaaccactgggtctactggatcggcccgctgctcggcgggtccctggccggcttcgtgtacgagtcgctgttcatggtgtacaagacgcacgagccgctgctcaatggagacatctgacgaccgtcgggcccccagggcagtgagcacggttcatgcttgttttctgtaaaatagttcgttacctacaagcatgatgcatatattgaccaaggtaattaataggagagggttgctgttaccctggtgggattgtgggatgtagaaattgttgctgggctttgcttttttttttacttttcctcccaaggaattttttaagagggctgggttctgtaaaggatttgtttaggctattagttagctatgtagtagaaaactagagaatgctatacgttggacgtgattttttttcacgtatattgttgtacgatatggtattttttatcttccggatgaaattggatgtacatagcataattttttttgaagcagtatttatgct

SEQ ID NO: 149969 - DNA, 952 bp, Zea Mays
cagccggagaccatgtcccactcccctctccctcctccagtcttccaaaatatctccctgcgcttttccgagtccttttccctccaaggaacagaaacaaccggagcttttaccccacccgctttcccctccccgccaggaacaacagggctcctcgcaataattcgtccatccatggcgaagctcgtcaacaagctggtcgattcgttcgaccaccacgaggcgccggcgccggacgtcggctgcgtgcgcgccgtgctggccgagctcgtcctcaccttcctcttcgtcttcaccggcgtctccgcctccatggccgccggggccggcgggaagcccggggaggctatgccgatggcgacgctggcggcggtggctatcgcgcacgcgctggccgctggcgtcctggtgacggccggcttccacgtctccggcggccacctcaaccccgcggtgacggtggggatcttggttcgcggccacatcaccaagctccgggcgctgctgtacgtcgccgcccagctgctggcgtcctccctcgcctgcatcctcctccgctacctcagcggcggcatggtacgtccacttccacccgcgccgatccatggatctcatctaggagtaccgcatttttttttttttttgctctgcgtgtgtaattacggctgtccttgatgattcgacgcggtcaaaaaggatgtgggggaaaattttggccggccatgcttgtctgtctcagatcaacttgggctgggctcgaatgggtgagagcctctgtgctggaagtaggaaaaaaaataaaactgaggtttttctgtctactgtttggtaaaaaaataactacaaactaacaaatgctccccacacaaggtatatgtggagcatcatgcttgacataagtctcgggcacaagctaaacatgacaaacttcgatatgtatgtgttaagttca

SEQ ID NO: 149970 - DNA, 119 bp, Zea Mays
gatctgtacgaaaaccgaaaaagtctactaacagctatgacttgtgagaagaattccttgcctcgtttcagcgtgtgaaacagaacagacgaagctgatattctgccgggaggcaatta

SEQ ID NO: 149971 - DNA, 1313 bp, Zea Mays
cacctgatcacccttcaaacaaatcactcttcgctccggctccgactcgcactctttccccttcccttcccttcccactcccaggctcccactctcaccccttccgcctacccacgcaaacggcacacgaactaacagccacctctcacgtcccccaccctctggttcatgtcctgctgctccccatgtcgcctccactcgagctcgactacataggcctctcgccgccggcggcagccgccgccgctgaaaacgacgaactgaagggtactgagctccgcctcgggctgccagggtccgggtcgccggaccgccgtgtcgtggctgccaccgcgaccaccctggacctgctcccggccaagggcgccaagcgcgggttttctgacgaggcgcccccgccatcgcctgttgccactgccggaaagggaaagaaggtggcagaagaggagtacgacgagaagaaggtggcagcgaccccgcagccggccgccaaagcacaggtggtgggatggccaccagtctgcaactaccgcaagaacacgatgactaccacccagctggagggcagcaaggaggatggtgatgccaagcagggtcaggggttcctgtacgtcaaggtcagcatggatggcgcgccgtacctcaggaagatcgacctcaagacttacaagaactacaaggacctgtcgaccgcgcttgagaagatgttcagtggcttcagtactggcaaggacggctcatctgagtaccgcaaggatggtgaatatgttctgacttacgaggacaaggatggagattggatgcttgtcggcgacgtaccatgggactgccacatcgtctttcgctccaattgtaggatgttcgccggctcctgccgcaggctcaggatcatgaaaggctcagatgcgattggactcgctccaagggcagccgataagtccaagaaccgcaactagaacggtggcttcctatccttacacagtccggtacgagggaggagatgcagtgacttgtagggatctgtacgaaaaccgaaaaagtctactaacagctatgacttgtgagaagaattctggcttatggtctgcactagaatggcttggtacatcgtctatggacaaaacacgctattcgattaattgttgttaattaagccttggggggggtacgagtgctattcatgtaaatggtttggtgcatcgtgtgctgctgctgcctgctgctgttactacgattgagctcccctataatactatgatttgaagagagatggcgatgtcatatgatcccttggaatcgggctttactgccta

SEQ ID NO: 149972 - DNA, 1283 bp, Zea Mays
cacctgatcacccttcaaacaaatcactcttcgctccggctccgactcgcactctttccccttcccttcccttcccactcccaggctcccactctcaccccttccgcctacccacgcaaacggcacacgaactaacagccacctctcacgtcccccaccctctggttcatgtcctgctgctccccatgtcgcctccactcgagctcgactacataggcctctcgccgccggcggcagccgccgccgctgaaaacgacgaactgaagggtactgagctccgcctcgggctgccagggtccgggtcgccggaccgccgtgtcgtggctgccaccgcgaccaccctggacctgctcccggccaagggcgccaagcgcgggttttctgacgaggcgcccccgccatcgcctgttgccactgccggaaagggaaagaaggtggcagaagaggagtacgacgagaagaaggtggcagcgaccccgcagccggccgccaaagcacaggtggtgggatggccaccagtctgcaactaccgcaagaacacgatgactaccacccagctggagggcagcaaggaggatggtgatgccaagcagggtcaggggttcctgtacgtcaaggtcagcatggatggcgcgccgtacctcaggaagatcgacctcaagacttacaagaactacaaggacctgtcgaccgcgcttgagaagatgttcagtggcttcagtactggcaaggacggctcatctgagtaccgcaaggatggtgaatatgttctgacttacgaggacaaggatggagattggatgcttgtcggcgacgtaccatgggagatgttcgccggctcctgccgcaggctcaggatcatgaaaggctcagatgcgattggactcgctccaagggcagccgataagtccaagaaccgcaactagaacggtggcttcctatccttacacagtccggtacgagggaggagatgcagtgacttgtagggatctgtacgaaaaccgaaaaagtctactaacagctatgacttgtgagaagaattctggcttatggtctgcactagaatggcttggtacatcgtctatggacaaaacacgctattcgattaattgttgttaattaagccttggggggggtacgagtgctattcatgtaaatggtttggtgcatcgtgtgctgctgctgcctgctgctgttactacgattgagctcccctataatactatgatttgaagagagatggcgatgtcatatgatcccttggaatcgggctttactgccta

SEQ ID NO: 149973 - DNA, 1712 bp, Zea Mays
agggaagcttcacctgatcacccttcaaacaaatcactcttcgctccggctccgactcgcactctttccccttcccttcccttcccactcccaggctcccactctcaccccttccgcctacccacgcaaacggcacacgaactaacagccacctctcacgtcccccaccctctggttcatgtcctgctgctccccatgtcgcctccactcgagctcgactacataggcctctcgccgccggcggcagccgccgccgctgaaaacgacgaactgaagggtactgagctccgcctcgggctgccagggtccgggtcgccggaccgccgtgtcgtggctgccaccgcgaccaccctggacctgctcccggccaagggcgccaagcgcgggttttctgacgaggcgcccccgccatcgcctgttgccactgccggaaagggaaagaaggtggcagaagaggagtacgacgagaagaaggtggcagcgaccccgcagccggccgccaaagcacaggtggtgggatggccaccagtctgcaactaccgcaagaacacgatgactaccacccagctggagggcagcaaggaggatggtgatgccaagcagggtcaggggttcctgtacgtcaaggtcagcatggatggcgcgccgtacctcaggaagatcgacctcaagacttacaagaactacaaggacctgtcgaccgcgcttgagaagatgttcagtggcttcagtactggcaaggacggctcatctgagtaccgcaaggatggtgaatatgttctgacttacgaggacaaggatggagattggatgcttgtcggcgacgtaccatgggagtgagttacacccatctgtcttaattaaaacaatggaattggaactaaattaatcaccgattagggcatgtacagtgggtgtcttgagttatgtcttcgagtgtgtttaggggggtgaatgtaaaaaaactcaagatatgtatcttgacgaagacacagtgtcttagctctatgttcgagacatgagactagctgattggtcactttaatttattgaatgctctgattggtacaattaatatggtaagacacatgttttagacacgtccactgtattatgttgtgttttaggtgtgtcttatacttggagtaccgtgcaacagtgtctaggttgtacatgcccttaggtttcgtggctcattttttttctcaactaaatacatgtttagctgccacatcgtctttcgctccaattgtaggatgttcgccggctcctgccgcaggctcaggatcatgaaaggctcagatgcgattggactcgctccaagggcagccgataagtccaagaaccgcaactagaacggtggcttcctatccttacacagtccggtacgagggaggagatgcagtgacttgtagggatctgtacgaaaaccgaaaaagtctactaacagctatgacttgtgagaagaattctggcttatggtctgcactagaatggcttggtacatcgtctatggacaaaacacgctattcgattaattgttgttaattaagccttggggggggtacgagtgctattcatgtaaatggtttggtgcatcgtgtgctgctgctgcctgctgctgttactacgattgagctcccctataatactatgatttgaagagagatggcgatgtcatatgatcccttggaatcgggctttactgccta

SEQ ID NO: 149974 - DNA, 1231 bp, Zea Mays
agggaagcttcacctgatcacccttcaaacaaatcactcttcgctccggctccgactcgcactctttccccttcccttcccttcccactcccaggctcccactctcaccccttccgcctacccacgcaaacggcacacgaactaacagccacctctcacgtcccccaccctctggttcatgtcctgctgctccccatgtcgcctccactcgagctcgactacataggcctctcgccgccggcggcagccgccgccgctgaaaacgacgaactgaagggtactgagctccgcctcgggctgccagggtccgggtcgccggaccgccgtgtcgtggctgccaccgcgaccaccctggacctgctcccggccaagggcgccaagcgcgggttttctgacgaggcgcccccgccatcgcctgttgccactgccggaaagggaaagaaggtggcagaagaggagtacgacgagaagaaggtggcagcgaccccgcagccggccgccaaagcacaggtggtgggatggccaccagtctgcaactaccgcaagaacacgatgactaccacccagctggagggcagcaaggaggatggtgatgccaagcagggtcaggggttcctgtacgtcaaggtcagcatggatggcgcgccgtacctcaggaagatcgacctcaagacttacaagaactacaaggacctgtcgaccgcgcttgagaagatgttcagtggcttcagtactggcaaggacggctcatctgagtaccgcaaggatggtgaatatgttctgacttacgaggacaaggatggagattggatgcttgtcggcgacgtaccatgggactccaagggcagccgataagtccaagaaccgcaactagaacggtggcttcctatccttacacagtccggtacgagggaggagatgcagtgacttgtagggatctgtacgaaaaccgaaaaagtctactaacagctatgacttgtgagaagaattctggcttatggtctgcactagaatggcttggtacatcgtctatggacaaaacacgctattcgattaattgttgttaattaagccttggggggggtacgagtgctattcatgtaaatggtttggtgcatcgtgtgctgctgctgcctgctgctgttactacgattgagctcccctataatactatgatttgaagagagatggcgatgtcatatgatcccttggaatcgggctttactgccta

SEQ ID NO: 149975 - DNA, 1598 bp, Zea Mays
caaattctctactttcgaaaatgcgctctttcaatttatctttcagaatccttgctttgtttttcactttttcttgcttgctcaagctcttctcatcttcttctctgctctccctgctttgtttttgttgtattttgtacaaaacattttgatccgtcattatcttgctcaaattctgtaactttcatcccaaagttcgccagaattcgtttcttttttattttgttaccagtagagcatctcctgatctacctcttcgtcgtgtttggtaaagactattgagctcaggtgtgttgcgttgtgcagagcacaggtggtgggatggccaccagtctgcaactaccgcaagaacacgatgactaccacccagctggagggcagcaaggaggatggtgatgccaagcagggtcaggggttcctgtacgtcaaggtcagcatggatggcgcgccgtacctcaggaagatcgacctcaagacttacaagaactacaaggacctgtcgaccgcgcttgagaagatgttcagtggcttcagtactggcaaggacggctcatctgagtaccgcaaggatggtgaatatgttctgacttacgaggacaaggatggagattggatgcttgtcggcgacgtaccatgggagtgagttacacccatctgtcttaattaaaacaatggaattggaactaaattaatcaccgattagggcatgtacagtgggtgtcttgagttatgtcttcgagtgtgtttaggggggtgaatgtaaaaaaactcaagatatgtatcttgacgaagacacagtgtcttagctctatgttcgagacatgagactagctgattggtcactttaatttattgaatgctctgattggtacaattaatatggtaagacacatgttttagacacgtccactgtattatgttgtgttttaggtgtgtcttatacttggagtaccgtgcaacagtgtctaggttgtacatgcccttaggtttcgtggctcattttttttctcaactaaatacatgtttagctgccacatcgtctttcgctccaattgtaggatgttcgccggctcctgccgcaggctcaggatcatgaaaggctcagatgcgattggactcggtatgtttgtgctcctgttatgtctagtgtatcgtcgcgctaatcatgttgtcttggttgtttggtggaaacggtgggatcgaagtacgttctattgtcggttgtacatgatacaatttttgttaaggagttcctgtcccatggtcctggtccctgcatggctgcatcactggtggtagttctcttggctccaagggcagccgataagtccaagaaccgcaactagaacggtggcttcctatccttacacagtccggtacgagggaggagatgcagtgacttgtagggatctgtacgaaaaccgaaaaagtctactaacagctatgacttgtgagaagaattctggcttatggtctgcactagaatggcttggtacatcgtctatggacaaaacacgctattcgattaattgttgttaattaagccttggggggggtacgagtgctattcatgtaaatggtttggtgcatcgtgtgct

SEQ ID NO: 149976 - DNA, 684 bp, Zea Mays
gttttggcacttgataagcgctatcttgatccacgccgttcagtgaacccgacacaacaagaaaaagaagagggcattataccattaacagattctttgcctataatacctcagtcctttgtgacgcactctcaccaagtggaggccctgcgagggatcgtttctattcctgcgaagctggagtccacgactcttgttttcacatacggcgtcgatctgttctacacccagcttgccccgtcaaggacctacgattccctcaccgacgaattcagctacgcgctgcttctaatcacgatcgcagtcctggttgctgccatcatcgtcacatggatttggtccgagaagaaggagttgggggacaagtggagatctttaaactttaatgaagtgctggtatgtcactgtggcgtgcaatcccgtctagcttgtctgaggttctttcatgtcatgccaaccctaaaggtggaagtgggcgttcaggtcgcccatgcaagagtcccacccaggtcagggttctttggtagagggtgtgagatgtctgccatgatcgcgagaggtgagcgtcgtgcatcagcatcatcagctagctgtggtgccggcgcgttacctaccggagggttgcctttcgcagctgtgctgctgggtgcgccagccaaagtgggtgatgtgaggccgacttga

SEQ ID NO: 149977 - DNA, 2767 bp, Zea Mays
cataacttccaagtcccaaataaactcctcggtgactcgccccaacaccaaacagtaaacgacgcttccctccgccgccgtcagatcggagctcgactccgtgccccgcttctccgccgcgatggcggcgccaccgcgccgctccctccttgtccttctctccgggctcctagtcttcgcctcccttgttgccctcaccacagccatctacgaggaccaggtcggcctcgcggactggcatcagaagtacattggcaaagtaaagcaagcagtttaccacagccagaagagtggaaggagacgagttgtggtcttgacagaggaaaatgtgatctcgtctcttgatctacgttctggagatatattctggcgacatgtcattgacaagaatgaccccttggatcagcttggtctatcacttggaaaatatgttctaactctttcttcggggggaactatattaagggcatggaatcttccagatggactgatgatctgggaaactaaccttcgaacttccacagcatcgaactcacagttgcatgttatgtcaaacaataaagcggccagggacaacttagttttagtttcagctgggcgatggatttatgctgtatcaagcattgatggggcaatttcatgggaaaaggagttttctcttgatgacttggaaatcaagcggattctccaatcacctgaaaatgatgttgtgtatgctttaggacttgctggttcctcgaagctagctttgtatcacttgagtgctaaaactggagagatactaaaagatatccaagagtcattccctggtggattatgtggtaaaacagtacttggttctgataatgtgtttgtagcattagataaggccagatcaagtctgttacttattgaattcaagggtgagagaattagctacaacaaggtgctggtttcagatcttgttcaagacttatcaggatcatttgagcttcaatctttgtccagtgacatcatatctttgcaaacgtcatcttctatttccctcctaaagctcaaaggtaccgatggattggaagtacttcagagatttgaccagccagctgcagtgagtgattccttgccaatcacagaaaaagaaaaagcttttgctgtcgtgcaacatttgggttccgaaattgagtttatcgtaaaatttacaagtgacctaagcagtgagattattagagaaaaggttaatatagaccaaaataagggcaacgttgagagggtcttcttgaatagttatattcgaactgacaagtctcatggttttcgagctttggttgtaatggaggatcattcactcttgttaattcaacaaggtgaggttgtttggagcagagacgatgggctggcttcaattgttgatgtaacaacatcagaattgcctgttgagaaggatggtgtatcagttgccggtgtggaacacaatctctttgagtggcttaagggacacatgctgaaactcaaaggaactctaatgcttgctaatgctgatgaagttgctgcaatccaagcattgagactaaagagctctgagaaaaataagatgacaagagaccataatggatttcgcaaactccttgttgtattgacaaaggctggcaaagtgatgactctgcacactggagatggacgcgttatctggtcaaaattgctgccatctcttcgtgcctccagatttggtggagtgccttctgcattaaggatataccaatggcaggtcccgcatcacagtgtgatgcgggaaaacccatctgtacttgttgttggtagaactggagcagaatcttcagctcctggcgtattctctattcttgattcatattctggagaagaacttaactctatgaaacttgaccattctgttttccaaattatccccttaacactgaaggattcatcagagcagcgactttatctgattcttgattccaattccaatgctcatttatacccgaaatctgcagacaccctcaatatatttcttcatgaaatgtcaaacctgtatttctactctgtagatattcaagcaaatgttattaaagggtattcattacagaaatcatgtgatctcaattttggtgatgactactgcttcagtacgaaggagttatggtccatcatctttccttctgattctgaaaggattgttatctctgaaacgcgaaatatgaatgaggttgttcatacccaagctaagacaattggtgatcatgatgtgatgtacaagtacttgtcaaagaatttagtttttgttgctactttgtctcctaaagctgctggtgatattggatctgtgctacctgaagaagcttcacttgttgcatatcttattgatgcagtcactggacgcatacttcatcgtgtaactcatcatggtgcacaaggccctgtacatgcagtcttgagcgagaactgggttgtttatcattattttaatctgcgagctcacagatttgaaatggcggtgattgagatatatgatcaatctagggcggacaataaagatgtcatgaagctcatacttgggaagcataatctttcagcaccaattacatcatacgcccgccctgaggtggcagtaaaatcccagtcatactttttcacccattcagtaaaagcaatggcagttacacaaacggctaaggggatcacttccaagcagcttctgattggtactattggtgaccagattactgtaggcttcacatgcataggaatttccttgtttactgctccataa

SEQ ID NO: 149978 - DNA, 111 bp, Zea Mays
ttattttactcttcaaatttttatcatgttttcaatccttagtgtataaatatataatactaatcaatatattttttgtgtagactattttgaatatcgaggagctcgaac

SEQ ID NO: 149979 - DNA, 109 bp, Zea Mays
atgcaaactctctttgtatgtggtacacacgcttggccgggaaaaaatttctacgtactattcattcaacgcaccttaaaacataggtacatagctagctacacaatgc

SEQ ID NO: 149980 - DNA, 2145 bp, Zea Mays
atgtccgacgagccatacgatgccgatggcgacgtcggccgcttcctgcattgccctagcccggaggctcacatgttccccttgtctgaaccggagcgcactggagtggggctccgccataccaccgatcatgtccagggccaccagctggcggcgccacagacgctgagtaacgcggcgccggatttatcaggccgcggccagggcctcccggcaccaccacagacgctgacagtggcgccggatcttggcctccagcaggcgccggtaactggattccacggtcaccccgcgctccaccagtcgctgacgacgacagtggcgccggattttggcgtccacgcgctgacgaccaccgagttccagggacacccggcgctggagacgacgctaaacgcggcgcccgacttcggcctccctgtgccggcggcgcccatcgtcgacgccgctgccgggaactaccagccatcatccgccatgctggacgtagagtaccaccagccgatggccatagacaacaacgacatccagcagccgagtcatcaaatgctgccccccgagatgcatcgtcgtcatgcgtatggcggcggcggctttgcggaaccgacgacgatgctctgcgacggcggggccgacgaagcctctttggtcgagcgtaacatgcagatgctgctcgccgatggcggcgtcatcccccaccctcatcgcccgagcccttcgctgtacgaacagctcgtcaacaatgggcaggcagagcttgcggctgtcgtcaggaaccttgaacgcggggagagcagcggtggtgcggctgcgctcatcaacgacgtgtaccctgtgaaggaggacgtctggttccggccaatcgtccgcggccaactcgactgctcccggtgccactcagtccgggaggttgtgcgtcaagatgagaggtggaggatgcatttcacggtgcatgcatcggagccggggatggttttccagcatgcgatcgtcgatcgcatgtccatcggcgcagatggccatttccatacggaccaactgctgcaccatgatctccgcaggcgcaaccacgtgtgggttcacaattttatagcgcgcagcgtggagatgatgaaaagaaacagcgggcagatgcactctagctacgacagtgctgcggcggcggaatacaccaccaccaacgccgtcgtcacccccgcgccgccaccagcgagccaccaccaccatgcgcatatggggctcgaggaacaacaacaaaccaccgtagcggaagcagcagcgcctgaagcagtcacgcagcaggaacaggcagaaaacacggatgctcctagggttgcggaggcagcaatccctgtgcctgcggtgacggcgccgcaggaacaagaagccaccgatgctcctgcagagggggctgaacgagcagctgcccctcgatctgcagtgatctcgcggaagcaagacggtagcaaggatgccggagccgtatttgctgcgttcaaatgggaagggttccagccagaaatactcgagtcttccctcgttgagccgtacgatccagagtccggtgccaatgtgttgctgtacccaagcctggtggagcagctccgccagaccgagctcgagaggaaggagagcaagtcgctttccaagatgccggcggcggcggctcaggaggatacgacgtcgacgtacctgcagatgagcggcgaagcttccgctaacgaaccgaagcttggatcctcatcggcgttcagacgcctttgccaaaaagacgctacgtatcggctgtattcgcgcagggtcaactgcatcaacaggaagatcacgaagctccagcagactgcggctagggttggcccgagggggctgttcgccgtgaagcagaagatggaaatgtacaagcgcgagaaggcggagctttacgacgtgatcaacaaaggaatgcaggagaacgagaggggcggcaacagcggtgctgggccttcgaatagggctgctgccggtccttcttcccatgaagctgctgccagcagtccttccaacactgccatcccttccgacggtgctgatacatcaaaggacgatgatgccagtccttacagcgttccctcttccaactgtgctggtccttccggcagcaagtag

SEQ ID NO: 149981 - DNA, 958 bp, Zea Mays
tcaacttgtgaattgtggtccatggactccattcaatcccaaaatcagatacaacaaattattcattttattacttccattgtgtgatttatttcactaatggaaaaaaaatatttctaattgcgcaaatattcgaagactaactgattgaactaaacttcactgcaagcgaatctaaacttacacaatacctaaatcgagtcaggactcgcgaaaatggtgacaaatccgactcaggcaatatatcgagcaccggcgagcgacgaactggacttcactattctacatgatttagattttctctcgatacatacacacatacacatagttaacctcaaggcacaggcatcggttagtgaaacgagcagaataattgagagggcgtcaaacctgcttgcagggtacgtcaacggagtttaagccgacgaggacaaggaaatcagaggggatggcgcgacgaaactgcaagaaatggcggcggcgtgtgtgcagtccgacgaggaggcggaggtctaggcgaggctgataaaggagcgtgagggagcgtcggggcaacaggcatcgacggcctgaaccgcggcgaggacccagaggcacgatggcgcggaacctggcagtgctggaatggcgcccaggacacggcaggtccgcgacgagggaggaggacgcgaccccacgaccagggtcctcggccagaccggcggccggacatgaaggagaagagggaggtcggcgcgctgagaacaggaagctccgacgagctgcagccgagcaacgccggcgagtcgaggtggagagaggaggggccgtaggactgggtaccggcagcaggagcgtgtgcgaaagaagccgagcgctagccaacagatatacgacggctgagaaatatcagatggagggcagcggctggagattttctagaggaatgactagtggagaggaatcatatggaagctag

SEQ ID NO: 149982 - DNA, 639 bp, Zea Mays
atgaagctggcgagcagcagcagcacgaggccgccgacggccacgcccacgacgagcgacgtagacggcccggagctgccgccaccgccccccggcgagtgcgacttgggaggcgagtgggaggacggcgtggatcgcccacccccagacgacggcggggacctgccccctccaccggacgatggcggcgacggggtgtccgatggaggcgacggggtggcgggcgtgcccggggaggaaggggaggagggcgagggcgcagagggagtcaccggggtggaggccggcgcgggggccgggacggaggggggtgacggcggcggcgcggctggggacggcggggacggcgtgggcggggtgggcgtgggaggcgtgggcgccgccggtggcggcgcggacggggtcgcgggcggcggatttgtcgcgttggccggcggagccgatggcgtggtcggcgccggcgcggccgtcggcgacgacgacatcacggccccccttagctcccggctccggctccggctccggctcccgctttggagctacggccggctggcctgttgcttagcgcgtaagaatgggcaagtggagcacggaggagacgatgaggcgagatgcttcgcagtgctagcgcccgcctag

SEQ ID NO: 149983 - DNA, 933 bp, Zea Mays
accccaccatcaggtacaagaaacaacaagactgacagcgacgatgatgccacagctgcgtagcctcgtcgcgctggtcctcgtggccacggccatagccgccgctcccggcgttgggtttgtcgtcaccggccgcatctactgcgacaactgccgcgccgggttcgagacaaacgtgtcccacgccatccaaggcgcgacggtggagatggagtgccgccacttcgagtcgcagcaggtccacgacaaggcggaggcgacgacgggccccggcggctggtacaggatggagatcagcggcgaccaccaggacgagatctgcgacgtgcgcctgctcaagagccccgaggcggactgcgccgagatcgaccactcccgcgaccgctgccgcgtcccgctcacccgcaacgacggcatcaagcagagcggcgtccgctacgccaaccccatcgccttcctccgcaaggagccgctccccaactgcggcgagctgctccgcgcctacgacctctacaacgagacgtccgagaattcctaagcgtccaaacaaaagttctctcgctcgctttttttttaaaaaaaaatcccatatacatatagcacatttgtttcggtttgttgatgcgcgcatgcatgctagcagacatctttcctaaaaaaatttaaataatttccatctcgcattattttagtagctaccattcatgttttctgagtagttgtataaatgctaccaccgtcatcttttgtacccggccggaacaaacgaaaaacacactatctatgctgtgttgtgaattcaattcttgaccatcttctctaaattgtatctatattttagattccgtttagctggctttcgctctggattttttcctggaaaaaagtgagagttctgtcaaacactttttttttataaaaaaaagtctcact

SEQ ID NO: 149984 - DNA, 835 bp, Zea Mays
accccaccatcaggtacaagaaacaacaagactgacagcgacgatgatgccacagctgcgtagcctcgtcgcgctggtcctcgtggccacggccatagccgccgctcccggcgttgggtttgtcgtcaccggccgcatctactgcgacaactgccgcgccgggttcgagacaaacgtgtcccacgccatccaaggtgagcattacattacgcatcatccgtgacaaaacaaaacacaacacaaaacaatgcgtgccaggcgcgacggtggagatggagtgccgccacttcgagtcgcagcaggtccacgacaaggcggaggcgacgacgggccccggcggctggtacaggatggagatcagcggcgaccaccaggacgagatctgcgacgtgcgcctgctcaagagccccgaggcggactgcgccgagatcgaccactcccgcgaccgctgccgcgtcccgctcacccgcaacgacggcatcaagcagagcggcgtccgctacgccaaccccatcgccttcctccgcaaggagccgctccccaactgcggcgagctgctccgcgcctacgacctctacaacgagacgtccgagaattcctaagcgtccaaacaaaagttctctcgctcgctttttttttaaaaaaaaatcccatatacatatagcacatttgtttcggtttgttgatgcgcgcatgcatgctagcagacatctttcctaaaaaaatttaaataatttccatctcgcattattttagtagctaccattcatgttttctgagtagttgtataaatgctaccaccgtcatcttttgtacccggccggaacaaacgaaa

SEQ ID NO: 149985 - DNA, 1188 bp, Zea Mays
cacaagcaagggaagggagggcacctctaggctccagccatggcgcagcagctgctgctcctcctccccgccccttccagaactttcttgaaggccctcccctctccctttctctcctacctcccccggcgccaccttgtccccgttaccgccgttcccgtagcacccggcatccggcggggcctgctccggtacgcgacgaagcgttcaagcttggtcgaagaactggagattgccaaggagaagcagccgcatagcaggcgcgccaatggcatcttctggatcttgctgctcaatttcggcatctacatggccgaccacttgttccaggaatcatctttcaagcaatttattctttgtgtatatctttggaaagcttgtcgaggaggaagagggtaactttgctctctggatgtcttacattttgactggtgctggggcaaacttgatttcatggctagctcttccaacatcctctgtgtcacttggagcatctggtgctgtttttggccttttcaccattagtgttctagttaagatgtcatgggactggagaaagattcttgaagtgcttatccttggacaatttgttgttgacaaggtcttggaagcagcacgtgcaacaacaatcacgggccagtcatttcaagtgaacaacgtcgctcatgtgtcaggtgctttgattggtgccgcgttggtgtttctggttagcagaatccctttttcatccaatgatgataatccaaaggcaacaaaaagagtaaatagaaaataaagatttgtcaacaacattatcaacctaacgtattactatcaatttttcattcattatcattccttcatatgatagctaccttttgaaaattcagttgtaacatttctgatttaaatgaaagatacatctgaaagttcagtgccggagtataaagttcgtttgtagaccaatgaccaagtcgattttaggttggacgacgcccaaaatttgttcgcacacgaatcttgtgccttcatcgatgagtgtgatactcaagatatggtggagtagtagagatgaaaatggatggaaaaaaatgggtttcgtttggtattgtatcccgttttaaccaatctgtttttgtatttgtcgaaaaatgtgaactggatggtatattgcaggaacaggaatgagaacaattaaatgttttttca

SEQ ID NO: 149986 - DNA, 1311 bp, Zea Mays
gttcatagatgccagtcctcccctccccaaaacccagcacaagcaagggaagggagggcacctctaggctccagccatggcgcagcagctgctgctcctcctccccgccccttccagaactttcttgaaggccctcccctctccctttctctcctacctcccccggcgccaccttgtccccgttaccgccgttcccgtagcacccggcatccggcggggcctgctccggtacgcgacgaagcgttcaagcttggtcgaagaactggagattgccaaggagaagcagccgcatagcaggcgcgccaatggcatcttctggatcttgctgctcaatttcggcatctacatggccgaccacttgttccagattcggcaaataaaatcactatacctgtatcatgcattcccttcatggttccagtttgtgacatcaacattttgccatgccaactggaatcatctttcaagcaatttattctttgtgtatatctttggaaagcttgtcgaggaggaagagggtaactttgctctctggatgtcttacattttgactggtgctggggcaaacttgatttcatggctagctcttccaacatcctctgtgtcacttggagcatctggtgctgtttttggccttttcaccattagtgttctagttaagatgtcatgggactggagaaagattcttgaagtgcttatccttggacaatttgttgttgacaaggtcttggaagcagcacgtgcaacaacaatcacgggccagtcatttcaagtgaacaacgtcgctcatgtgtcaggtgctttgattggtgccgcgttggtgtttctggttagcagaatccctttttcatccaatgatgataatccaaaggcaacaaaaagagtaaatagaaaataaagatttgtcaacaacattatcaacctaacgtattactatcaatttttcattcattatcattccttcatatgatagctaccttttgaaaattcagttgtaacatttctgatttaaatgaaagatacatctgaaagttcagtgccggagtataaagttcgtttgtagaccaatgaccaagtcgattttaggttggacgacgcccaaaatttgttcgcacacgaatcttgtgccttcatcgatgagtgtgatactcaagatatggtggagtagtagagatgaaaatggatggaaaaaaatgggtttcgtttggtattgtatcccgttttaaccaatctgtttttgtatttgtcgaaaaatgtgaactggatggtatattgcaggaacaggaatgagaacaattaaatgttttttca

SEQ ID NO: 149987 - DNA, 966 bp, Zea Mays
catagatgccagtcctcccctccccaaaacccagcacaagcaagggaagggagggcacctctaggctccagccatggcgcagcagctgctgctcctcctccccgccccttccagaactttcttgaaggccctcccctctccctttctctcctacctcccccggcgccaccttgtccccgttaccgccgttcccgtagcacccggcatccggcggggcctgctccggtacgcgacgaagcgttcaagcttggtcgaagaactggagattgccaaggagaagcagccgcatagcaggcgcgccaatggcatcttctggatcttgctgctcaatttcggcatctacatggccgaccacttgttccaggaatcatctttcaagcaatttattctttgtgtatatctttggtgagagctgattgctaaaaaatgaatgctctgctctggttggaacttaaaattcagttaaaggatgcctattgctgatctgaatatacaggaaagcttgtcgaggaggaagagggtaactttgctctctggatgtcttacattttgactggtgctggggcaaacttgatttcatggctagctcttccaacatcctctgtgtcacttggagcatctggtgctgtttttggccttttcaccattagtgttctagttaaggtgattaattcaatcttgtccttctgaaatttctttagttaataaccagtcagccaatgtttcttttttaaaacattgcctcatactgtcatggcagatgtcatgggactggagaaagattcttgaagtgcttatccttggacaatttgttgttgacaaggtaccttcatgacactgttttgttgctttccttaatcgtttttaagtaaaacactggacgtgtcattacagaattgtaacaaaatggataattttattttcttaccatcatattctacatgaaaaatgcaatacattgatcta

SEQ ID NO: 149988 - DNA, 723 bp, Zea Mays
gtacaacctatgcaatcgcggttcgcactattaaagtggaaaagaggatcaatgagattgtgaaccgcttgaataagacaaaggtggaacggaaacctgatttaaaggctgaaagagaggctattagtgctgctgaaaaggcagaaagaaaggcacagcttagagacaagaaacgtagggaagagatggagaggcttgagaaagagaagcaggctgatatcaggagctacaagggtctaatggtccaagagaagatgacttccaacaagcaaatcgcttctggcagcaagaccctgcaggaacttgaagaagactttatgtgagaggcggacattataaatgccatgctgaagatttccttgaactgcttctgtcgaagacagaaggggtaccacaggcttgtgagatactggatgactcatgggcaggccatggtctgttattatctcctcttgctgttgtggtctatgtaaaccttgtttacttgctgaaaaaacaacggtgcatgctctaactgtggttgatgtaatggtctgttgcccatcaagttgaaatggtaatggaattatggtttcctggatttttttcaaacaataaagacatggcagcagataacttacatattccattctttgcatggagaacggctcaggaacttctttgtttgtgtaagagtgttatagaaatgaaccacacttagcttacatttggagattctttaat

SEQ ID NO: 149989 - DNA, 1306 bp, Zea Mays
gcgaagaaagaagtatgaataaaacaaaatttgaagacgcctaacagcccgactgcttcgtttccacgcgcacgaaaccctagactagataaaaagttcccatttccctcaattccccaacttccctcgccgcaatctctcgccgcctccagtccagagccaccgtgagatctgcccgattccgccgcccggacccggggactccctcccctcctcgatccgttcgggcggccggccggcctagcttcaagtgcggggatggtgttctacttcaaggcgcggcccgaggccggcgactataccatcttcatgggtcttgacaagtacgagaacgaggacctcatcaaatacggcttccccgaggacatctggttccatgtagataagatgtcctctgcacatgtgtatgtgagattgaataaaggtcaatcaatggatgacatgagtgagggtttgctggaagactgtgcgcagcttgtcaaagctaattccattcaaggtaataaagtcaataacattgatgtagtttatactccatggtacaatttgaagaagaccccttcaatggatgtaggccaagttggttttcacaaccctaaattggttcgcactattaaagtggaaaagaggatcaatgagattgtgaaccgcttgaataagacaaaggtggaacggaaacctgatttaaaggctgaaagagaggctattagtgctgctgaaaaggcagaaagaaaggcacagcttagagacaagaaacgtagggaagagatggagaggcttgagaaagagaagcaggctgatatcaggagctacaagggtctaatggtccaagagaagatgacttccaacaagcaaatcgcttctggcagcaagaccctgcaggaacttgaagaagactttatgtgagaggcggacattataaatgccatgctgaagatttccttgaactgcttctgtcgaagacagaaggggtaccacaggcttgtgagatactggatgactcatgggcaggccatggtctgttattatctcctcttgctgttgtggtctatgtaaaccttgtttacttgctgaaaaaacaacggtgcatgctctaactgtggttgatgtaatggtctgttgcccatcaagttgaaatggtaatggaattatggtttcctggatttttttcaaacaataaagacatggcagcagataacttacatattccattctttgcatggagaacggctcaggaacttctttgtttgtgtaagagtgttatagaaatgaaccacacttagcttacatttggagattctttaat

SEQ ID NO: 149990 - DNA, 1501 bp, Zea Mays
gcgaagaaagaagtatgaataaaacaaaatttgaagacgcctaacagcccgactgcttcgtttccacgcgcacgaaaccctagactagataaaaagttcccatttccctcaattccccaacttccctcgccgcaatctctcgccgcctccagtccagagccaccgtgagatctgcccgattccgccgcccggacccggggactccctcccctcctcgatccgttcgggcggccggccggcctagcttcaagtgcggggatggtgttctacttcaaggcgcggcccgaggccggcgactataccatcttcatgggtcttgacaagtacgagaacgaggacctcatcaaatacggcttccccgaggacatctggttccatgtagataagatgtcctctgcacatgtgtatgtgagattgaataaaggtcaatcaatggatgacatgagtgagggtttgctggaagactgtgcgcagcttgtcaaagctaattccattcaaggtaataaagtcaataacattgatgtagtttatactccatggtacaatttgaagaagaccccttcaatggatgtaggccaagttggttttcacaaccctaaattggttcgcactattaaagtggaaaagaggatcaatgagattgtgaaccgcttgaataagacaaaggtggaacggaaacctgatttaaaggctgaaagagaggctattagtgctgctgaaaaggcagaaagaaaggcacagcttagagacaaggtaaagatatttctaatgctataccagccgtgttttcttttgttgccatgtgctggttatgtagaaatcaaagatctaacttgtttgtatttctagagcatagcaaattatatttatgggcagcaaactggttgtaacagatcttgtaggaaccaaatatttatgtagttgattctattgtaattaattttctagggcatatcaaattataaataggatgttggtactacctgataaaataactgaactgctgaacttttgatagttagaatattgacataacagatcactggattatgtttttcttctgtttcagaaacgtagggaagagatggagaggcttgagaaagagaagcaggctgatatcaggagctacaagggtctaatggtccaagagaagatgacttccaacaagcaaatcgcttctggcagcaagaccctgcaggaacttgaagaagactttatgtgagaggcggacattataaatgccatgctgaagatttccttgaactgcttctgtcgaagacagaaggggtaccacaggcttgtgagatactggatgactcatgggcaggccatggtctgttattatctcctcttgctgttgtggtctatgtaaaccttgtttacttgctgaaaaaacaacggtgcatgctctaactgtggttgatgtaatggtctgttgcccatcaagttgaaatggtaatggaattatggtttcctggatttttttcaaacaataaagaca

SEQ ID NO: 149991 - DNA, 2068 bp, Zea Mays
aaaacaaaatttgaagacgcctaacagcccgactgcttcgtttccacgcgcacgaaaccctagactagataaaaagttcccatttccctcaattccccaacttccctcgccgcaatctctcgccgcctccagtccagagccaccgtgagatctgcccgattccgccgcccggacccggggactccctcccctcctcgatccgttcgggcggccggccggcctagcttcaagtgcggggatggtgttctacttcaaggcgcggcccgaggccggcgactataccatcttcatgggtcttgacaagtacgagaacgaggacctcatcaaatacggcttccccgaggacatctggttccatgtagataagatgtcctctgcacatgtgtatgtgagattgaataaaggtcaatcaatggatgacatgagtgagggtttgctggaagactgtgcgcagcttgtcaaagctaattccattcaaggtaataaagtcaataacattgatgtagtttatactccatggtacaatttgaagaagaccccttcaatggatgtaggccaagttggttttcacaaccctaaattggttcgcactattaaagtggaaaagaggatcaatgagattgtgaaccgcttgaataagacaaaggtggaacggaaacctgatttaaagggtatgtcacatttatttgaaagcatttctgtcgtcatttttatgtcagcaactcagcattctataatgaacatggttaagtatttttctttttgtttttgggattcataatgtgagtatttatctcacaaagaaagtgaggatgtaatgtctaggctctgtttggtggagctgtagcttttccaaaagcacctcctgaagaagctttcgggaaaagcttgggaagctgctccttgaaagcttctctgcttttagtacaacaaagtgctgcttttatcagcttgaagaagctgctgccctgtttgggggagcctctagctttttgagctttctgtagaagcgaaagctgccagaagctccccaaatagggccttagatcatttcgattttgcagaatctagatgcgcaaaaggatgttatcatgataacaagatttttgggaatcgtgaaaatgtttgcgtatatgttggtatctgtttggtctatgaataaaaggcacggttgatggattatcgttttcaactgaatgataaatttgacgcgttggcttgtcgcatgtgcacttcagtcctgttatttgagtcaataatcatcacatcgtttcctgccagctgaaagagaggctattagtgctgctgaaaaggcagaaagaaaggcacagcttagagacaaggtaaagatatttctaatgctataccagccgtgttttcttttgttgccatgtgctggttatgtagaaatcaaagatctaacttgtttgtatttctagagcatagcaaattatatttatgggcagcaaactggttgtaacagatcttgtaggaaccaaatatttatgtagttgattctattgtaattaattttctagggcatatcaaattataaataggatgttggtactacctgataaaataactgaactgctgaacttttgatagttagaatattgacataacagatcactggattatgtttttcttctgtttcagaaacgtagggaagagatggagaggcttgagaaagagaagcaggctgatatcaggagctacaagggtctaatggtccaagagaagatgacttccaacaagcaaatcgcttctggcagcaagaccctgcaggaacttgaagaagactttatgtgagaggcggacattataaatgccatgctgaagatttccttgaactgcttctgtcgaagacagaaggggtaccacaggcttgtgagatactggatgactcatgggcaggccatggtctgttattatctcctcttgctgttgtggtctatgtaaaccttgtttacttgctgaaaaaacaacggtgcatgctctaactgtggttgatgtaatggtctgttgcccatcaagttgaaatggtaatggaattatggtttcctgg

SEQ ID NO: 149992 - DNA, 597 bp, Zea Mays
tgcttatcattacatgtactaaaactgatgaataatagcttcgactataatatctgtaactcatccttttcttttttgaaggttcgcactattaaagtggaaaagaggatcaatgagattgtgaaccgcttgaataagacaaaggtggaacggaaacctgatttaaagggtatgtcacatttatttgaaagcatttctgtcgtcatttttatgtcagcaactcagcattctataatgaacatggttaagtatttttctttttgtttttgggattcataatgtgagtatttatctcacaaagaaagtgaggatgtaatgtctaggctctgtttggtggagctgtagcttttccaaaagcacctcctgaagaagctttcgggaaaagcttgggaagctgctccttgaaagcttctctgcttttagtacaacaaagtgctgcttttatcagcttgaagaagctgctgccctgtttgggggagcctctagctttttgagctttctgtagaagcgaaagctgccagaagctccccaaatagggccttagatcatttcgattttgcagaatctagatgcgcaaaaggatgttatcatgataac

SEQ ID NO: 149993 - DNA, 880 bp, Zea Mays
gcgaagaaagaagtatgaataaaacaaaatttgaagacgcctaacagcccgactgcttcgtttccacgcgcacgaaaccctagactagataaaaagttcccatttccctcaattccccaacttccctcgccgcaatctctcgccgcctccagtccagagccaccgtgagatctgcccgattccgccgcccggacccggggactccctcccctcctcgatccgttcgggcggccggccggcctagcttcaagtgcggggatggtgttctacttcaaggcgcggcccgaggccggcgactataccatcttcatgggtcttgacaagtacgagaacgaggacctcatcaaatacggcttccccgaggacatctggttccatgtagataagatgtcctctgcacatgtgtatgtgagattgaataaaggtcaatcaatggatgacatgagtgagggtttgctggaagactgtgcgcagcttgtcaaagctaattccattcaaggtaataaagtcaataacattgatgtagtttatactccatggtacaatttgaagaagaccccttcaatggatgtaggccaagttggttttcacaaccctaaattggtgagagctcattaactttttcttattcacaatgtttacagcaggattatgtacatatgcttttgtatgtatcttgacaaagtttatgtgctttatggatgtggatcaagatgtgtaatatatgtttctgatagggttccttaccgtagaactagtatttttatctctctatgacagtatgacttcaaaaaatgtctttacagttactttgcaagcaatttgaattggtttagactttagaataacaaagttttcagaagaggttattcttttaatc

SEQ ID NO: 149994 - DNA, 2712 bp, Zea Mays
cagctgcagccgagcctccctccctccctcctctcacactagctcgttcatcacagagacggacagatagaaagaggaggagatgcatgaagcccaatctacgctcccacagtagggatccctcctccattaatagggggggatgcgtgtcgcggctagccaagcgacgacgcgagctgcctcgctcctctggccagccactccaggtccagggcgaggcgccagagctgcatcgcgctggctagctagctaactagcctgggcgcctagcgctagaagaaacagagctgagtggcggggtacaagcgagcgcggtggacaaaaggctagccagagagacgatggacggcggcagcggaggaggggaggcgtggcgcggcgcggtgtcgccggcagcgcggtacgcggagtccggcggcgccagcctcacgtgggagaacctcacggcggtgctgccgggcggcggcggccgggccaccaagaagctggtgcaggggctgtacggctacgccgtgcccggccgcgtcgtcgccatcatggggccttccggctccggcaagtccacactcctcgactccctctccgggaggctggcaaggaacgtggtcctcaccgggaaggtgctgctcaacggcaagaagaggcggctggattacggcatcgtggcatacgtgacccaagagaacgtgctgctgggcacgctgacggtgcgcgagacggtgacctactcggccctcctccggctgccgtcgagcacgcgcaaggcggaggtgcggcgcatagtggacgagacgctggacgagatgggcctccgggagtgcgccgaccgccacatcgggacgtggcacctccgcggcatcagcggcggcgagaagaagcgactgagcatcgcgctggagatcctcacccgcccgcgcctcctcttcctggacgagcccaccagcggcctcgacagcgccgccgccttctccgtcgtccagacgctgcggcagctcgccgtcgacggcggccgcaccgtcgtctcctccgtgcaccagcccagcagcgaggtgttcgcgctcttcgacgacctctgcctcctctccagcggggagtgcgtctacttcggtgacgccaagctagcgacacagttcttcgcggaaacggggttcccctgtcccagccggaggaacccgtccgaccatttcctccggtgtgtcaactcggacttcgatgatgtcgccgccaccatgaaaggctccatgaagctgcgagcagaggcagagctcgatcccctgttgaagtactctacctcagagatcagggaacggctagtggacaagtacaggatctcagattacgccatgatggttaggagcacgatacacgagataaccaagattgagggtgtgatggaggatgtgatccgtggcagccaggcgagctggttgaagcagctccgcacgctgacaagccggtccttcaccaacatgtcccgcgatctgaactactactggctgcgcatcatcatctacatcgtgatggccatctgcctgggaaccatctactacgacgtgggcaccagctacacggccatccaggcgcgcgcctcgtgcggcggcttcgtgtcgggcttcatgaccttcatgtccatcggcggcttcccgtccttcatcgaggagatgaaggtgttcaccctcgagcgccagaacggacactacggcgtcgccgcctacatcatctccaacttcctctcctccatgccgttcctgctcgccgtgtcctgggccagcgcgtccatcacgtactggatggtcaagttccggccgggcttcagctacttcgccttcttcgccctcaacctctacggcggcgtctccgtcatcgagagcctcatgatgatcatctccgccctcgtgccaaacttcctcatgggcctcatccttggcgccggtgtcatagggatcatgatgttgacctctgggttcttccgactgcttccggagctcccaaagatcttctggcggtatccagtgtcctacattgtctatgggtcatgggggttgaagggcgggtacaagaacgacttgatcgggctggagttcgagccgatgatgccagggcagccgaagctgaccggcgagtacatcatcaccgagatgatggggctgagcctgaaccactccaagtggctggacctcgccatgatcttcgtcctcctcttcgcctaccgcctcaccttcttcgtcgtgctcaaggtgaaggaggccgctgcgccatacatccgcgtcgcctacacacgattcaccgtcaagcgtctcgagcggcgcgcctccttcaggaagacgctggccatggcgtccatgtccaagcggcacaacccgccgcaccccatggccatccaggaaggactcagctcgcctatgccgtactgagctgagccgaggcgaaggagagagcggagggagacggaagtggtggtcgatatcacagttacttgtggatgtgcttacagatttgtccgttccattgtttagtttgtcagagagcgttgtcaaagataccccacgcgatagtcggtcttcagagcattcgtttcactgtaataactctgaacaccatacacatacaagatagtgctgctgtgcgtacttgtttttttttgtaaacatgaaaccaggcaatgatccttatattaagaaagtcacgcagtcaaaacttacttattattaa

SEQ ID NO: 149995 - DNA, 1921 bp, Zea Mays
atggagacaaacactattttttcagccacattaaacatgctattggttctgcaatcacgactaaagatgcacatggagacgtttgtaatgatcataataaaaaggctcaaggatgccaaccttttcgtgtcacaaggagggctcatcattctagattttttctttctaatttctgttgtgattggtttgcttgctgagtcttcagaggaagtaaagacagacactgacaggaatgtcttagttatgtttgatatcctcaggctttcatttgcccaaacagttgaaaatgtttttgcactatctttcttagtgaaagatggtagggtggaaataactgtagatgatagcaggcatatagtacggccaaggaatgcacctgctgctagcgctatagcctcaggagaagtctcatacagtcattttgtttttagatttgacttcaaggactggaagcttatgaaagaagttgttacagagggagaagagctgttgccacataggacttcccagagcaatctttgcaacgaagaaaacgaccaaataaatctggaggcacgtgcgcaaataacgcctatcaggaaactcacccggaaccgaggattggtcttgcaggatcatgtagtcgaggaaactcctgaagagaaccaagcgtttaagcgcaggcgcctttttaggaatcaagattgacctagcaattgcttggcatgagtagtgtaggcaggcaacctggcttgtgttgtatgcaaaaaattgcctgagcttgagtaacgtgtctttcactaggtctgttgtgccatgctgtcttgttcttggcacagctcgtgcttatctgaacttccagttgtgccagcggagtagggctgtaattataaattgtttgaagttctggtcacatcttgcaactacagaatggtgtttgtagggctgagtgtaactagccagcttggctcgtgttgggtcattaagggtgtgtttggttggatgtatatggaaggatggaaagggacggccacagattctatagtgtttggattagagtcgtgtgggacaagataaacatcggagtaattttggtggcggtgtgattcaaaaaattgaggagacgctatcgtccccgtgtcatactactttgatctcaaactaaacacattctaactcatttatcatggcaagatgtgtctcgggtaagcttgttaggctgtcatagtttatccatcctatctcttattttaaattttatttttttgtaaatattataatttacagtgcaaaacagtgttttacacgtctatatagacgatctactacaaacaaccttaagaaatgagttaaaagttcaactcaacttgcctttgctcgttaacatcttgagcaaatcaatgctaaagagaagttgctcaaatcaatgcgtgattgtgatccttcgtctgtgcaccactagattgtaagagttgtcttcttgttttaattttttttgttattcctaccattaaattgggcattcaatacctgttcattatctttatgcttatgcaatccaataatgatggaaaataactgacttggctgctctcttgagttgtggcaacggaagttccaggccccgttgcagctgggagtggttttatactcgctgatgacatcaagtcttaggtgcttccattgatcaataactcagggaaatatggagggatcatgatgtggttcaagtactatgatgatcaagatggctacaattcttgagtgaagagtgatgtttaggttgttgcctatggtgtgtgacaatatctgtgtgttacttgtgtgtatgtgagaaattatgtgactctggagtctggatagtgcaataagtattactcaagtatatgattgaatcttatgtcatactattcaaattatgtcatattgtatcttttaaggt

SEQ ID NO: 149996 - DNA, 371 bp, Zea Mays
gcgagcggcgtcacggaaggcgcgaggtgcgcgcagcgatgatcgcgcgtgacatcctccgatccggcgcagtttgggcggcccgagtgacgacctacatttgtgcttgtgtcatcgacgccgtccttcggccactacctcatctgattcgtgttttcttttcgattattatgttttatgcctaccacatgtattatttacgctaaaaactatacgattttatgcttgaacacaaagttcgtatattagtttggtgcatgcatatttttttgcatgcacattagaaaggtaattccttaatttataatgtttgtaattatcataaaaaatcaaatcatttatgttcgtaaatgccagatttgtaagtattt

SEQ ID NO: 149997 - DNA, 1360 bp, Zea Mays
ataaatccatatttgtcccagcgaaggcacacagccgccgccatttcttcatcctcccatctcctgatctccatctccatcttcttcgcagcgccggcgatccatcttccgctgcctcccttcctcgcgctcgggctctcagtgacggcatcagcggtttcccctcccgcctctcgccagtcgcatcacgcccccgcctccggtccaccgcacaccggccggtgaccctacattacttgctaatctttcttgagggcagatggccgtttcttttgcaaatgtcaacgccgaggcagggctgaaaaagcttgatgagtaccttctcactcgcagctacatcactggctaccaagcttccaaggatgacctggctgtctactcttcatttttggctgatccctcatccaagtatatcaatgtagcaaggtggtttaatcacattgatgcactcctgaggctgagtggagttaccgcagagggcctaggtgttaaggttgagccatcagcggttccttcagcttcaattcttgatgttgctgatggacaggccccagctgctgacgaggatgacgatgatgatgttgacctttttggcgaggagactgaagaggagaagaaggctgctgaagaacgtgctgcggctgccaaggcttctggcaagaagaaagaatctgggaaatcgtcagttttacttgatgtgaagccatgggacgatgagactgacatggccaagctcgaggaagctgttaggagtgtccagatggaaggactgctttggggcgcatccaagcttgtcccagttggatatggcatcaagaagctgcaaatcatgatgaccattgtcgatgaccttgtctctgttgacactctcatcgaggaccatctctgcgctgagccagtgagcgaatacgtccagagctgcgacattgtcgccttcaacaagatctaaatttccttgtgatggtggcaatggtggttggtgggcactgtaccagcctaatttataattttccatgagcatcttcaagagtttttctaaattatcatttggagtcatttacataaaaagcactttctatatctttttaatctcaacaacttttctatatcttgtttgcaccctggagagctatttacgttttctatctttagctagcgagaaacctggatggctggaatagaagataactatatttagacaatactttaaataagctgttggaagatagtaattcttgtgtgatcggatgcataatgccttggtctggctggttggaggtgtatcactctggagcatgttcggttctgtttatttcagctttttttagcttatgcctatcaaaatctgccacagaatgtc

SEQ ID NO: 149998 - DNA, 1603 bp, Zea Mays
ataaatccatatttgtcccagcgaaggcacacagccgccgccatttcttcatcctcccatctcctgatctccatctccatcttcttcgcagcgccggcgatccatcttccgctgcctcccttcctcgcgctcgggctctcagtgacggcatcagcggtttcccctcccgcctctcgccagtcgcatcacgcccccgcctccggtccaccgcacaccggccggtgaccctacgtgcgtaccccctctctctgtctcctcccgcctccggtggatcgtcaacggcgcccggccccggcggctgcgccgtgcgcggtctgagggcaggagccagcagccgctactcgaccaaggcggtcgcgccgctttgggagcgcttatgccccacagcgacgcgttacccgtcttcttagcgcttcagcgcgctgaaacgtgcgcttagtgctgtttggtttaaaccgtgtgtagaggggctaaatgaccgttttggtgaacagtgactgtctcatgattttaagaatcttgttgctgtgatatgttgtcggggtgcccataaagtttacttaagatggccgtttcttttgcaaatgtcaacgccgaggcagggctgaaaaagcttgatgagtaccttctcactcgcagctacatcactggctaccaagcttccaaggatgacctggctgtctactcttcatttttggctgatccctcatccaagtatatcaatgtagcaaggtggtttaatcacattgatgcactcctgaggctgagtggagttaccgcagagggcctaggtgttaaggttgagccatcagcggttccttcagcttcaattcttgatgttgctgatggacaggccccagctgctgacgaggatgacgatgatgatgttgacctttttggcgaggagactgaagaggagaagaaggctgctgaagaacgtgctgcggctgccaaggcttctggcaagaagaaagaatctgggaaatcgtcagttttacttgatgtgaagccatgggacgatgagactgacatggccaagctcgaggaagctgttaggagtgtccagatggaaggactgctttggggcgcatccaagcttgtcccagttggatatggcatcaagaagctgcaaatcatgatgaccattgtcgatgaccttgtctctgttgacactctcatcgaggaccatctctgcgctgagccagtgagcgaatacgtccagagctgcgacattgtcgccttcaacaagatctaaatttccttgtgatggtggcaatggtggttggtgggcactgtaccagcctaatttataattttccatgagcatcttcaagagtttttctaaattatcatttggagtcatttacataaaaagcactttctatatctttttaatctcaacaacttttctatatcttgtttgcaccctggagagctatttacgttttctatctttagctagcgagaaacctggatggctggaatagaagataactatatttagacaatactttaaataagctgttggaagatagtaattcttgtgtgatcggatgcataatgccttggtctggctggttggaggtgtatcactctggagcat

SEQ ID NO: 149999 - DNA, 1186 bp, Zea Mays
gacacgaggagaacttcatttctattacttttataacaaaaatatattattgttcgtcgaaactaaagttttgcagtcagaagcatgaagcaaactgtcagacgacctcgtagaccgaccccctgattcagagagccagcacacaggaaagcccaccaacagaacaattaaccagaggtccagagctactacccaaaagccctatggccgtttcttttgcaaatgtcaacgccgaggcagggctgaaaaagcttgatgagtaccttctcactcgcagctacatcactggctaccaagcttccaaggatgacctggctgtctactcttcatttttggctgatccctcatccaagtatatcaatgtagcaaggtggtttaatcacattgatgcactcctgaggctgagtggagttaccgcagagggcctaggtgttaaggttgagccatcagcggttccttcagcttcaattcttgatgccccagctgctgacgaggatgacgatgatgatgttgacctttttggcgaggagactgaagaggagaagaaggctgctgaagaacgtgctgcggctgccaaggcttctggcaagaagaaagaatctgggaaatcgtcagttttacttgatgtgaagccatgggacgatgagactgacatggccaagctcgaggaagctgttaggagtgtccagatggaaggactgctttggggcgcatccaagcttgtcccagttggatatggcatcaagaagctgcaaatcatgatgaccattgtcgatgaccttgtctctgttgacactctcatcgaggaccatctctgcgctgagccagtgagcgaatacgtccagagctgcgacattgtcgccttcaacaagatctaaatttccttgtgatggtggcaatggtggttggtgggcactgtaccagcctaatttataattttccatgagcatcttcaagagtttttctaaattatcatttggagtcatttacataaaaagcactttctatatctttttaatctcaacaacttttctatatcttgtttgcaccctggagagctatttacgttttctatctttagctagcgagaaacctggatggctggaatagaagataactatatttagacaatactttaaataagctgttggaagatagtaattcttgtgtgatcggatgcataatg

SEQ ID NO: 150000 - DNA, 626 bp, Zea Mays
ataaatccatatttgtcccagcgaaggcacacagccgccgccatttcttcatcctcccatctcctgatctccatctccatcttcttcgcagcgccggcgatccatcttccgctgcctcccttcctcgcgctcgggctctcagtgacggcatcagcggtttcccctcccgcctctcgccagtcgcatcacgcccccgcctccggtccaccgcacaccggccggtgaccctacgtgcgtaccccctctctctgtctcctcccgcctccggtggatcgtcaacggcgcccggccccggcggctgcgccgtgcgcggtctgagggcaggagccagcagccgctactcgaccaaggcggtcgcgccgctttgggagcgcttatgccccacagcgacgcgttacccgtcttcttagcgcttcagcgcgctgaaacgtgcgcttagtgctgtttggtttaaaccgtgtgtagaggggctaaatgaccgttttggtgaacagtgactgtctcatgattttaagaatcttgttgctgtgatatgttgtcggggtgcccataaagtttacttaaggtctgagtctgagttaagctatgacatttcagaaacatagctttggtttagattttggttc

SEQ ID NO: 150001 - DNA, 182 bp, Zea Mays
atggcggagtaccatcctgatctcatcatgtgccggaagaagcctgtcatcatggttggtcgcatgtgcgagaaatgtgatggcaactgtggcgtttgcgacgagtgcaattatggtcgttccagggaagttgtgtgatctgtggaggagtcggcatctcggacgcttactactgcaagaag

SEQ ID NO: 150002 - DNA, 952 bp, Zea Mays
gacggcaaaggcaaaggcaacggagccagccaggtccagcctcaattccagactggccgatcctgccgcaaactgcaaacagccccccgcaacggctgtgcatgtgcgtggacccaccgccggcgcaacacgccatagcagtcccagcgaggtccagcggttctagagagagaaggagagagagagagagccgttgccgctgaataattacgctcacgatccgttttatagggggggtggagtgaatgcacatgcggtacaagcagagctgatcgggattcctcgtctctggtctgtctgtgctccaccacctgctgctggtgccatggccatgggtagtctcgccttcgccacggcgctcgtcttcgtcttcgtcttcgccatcgccgtgccggccgtcgccgccgccgcgcaggcccccgccccggcgcccaccagcgacgggacgtcgattgaccagggcatcgcgtacctgctgatgatcatggcgctggtgctcacctacctcatccaccctctggacgcctccgccccgtacaagctcttctgagcgagcagattttctcctccattttttggtaggcttttgtagtggatcactagagtaactgggggtggtggtgtgggtgtgtgggtgagattcggtacctattcattgccatgaattacattcggtttcgcgtgtgtatattattactcctatatgtcttctggttcatgcttcgatgtccattggttgtcgctttgtgttgcatcggggagacctcgaggagtagttcttgttcagtagtgcctagcgcgcatctgagatctgacctgacctgaccttccacacgcgaagccttgtggtgtggtgtttgttgttggggctttcgcaggatctgaattagtcaaaccgttaaggccctatttcccgatagcaatcgagatcatcggttcatgttagaatgcg

SEQ ID NO: 150003 - DNA, 819 bp, Zea Mays
gacggcaaaggcaaaggcaacggagccagccaggtccagcctcaattccagactggccgatcctgccgcaaactgcaaacagccccccgcaacggctgtgcatgtgcgtggacccaccgccggcgcaacacgccatagcagtcccagcgaggtccagcggttctagagagagaaggagagagagagagagccgttgccgctgaataattacgctcacgatccgttttatagggggggtggagtgaatgcacatgcggtacaagcagagctgatcgggattcctcgtctctggtctgtctgtgctccaccacctgctgctggtgccatggccatgggtagtctcgccttcgccacggcgctcgtcttcgtcttcgtcttcgccatcgccgtgccggccgtcgccgccgccgcgcaggcccccgccccggcgcccaccagcgacggtgagtcctctttgccttccagtttttaccgtctaccccacccggcgccgtcgggatcggagcgcgatttctcgaatacaagcagcggcctcctgaatcctgatgatctgtgtttcgctgcagggacgtcgattgaccagggcatcgcgtacctgctgatgatcatggcgctggtgctcacctacctcatccaccctctggacgcctccgccccgtacaagctcttctgagcgagcagattttctcctccattttttggtaggcttttgtagtggatcactagagtaactgggggtggtggtgtgggtgtgtgggtgagattcggtacctattcattgccatgaattacattcggtttcgcgtgtgtatattatta

SEQ ID NO: 150004 - DNA, 519 bp, Zea Mays
gaattgtgttaccgtcggtcccatatctttctataaagttgaagatcttccacaactattccttcggtcatcaattgttttcataagttgtgctttgtttggagtcacattctggtacgctgttagaagagatctggataatatccaactaaaaactggggctcttgcagcatttgcttttgttagaggccttgctctgctggaatctggtagaaccctcgtgctgagtactgataccttaatatcagtaactcttgatgctgcagtcagtgtggttgagaacattttcatatttctgcctgctgctgttgcactggactactgttttaagatgagatttttgagtccctttcctagaagaaaacaatagcttctgtgaagaatatgtatgatcaataacaatcttgatagctcaaatggtcatatgtaacacaaatgatatcttagattcattaaaaacatttcccctcattcactcaaagttccatcaagtcaaccaaatagtattttttacttaat

SEQ ID NO: 150005 - DNA, 93 bp, Zea Mays
gaaaaaactcattcggactccaaacaaggcaaactagtagtcgatcggaatcgtctcgacgatatctatgcatctacggtctccgatcattag

SEQ ID NO: 150006 - DNA, 329 bp, Zea Mays
ctttttaatattaattaaaatttatcattgtacatcactactaatgtaagattaacacaatcatttgtttatgatataaatatttttaacattttaaatggtgtacttcagtttttagtatattatttaatgtttaaaatcacttgtaattagcgagaggacggaatcaagcttaagcatgtggggtttagaatgcaccaagggccatacggattattcagtactattaaacaaaatgtaataaacaaatcagtcgcaaaagcaaaaacaaatcaagatgagaaataaatttggacggacaaatcagcggcataaacgaaaaaaccacg

SEQ ID NO: 150007 - DNA, 96 bp, Zea Mays
tgcttgccagttacatgggaggttatacgtgacgtcatgctggccactgtaataacatttacactatatctaacaccatttatgtttaaacttgag

SEQ ID NO: 150008 - DNA, 210 bp, Zea Mays
taagtttgtcaaagagatagctgcagcaacaggaattgtccttgatctagtctacagtgggaaggcggtttatgctaaaagacatggctggcaatccagccaagtggaaagggagaaaagttctgtttatccatataggtggtcttcttggagtgtatgataaggctgcctagttgtcatctttggctgggagctggcgcataatggatc

SEQ ID NO: 150009 - DNA, 2101 bp, Zea Mays
agaaaccagaccaacaacaaaaaccgactagcccaggcaagcagaaacccactgtctccgcttccgctcccgactcctttgtctcgtcctcatccatccaaccaggcgagccaacaagcaagcaaaagtaaacggggcgaggagctggagagacgccggcgacgcgaagcaaccgcccgatcggagccgcggctgagcaggagggagccggagatggtgggtctcgtcggcggcagcacggcgcgggcggagcacgtcgtcgccaacgccggaggggaggcagagtacgtgcgccgcatgcaccgccacgcgccgaccgagcaccagtgcacctccaccctcgtcaagcacatcaaggcgcccgtccacctcgtgtgggagctggtgcggaggttcgaccagccgcagcggtacaagccgttcgtcaggaactgcgtcgtgcgcggggaccagctcgaggtcggcagcctgcgcgacgtcaacgtcaagaccggcctgccggcgacgaccagcaccgagcgcctcgagcagctcgacgacgacctgcacatactcggtgtcaagttcgtcggcggggaccaccgcctccaggtccgtgctgctgccgcccgtttgttgcgtccctgcaaaaatgctctgtttcacgcgccctccttgcttgtcagtgtactccaaattatttttgggggtatgcttgctttgttaccatttctcttttttttaaattaaattgctttcttgtttccatttcactgcagtcctgatcgctggatgctatgcatgaaatgcatttgctgtgcttgcgagattgggcatttactatgagctttgtgacagttaacatcttggtcctgtttggaagctgggattgggaatcaaatccttacatggtttaggagcatccagtttgaacttaaaccattgtagacatctgctgcaataaaaacaattggcttcggtgagaggcactcatcatcagttcaaacttaaaacgagataagccatcggttgattggcctaattaccttgcttcccgtgattgttcgcctcgctgaaaggatatgctcacaacccgtactgttttgacttgttatccacatactatttaagtacgaaaggacatgcgtactactttcatttgttgttcttcgtctagtcttcagactgataatataaggtgaaaaacttcgatgtttcgcgtgctgtcaagtgattgtgaagcaaagtttctgttagtgtcaatgcgtacaggctgcaatggccatctttactcctacttgaagcatatctctgatccacactgatgatgatgagttgtgtgcgccacttttttttctttttctttcagaactactcatccatcataactgtccaccccgagagcattgacgggaggccgggcaccctggtgatcgagtcgttcgtggtcgatgtgcctgatggcaacacgaaggacgagacatgctacttcgtggaggccgtgatcaagtgcaacctcaattctctcgcagaggtatcggagcagctagcagtggagtcacctacgtcgctgatcgatcagtgaagtcacctgcgtcgcccatcgatcagtgaccaccggtacaaaaaaagacgtcaatcagcaacaaataagaagaagcttcgaaggctggctggagagttcaacctttttgagaccggtggtttggccatcgtcttctgcgtgtaatgtctcttggaatatggaagtattagtcgttgtgtaggattaaacatctgtagtagcttgtatgctagggatggttgtttagccttagaaactgcacctagatacctcatggcatgtatgcatactgctagtatgtgtagagatcagggaaagcatggagcgggttttgcctcttaggtgcatggagatctgtctttttttccccctccattttgcggtggcgactctattggttggggttcttggataaatatactttcccgcgaacgcatagggccggattttggaattggttcaattctcgtaattattgtattctctagtgttattgggatttggggtttggaattgccggactgcgataagtgatgaaaatgtagacattaaagctct

SEQ ID NO: 150010 - DNA, 1344 bp, Zea Mays
agaaaccagaccaacaacaaaaaccgactagcccaggcaagcagaaacccactgtctccgcttccgctcccgactcctttgtctcgtcctcatccatccaaccaggcgagccaacaagcaagcaaaagtaaacggggcgaggagctggagagacgccggcgacgcgaagcaaccgcccgatcggagccgcggctgagcaggagggagccggagatggtgggtctcgtcggcggcagcacggcgcgggcggagcacgtcgtcgccaacgccggaggggaggcagagtacgtgcgccgcatgcaccgccacgcgccgaccgagcaccagtgcacctccaccctcgtcaagcacatcaaggcgcccgtccacctcgtgtgggagctggtgcggaggttcgaccagccgcagcggtacaagccgttcgtcaggaactgcgtcgtgcgcggggaccagctcgaggtcggcagcctgcgcgacgtcaacgtcaagaccggcctgccggcgacgaccagcaccgagcgcctcgagcagctcgacgacgacctgcacatactcggtgtcaagttcgtcggcggggaccaccgcctccagaactactcatccatcataactgtccaccccgagagcattgacgggaggccgggcaccctggtgatcgagtcgttcgtggtcgatgtgcctgatggcaacacgaaggacgagacatgctacttcgtggaggccgtgatcaagtgcaacctcaattctctcgcagaggtatcggagcagctagcagtggagtcacctacgtcgctgatcgatcagtgaagtcacctgcgtcgcccatcgatcagtgaccaccggtacaaaaaaagacgtcaatcagcaacaaataagaagaagcttcgaaggctggctggagagttcaacctttttgagaccggtggtttggccatcgtcttctgcgtgtaatgtctcttggaatatggaagtattagtcgttgtgtaggattaaacatctgtagtagcttgtatgctagggatggttgtttagccttagaaactgcacctagatacctcatggcatgtatgcatactgctagtatgtgtagagatcagggaaagcatggagcgggttttgcctcttaggtgcatggagatctgtctttttttccccctccattttgcggtggcgactctattggttggggttcttggataaatatactttcccgcgaacgcatagggccggattttggaattggttcaattctcgtaattattgtattctctagtgttattgggatttggggtttggaattgccggactgcgataagtgatgaaaatgtagacattaaagctct

SEQ ID NO: 150011 - DNA, 1140 bp, Zea Mays
caacaacaaaaaccgactagcccaggcaagcagaaacccactgtctccgcttccgctcccgactcctttgtctcgtcctcatccatccaaccaggcgagccaacaagcaagcaaaagtaaacggggcgaggagctggagagacgccggcgacgcgggcggagcacgtcgtcgccaacgccggaggggaggcagagtacgtgcgccgcatgcaccgccacgcgccgaccgagcaccagtgcacctccaccctcgtcaagcacatcaaggcgcccgtccacctcgtgtgggagctggtgcggaggttcgaccagccgcagcggtacaagccgttcgtcaggaactgcgtcgtgcgcggggaccagctcgaggtcggcagcctgcgcgacgtcaacgtcaagaccggcctgccggcgacgaccagcaccgagcgcctcgagcagctcgacgacgacctgcacatactcggtgtcaagttcgtcggcggggaccaccgcctccagaactactcatccatcataactgtccaccccgagagcattgacgggaggccgggcaccctggtgatcgagtcgttcgtggtcgatgtgcctgatggcaacacgaaggacgagacatgctacttcgtggaggccgtgatcaagtgcaacctcaattctctcgcagaggtatcggagcagctagcagtggagtcacctacgtcgctgatcgatcagtgaagtcacctgcgtcgcccatcgatcagtgaccaccggtacaaaaaaagacgtcaatcagcaacaaataagaagaagcttcgaaggctggctggagagttcaacctttttgagaccggtggtttggccatcgtcttctgcgtgtaatgtctcttggaatatggaagtattagtcgttgtgtaggattaaacatctgtagtagcttgtatgctagggatggttgtttagccttagaaactgcacctagatacctcatggcatgtatgcatactgctagtatgtgtagagatcagggaaagcatggagcgggttttgcctcttaggtgcatggagatctgtctttttttccccctccattttgcggtggcgactctattggttggggttcttggataaatatactttcccgcgaacgcatagggccg

SEQ ID NO: 150012 - DNA, 729 bp, Zea Mays
agaaaccagaccaacaacaaaaaccgactagcccaggcaagcagaaacccactgtctccgcttccgctcccgactcctttgtctcgtcctcatccatccaaccaggcgagccaacaagcaagcaaaagtaaacggggcgaggagctggagagacgccggcgacgcgaagcaaccgcccgatcggagccgcggctgagcaggagggagccggagatggtgggtctcgtcggcggcagcacggcgcgggcggagcacgtcgtcgccaacgccggaggggaggcagagtacgtgcgccgcatgcaccgccacgcgccgaccgagcaccagtgcacctccaccctcgtcaagcacatcaaggcgcccgtccacctcgtgtgggagctggtgcggaggttcgaccagccgcagcggtacaagccgttcgtcaggaactgcgtcgtgcgcggggaccagctcgaggtcggcagcctgcgcgacgtcaacgtcaagaccggcctgccggcgacgaccagcaccgagcgcctcgagcagctcgacgacgacctgcacatactcggtgtcaagttcgtcggcggggaccaccgcctccagtcctgatcgctggatgctatgcatgaaatgcatttgctgtgcttgcgagattgggcatttactatgagctttgtgacagttaacatcttggtcctgtttggaagctgggattgggaatcaaatccttacatggtttag

SEQ ID NO: 150013 - DNA, 91 bp, Zea Mays
cgcccaaaggccaaagtgtgtaaaagtttcacgtgaccaaaaggaaactccagaaaatgatattttatatcacagatcggagaactggatt

SEQ ID NO: 150014 - DNA, 735 bp, Zea Mays
gttgaaggtcctagaggtctcactcccactaaaatatccaatttggactgcttgggggggcagtgggcagtagaaatcttatctattttgtctactacatacagatttggacaaagtgatatttatgtgtgggagctgagccaacgaggtgtagtgcttgtatgccacgtttttgaacctttggtgtgctggcactctaggaatcctccttcatcaagcgtggatgagctccactgcacctgcccctatattcagtaccttgggctgccgtattgagtgaagatttcttccttgccctcaaattctagccaaagttcactgcttgagtgtgcagtccttatgtactgctggtataaccccctccctagcccaggtttgcccccttctccccatggactggatgcgctcagtgacccctccccctgcctacttattcagtgtgttccacggctgagttcagaaaagcttttctcccttgttctcgagctgtagtcccagtccactacaaaggtgttggagtcctggtattcttgctggtgtgcatcctctctttcagccaccaagtttgttttactctagagctgaatgccaacctcttgcctgtggtgaccaaacccaaccgtttttcacctcctcgtggacaaagtttcccacaagtattcttggccgtgtactacttgttccatgctcggcaaaggtcagtgaagctcaccatttactacttgtactctacca

SEQ ID NO: 150015 - DNA, 1925 bp, Zea Mays
ggcagtccacatggccgcaccgcctagacacgggtcgcgcgcaataacccaccgatcgagctgagcacgcacgacctggcgctcgctttaaactctcgctctcaatcgtcgtcgcctcgggctctcggcagacagctgcggcggcgtgcctggcagtgaagcggtagcaggtagagccagccagtctagcttagccaccacactagtgtgatggcgaccaccggcggcggcaaggcggcactggtgctggggcggcttctgcttctgctgtgcgtgctcggccatggagctgcgcagcggtacaacgccatctggagcttcggcgactccatctccgacaccggcaacctctgcgtggggggcgggtgcccttcctggctcaccacggggcagccgccctacggggagaccttcttcggccgccccaccggacgctgctccgacggccgcgtcatcgtcgacttcctggccgagcactttgggctgcccctgctgccggcttcgaaagccggcggcgacttgaagaagggggcgaacatggcgatcatcggcgccaccaccatggactttgacttcttcaagtccatcggcctcagcgacaagatctggaacaacgggccgctggacacccaaatccagtggttcaggcagctgctcccctccgtgtgcgggaaggcagattgcaagaactacctgtccaagtccctgttcgtggtgggcgagttcggcggcaacgactacaacgcggcgctcttctcggggcggtccatggcggaggtgagagggtacgtgcccatggtggtgagcaagctcgtccgcggcctggaggcgatcgtgaggagcggagccgtggacgtggtggtgcccggggtgctccccatcggctgcttccccatctacctcaccctctacggcacctccaacgccgccgactacgaccgcgacggctgcctccgcgcctacaacggcctctcctcctaccacaacgcgctgctgcggcggagcctgtccggcctgcgcaggacgtacccgcacgcccggatcatgtacgccgacttctacacccaggtcacccacatgatccgggcccctcacaacttcgggctcaagtacggcctcaaggtctgctgcggcgccggcgggcagggccagtacggctacaacaacaaggcgcggtgcggcatggccggggccagcgcctgcgccgacccgggcaactacctcatctgggacggcatccacctcaccgaggcggcctaccgctccattgccgacggctggctcaagggcccctactgcagccctcccatccagcactgatcgagctagctgggccgggggactgaatagctaattaagctagcagcatattattcatgagtgacatcatcgtgctttgtttgtttacggctaattgccatgtgcatcatcctagcgctctagcaggttcatcaatgatgggtttgctatttggtttgtcaattagttgttcaattggtgaggaaggggtagctggtgtttcggcggtgtggtgggaacagtgatgaataaacgtgtaatggactgtttacaattagctacgacgtacgtgaacaataagctcatatcacagcaaacaacaatatatgacgggaaggagcacacgtagagaggtcgttctagtatcaaggaaataaaccacctagaatgttgtcaaatctcatcgagagacatagcaaacaacaagatatgaaaagttagggcaataaaatgatagtagataagtaatttttttggtgattatattgaaagttagatttctcaatcggccgtgatcttcccatttacatagagagggttatcttaccctagttggaaacaagttcaaaatacagtcttcaattttttcacgtcgaaaatagatccaaaaatcaatttgaaacaaa

SEQ ID NO: 150016 - DNA, 1689 bp, Zea Mays
gtccacatggccgcaccgcctagacacgggtcgcgcgcaataacccaccgatcgagctgagcacgcacgacctggcgctcgctttaaactctcgctctcaatcgtcgtcgcctcgggctctcggcagacagctgcggcggcgtgcctggcagtgaagcggtagcaggtagagccagccagtctagcttagccaccacactagtgtgatggcgaccaccggcggcggcaaggcggcactggtgctggggcggcttctgcttctgctgtgcgtgctcggccatggagctgcgcagcggtacaacgccatctggagcttcggcgactccatctccgacaccggcaacctctgcgtggggggcgggtgcccttcctggctcaccacggggcagccgccctacggggagaccttcttcggccgccccaccggacgctgctccgacggccgcgtcatcgtcgacttcctggccgagcactttgggctgcccctgctgccggcttcgaaagccggcggcgacttgaagaagggggcgaacatggcgatcatcggcgccaccaccatggactttgacttcttcaagtccatcggcctcagcgacaagatctggaacaacgggccgctggacacccaaatccagtggttcaggcagctgctcccctccgtgtgcgggaaggattgcaagaactacctgtccaagtccctgttcgtggtgggcgagttcggcggcaacgactacaacgcggcgctcttctcggggcggtccatggcggaggtgagagggtacgtgcccatggtggtgagcaagctcgtccgcggcctggaggcgatcgtgaggagcggagccgtggacgtggtggtgcccggggtgctccccatcggctgcttccccatctacctcaccctctacggcacctccaacgccgccgactacgaccgcgacggctgcctccgcgcctacaacggcctctcctcctaccacaacgcgctgctgcggcggagcctgtccggcctgcgcaggacgtacccgcacgcccggatcatgtacgccgacttctacacccaggtcacccacatgatccgggcccctcacaacttcgggctcaagtacggcctcaaggtctgctgcggcgccggcgggcagggccagtacggctacaacaacaaggcgcggtgcggcatggccggggccagcgcctgcgccgacccgggcaactacctcatctgggacggcatccacctcaccgaggcggcctaccgctccattgccgacggctggctcaagggcccctactgcagccctcccatccagcactgatcgagctagctgggccgggggactgaatagctaattaagctagcagcatattattcatgagtgacatcatcgtgctttgtttgtttacggctaattgccatgtgcatcatcctagcgctctagcaggttcatcaatgatgggtttgctatttggtttgtcaattagttgttcaattggtgaggaaggggtagctggtgtttcggcggtgtggtgggaacagtgatgaataaacgtgtaatggactgtttacaattagctacgacgtacgtgaacaataagctcatatcacagcaaacaacaatatatgacgggaaggagcacaccaaacaacaagatatgaaaagttagggcaataaaatgatagtagataagtaa

SEQ ID NO: 150017 - DNA, 1730 bp, Zea Mays
attcaggaacaacgatctttggcacggcggacggcgacgacccctccaactcccccaccttgatatcgccgctgctacgctgttatcaccattcgaagccatgagatctcttcttacccgcctcttcacctcaactcacattgtcatggcctcgtcttccttctcttcctctccatctcggcggttggtccacctcacacgccatctcgtctcctcttcttccggcgagctttcctcagtcggcgcccccgccgctgccgcctcagatgccgaccccgtgaaaagcccacgctccactgcctccagggttcacgccgcggtgctggtctgcctcttcgaggaccctagcagtgggccacgggtcctgcttacaaagcgcgcttcctccctctcctcccactccggggaggtgtcgttacccggagggaaggtggacgatggagacgcagatccgaaggccacagctctacgggaggcgaaggaggagattggactggatccggcgcttgtttctgttgttacagttcttgagcctttcctatcaaagaatggcctcactgttgttcctgtcattggtatggtcccagataaagccttatacaagcctgtcttgaataaagctgaagtggaggacatctttgacgcacctctggagatgtttctaaagttttccacttgtatcgcatcaacaggacgaccaccggaggacaagacagatgaactggatgggcatagatatccccgtccagtttttcgactacgaggcagatggcaagaagttcgtgatttggggcttgactgcgcacatcctgacacgcgcagcggcagtcattttcgggaggaaaccatcattcgtcgagcttcccagacccaaatatgcaggtgcacctgttgctggcactggcaagtcgaatctctgatggagcataagctggatgtaaggggcctctttgggtttggaacttggtgcatgaaccttgtgattgtagaattatatatgtttctcactatgtgatggctggggaaggtaccgaaaattgcttggtatatttatctacagaatataagatacatgctcaactgtattttgagtgtagcacagcagacaatattggcacacttggtggatggtgctttgtaaaaaagaatgtatacaatgaactccagaaagtatactgtcttgaaactgaagcttgtgcttgctgtcatactagaagagtaccgatttccttatccttaaagctaaagttatttaatttcaaaaaaaacaattaaagttattgttattcagacactctaataagtggttctgaaagcgacatggaaacagctcactcgtgattgattccagttgttattaaattaaataataattggagcaatagcacactgaacataatgcaaaacgatgagaccaccctggcaaaatagatcgcattcaaaaattagcaaggataacctaactaagcggccagtgacgtgcttcagcggcgacggcggtgagtgccggccgctgggctggctgctggggctgccgttcgcactgctcgccgtcctttctccatcgtcggttttgcccctgcttccgctgcacatctcgtgcatctgcacgtgctgcctctgcgtgacggtggtgctggaggtggcggtggagctcatcaagccgccgctgcacgttatgcctggttcacctccatccaagataccccgctagacaagtggtcggagta

SEQ ID NO: 150018 - DNA, 1707 bp, Zea Mays
gcattcaggaacaacgatctttggcacggcggacggcgacgacccctccaactcccccaccttgatatcgccgctgctacgctgttatcaccattcgaagccatgagatctcttcttacccgcctcttcacctcaactcacattgtcatggcctcgtcttccttctcttcctctccatctcggcggttggtccacctcacacgccatctcgtctcctcttcttccggcgagctttcctcagtcggcgcccccgccgctgccgcctcagatgccgaccccgtgaaaagcccacgctccactgcctccagggttcacgccgcggtgctggtctgcctcttcgaggaccctagcagtgggccacgggtcctgcttacaaagcgcgcttcctccctctcctcccactccggggaggtgtcgttacccggagggaaggtggacgatggagacgcagatccgaaggccacagctctacgggaggcgaaggaggagattggactggatccggcgcttgtttctgttgttacagttcttgagcctttcctatcaaagaatggcctcactgttgttcctgtcattggtatggtcccagataaagccttatacaagcctgtcttgaataaagctgaagtggaggacatctttgacgcacctctggagatgtttctaaaggacgaccaccggaggacaagacagatgaactggatgggcatagatatccccgtccagtttttcgactacgaggcagatggcaagaagttcgtgatttggggcttgactgcgcacatcctgacacgcgcagcggcagtcattttcgggaggaaaccatcattcgtcgagcttcccagacccaaatatgcaggtgcacctgttgctggcactggcaagtcgaatctctgatggagcataagctggatgtaaggggcctctttgggtttggaacttggtgcatgaaccttgtgattgtagaattatatatgtttctcactatgtgatggctggggaaggtaccgaaaattgcttggtatatttatctacagaatataagatacatgctcaactgtattttgagtgtagcacagcagacaatattggcacacttggtggatggtgctttgtaaaaaagaatgtatacaatgaactccagaaagtatactgtcttgaaactgaagcttgtgcttgctgtcatactagaagagtaccgatttccttatccttaaagctaaagttatttaatttcaaaaaaaacaattaaagttattgttattcagacactctaataagtggttctgaaagcgacatggaaacagctcactcgtgattgattccagttgttattaaattaaataataattggagcaatagcacactgaacataatgcaaaacgatgagaccaccctggcaaaatagatcgcattcaaaaattagcaaggataacctaactaagcggccagtgacgtgcttcagcggcgacggcggtgagtgccggccgctgggctggctgctggggctgccgttcgcactgctcgccgtcctttctccatcgtcggttttgcccctgcttccgctgcacatctcgtgcatctgcacgtgctgcctctgcgtgacggtggtgctggaggtggcggtggagctcatcaagccgccgctgcacgttatgcctggttcacctccatccaagataccccgctagacaagtggtcggagta

SEQ ID NO: 150019 - DNA, 1290 bp, Zea Mays
attcaggaacaacgatctttggcacggcggacggcgacgacccctccaactcccccaccttgatatcgccgctgctacgctgttatcaccattcgaagccatgagatctcttcttacccgcctcttcacctcaactcacattgtcatggcctcgtcttccttctcttcctctccatctcggcggttggtccacctcacacgccatctcgtctcctcttcttccggcgagctttcctcagtcggcgcccccgccgctgccgcctcagatgccgaccccgtgaaaagcccacgctccactgcctccagggttcacgccgcggtgctggtctgcctcttcgaggaccctagcagtgggccacgggtcctgcttacaaagcgcgcttcctccctctcctcccactccggggaggtgtcgttacccggagggaaggtggacgatggagacgcagatccgaaggccacagctctacgggaggcgaaggaggagattggactggatccggcgcttgtttctgttgttacagttcttgagcctttcctatcaaagaatggcctcactgttgttcctgtcattggtatggtcccagataaagccttatacaagcctgtcttgaataaagctgaagtggaggacatctttgacgcacctctggagatgtttctaaaggtacttctttctctatcatagtatcatatgttgtagtgcaacaattctatcatagattcctttataaggcgcgagtaaggacattgcattgcattgcatagttttccacttgtatcgcatcaacaggacgaccaccggaggacaagacagatgaactggatgggcatagatatccccgtccagtttttcgactacgaggcagatggcaagaagttcgtgatttggggcttgactgcgcacatcctgacacgcgcagcggcagtcattttcgggaggaaaccatcattcgtcgagcttcccagacccaaatatgcaggtgcacctgttgctggcactggcaagtcgaatctctgatggagcataagctggatgtaaggggcctctttgggtttggaacttggtgcatgaaccttgtgattgtagaattatatatgtttctcactatgtgatggctggggaaggtaccgaaaattgcttggtatatttatctacagaatataagatacatgctcaactgtattttgagtgtagcacagcagacaatattggcacacttggtggatggtgctttgtaaaaaagaatgtatacaatgaactccagaaagtatactgtcttgaaactg

SEQ ID NO: 150020 - DNA, 105 bp, Zea Mays
atttatctcaattctcaaaaaacaaacttcatccttcagaattgctgatatgatattatttctcttttctcttttctactatataaagcattagtttcaacggtc

SEQ ID NO: 150021 - DNA, 110 bp, Zea Mays
attgaactgaacctagattcagaatgcactgaacaagattttagtgaaccattgagagtaaacctattaaatagacatacatggaacaaaaaatgaaaccggtgggttta

SEQ ID NO: 150022 - DNA, 182 bp, Zea Mays
gggtatggtcacaagaatgaaaagaatgggcacaagggcaacggaagaagcaagctttaaaactgctttatcccgtcaaaacaaaatcatgctaaacaattggttagtacaacatcctgtatttacgctggtcagtgccattgcttcgcaatctcctcatcaaggatttggcaagcctgctg

SEQ ID NO: 150023 - DNA, 1489 bp, Zea Mays
gagacaaataaagagtcgagtcaaaaataaagtctgtgagtgatgttctaagtgcggccaatgactacaaatgttatttatagagtttaatatttacattttctagtttcttctgtgtgtcacccttgaccacctgcgccgtgtctcttctgtgtgccactgctgccctcacccctggatgagaaatgaaggcaccagatttaaagtgctcatatgagcacaagagctccatgagcacataatacgttccctttgctaaaagcaaccacaagcgaaaaaaaaacaaatttccctgctctttccgtcgcctccgccgtcgccgtaagactgtcgatggccgcagccaccgccaccgtcaccttctcgccatctcccccatccttcctcaactcccatatccctcgtggccaccgacctgcctccaccacgacgatagcttttgcacgccgttttcgcggtgtaaaacctagtcccgatcgctcccgaggcaaggtcgaccaggtcgcccaccccgacgatggattcggcgcactcgaagcggagctctggcgcctgcgccgcctcgtggagctaaagatccaccgcctcggcaccgaggccgacgccgcctaccgcgacctacgctcggcggtgcgcgaggtcagcggagaccgcgtcgtcctaaccttccgccgctcgtcgctgcgctacctcaccggagcactcctcttcttgctcgcctgcgccatcgcggcgcgattgctgctggggatggtcttacgggcgtggcagcggcggggtttgaggaggggattgtggggtgaaggcggcagggcggttgtgcgaaggagggaccgcagcttgggagggaaggaggtggtggttgctgtgtcgtcgccgcctaaggaggcagctcggaccagtcgtgtcgcagagccagcaaaggaggtctggagggggtactcacaagctaagttgccagactggtggcccaatgttggagcgacggtgatggaacctgggccagagatggagaagtgggcaagaatggcaaacagattggtccgagcaataattgatagtagagtcatggggagggattacagatatgatgatgcaattcaagttgcatgtaagttcacgggcaacgtactgatcaagtggttcctaaaaagcttcgggctacatgacaacaccgtgctgatgaagtggttcctaatgcgagggctacatgacaacaacgtgctgatgaagtggttcctaatgcgagagcgtattggtgaagtggttcctaatgcaagagtcgaagttactcaaggactggtattgacatcaatggaaggaatgaagtggtgactggagggctaggggtgcctcatcaaatattgctacggcagaagctggtaatacgttgctcacccttgtcattgggcaacataacaatcagccacaactattcagaaatagtgatgaaccataatgaaatgggaataaagaacattatgatgcc

SEQ ID NO: 150024 - DNA, 330 bp, Zea Mays
atgcgggagacagggaggcacgctgacagagaggcgcgcggcggcgcgtggacagggaggtgcgcggcggcgcggggacagggaggtgcgcggcggcgcggggacagggaggcgctcggcggcggtgggggagagggtggcgcggggacagggaggtgcgcgtacaggaggggcgagggcgtgctcgggatgttattgcatctgggtgcattcaatatagagaatgcacccagagaacattttaattggttgaatatacagacaaaaggtatctgcctccgtgatgaaaaatccccgtgcgcacgtctagagtcatcattatttgtttga

SEQ ID NO: 150025 - DNA, 1989 bp, Zea Mays
caactacgccaagccaagcttagcgaaactcaggcgatcggaccacgccccaccgaacaagtgcagcgcccgaccctccccacggaacgaagcttcggcgttctcgtcgccccgtcgcaagtgcagatcacaagtccataacaagaaagacaacaaaactatgctgaaagatgtgcttgcatagaagatacttctgctgcaacaccaccaagggcctagtggctcttgcgcaagatctgcaggcctgctcgtctcttgacttgagcggcggtcaccttgtccgcatctactccacgcccttcagactccgacgccagcaacctataaggcgcagtccacctgattgacaacagaaagctagccttgtgcgtgatcacacagttttcatggatataaaagatatgaagaccagagggaagactttgacggagcggtatgagctggggaagctgctggggaaaggcgcgttcgggaaggtacactatggaagggaccttgagtccaaccaggatgttgctatcaagatcatggataaggacagggtgctcaaggccgggctctcagagcaggtaaaatgtgagatcacgacgatgcggctggtgacacacaaaaacatcgttcgtctccatgaggtcatggcgacgcgaaataagatctacatcatcatggagtatgcgaaagggggtgagctctttgaaaagattaagaggagcgacaggctcacggaggctgacacacacaaatacttccaacagctcatcgatgcactagatcactgccatagccgaggcgtgtaccatcgggacttgaagcctgagaacctgctgctggatgagaatggggacctcaaggtgtctgactttggactgagcgcgttttcagagtcgaggaggacagatgggttgctccatactgtctgtgggaccccggtgtatatagctccagaggtgatcaagaagacaggctacgatggtgcaaaatcagacatctggtcttgtggtgttgtcctctttgttctcgctgctggctacctccctttccagggcccaaacttgatggagatttatcggaagatacatgatagagattttaggtgccccagttggttttcacacaaactcaagaggttgctatacaagatcctgaaccccaaccccagcatgagaccttcaattcaggagataaaagagtctacctggttccgaaaaggtcctagggagatcagtgcagtgaacgagaaagttcttagcgagaatgccaccaccacaaatgctgccccagtgcttccttctaggcgcaaggagattgctcacgaagatatgaagtccttggttgccacaaacctcaatgcctttgaaatcatcgcgttatcagcaggattggacctgtctggtctgtttatcaaggagtgcaggaaggagacaaggttcacttcagataagcctgcattgtccatcatcgcaaagcttgaagacgtcgcaaaagcactgaatctcaggataaggaagaaggacaacaacactatcagcattcaagggaggaaggaggggggcaatggtgtccttaagtttgacacgcagatctttgagatcacaccatcctgccatctcgttcagattaaacaaaccagtggcaatctacttgagtacgagaaactgttggaagagggcatccgaccagggttaaaggacgttgtctcggcatggcatggagatgatctgcaacagaagcagaagtagcttcggatgtctcctgtagattctattctagtacatttcattccttatttttttagcagctacattccttttttgtattggtggtgatatgaaccattaggttgtgttttgttcagcaataattgttaaggagctgagttattgtgttacaacctaatgattgttacaattttataatgaaaaaatgttgtcgatccttaaaaagggtcgagctttccaggagatccattagtagtttgatgtgtaccag

SEQ ID NO: 150026 - DNA, 219 bp, Zea Mays
atggcgctggcgcccggcgagagcgggcgatatcgcctcgctctcgcccgcgctggagcgcccgccagggcgagaggcgggcgagagggaggcgagagggaggcgaggcgctggcggggcgagagcgcgggcgagagcgacgtgtcgcgatctgattggtccacgtgtcgcgatctgattggtccacgtgtgctagccgttgcaactagccgtttttga

SEQ ID NO: 150027 - DNA, 268 bp, Zea Mays
gaaggcaacaatccaatatcaacaaactcgccccaccatacaagagtcttaaattcacaatagcgtgtgaccagtttcaatgcgaattttccatacaatacaggagcatcctgtgcaatagttttgtaggttgtatcggaattagaaccatggaaagagctccacttttctctgtaggaagctgcattctcaagagacagaatcagctgacctttccaatcagtgcatcagatctgcagacatcgccacgacaaagtggacaaaccct

SEQ ID NO: 150028 - DNA, 2031 bp, Zea Mays
gctgcgttgacgtccagctcctgctcgttggtcgctggtgggcaccagcacaaaactgggtctcctcggttcttctcctcgcatccagcagaccgcagacgacgactacctcagccgccttccaatggcgcccctctcctgccgcgaccttcccgcccggctaccgactcttccccaccatgctagcactcacccacacctctccttcctatcgggcggcccagcccctcgccgatggcgatcactcaccacctcaaacactctgcggcttcgcttggcggccactaaggacgacgcggtcgcctccctcgtcggaaggctcgagcacgacgtggcgaacgcccagtaccgcgacgacgttctggaagaagaagacgaagagcagcgggaggaggaagaagaggagcagcagttccttgacgacgacaacgctcggcgccgcggcgcggggaagcatcgggacgagctgcgcagtcggtggcgcgagatccacgggtgcgacgactgggcggggctcctggaccccatggacccgctgctgcggtcggagctgatccggtacggcgagctggcgcaggcctgctacgacgccttcgactacgacccgtcgtcccgctactgcggcagctgcaagtactcgcggcgcgacttgttcgagcggctgggcatggcggacgcggcgcgcggctacgtggtgtcccggtacctgttcgcgacgtccaacatccggttccccaacttgttcccgcagtcccgggcgggcgccaggatctggagccagagcgcgagctggatcgggtacgtggccgtgtccacggacgaggagagcgcgcggctggggcggcgcgacatcgccatcgcgtggcgcggcacggtgacgcggctggaatgggtgtcggacctcatggacttcctccggcccgtggcggaggagggcatcccgtgcccggaccgggaggtgaaggtgctggccgggttcgtggacctgtacacggaccgggaccccagctgccggttctgcaagtactcggcgcgcgagcaggtcctgacggaggtccgccggctggtgggccgctacacggcggcgggggaggacgtgagcgtgacggtgaccgggcacagcctcggcagcgcgctggccatgctgagcgcctacgacatcgcggagaccggcgcgaacatggaggccgcgcccgtgtgcgtgttctcgttcgggggcccgcgggtgggcaacacggcgttcaagcggcgcttcgaggaggagctcggggtgagggcgctgcgggtggtgaacgtgcacgacaacgtgacgcggatgccggggatcctgctgaacgagggggcgcccgaggtggtgcggcgcgtggcggaaggcctgctgcgtgtgccctggtgctacgcccacgtcggcgtggagctgccgctcgaccacaagcgctcgccgttcctcaaggacacgctggaccccgcgtgctaccacgacctggaggcgcacctccacctcatcgacgggtaccacggacgcggtgagcggttcgtgctggcgagcgggcgcgacccggcgctggtgaacaaggcgtgcgacttcctcaaggaccaccacggcgtgcccccgtgctggcgccaggacgagaacaagggcatggtccgcgcccgcgacggccgatgggtccagcccgaccgccacggctggcacctggacgaccacgaccacgaccacggtgaccaccgtcaccaccaccaccaccaccaccacgacggtcaccaccaccgtcatcacaagaagcacagcaccgagggcgcccggcaccaccaccgtcacggtcacggccaggacatgcagtctcatgcataggccaaagcatgaactatatatagctctgaccgttcccgtcccgcgggacaccagttgtccgcgtgttgatgccgtgccgcacggagatgcaaacctagccgtggagaggagctgaaatattgggatcttatctctcgatcgatggtcatgtgcgatgtgagcgtgtattattatta

SEQ ID NO: 150029 - DNA, 1286 bp, Zea Mays
gccagtagtaatgcgaagtgggtcaattggggatctgggaaggcagctcgcacggacgacacgggagtggaccaaggcacgcgctgccggatcgctgcttgctgctcgctgatctgagtctgcagtttggtgtcatggactggtggtgattgatgttttccgacgacccgatcgattcagtggctgtgacttgtgtgagctagtacgatgtgatgcaagagcatcaaggatttccaggcgctactccaccggagctacagccggacgacgacgacaccgtcggcgtcgccacccgtgccagtgccgcttcccctggcgccgccgtcccggtcccggtcccgggcgtgcccgcgcccggccgccaagccgaagctgctcatcttcatccgcaagcagaaccgcgtgctgctcaacctcccgcacgtggtgacggcctgccggcgggccgggttcgcgccgcacgtgatgaacctgcggcggcagaccccgctggccgcgatccacgccgcgctggcgtcggcggacgccatggtggccgtgcacggcgcggccgtcacccacttcctcttcatgcgcccgggctccgtgctcctccagatcgtgcccgtgggtctcgactgggcggccgacgccttctacggcaagcccgcgcagcagctcggcctcgagtacctcgagtacaaggtggcgcccgaggagagctcgctggccgccgagtacggcctcgacagcaccgttctgaggaacccctgggtgatcagcagccgcggctggtgggagatgaagaaagtgtacatggaccgccagaacgtcaccgttaacatcaagcggttcggcgagctactcaggacggcgcggacgcacctcaagaacaccacggcgtgcgccgccgccgcggcgctgaggtagaagatgctagttgagcttggtcaggtgctaatgacttagtcatacttgtcaatttctttgtgttttcgtcgagatcctgtaaatatgattgggttggttcttttggtcgagagattggtggggatcgatcgccttcttctacagtgcattcgtttggttcatggtgttgctagagcagaagcagatgaagaatagtttatggcaggggcagctgtcctcaaacaccttgttcacactagttcataggggtagcagctctttttatttctcttcaaattttctttttgttcttctcattctttgggtgtcatgatgatgtataagaaactacatgtctttctctgtaacaaagatcaatagtccagactcttttacag

SEQ ID NO: 150030 - DNA, 2442 bp, Zea Mays
ccgtatggctttgacttttgaccagttggaactacacggattagctgcagacagaggggaggaagtttagcacacgtcatcaaaacaccctgtttctccttgtcttccatgtgagcccggtgctctgcattctccttcgtcatttcctccaccgctcacctcttctgctccccaccccaactccgcccccatgaatatgatcatcagatgcggctagcatcatatctcgcctccacttcgtcacctcctcgccattctatcccaccagctgcatatatccctggtgtgtgaggtcagctgttttagctcagcgcgcgcggcgtggcagcaaaggaagcaaggagggagagcagcggcggcggcgtagcatgcggcggtgagagcgagggagctagggaggaggaagggatagccgagagagcgagagccagaggatgatgcagctgccgcagcatcacaagccgtccgcccactcctgctgcccgtcgtggatccggaggtccccgccgtcgccgccgccgccgccgcacaagaagctgggcggcgggaggagccggtatgcttgccgcctcgtgcccctgctcgtgctcaccgtgtacagcgtcgtcaccgtgcttcgcatccccagcgcctccctcgtcgtctccaccgccgattcagagcgcgtggacaggcgggaggacttggaggcgctcaagacccacctgccgtcgaaccagaacagcctcgaggcccgcgaggagacgcggtcggtggcctccctcccctgctccgccttcatcagcggtgaggcggggcacggcgaggagggcgtcctgtgctgcgaccggagccactaccgcagcgacgtgtgctacctgcgcggcgacgtgcgcacggacccgtccacctcgtcggtgctcctgtacaacgcggcccgcgggagcggccccgagaaggtgcggccgtacacgcgcaagttcgaggacagcgtgatgagcagcatcgacgaggtgaccatcgtgcccgtgccgggcggccacaacgcgagcgccagcgccctgcggcggcggtgcgacgtccggcacccgcgcggcgtgccggcggtggtgctctcgacgggcgggtacacgggcaacgtgtaccacgagttcagcgacgggctgatcccgctgttcgtcacggcgcagcggttcggcggcgaggtggtgctggtggtgctcgagtaccactactggtggctgggccgctacggcgccgtcctggagcagctcaccaactacaaggtggtggacttccgctccgaccggcgcgtccactgcttcgacgagatgatcgtcgggctccgcatccacggggagctcgtcgtggaccccaagctcatgcccaacggcaagagcatcaaggatttccaggcgctactccaccggagctacagccggacgacgacgacaccgtcggcgtcgccacccgtgccagtgccgcttcccctggcgccgccgtcccggtcccggtcccgggcgtgcccgcgcccggccgccaagccgaagctgctcatcttcatccgcaagcagaaccgcgtgctgctcaacctcccgcacgtggtgacggcctgccggcgggccgggttcgcgccgcacgtgatgaacctgcggcggcagaccccgctggccgcgatccacgccgcgctggcgtcggcggacgccatggtggccgtgcacggcgcggccgtcacccacttcctcttcatgcgcccgggctccgtgctcctccagatcgtgcccgtgggtctcgactgggcggccgacgccttctacggcaagcccgcgcagcagctcggcctcgagtacctcgagtacaaggtggcgcccgaggagagctcgctggccgccgagtacggcctcgacagcaccgttctgaggaacccctgggtgatcagcagccgcggctggtgggagatgaagaaagtgtacatggaccgccagaacgtcaccgttaacatcaagcggttcggcgagctactcaggacggcgcggacgcacctcaagaacaccacggcgtgcgccgccgccgcggcgctgaggtagaagatgctagttgagcttggtcaggtgctaatgacttagtcatacttgtcaatttctttgtgttttcgtcgagatcctgtaaatatgattgggttggttcttttggtcgagagattggtggggatcgatcgccttcttctacagtgcattcgtttggttcatggtgttgctagagcagaagcagatgaagaatagtttatggcaggggcagctgtcctcaaacaccttgttcacactagttcataggggtagcagctctttttatttctcttcaaattttctttttgttcttctcattctttgggtgtcatgatgatgtataagaaactacatgtctttctctgtaacaaagatcaatagtccagactcttttaca

SEQ ID NO: 150031 - DNA, 1411 bp, Zea Mays
ggtagagcggcggggcacacacggtttccggagccaaagccagtagtaatgcgaagtgggtcaattggggatctgggaaggcagctcgcacggacgacacgggagtggaccaaggcacgcgctgccggatcgctgcttgctgctcgctgatctgagtctgcagtttggtgtcatggactggtggtgattgatgttttccgacgacccgatcgattcagtggctgtgacttgtgtgagctagtacgatgtgatgtcagtgatccatgtcccatatggccatgcctaacacaagacatcgaagttggggaaatccttaacgcaagaatgctgatggtacgcaggcaagagcatcaaggatttccaggcgctactccaccggagctacagccggacgacgacgacaccgtcggcgtcgccacccgtgccagtgccgcttcccctggcgccgccgtcccggtcccggtcccgggcgtgcccgcgcccggccgccaagccgaagctgctcatcttcatccgcaagcagaaccgcgtgctgctcaacctcccgcacgtggtgacggcctgccggcgggccgggttcgcgccgcacgtgatgaacctgcggcggcagaccccgctggccgcgatccacgccgcgctggcgtcggcggacgccatggtggccgtgcacggcgcggccgtcacccacttcctcttcatgcgcccgggctccgtgctcctccagatcgtgcccgtgggtctcgactgggcggccgacgccttctacggcaagcccgcgcagcagctcggcctcgagtacctcgagtacaaggtggcgcccgaggagagctcgctggccgccgagtacggcctcgacagcaccgttctgaggaacccctgggtgatcagcagccgcggctggtgggagatgaagaaagtgtacatggaccgccagaacgtcaccgttaacatcaagcggttcggcgagctactcaggacggcgcggacgcacctcaagaacaccacggcgtgcgccgccgccgcggcgctgaggtagaagatgctagttgagcttggtcaggtgctaatgacttagtcatacttgtcaatttctttgtgttttcgtcgagatcctgtaaatatgattgggttggttcttttggtcgagagattggtggggatcgatcgccttcttctacagtgcattcgtttggttcatggtgttgctagagcagaagcagatgaagaatagtttatggcaggggcagctgtcctcaaacaccttgttcacactagttcataggggtagcagctctttttatttctcttcaaattttctttttgttcttctcattctttgggtgtcatgatgatgtataagaaactacatgtctttctctgtaacaaagatcaatagtccagactcttttac

SEQ ID NO: 150032 - DNA, 97 bp, Zea Mays
gaattgaagtaaatactatcttagtctatgtttgtggtatattttgttttagcggtatatttagccgcacaatatattagaggttgtttaaaataac

SEQ ID NO: 150033 - DNA, 189 bp, Zea Mays
atggcggctaggagagtgccctcgccttcgcgggttgacgaggtggcaggggtgaagggggccgagactggagaagccaaccaagagttgtctgtggacgattacctaattgaagatgttggtatgttcgacgctcagataggggcggatattaggcccgggccacctgggccgtggcccgggtcgtag

SEQ ID NO: 150034 - DNA, 3217 bp, Zea Mays
atggcgctgttctatttttatgtttgtctgagggatcggatggatgggataatagattggttaacactgttaactatggggcccacatgtcatacaaacaatagcttatttccctttgttcttctctgcctagcactgccagctcacactgcttgtgccgacgcctatgcctgctgcagctccggtgagcatgtgcctccgtctgcccatgtgagctcacgcagccacccgttgcgtggccccaacctcacccatggccccacttgtctcctgccatgccggctctgctcacccacagcttcatccctggcagcgttggatccggatgatgatggtgacaatgcttttcacatagctgctgacgcagcaaaaatgatacgcgaaaacttgacttggattgctcaaatgctactacagccgtcacctgctgttgatgtgagaaaccaccgaggttggacactacgagactttcttgagaggcttccacgagaatggatttatgaagaattgatggaaatgcttgaagataaaggagttcatctctcaccaaccatatatgaggttgcggattgggtaaaatttagaagaactgttacatcaccagcttttggctggcaaggtgcaggacctagaagcattggttttgtccagtctgttgtagacaatgaccaccttgcggtgtcattttgtactggagaagcccatgttttgacaagtgaagttatcaaagttattccattaaataggggccaacatgtgcaactcaagcctgatgtttctgaaccaagatttggatggcgtggtcaatcgcgggatagcattgggacagttctctgtgttgatgatgatggaatcttgagggttggttttccaggagcttctaggggatggagagctgatcctgcagaaattgaaagggttgaagaatataaggttggtaactgggttcggattcgtccttcactaacggttgctgtgcatggcatggagtccattactcctggaagtgttgggattgtatactccatcagaccagatagcagtcttttattgggactttgctatttgtccaatccatggctgtgtgaaccggaggaggttgaacatgttgacccattcaagattggggaccaagtatgtgtaaagaggtctgttgcagagcccagatatgcatggggcggtgagactcatcacagtgttgggaaaataattgacatcgagagtgatggcctgctcatcattgatattcctaatcgggctgcaccatggcaggcagatccatcggacatggaaaagattgagaacttcaaggttggcgattggattagagtcaaagtgacagttccctcacccaaatatggatgggaggatgtgactcgaaatagtattgggataattcatagtctacaagatgatggagatgtgggtgttgctttctgctttagaagcaagctttttctttgctcagttgcagatatcgagaaggcacaaccatttgaagtaggggaaaaagttcatgtgtcaccttccatatctgagccacgcctcggctggttaaatgaaactgcagctactattggagccatatcaaggattgacatggatgggactttaaatatcaaggtttctggccgaaaaagcttatggaaggttgctcctggtgacgctgagaggctttcagcttttgaggttggagattgggtccgcccaaaaccaagtattgggagcagacctacttatgactggaatagtgttgggagaataaacattgcagtagtccatagcattcaggactctggttacttggagttagctggctgtttcaggcatgggaagtggctaacccataacacagacattgagaaagtgcagacagtaaaaattggtcagcatgttcggttccgtgctggaatttcagagcctagatggggatggagagatgcgaaccctgattctagaggcatcatcgctggtgtacatgctgatggagaagtaagggtcgccttctttggtgtgccgggattgtggagaggcgatcctgcagatcttgaaattgagaatatcttcgaggttggagagtgggttaggctgaggaacgatgtggagcagtggagatcactcaagcctggtagcattggtgtggtgcatggggtgggatatcaaggtgatgcttgggatggaaccattcatgtcgctttttgtggtgagcaggaaaggtggattgggccttctagccagcttgaaggagttagcaagtttgttgttgggcagcgtgttcgaatcagaggctgtatccgccagccaagatttggttggtccaatcatagtcattcaagcatagggacaatctcatctattgacgcagatgggaaactgaggattcatacaccagctggtgccagggcttggttgacagacccagcagaggtggaaaaagtggaggacgaggaggaagtctgtattggggactgggtgaaggttaaggactcagttggaaccccagtgtatcaatggggtgatgtgaaccacagcagtataggggtggtccaccgggctgatgatggagagctctggattgctttctgcttctgtgagaggctgtggttatgcaaagcatgggaggtggaaaaggtgaggcccttcagacaaggtgacaaagtacggatacgatctggtcttgtatcccccagatggggctgggggatggagacctacgcgagcaaaggcgaggttgtgggtgtggatgcaaacggaaagctgaggataaagtttcggtggagggatagactttggattggggacccggctgatgtcgttcttgatgatgcccatttattgacggaggcttctaatggcttttgacctttttgttcataggcttgtggtattcttttgaccccatatctcatttcttgcacccatccattttgcagcatttcaaatttagcaaaatctcaacctgcagtggagttgcaagttgcacatagttatcatcgcataggcatgcatggcagggtgtatttcttgttgataaccggggaatgagaagacagcgatagtgaaatactcctagagttgataaccaccacctaggtttttttccctttggtctacatgtataattatgccgcctgataccttttgggtttcagtgtaccatatataccagtgtacaggttcggacctgaacattaatttgattgatagtggtctactg

SEQ ID NO: 150035 - DNA, 1154 bp, Zea Mays
aaattcccacgttgctctcccgtcttccctcctcccctccccaaacccccaccccaacgcccagatctaccctccccatttacagctttctctccggccctgcgccccagggcaccgcgccgcccgaaaccgtcggcgccggcgcgatgcgcgtgccatgctgctcgttatgcaacgtcagatatgacgaggaggagcggacgccgctgctcctccactgcggccatggattctgccgcgcgtgcctctcccgcatgctagcggcagcccccggagccacgctgccgtgcccgcgatgtcgccatccgaccgccgtaggcaactcagtctctgcgctgcggaagaacttccccattctatcgctcctctccgcatccccctcatccccgtctttcctccactccgactcggggtcatcctccgacggctccgaagatgaggatgacttcttcgcacggcccactcgccgccccgcgcccgcgcccgccgccgcgtcgcccggatgcagctccttcgacctcgcctcgcacccggacctcaagctcgcccgtcgcatcgggagcggcccgcctgggcccgccgggcaggacgtgtgggtcggcacgctgtctcgtggcggcggcggggtcaagcggtgcaagcaccaggtggcagtgaagagggtgccccaaaccgcgggggatgggctcgaggttgttcaagaggaggtggagcggctgaggcgtgcctccacatggtgtcggaacgtgtgcaccttccatggtgctgtgagggtcggcggccacctctgtttcgtgatggatcattatgtcgggtctgtgcaggcggagatgcggcagaatggtggacgcctcacgctggagcagattctcaggtgtggcattgcatcaaaatgtcggtacttagtaatattgtgcggctattctttctgctgctgtcttaccaataatcgctgcaaacatattacattgcaacatagctgctctcttttattattactcagtagtcagcaagaagcatgcctagctagaaccttcactaaatgtggcaaattgtgtacgtgtagtgtatgatagcttgctttgtgacatgtaaagtggttgccttgttaatggcgttatgcagtttgaactttgatttcattggttctgcta

SEQ ID NO: 150036 - DNA, 1789 bp, Zea Mays
cgtccccatcccactcgtcgcccatctgccgtgacgtctctcctctctccagcggttcccatctactacttaactcgcaggccgcggccgcctagaccttcctctcacttcgcgggtacgcagagtcgctagacgcacctcgctcgcaacttgttggactcgaaggggcaatagacagcaggcagggccccgaactgcgggaggagattcccaaggatctcgtcggccgggtagaggaagggacggggacgggcgatggcggcggacggcggcggcggggtggactgggagagcctggcggaggccacctccggggcaatcggctcgctcgtcagcaccaccgtgctctacccgctcgacacctgcaagaccaagttccaggccgagctccagacgcaccagggcgctcagaagtataggaacctttcagatgtcttttgggaagcgattcgtaaaaagcaatttttgtccctatatcagggcctgaacacgaagaacattcagtcttttgtctcctcgtttttttatttttatgggtatagctattttaaaagactctacttggagaagagtggagcaaagtctattggaacaacagccaacttgttagttgctgctgctgctggtgcttgtactgttatcgtgacacagccattagatacagcagcttctaggatgcagacaagtgtctttggaaagtctaaagggctgagagaaactcttgcagaaggtacttggatggaagcattcgatggcttaggcatttccattatattgacttgcaatccttctattcagtacaccgcgtttgatcagttcaagcaaaggatacttcataggcagcggcgcaaaaatgcaggatcagcggaggataattccggagttgctctttctgctttctcagcttttctgcttggcgccgtctctaaaagtattgctacagtattgacttatccattaatcagatgcaaggtgatgattcaggctgcagaccctgatgaggatgatgacgatgaacctggaaggccaagcaaatcaagaacaccaaaaacaatgctaggtgccttgcatgctatctggagcaaggaaggcattccaggcttcttcaaaggcttgaatgctcagatccttaaaacagttctgagctccgccttgctgctgatgattaaggagaagatctcgaagttcacttgggtctcactgcttgccctgcggcggtatcttttcgtttctcagaagaggatcaagagtgcaactgtataaatacgttagctccaaaacacaaactagcacacatagcgacatggtgcttctggagatgttatgccaaggaataaatctgaggaataatcagcagaaatacttaaccaagagagagagaataaggtgtgtatctggggtcgatagcatcagagggctcttcaataagtttgtccatttcttttttttctctctctctctgaatctcttgtagctagtgacgtagatgttgcgcggatctgaaactggactgtacttttagcgtttgttgcctgtaattaggggtgataatgggctctgaattttacagtataatatttaaggttcggattatgattgggtcctgtttctattcatttttaattaaattttatttaggactctaagaaattgtgaaaaacatttagagcgtgatctattatcatccctacctgtaacgtgtaaaatagcagcgtgttaatattccctttaaaaaaggtaatcgatcggcagtgtgatgtaagatgtgttgtcgatcgttcccttttgc

SEQ ID NO: 150037 - DNA, 844 bp, Zea Mays
cgtccccatcccactcgtcgcccatctgccgtgacgtctctcctctctccagcggttcccatctactacttaactcgcaggccgcggccgcctagaccttcctctcacttcgcgggtacgcagagtcgctagacgcacctcgctcgcaacttgttggactcgaaggggcaatagacagcaggcagggccccgaactgcgggaggagattcccaaggatctcgtcggccgggtagaggaagggacggggacgggcgatggcggcggacggcggcggcggggtggactgggagagcctggcggaggccacctccggggcaatcggctcgctcgtcagcaccaccgtgctctacccgctcgacacctgcaagaccaagttccaggccgagctccagacgcaccagggcgctcagaagtataggaacctttcagatgtcttttgggaagcgattcgtaaaaagcaatttttgtccctatatcagggcctgaacacgaagaacattcagtcttttgtctcctcgtttttttatttttatgggtatagctattttaaaagactctacttggagaagagtggagcaaagtctattggaacaacagccaacttgttagttgctgctgctgctggtgcttgtactgttatcgtgacacagccattagatacagcagcttctaggatgcagacaagtgtctttggaaagtctaaagggctgagagaaactcttgcagaaggtacttggatggaagcattcgatggcttaggcatttccattatattgacttgcaatccttctattcaggtattaaacttggcaaggttcttgtataatgaatattgtaggacta

SEQ ID NO: 150038 - DNA, 198 bp, Zea Mays
caagctgaaacaagcccattgtcctttattaacagttctattgttgcgtctcgtctttgtatcggcataactgttggggttcaccgaacacccgtaacaatacaatcatggcgcaacccacatgtaaactgtgattggcgtatcttttgctagaagtattattcaacatggcagtctaaagcaacagtgttgcaagtt

SEQ ID NO: 150039 - DNA, 176 bp, Zea Mays
catttctccagccgacagttaggttgacaactgtggttaaaaaagcgagaagcgtgttctgtaaaagctgcatcaattacaaagtccttgctgactttacacatgtagaaattctaatctctatgttgtctcatatgctgaagcctatctttacatattgcatcatctgtaactga

SEQ ID NO: 150040 - DNA, 511 bp, Zea Mays
tccatatctaaagtctgtccaatgaggtgaaagaaaatttactttgcaagggaactttatattcttatgccttccgatagtaaattttttatgcctgtttttgctcttgccattatttgattatgtgcttggtgtccccttgtttaattcataaataaatgacatcactcactctcgaatcaggcacttcaccaaaaaggtgtcctagaggcagaagtagaccaggcaacgagaagagtgttccaggacaggatggcgatgactatggaaaggcaacgttcggcatgtccgaagcttccatggatcgtctgtttgctcaggcgtccaaacagtggcagtgtgggcaaagcttgaccctggagagccgacgtgcgtgcatggtgaggtggcttcagtaccgagggtttaactgggctgtgaccaatgccgttatcaggaagctggaggctcagcaccctccaccctgactcttctgactagatgaatggcaacaaacatatcaagttcaaac

SEQ ID NO: 150041 - DNA, 347 bp, Zea Mays
caaggaagatattaaggagttttgctttaagctggctgaaatttctcgtattactgtattggactttgccaatttgaagctcccaatattcatagcacgtccagatcgagttgaagatggtatacgtaggtgctatcaggaagcgaagaataagccgagggatcaaaagattgatttactgcttgctatactactagatcgaaatgacagtttatatggtagtgtctatggtgtaagacataatttcttcacttttattacatgtatgtgattcatgatatcacttcaaagcacataaaatattaaaaggacctgtgagacagatattggtcttgtgtcgcagtgtt

SEQ ID NO: 150042 - DNA, 447 bp, Zea Mays
atgaggcgggcgcggtggcaaaggcgggacgtacttctcttccggccccgccatgatctcctcgtcatcaggggcgatggaggccattccctcgtccatggagaagaaatagtcccacgtggcaactcctgccttcatctccgacgagggcgggggaggcggcggcggcggaggctgaggagtcaccggcgtatccggcggcggcggcgacaagggcgggggcagtggcgggcggtggcgcaaccgctgccgacggtcgtcgagatggccgtcgtcctcctcttcctcctccctctctgcctcgtcctcgtcctcctccctaatggagtcgctgcggagcatggcgggatttctgttgccggacgacggcggcagtggcatgctaatggagcggtggatcttcgccggcgatggcgagaaatccggcagaggcggcggcggcggtag

SEQ ID NO: 150043 - DNA, 270 bp, Zea Mays
atggcggcagtccggatggagatctcggtctccacctgcagtgcggcctgcgcccgcttgaagctcagcgacccctcgatgcgcagcttgccggagcccagcgccgccctgaggatggccggctcctcccctgcgccgccggcggacggaggtggtgcctcctcctccaccaggtgtgtgtcaggacatggctggtgtacgggatggacggatccgttcactagttgtggtgcggcggcgtggtgggcgcgagtggcggcgctaggttga

SEQ ID NO: 150044 - DNA, 411 bp, Zea Mays
ctcgatcgtgtgtgttcgttacgtatgcggttaatgctgcaggggattcagccacggaacccctggaagcgagaccggcggtcgacgagcacaaggcgaaggaggcgacgaccgtcgtcccagcaccgtcggcggaggaggagaagaccaccaccgacgaacaggccgctgccaactaactgattacaaggaggccaagagctagacgacgtgcatccaccacgatgcattttgttcaactgaattcgggcgccgggcgggctgtctctttttgtgtatcctcatgcatgggtgctttcgctgtacgtgggccgggctggagtcactcaatataatgtgttcgatccatcgacccattcgcgaacccgtctatgtgcaatgcatctgcgttgtggactactttacattctt

SEQ ID NO: 150045 - DNA, 1089 bp, Zea Mays
aatccccttgtgttcgcccactcgtcaggttgaggttgtttttttcccacgaaagcgaatgcgagcgccgagcgtcgtccagtcgcgctgcatgcgtgcgagcacgtcgggtagggtcgtgtccttgcattgtcgttgtctataaaagcgggcgtgccaccacggcgtttctttgcctccgacccttcgagccccacccgacgcgacgattcctctcctccgcccgttcccaccgatctcacgctctctctcttcctccgtcgcgtcggcgtcgccatcgccggccatgggttgcggtggctccaaggaggccgtggccaccggcaacaccagcgccggcagcaaggtcctccggaggaagtcctcctccgtctccaccggcgcaagccacacctccaccacgtcgccgtcgtcctccggcgtcgtcgtcaaggacgtcgtgaaggatgcggcggcggccggcgaggtgatgacgcccgccgacgccgagaagcctatctctgtcgaccccaaggcagacgccatcgtggtgatggacgccaagaaagaggagggcaacaacaaggtggccgtggaggaggatctgcttcctgaatccaccatggccgacgaggcgcttgctgtggatgaggggcccaaggttgacgaaccactcaaaatcaaagacggggaggagaagacggttgagagccaacacatcgaagaggagcatccgatgaatgaggatggggattcagccacggaacccctggaagcgagaccggcggtcgacgagcacaaggcgaaggaggcgacgaccgtcgtcccagcaccgtcggcggaggaggagaagaccaccaccgacgaacaggccgctgccaactaactgattacaaggaggccaagagctagacgacgtgcatccaccacgatgcattttgttcaactgaattcgggcgccgggcgggctgtctctttttgtgtatcctcatgcatgggtgctttcgctgtacgtgggccgggctggagtcactcaatataatgtgttcgatccatcgacccattcgcgaacccgtctatgtgcaatgcatctgcgttgtggactacttt

SEQ ID NO: 150046 - DNA, 1731 bp, Zea Mays
agcctacatttcggcggccgccgaaggcccgaaaccgtcgggcgtctcagggaggcgctgacgggggactcggagttgaggcgccggagtggcggcatccccctccagtcccagtccactactttctctgttcctttccgagacaggcacgcacgacacgcgctcgcacgcagagcaactgcttcgatctctccgtgtccgtcctctactctctagctaaccgcggtcggcccggggaggtggcgatgggcagcgaggacatgctcgtcgagatccacccccgcgagctccgctttctcgttgaggtgaagaagcagagttcatgttgtatccatcttgttaataagtcagatcaatatatcgcattcaaggttaaaacaacttctccaaaaaaatattgtgttcgaccaaatataggagttattcttccattggcatcacgtgattttacagttactatgcaagcgctaaagaatgttccacctgatttgcaaacaaaagacaagtttcttgtgcagaccacagttgttccatttggtacagctgacgaggacatcgttcctgcttttttctccaaagaaactgatcaatatattgaggagaagaagttgaaagttgtcactgtcagagtatcagagcctcaagtagagaagctcatcaatggagttccccatgccaaggaaacagctggagttactgtggcagagcagacactagatagtgtgaatgaagcacctaatgtggtgaatgaagttcgtcattctctgaaagcaagctttccgtctttaagtggaactcctgctactttcaatgaaaactcctcatctgtaaacgaatgccctactatcctgcaagaatttctagtcccatccaaacaagcttcatttgcattgtcagaatctgcttccaatttgcaagaatcctctgttgcctctatagaaactctgttttcttcaacagaagcaagtgtagacctgaaagaatctccaccgctggaatatactcctgctccaagtgaagttccatcattaagtgataaagaatctaccaatgctgataatgtttatatacctcaggtaaccaaagattttcaaaatttacagatgaaacttaacaatcttgaagtaaaacttgatgaggctaaaactttgattgtaaaattgagggaagcaaacagaactaccatcctagagcgggataaattgcagaaagagatggtattcttgaaaagggcggaagctgctgcaaggagtcagtccatcggttttcccctgcttttcgtcatctacgtggcagttgttggcattttgctcggttaccttctacacctatgaggacggtgaattttagaagaagcacctgcgccattgctgatctctcttggagtcgctgagttcctgaacctgggttactttgtcagagtgaacctactgtcacgtcatgattgtcacattagtcagatgaacttgcatacatcttaggaccgggggtgataattactggagtatatagaaatagagcagcttaattttttacttggtataagaatagagtagtggttgatatatgctttgatcgagaaggccctgtaaccaggagatcatatccttgatacttctcctttcatgacaaggaacctccccttgtccttgtcacaatacgaacagaaactataaagagtttgttgaccttgtcaattaggttagagatcggttgttgattagcataaaa

SEQ ID NO: 150047 - DNA, 1937 bp, Zea Mays
cagcaggacaggccaaccatacaacacaaccttcttccccatctgcttcaagccccatggccgccgtggctttgagcttgggcagtggcagcggtggtaggaggagacggtcgtgccgagcggcgcgcaggggggacggaggaggggcaggggcaggggcaggctgccgccatttccacgtccactaccagtaccacatccctcgccaggcagtgtgggcatcctcgcctcctgctgttgcccccgtacggtacctgctgatccttccggtgattttcttggcggcgcttgcctttctcgtgtgcttcggctggctcaccctggtctaccttgcgtcgtcgtcgctgtggagccgtagcgtggaccgcgccggcgacgccagtggattcgccggagaagacgaacgggaggagagacctgtgatgcctgtgacggacacggagcatgctgctggtcgttctggcgtctcaggagtttgtgctggtgaagggaagacggagataggagaggctggagatggaatctctgaggaacgtcggtacgtatcaaccatggtttcaacaggaatctgtttcagcgatgacgagcgagccagtgatgagaagattgtcaaggaagtgatggtgtttgagccgtgtaaagctaaagcatttgccgagctggatggttcttcggaggaggaggagcaccagctgctgctaatggacattccaatagattgttttcttgaagaggttatcaacaccaggcagttcagcatctcactcagtaacgcaaccaaattacttgacgcgctgtcagttggtgaagtaattgctgcagatacgaaggaagtctcagatttgagttcaacagagatctggaaattcgttgacaggcatgatactgcagcagaaaaaataccagttcacggtgctggggctgattttgtgattccggaggcaacgtattccgctgattcaacccttcatggccttgaagatgagtatgagagtgagatcaaacaagaacagagcctagcagaactatcagctgacactgttcctggaaatgtcaccgacgaatggcaagaaacacaaacttcggttactgagcataacaacaagcaggctgaacctgaagcagcctccagtgaaggatacagaaagcaggtcgttggtgtttcagacgaatctcatgattccgtacgtgaaaatatatctgaaaacgaagcggcttcaaacgctccgttccatcaaacaaacagcgatgaagatactgaactccaagaaggccttttcccgaacaagcgagcggaggcgtcaacgtctgcgtctgctgtctgcgattttgccgacaaccattggcgaacagcagaagaacttgctggctctgcggatgaaggaaacgttcacggagaggggaggacttcagtccttgaaacggcacaagacggggatgaggacagagacaatcatgtctccatgggggcgccacgcccacgcccacgcaggttgccgctcgttcggaggtccccagcaccgtggtggagcttttgtggagttcttgatgcgtttgcaggcggtgaagactgacaaggactcatcctaatctggtatcagcttttgtttacacagatttccagatgtcgtcagtccacacgggagtattaggccttctaaaatttcaaaaaaaaaacctaatgctcaccccattctgctacccacaatgtacctcagggcctgaggttttatccacaatgtgcagtggctttgaccatttgttttttctctctctctcattactttccttcattttagaagctttggacttccaactatagggtgttgctccaaacaaggattgggttttgccatttgtgcttgtgtgttgaccactggaaaagaattggattgatgtttacgctgaagccacaaaaataataatacattgtgtat

SEQ ID NO: 150048 - DNA, 188 bp, Zea Mays
gttcaattctcccgctttggcgtcgcacgaaagcaagcaatcagactatccgcaaccgttacctctaaatttttccccctatatcacttttcccccatatttttccccctattttttcatctcccgcagcggttccccctaaatactccccctataccccactacccctataaaatatcattttctat

SEQ ID NO: 150049 - DNA, 2188 bp, Zea Mays
atgcattgaccgctccaagccacaaagaatccaccccctcgaagcctccgtcctcgccagtccaatctccaacgtcggaactccgaagaaccacccccaaattacgcagtagcccgtacgaatctccgctcgccatggacgccgtggcctcatcccggaacaccgttgcactggcggcgcccgcggcggtgccgctggaggctcatgcccaaaaccctagcattgccatcgctaacccgccgtcgccggagatggaggctacagcggaggcgctcacgcaggaggaggtccttcgccggcgccggcgccgcgcggcccggctagctggtgtgtaccgccggctctactgggccatggccgaggaggtgcgcgcgcggcaccggcagtacgtctgggatctcgcccggagcccactggaggcagagcagccgccggcgcctcctgggggtcccgtcccggcggcggttggggagccgccgaagccggcaccggtgccgaggaggaagaagtgcgggttcacagggtgcaaggtgcgggccatggccacaacccgcttctgccactctcacatcctctccgatcccaaacagatgctgtacaagccctgcgcgtccatcatcaaaagtgggccacagggtgggcttgtcacctgtggtagaccgatcataaagtctgcagctccctccttatgtaatatgcacttgcaaaaatgccagaaaaacattgcagcggcttataggaaggttggctttaacccatcccttacaggcaaagtcaccccaaagtttagtgttttggttgctgaatgtgttcgtcagatccaagacaaaaggagaaaatcactgaaagctacagcacaatagaaatgtcctaaagacggaaatgttgattgaatcatacttgatctacatgtgtgtgcataaacttcatgggaatattattctgaggtttatccaaaacagtgataacggcaggttagtacagtcagtcctgctcctactggaatgatatgaataatggaaacttgcatcatacgcattagttgaagattgaagtgtcattggaagaatggatgtcgggaataattgttaacagcatatttgaaatgaaaaattgaatggacaacatcatgggagaatcaagtatctgtgagagcctgcagcatacagttatagaatcctacttacatgggcagcagcatgttctattgtttatcgggcagtctttatcttgggctttgtgagttgctgaagatgcagcaagactgcatggttgatatgatggtgtgttgaacatcatcagcttgctggcagtattatacagcctgcatgaaactggtgattgccagcatgaaatacctacctacatgggctcgaatgaaaaacttgaccactcctagaatgtcaccgttcacatattgatttggattccattttggtgttacacagatccgaattgcaacctgtattgcatttattggtagctcggtgtggaaaatgtgcatattctggaggaagcaaaattatttcttgccaaattgagattcagtacaggtgcttattctgttctttgcagagagatgtatgaatgcaagatctgtacttccatggcaaatgaactgtgcaatatgagatggtacgagaatgttgcacatcatgaacgaaagtaaagagctttatatagcatacagctatgaggatttatgtttattggacattcgttgcttggtactgttataaaatttcgtgatgttgcgcaaataattacccttggtggttcaaatctgactacaatgtatgggtgtaccggattgtttggttgcagttacctgtaagagctcaggtctgataaaggctaaggcgacaaacagaagattatttttcctgataccacagttgacagttttgctattacctgttagatgttccaatatgtaaatcagtaaatagcacttgagcttacttcttgtttatcttatcctcagatttgtattccttctttcttactattacattcagtttatgcgtattgttaatgtatacattttagtttccggtcctggtttttgtcagtgacagctatttaggctactgagaaaatgttcctttgtagtgtcttacttttatcttgcaacttattcttcgtccactgaaatattatatttcttagatctggggcacttgtcggc

SEQ ID NO: 150050 - DNA, 223 bp, Zea Mays
aactaggattgcttgtaccttactacgtccatcccgaaaagaatgtagttttgtctatgcacgtcgacaagcattccttttgggacagtggtagctacaagttaccagttacgtcgctacgagagagacagaaagagagcaagagagatttcattgtgcttccaatataaggtgcacttgctatcctgagaatggttaaatctgagccactcaaatgatcttt

SEQ ID NO: 150051 - DNA, 590 bp, Zea Mays
agctcttgcgagttcttcccaaaaggttcagtggtaaaccaggtgaccttgttgcacacataaagttcactgtgctgctaatgcccaatggatcggataggattacatcatatccgctacaggagttaaagccaacaaaatccattgaagacaatgctgagataaaggcatggcttgctttggggacgaaatcaaagaagaagggtggtggaaagaagaagaaaggcaagaaaggagatgcagcaggagatcccatggaggcgacaaacgatgctacaagccaagaataattctgatttttggaattactgcacccagcattttctctcttgtttcttcgctgcatctgatggtgttatattacattcagttgcgaaaaaatgaatacttttttctagtgtctaagaaacgaagcatcctgttgcacattatcgcatccaatggcacaaagataattatctacgaggcatgcctagtgttggttctctgttcttcgtgacttcacgcccttcacttctcgcagctgataccagactggaaattttagtgcttgcattgacaacgcatttcaaaggacactgtggcattaa

SEQ ID NO: 150052 - DNA, 466 bp, Zea Mays
tccggtaatccccccttcccgagtccaaaccctaaacctaaacctttcacccggcgccgccgcccccaccgccgccgccccgaggccccatcccagcgcaaccgacatccgcctcggattgaagcaatgtcgtcggacgacgaggtcagggaggagaaggagctcgacctctcctccaacgatgtcgtcaccaagtacaagactgccgccgaaatcctgaacaacgctctgaagctggttgtgtctgagtgcaagccaaaagcaaagattgttgacctttgtgagaagggtgactctttcataagagagcaaactgggaatgtctacaagaatgcaaagaggaagattgaaaggggcattgctttcccaacctgtgtttctgtgaacaacacagtctgccacttctccccgcttaccacagatgatgcagttctggaagaaaatgatatgggtaaaaatgtaattg

SEQ ID NO: 150053 - DNA, 652 bp, Zea Mays
tcactttctaccgaaccaaacctgatggcaaacatctcctccttaagttcgccatcggcaaagtcagcagcgtgccaaacacacgacttgtcgctgcccgcatgctcctgcatcttcgtggaagggataccgaggtggttcgcgcagatcttaagcgttttagcctggcgcatgactaggcggaccttgccggtctgcttgtgcttgagaagcttgacagcgcccgtgccccgttccttccattggttaccgtctttgtcgaatcggtacagcttcgccttcctgcaaaacccgaatcagcactaaatcgagcgggggcggccaaccgcgcgcagcaatgaacaagtacatggggagggagggcgcctcacatgtcgagcaggacgtcctcgtcctcctcgccggtggtgacggctacctcctcaagccgcacgatgggagccacctgggcgcccgtgtcctcctcctcccccgcggcggcggcggctgaggcgtcctcctcctcctcacccgcctctggccgctccacgacaggctccttgtccgccatgaggtgggtgatcgcggcgcgattcgattcgaacttcgaagaggatgcgacggcggggcaagggaggaattctccggaagctttgggtgcaggcctggctgc

SEQ ID NO: 150054 - DNA, 489 bp, Zea Mays
atggactcccaagtttttagcaaaatcaagcccggaccaaaccagaccgaacacctgagactcctccaactcggcccgggcccaaatgatagcaatcgtattccatggctaaagggcaccaaacttccactggacgcggacagacaaactagttcagcaccaggcgaatctgcgtgcaagtgcaaccacaccaactactcagctggggctgtgtcggctttggtttcagtcactttgccagaatcagtggactcagacttgccacttccctcagatttgccctcgctcacagtgagcttcgccagcaatccagccgtggaaccaccatcttcaccttccttgccctcgttctttgtaagcgactcagctatctcctcaaccaactccttgaacttcttgcagtttttggatttggttggaagcttcccaggcagcaatgtcaaccccaggccaccaaaattggatgcctgggctcaaacaaaaaaggcc

SEQ ID NO: 150055 - DNA, 278 bp, Zea Mays
tggatgagtggtggtccggtgacgcaacctatgagaaagttaggttcgacggtgaaggagaaacttgcgtcatacgtgtttgacctagctacctcattatgctagaaaatgaaaaaagagtgtgttataactggctatctcactgtatgggaaaggtaaaaataatcacgctagtgtgaagaaattgacgtcaactgtatttagggagttcctaccgagttgctaaatgtggagagtaaatagagttgaatagcaactaagtaaatttagcaagtcta

SEQ ID NO: 150056 - DNA, 615 bp, Zea Mays
aggtcttctaccctgtcatcgaggtcgaggccgctgcagttcgcgcagacaacaaccatcttggagggttggtgaggtatccggtctctgcaactcttccacagattggatccagattattccttacgtggggtgtcttctggagttttcctgaggtgatcgactgactcgagagtttgccgatgcttgaagaaggacctaatgtgagcttttacatacttgatgaacagcttgagatcttgagcaagattcgatgtcgcgggcacccagatggcattgcttgttcttgattcacgacgagatggatgcggtttccttcagagttccgccgagcaacctcttggtttgactcttttgggatcttctaggaattccatcttgtgatatcctccagttcatcacatgataatatacggttccactcactagcccttgcagactaaaaagctcttgagaaatactctgttgtaactcttcatatttttcttttgtttatgtagcctagcacccagtctgtactgtggtgtccagttccattatctctgccttgcattttagattttggttgtgattgggatactatcttaaagctgcttacttgcttgtggtgtctaa

SEQ ID NO: 150057 - DNA, 306 bp, Zea Mays
atggcggccgcgaggcccctctacggcagggtcgccggggaggcggtgtacgtggttgaaccggtgtcggcgcccgcgcggagggggtcgcctacgaagggctgcctcggtgcaatgcggctggggctggtcggcagaggcccactatggtttcctggtggtggcgctgaagggataaggagttgccaccagtgccggaaggctaggggtgtcatctggtgtaccagctgtgacaggagaggctacagtgccagatgcatctccagatggtctcaactctcaagtcagtaccagcagcagagttga

SEQ ID NO: 150058 - DNA, 3089 bp, Zea Mays
tataaaccctagccgcctcattttcattcctcctctccctcgccggagttgagtttcatttgaataggcgggtgggaaagcatcctaaaccaccctccgctatccccaaccgccccgaaccatagcctcccctccgtgtcgccgtccggatctcgtgggttcgcgtgcagcggggatccgtccaggcttggattgatttcttatctgcgcggatacagccatggatatcactcaggttctgatagctgctcaatctccagatgctaaccttcggaccgtggcagaaggcaacctcacacagttccaggagcagaattttcctaactttctcctctccttatcaatagagctctcgaacgatgaaaaacctccagagtctagaaggcttgctggtattatccttaagaattctttggatgcaaaggattctgcgaaaaaggagctactgactcagcaatgggtaagtgtggatccatctatcaaattgaaaatcaaggagttgttgctggtgacactaggatcttctgtgcatgatgcaagacatacctcttcacaagtcattgccaaggttgcatcaattgagatagcacgtcgagaatggcaagatctcgttgccaaattactggggaacatgacttctgcaggtgcacctgctcctttgaaacaagcaacactagaggcattggggtatgtgtgtgaggagatttctccacaggacttggagcaggaccaagtgaatgctgttctgactgctgttgtccagggaatgaaccagacagagctcagccctgaagttcgtcttgctgcagttaaagccctatataatgctcttgactttgcggagagtaactttgcaaatgaaatggagaggaattatataatgaaggtggtttgtgatactgctgtgtctaaagaagtggagatcagacaggctgcatttgaatgccttgttgcaatagcatccacctattattcacacttagagccttttatggaaaccatattctacctgacagctaatgcagttaaaggtgatgaggaaccggttgcacttcaagctgttgagttctggagcgctatctgtgacgaagagattgcactccaagatgaatatgagggatctgaggatggtaactctgctatacacttccgctttattgaaaaggccctccctttacttgttccgttgctgctagaaactttgttgaagcaagaggaagatcaagatcaagatgataatgcttggaatatttctatgagtggtggaacatgccttggactcatttctagaactgttggtgatgcagttgtccctcttgtgatgccatttgtcgagaccaacatcacaaagcctgattggcattgtcgtgaggcagctacctttgcatttggttctatccttgaaggcccctctgttgggaaacttgctccacttgtccaggctggtcttgatttcttgctcaacacgatgaatgatgcaaatagccaggtaaaagatactactgcttggactcttgggagagtatttgagctcttgcattctccagctggtataaactcaatcataaatggttcaaaccttccccgtatcatgtctgtattgcttgagagtactaaagatgctccaaatgtagccgagaaagtctgtggagctatttattttctcgcccaaggttatgaagatgcagagtcaacgtcttctgtcctcacaccttatctatctaatacgattgctgctcttctttctgccgcagaccgtgctgagaccacccatttcaggcttcgtgcttctgcttatgaagcactgaatgagatcgtgagggtcagcaacatacctgaaacttcaggcatcatagcacaattattgcaggagatcatgagaagattaaaccttacatttgatctccatatactttcttctggtgataaggagaaacaaagcgatctgcaggctttgctatgtggtgttctacaggtcatcatccagaaactgagcagcacagatgcaaagtctataatttctcagaccactgatcagctgatggtgctttttctgcgtgtctttgcctgccacaattctactgttcatgaagaagcaatgcttgcaattggtgctcttgcatatgctactggtccagattttgtgaaatacatgcctaacttctttacatacctggaggctggtttgcagaattatgaagagtaccaagtgtgttccatctctgttggagtggttggtgatatttgtcgtgccttagaagataaaagtttgcctttctgtgatcgcattatgacggttcttcttaaggacctatcaagctctatgctcaatcgatctgtgaagcctctgattttctcgtgctttggagacattgctcttgctattggtgagaattttgagaaatacctaccttatgccgtgccgatgcttcaaggagctgcaggactccttggtacacttgacctgagtgatgatgatatggttgattatggcaaccagctcagacgtggcatttttgaggcatactctggtatactccagggcatcaagggcccaaaagctcagctgatgatcccatatgcaacccatctactacagttcactgaagctgtctccaaagataggagcagggatgacagtgtgacaaaggctgcagttgctgtccttggggatctcgcggacacgcttggccaaagctcaaaggatctgttcaagacccacctattccatgttgagttcttgagggaatgtcaagctcaagagttggatgatgaagttcgggagactgcacaatgggcccaggggatgataaaccaggcggtggtctcttaatgcgggatgattttggtttgttagttacgggtggtttcttctgtggtggtgccaagttcatttgccacagatgaacgaaaggataccaatatatatgtagcgtcagtcttaggatcctggttggtctgtcaagccggtgtgggtcacattggaccgggtggtttctgtccatgaatgtcttgaacagcaaaaattggttcatttatcatgatattttttaatgctggggatgtgtttgcctccaaatttccattta

SEQ ID NO: 150059 - DNA, 243 bp, Zea Mays
cttgagctgcgagaggagggtgacacaggtgttgaggtcgttgcaggcgtaggccgtcttgaagcgggcgaacatctgggtcacctctgtcatctttggatccatcgtcagaggctgtggcgggggcatgctctggagctctcggtcacgacgactcctcttctctgctgcgggtttttcttgcgggttgggttgatgaggggtggagggtgctgccaccggagaggaaatcgagcgatatga

SEQ ID NO: 150060 - DNA, 1838 bp, Zea Mays
gtgccctggagcccaatggctagtagcacactgctctgctctctatcatcgtcgccgccagaaggtgttgttgttgtcgtctgctgcaccttgtgcccttctccctttccctccacgacgtgtgtgccctccttccgtggcgtgtgcagccgcttctccgtgcagcgagccgtccgcgtcgcttctctccctcgtgctgccctgtccctccacgctgccctctctctccacgcctctgtttgctagcagccagtggccagcacccagaagtcgactcatctcatcctctttgcctctttttggtaagctactaacctctctttttgatatgcttccaggccctgtccccccacctccacctctgcttttggtttttacaggatcaccagttctgagtctggaatgcggtctgctacatcagcagctgttgcctcagctgtgtcgtctgtggtacattctgcagaagggccagtgaaggggtctgaactggtagcatccgtgcctatctctgctgaaatgccaaagggcaggatggacacactggtgccatcagcgccgtatcttccagatgtggaacgtttgatattggggttgctcttgctacctgcagtgccaatgaagcctgggagcggggattgtgcaatgtgcagagaatttctacctactgaagtgctcctcatactgccagtgtgctcgcacatgtttcatcagtcatgcatcatcacttggctatgccgcaccacaccaccatgctgcccgttttgccgtgcctctatcaccattcctggctgtaacaagactaaagttgatccatccttctgctcagttgaatacgacatcgagtctcagatgctaatgccaatcccacctggcgaggtagtagcagaggctgtcggaggatctcatgggtggctgcgctcttccctggacagattatctggcagctggagaatatgctccagcaatcgtgccactccagcggttgtgccagtgtcctcacggcgtaccactggaagttggagccacggcaatgactcagattgctctaaggtacagaagccgctgccagttccagatggtaaggaggtgccagaggaagtcaggaggtctatcgggtggctgggatctttggccacgctttctggcagctggagtgggtgctccagcagctgttcttctgagatggggttgatggtgactttgaggcatgtcaaagaaaccctgacatcaagtggacacagcgaaactgataaatggtctatgaggtgggacctcgaggctgctacgccgacacccgagaggccatcgttatatggctatgccagatggttcttcagaagctcaggttgaactgtcgcttaacattccctagctaaaagaaggaagtgaatacaaattgtacatcagaaaactggagtagcattgattctttgcattggagatacaatacagatggatgcagtcatgcaccagcgttttgtatagtacaaatagatcaggttttaccttttagatcattggctgtccttggtccttctgtccaagtcaaactctgagcaagatagcacgaaaagtgttggataagagtctccctgccattcttagcattttctattgaagtaaaagattaatcatggtagatatatatcatattaaatgatagttttgaaaaagcttgattttgcttctactgtgatatagcattatgctatatgtgcttgaactgtaatctgtgctgctacaatggagctgtacgatgatactgtctggaaatgttcagcttgcagctgtttggttgtaaagaatacggttgcaaccaattggcctgtgatatatcc

SEQ ID NO: 150061 - DNA, 130 bp, Zea Mays
ttttctttttacttcgctattaaacctgtaaatctattagttaggtattttttcctaatcttctactactatctattagttatgttggattttaagtctattatgttggtttatgttgaacttgtacttc

SEQ ID NO: 150062 - DNA, 1698 bp, Zea Mays
gcaccaccgtccatattcccccatcaaactgcgaaccgaaaaaggagaagacggacaacgaattgggatcgaaaaacatctccgttccccaccaccaccttcgctccttctgcttcgcccgtccccctccgtcgcgtcgactcccaagatggataagctcagtggttctgcacgtcttatgattgtttcagatcttgaccatacaatggttgatcatcatgacgaggagaacctgtccttgcttaggtttggtgccctgtgggaatctgtttactgtgaggattctctactagtcttctcgactggaagatcaccaactctttacaaggaattaaggaaagagaagcctatgctaactccagacatcactatcatgtctgttggcactgagataacatatggggaggcaatggttcctgatgatggctgggaagaatatctgaacaataagtgggacaggaatattgttgtagcagaaactgtgagcttttctgagctgaagcttcagccagagacagaacagcgcccgcacaaggtcagcttttttgttgataagaagaatgcccaggaagtgataaaatctgttgccgagagattggacaaatgtgggctagatgccaaaataatatatagtggtggccaggaccttgatatattacctcaaggagctggaaagggccaagcacttgcatatttgcttaaaaagctaagctcatgtggaaaaccgcccaacaatactcttgtttgtggtgactctggtaatgatgcagaattattcagcatccctggtgtacatggtgtcatggtcagcaatgcccaagaggaactacttcagtggtacacagaaaatgcgaaggataacccaaagataattcattcaaatgagagatgtgcagctggtattatacaagctattggacacttcaagctaggacctaacatttctcctagagacctgcagtttccttatgcaaaggaagcctctttcaaacctacagatgctgtagtgaagttctacgttctctatgagaagtggcgcagggctgaggttccaaagtctgattcagttataaagtacttcaaaaacatcactcatgcaaatggagttaccatccatcctgctgggcttgaactctcactccatgcatccattgatgcgttgggatcatgttatggtgacaaacaagggagaaagtaccgagcatgggtggacagactttttatcacacagactggttcagatagttgggtggggaggtttgacttgtgggaatcagaaggtgatgtgcgtgcgtgttctctgtcaagtcttgctttgattctgaaggctgaatccccagagggctttgtgctaacccacatccaaaagacatggctgaacggatactcgtcaggggttgagcaggcgtttaagctgtagagcagtataccgtctcggctcgtggttggagttttcttgagaatagaatagaataatgtacctgtttataatattaacttcccaaaaccgcactggaggatcaccagggagaggattcggtgccttctcctatttggcgcgtaagataaatgttttgtctcatggctttcatgagaagatgaaattgactcatcttggtatatatttacaaatcttgaataatgcagcgttatctatatccagggatgtcaacggcaatccagggaaattgggttttt

SEQ ID NO: 150063 - DNA, 1757 bp, Zea Mays
accaccgtccatattcccccatcaaactgcgaaccgaaaaaggagaagacggacaacgaattgggatcgaaaaacatctccgttccccaccaccaccttcgctccttctgcttcgcccgtccccctccgtcgcgtcgactcccaagatggataagctcagtggttctgcacgtcttatgattgtttcagatcttgaccatacaatggtgaatgtcgtccaactcatatcttggtctgccttaagctatctgtatgtaaactcttcattcttttgggatggctaaaacttgcaggttgatcatcatgacgaggagaacctgtccttgcttaggtttggtgccctgtgggaatctgtttactgtgaggattctctactagtcttctcgactggaagatcaccaactctttacaaggaattaaggaaagagaagcctatgctaactccagacatcactatcatgtctgttggcactgagataacatatggggaggcaatggttcctgatgatggctgggaagaatatctgaacaataagtgggacaggaatattgttgtagcagaaactgtgagcttttctgagctgaagcttcagccagagacagaacagcgcccgcacaaggtcagcttttttgttgataagaagaatgcccaggaagtgataaaatctgttgccgagagattggacaaatgtgggctagatgccaaaataatatatagtggtggccaggaccttgatatattacctcaaggagctggaaagggccaagcacttgcatatttgcttaaaaagctaagctcatgtggaaaaccgcccaacaatactcttgtttgtggtgactctggtaatgatgcagaattattcagcatccctggtgtacatggtgtcatggtcagcaatgcccaagaggaactacttcagtggtacacagaaaatgcgaaggataacccaaagataattcattcaaatgagagatgtgcagctggtattatacaagctattggacacttcaagctaggacctaacatttctcctagagacctgcagtttccttatgcaaaggaagcctctttcaaacctacagatgctgtagtgaagttctacgttctctatgagaagtggcgcagggctgaggttccaaagtctgattcagttataaagtacttcaaaaacatcactcatgcaaatggagttaccatccatcctgctgggcttgaactctcactccatgcatccattgatgcgttgggatcatgttatggtgacaaacaagggagaaagtaccgagcatgggtggacagactttttatcacacagactggttcagatagttgggtggggaggtttgacttgtgggaatcagaaggtgatgtgcgtgcgtgttctctgtcaagtcttgctttgattctgaaggctgaatccccagagggctttgtgctaacccacatccaaaagacatggctgaacggatactcgtcaggggttgagcaggcgtttaagctgtagagcagtataccgtctcggctcgtggttggagttttcttgagaatagaatagaataatgtacctgtttataatattaacttcccaaaaccgcactggaggatcaccagggagaggattcggtgccttctcctatttggcgcgtaagataaatgttttgtctcatggctttcatgagaagatgaaattgactcatcttggtatatatttacaaatcttgaataatgcagcgttatctatatccagggatgtcaa

SEQ ID NO: 150064 - DNA, 1678 bp, Zea Mays
gcaccaccgtccatattcccccatcaaactgcgaaccgaaaaaggagaagacggacaacgaattgggatcgaaaaacatctccgttccccaccaccaccttcgctccttctgcttcgcccgtccccctccgtcgcgtcgactcccaagatggataagctcagtggttctgcacgtcttatgattgtttcagatcttgaccatacaatggtgaatgtcgtccaactcatatcttggtctgccttaagctatctgtttggtgccctgtgggaatctgtttactgtgaggattctctactagtcttctcgactggaagatcaccaactctttacaaggaattaaggaaagagaagcctatgctaactccagacatcactatcatgtctgttggcactgagataacatatggggaggcaatggttcctgatgatggctgggaagaatatctgaacaataagtgggacaggaatattgttgtagcagaaactgtgagcttttctgagctgaagcttcagccagagacagaacagcgcccgcacaaggtcagcttttttgttgataagaagaatgcccaggaagtgataaaatctgttgccgagagattggacaaatgtgggctagatgccaaaataatatatagtggtggccaggaccttgatatattacctcaaggagctggaaagggccaagcacttgcatatttgcttaaaaagctaagctcatgtggaaaaccgcccaacaatactcttgtttgtggtgactctggtaatgatgcagaattattcagcatccctggtgtacatggtgtcatggtcagcaatgcccaagaggaactacttcagtggtacacagaaaatgcgaaggataacccaaagataattcattcaaatgagagatgtgcagctggtattatacaagctattggacacttcaagctaggacctaacatttctcctagagacctgcagtttccttatgcaaaggaagcctctttcaaacctacagatgctgtagtgaagttctacgttctctatgagaagtggcgcagggctgaggttccaaagtctgattcagttataaagtacttcaaaaacatcactcatgcaaatggagttaccatccatcctgctgggcttgaactctcactccatgcatccattgatgcgttgggatcatgttatggtgacaaacaagggagaaagtaccgagcatgggtggacagactttttatcacacagactggttcagatagttgggtggggaggtttgacttgtgggaatcagaaggtgatgtgcgtgcgtgttctctgtcaagtcttgctttgattctgaaggctgaatccccagagggctttgtgctaacccacatccaaaagacatggctgaacggatactcgtcaggggttgagcaggcgtttaagctgtagagcagtataccgtctcggctcgtggttggagttttcttgagaatagaatagaataatgtacctgtttataatattaacttcccaaaaccgcactggaggatcaccagggagaggattcggtgccttctcctatttggcgcgtaagataaatgttttgtctcatggctttcatgagaagatgaaattgactcatcttggtatatatttacaaatcttgaataatgcagcgttatctatatccagggatgtcaa

SEQ ID NO: 150065 - DNA, 131 bp, Zea Mays
ttttcccctctctcccggacttaacttttattctaacgctaaccccggcttgtagtgtgcttaaagtttgtaaatttcagtttccgcttatccacccccctctaggcgactttcaattatcatcacaagtg

SEQ ID NO: 150066 - DNA, 2186 bp, Zea Mays
caatttctcagcaaccagcagcacgacctgtgagggttcgaaggaagtagcagtgttttttgttcctagagggaggaagagatggcaaagggggaggggccggcgatcgggatcgacctgggaacgacgtactcgtgtgtcggcgtgtggcagcacgaccgcgtcgagatcatcgccaacgaccaggggaaccgcaccacgccgtcctacgtcgccttcaccgacaccgagcggctcatcggcgatgccgccaagaaccaggtcgccatgaaccccaccaacaccgtatttgacgcaaagcggttgattggtaggaggttctcggacccttccgttcagagtgatatgaagctatggccattcaaggtcgtggcgggccctggcgacaagccgatgatcgtggttagctacaagggtgaggataagcagttctctgccgaggagatctcctctatggtgctgaccaagatgaaggagatcgctgaggcctacctcggctccaccatcaagaatgccgtggtcaccgtgcctgcctatttcaacgactcgcagaggcaggccaccaaggatgccggcgtcatctccgggctcaacgtgatgcgtatcatcaacgagcccaccgccgcggccattgcctacgggctcgacaaaaaggccaccagcagcggcgagaagaacgtgctcatcttcgacctcggtggtggcaccttcgatgtgtcgctcttgaccatcgaggagggcatcttcgaggtgaaggccaccgccggtgatacccatctgggtggggaggacttcgacaaccgcatggtcaaccacttcgtccaggagttcaagcgcaagcacaagaaggacatcagcggcaacccgcgcgcgctgcggcgtctgcggacggcctgcgagcgggccaagcgcacgctgtcgtccaccgcgcagaccaccatcgagatcgactcgctgtacgagggcatcgacttctacaccaccatcacccgcgcccggttcgaggagctgaacatggacctcttccgcaagtgcatggagcccgtggagaaatgcctccgcgatgccaagatggacaagagcaccgtgcacgacgtggtgctcgtgggcggctccacgcgcatccccaaggtgcagcagctgctccaggacttcttcaacggcaaggagctctgcaagagcatcaaccctgacgaggccgtggcgtacggtgctgctgtccaggccgccatcctgagcggcgagggcaacgagaaggtgcaggacctgctccttctggacgtcaccccgctgtccctgggcctggagactgccggcggcgtgatgaccgtgctgatccctcgcaacaccaccataccaacgaagaaggagcaggtgttctccacctactccgacaaccagccgggggtgctgatccaggtgtacgagggagagcgcgccaggaccaaggacaacaacctccttggcaagttcgagctgtccggcatcccgccggcgcctcgcggcgtgccccagatcaccgtgtgcttcgacatcgacgccaacggcattctgaacgtatcagcggaggacaagactacaggacagaaaaacaagatcaccatcaccaacgacaaggggcggctgagcaaggaggagatcgagaagatggtgaaggaggcggagaagtacaaggcggaggacgaggagcataagaagaaggtggacgccaagaactcgctggagaactacgcgtacaacatgcgcaacaccatcaaggacgacaagatcgcctccaagctaggtgcggatgacaagaagcgcatcgagaacgccgtggacggtgccatcagctggctggacagcaaccagctcgcggaggtggacgagttcgaggacaagatgaaggagctggagggcatctgcaaccccatcatcgccaagatgtaccagggcgctggcgcggacatgggtgctgctgccggcatggacgaggacgcaccggccgccggcggcagcgccgctggccccaagatcgaggaggtcgactaagtgcttccacctgtggtcgtgttatcgtggtagaagttgaattgcttctgtttctgtgggaacagtaaactctgaggttgtggttgatctgatgatacttttctaattggttccccttccttccctgagattttatagttgtttgctcgtttgca

SEQ ID NO: 150067 - DNA, 705 bp, Zea Mays
atggtcagcaaggagatggagctcggtcagcgaatagagagggacgcaggggatgctccatggctgaatccagagcacgccggcgagcagggatttgtgcgcgcggccacagaggaactggtgctgggcagcgcgcggagggagcttcggcgcggagaaaactggacgccggagagagtaccgcgcgcaggaaaccagctgggcggcttcggctgggcgagttcggctaggacaccatgggaggggcaccgagtgctagagctgggcgcggcagggagccagcgcgccatggctggacgcgagcagaggtcaggactgagcagagggagctccacgcgagaagaaacgagtagaagagcagggcgcgagctgcaacagggggaagggggcgcgacccagggcgagctcggcaaccgcggcgctgggcagagctgggcgcagtctgagcaagaaatcacggcacgactggagatcgagcgccaccataggagctggaacaagggcgcggcaggagcagccccacggtggagttgcggcatggggacagcgaagaacacgacgggctggggaataaataccaccgaacggcggctgggcggcaggatttttccggcggcttggcaccgagctggagcaagctgggcagcgagaaaaatcccacaagcgcttggccgaccgggagagataagggagaagaagaactga

SEQ ID NO: 150068 - DNA, 452 bp, Zea Mays
gtcaactctacatttatgagcatcaccacatacaacccgtgatacattttaacaaccatttaatttaaccacgaccgcatttatcagttatatgagtgagacactagacttattattcacttaaccacttctcacacaataattatttcaaacttgagtttcgcgtgacacgaccacttcatacttatgtacacaatctattcatcaaactaataattaaactaacagaaatatgaatcggcttactatactaaacctgacgcgctatccgcgaacacagcaaggattctggttcagcccttgtgtcgaacacttggtgaatatcacgctgctagcttcatcttaacccaattctcttggtgaatatcacgctgctagcttcatcttaacccaattcttgggatttcttgatgacgcacggaacaacaacgagatcgagcctggagcgagct

SEQ ID NO: 150069 - DNA, 493 bp, Zea Mays
gcaatgttctaataaagttcagaacatggaatcaaaggtgcgagcaacatgtaacagttcgaatgcaaaattagatgacatagtcaggctccttgatgacctactcacagagtatgagtcaacggcctatggtcctggaaaatggaaaaggctagctacattcttacagcagtgtttggctggccctgttctggaccttttcagaagatagttagagcatatagatgctgaaaggaactccctaagattgaaatgcaattcaagagatgtggaactatctgagaagatattctagtggtggagctacgaacaacaatccgatgtcctgatcgagagcgatggagctaatgtttgaacttgtgtgtttgaacttatgaactaaaaatgtgcactatggatgtgaacttatgtgaacttatgtgaatttgtgaacttatgtatttggacttgtgtgaatttgtgatatgaatatatatccatgtgtttaaaatct

SEQ ID NO: 150070 - DNA, 1131 bp, Zea Mays
cataaaagaccacgcccgcacaggccctccacgcagccgataacctcatcgtctcatcctcttcctcctaccgtccaaatgcaaccgaagaggaaaggagagagagaggcggcgaggatggggcggaagtggaacgagctgctgtcatcggctccatggaggacgggggaggcggcagaggatgaggacgcaacaaggatgagccgagaggggaaggtcagcgtcaccagcaaccccgaggagatgcccaccatgagcgtgccccagagcagacgcccggacctcgacctcaccatcgacgacttcaaggaggacgagatcgaccccgagctgcgctactccttccagcggaacagcaggtatcatctgcctgcacaattttccccagtaaacaatggtctcaagccagtattccatgtatcccgcctctcatgggtgatcatgatgggaggtatagatgaatctacgttggatcgtctctcgctggtcacagatatgacaaagcacatacgtgtccgggcctcaggtggaaggtccactgcatccgaacttgggcagttctcgcctgtctttgtttggttgttgcgagacttttatctggatttggcagaagacaacagaaaaattactccacgagattacctagagatagcattgaggcctgttcaaggtggaggaagggacatatctgcaaagaatgcgatacgggactccatctgtgcactctttccggacagggaatgttttacacttgtgcaacctgtgaacaatgagaaagatctccaacgtcttgatcaacttcctctgagtaatttccgtccagagttcagatccggtctggatggtttcgcgaaatttgttcttgaccgaacaagaccaaaacaacttggagctagtacaatgacaggtcccatccttgctggattgacacaatcgtttcttgatgctattaataatggttatgtccctacaatctcttcatcatggcaggtatattatgattgcttatagcaatgtggcttctgtttttttggcttacagtgctttaaatgtttttgctgttggtgctgggtcagctcgttcaaaatttgaaaagcttcttcacagttctcccaaaaaggcctttgaggt

SEQ ID NO: 150071 - DNA, 1949 bp, Zea Mays
ttcggctgcttctatcttgcagctcagaaacatgtggtcagtttccctccactccgtcggtttttttttttccttccattatctgcatgagcagataactccaaacgacgggctgagaggtgctgtgacactgcaggcgataaaggtatataagccaaacgcttttgcaaactgggagcctgggatcaccaaatggaccgtgttcttctgagctcccacttgccatctcacgctcatgcaaacacgaggttgcagcagggtcctggtggcctcaacagtataggatttgcagtcataaaaaagggatgcttgaagttaagatgttacgcgatcggcgatgaactcggtggtccagggcgctttagtaagcatttcatcgagaacagtaatggacctgttttccagggactcgatgcgtctgctggttcttttagaactgtcggtgctgaaatcactcaggacactggagatttctttgtcagtgacgcagagggtgatccagacaaacctaccgatgggttctcctcgatcgaccaggctataggtgctttgcgtgaagggaagtttgttattgctgtagatgatgagaacggcgacaacgaaggcgaccttgtgatggcggccactctagtggaccagaagtcagtcgcattcatgatcaggaatggctctgggattatctcggtaggcatggaggaggaggacctgactagactgatgattccgatgatgtcccctatcacagaaatcgaagatatcacggctgctgcttccacggtgacagtggatgccagggttggcatatctacgggtgtgtcggctgcagacagggcgaagaccatcctcactctagcctcctctgactccaagcccagtgatctgaggagaccaggccacatattccccctcaagtaccggaacgggggcgtgctgaagagagctggccacacagaagcgtcggtggatctggttgcgttggcaggtctccgtcctgtgtccgttctctccaccgtcatggaccccagggacggttcgatggcaggcgtaacggttctccagcagatggctatggagcatgacatacccatcgtttcgattgctgatctcatccggtataggagaaagcgggagaagctggtggagctgattgctgtgtctcgcttgccgacgaaatggggcctcttccgagcctactgctaccagtccaggctcgatggaaccgagcacatcgctgttgtgaagggcgatatcggcgacggcgaagaggtcctggtgagggtgcactcggagtgcctgacgggggacatcctcggctcagcccgctgcgactgcggcaaccagctggagctggcgatgcagctgatcgagaaggccggccgtggcgtgctcgtgtacctccgcggccacgagggccgcggcattggcctgggccagaagctccgcgcctacaacctccaggacgagggccacgacaccgtcgaggccaacgtcgagctcggcctcgccgtggacgcccgcgagtacggcatcggcgcccagatactccgtgacatcggcgtgcgcacgatgcggctgatgaccaacaaccccgccaagttcatcgggctcaagggctacgggctcgccgtggtggggagggtgccggtgatctctcccatcaccaaggagaaccagaagtacctcgagaccaagcgcaccaagatgggccacgtctacggctccgatctcccgggaagcctgccggagttcgccaacccacaagaggcccccacagaacaagacgacgacgataaccaaaactgataaaaaaactatacggtgtcgtttttttaggaaaagataccaatataaccacaaattcttgtattccactgagaacgagtattgcagagtatttatttatcaactgcaaaattattaagtataatagagatacaaacttttatcaa

SEQ ID NO: 150072 - DNA, 2084 bp, Zea Mays
ttcggctgcttctatcttgcagctcagaaacatgtggtcagtttccctccactccgtcggtttttttttttccttccattatctgcatgagcagataactccaaacgacgggctgagaggtgctgtgacactgcaggcgataaaggtatataagccaaacgcttttgcaaactgggagcctgggatcaccaaatggaccgtgttcttctgagctcccacttgccatctcacgctcatgcaaacacgaggttgcagcagggtcctggtggcctcaacagtataggatttgcagtcataaaaaagggatgcttgaagttaagatgttacgcgatcggcgatgaactcggtggtccagggcgctttagtaagcatttcatcgagaacagtaatggacctgttttccagggactcgatgcgtctgctggttcttttagaactgtcggtgctgaaatcactcaggacactggagatttctttgtcagtgacgcagagggtgatccagacaaacctaccgatgggttctcctcgatcgaccaggctataggtgctttgcgtgaagggaagtttgttattgctgtagatgatgagaacggcgacaacgaaggcgaccttgtgatggcggccactctagtggaccagaagtcagtcgcattcatgatcaggaatggctctgggattatctcggtaggcatggaggaggaggacctgactagactgatgattccgatgatgtcccctatcacagaaatcgaagatatcacggctgctgcttccacggtgacagtggatgccagggttggcatatctacgggtgtgtcggctgcagacagggcgaagaccatcctcactctagcctcctctgactccaagcccagtgatctgaggagaccaggccacatattccccctcaagtaccggaacgggggcgtgctgaagagagctggccacacagaagcgtcggtggatctggttgcgttggcaggtctccgtcctgtgtccgttctctccaccgtcatggaccccagggacggttcgatggcaggcgtaacggttctccagcagatggctatggagcatgacatacccatcgtttcgattgctgatctcatccggttagtatatcctaaggtgaagcctttgtgaacttgaaagcttccgttgcttttttttgtttaatcttttggttgtgctgtactgcttgcatatatgcctggaaactgaaatgtgtgtggtttggtttggttcaggtataggagaaagcgggagaagctggtggagctgattgctgtgtctcgcttgccgacgaaatggggcctcttccgagcctactgctaccagtccaggctcgatggaaccgagcacatcgctgttgtgaagggcgatatcggcgacggcgaagaggtcctggtgagggtgcactcggagtgcctgacgggggacatcctcggctcagcccgctgcgactgcggcaaccagctggagctggcgatgcagctgatcgagaaggccggccgtggcgtgctcgtgtacctccgcggccacgagggccgcggcattggcctgggccagaagctccgcgcctacaacctccaggacgagggccacgacaccgtcgaggccaacgtcgagctcggcctcgccgtggacgcccgcgagtacggcatcggcgcccagatactccgtgacatcggcgtgcgcacgatgcggctgatgaccaacaaccccgccaagttcatcgggctcaagggctacgggctcgccgtggtggggagggtgccggtgatctctcccatcaccaaggagaaccagaagtacctcgagaccaagcgcaccaagatgggccacgtctacggctccgatctcccgggaagcctgccggagttcgccaacccacaagaggcccccacagaacaagacgacgacgataaccaaaactgataaaaaaactatacggtgtcgtttttttaggaaaagataccaatataaccacaaattcttgtattccactgagaacgagtattgcagagtatttatttatcaactgcaaaattattaagtataatagagatacaaacttttatcaa

SEQ ID NO: 150073 - DNA, 655 bp, Zea Mays
gatccacttcatcctggctgttgtccggcaaattcccgaggttcagagcagtccatctgtgttcataacatttatagcttggagcatatctgaggtcatccgttactctcactatgctctgactaccttaaaagtttgtccagcatggctgacttatctcaggtacactgcttttatcccgctgtatccaatcggggttggcccaggagaaatgtggacaatgtaccaagccctcccgtttgtgaagaagagggacctttactcaggtttcttcgagaagttctccatgagctaccgttcctttctagtgggtgtgctggtgctctacccgttcctgtggctgaagctgtaccagcacgtgttcaagcagcgcaagtccaagctggggaaggggagcaggaagaaacgggcctgagaaaatctggctctgctcagctcagctgccacttgttgctgtcatgtgaaacgctaacgggtcattgtggatttttgttttggaagaaaatctttgtgagttgttgtctgatgcgacgggggcagttattggattacgctttgggttctctgtttgtttcaattgctctgcgttttatgtctgtattaacatacatcaagcatatataatagtcatgttgctgctgcgagtctaatcaat

SEQ ID NO: 150074 - DNA, 738 bp, Zea Mays
gatccacttcatcctggctgttgtccggcaaattcccgaggttcagagcagtccatctgtgttcataacatttatagcttggagcatatctgaggtcatccgttactctcactatgctctgactaccttaaaagtttgtccagcatggctgacttatctcaggtacactgcttttatcccgctgtatccaatcggggttggcccaggagaaagtaagctcaaaatgtcttctcacaagagcgttattactcttgactaaagcttagaccgaggctggttcttgctgtcctttcagtgtggacaatgtaccaagccctcccgtttgtgaagaagagggacctttactcaggtttcttcgagaagttctccatgagctaccgttcctttctagtgggtgtgctggtgctctacccgttcctgtggctgaagctgtaccagcacgtgttcaagcagcgcaagtccaagctggggaaggggagcaggaagaaacgggcctgagaaaatctggctctgctcagctcagctgccacttgttgctgtcatgtgaaacgctaacgggtcattgtggatttttgttttggaagaaaatctttgtgagttgttgtctgatgcgacgggggcagttattggattacgctttgggttctctgtttgtttcaattgctctgcgttttatgtctgtattaacatacatcaagcatatataatagtcatgttgctgctgcgagtctaatcaat

SEQ ID NO: 150075 - DNA, 966 bp, Zea Mays
cgccgttttccccatctcgcgcagcgctactgccggctgtcccgagtcccgaccaccgtcctccgctcccggacgtgaatccttcctcctaccgcgatggagaccttcccgtcggtgaagaacatcctcctactggactccgaggggaagcgcgtcgccgtgaagtactacagcgatggctggcctactctctccgcgaagctggccttcgagaagtcggtcttcgccaaaacccagaaagcgaatgctggaacggatgcagagattgtaatgtttgatggtcaaattgtggtatacaagttcatccaagacctgcacttttttgttactggaggagaagaggagaatgagcttattttagcatcagttcttcagggattctctgatgctgtcgaacgacttctcaagttatcttccctctattgaagtttatcttttcaaccattgtttgttctgttacatgttattgtgttaatgctgattgtatatgaatgtgtttccaaccttggtggtttcaggaacatggttgacaaaaggacagcactcgagaatttggacctgatcctattgtgtcttgatgaaattgttgatggagggattgtacttgaaacagaaggaagagagatagctgaaaaggtgtctggtcacggatcggagggtgcttcatcggctgagcagactttagtcaatgccctaacgcaagcaagagagcatctggcgaagtctcttctcatgtgatgttgtgctttatattttgggggtgacgacggagtatctattattgtgtctggatgacactattctttttgttagcaacggagaaagaaaaatgtctgaagcatttgaatgtgtagagtggcacattgcttccaaaattctcatggtcatctataagccttcaaagttctgtagcatgattgttcttatattgactggttcagttatttgtcgttacttgttttgttt

SEQ ID NO: 150076 - DNA, 1521 bp, Zea Mays
cgccgttttccccatctcgcgcagcgctactgccggctgtcccgagtcccgaccaccgtcctccgctcccggacgtgaatccttcctcctaccgcgatggagaccttcccgtcggtgaagaacatcctcctactggactccgaggggaagcgcgtcgccgtgaagtactacagcgatggctggcctactctctccgcgaagctggccttcgagaagtcggtcttcgccaaaacccagaaagcgaatgctggaacggatgcagagattgtaatgtttgatggtcaaattgtggtatacaagttcatccaagacctgcacttttttgttactggaggagaagaggagaatgagcttattttagcatcagttcttcagggattctctgatgctgtcgaacgacttctcaagttatcttccctctattgaagtttatcttttcaaccattgtttgttctgttacatgttattgtgttaatgctgattgtatatgaatgtgtttccaaccttggtggtttcaggaacatggttgacaaaaggacagcactcgagaatttggacctgatcctattgtgtcttgatgaaattgttgatggagggtaaagccttttcttactacgtacatgatattaagggcttcttttcttgttctctttattgtgtacatttattatcctttgatctgaaatcacctgactcatctgggccatggcaatagagctctattagggcctctatttgtaatggttgtattcaccggattcaaaggtttagtctggtgttctgcttctgtacctcaagcccaagcatgcctaaccttttaatggggttacacaatttgatgtgtgaaacaatggcttagtttgctaaagacatcagcaaaataaacagcccattcctttttttttgaaatggaacaaaactgattatccacatgaagaattgtatctatttgattttgagtttgagatcttgaacgactgcaggtaccacaactatgcactcgcctcaatgtgtctttgataacccattgatgtctaaactctgaaatgtggaagtgataggatcaagcatagagatgaatagaatcgcacattgtaagcagcatgtaattgtttggtgcattaaacataattttctgaatgattacacaggattgtacttgaaacagaaggaagagagatagctgaaaaggtgtctggtcacggatcggagggtgcttcatcggctgagcagactttagtcaatgccctaacgcaagcaagagagcatctggcgaagtctcttctcatgtgatgttgtgctttatattttgggggtgacgacggagtatctattattgtgtctggatgacactattctttttgttagcaacggagaaagaaaaatgtctgaagcatttgaatgtgtagagtggcacattgcttccaaaattctcatggtcatctataagccttcaaagttctgtagcatgattgttcttatattgactggttcagttatttgtcgttacttgttttgttt

SEQ ID NO: 150077 - DNA, 852 bp, Zea Mays
cgccgttttccccatctcgcgcagcgctactgccggctgtcccgagtcccgaccaccgtcctccgctcccggacgtgaatccttcctcctaccgcgatggagaccttcccgtcggtgaagaacatcctcctactggactccgaggggaagcgcgtcgccgtgaagtactacagcgatggctggcctactctctccgcgaagctggccttcgagaagtcggtcttcgccaaaacccagaaagcgaatgctggaacggatgagattgtaatgtttgatggtcaaattgtggtatacaagttcatccaagacctgcacttttttgttactggaggagaagaggagaatgagcttattttagcatcagttcttcagggattctctgatgctgtcgaacgacttctcaagaacatggttgacaaaaggacagcactcgagaatttggacctgatcctattgtgtcttgatgaaattgttgatggagggattgtacttgaaacagaaggaagagagatagctgaaaaggtgtctggtcacggatcggagggtgcttcatcggctgagcagactttagtcaatgccctaacgcaagcaagagagcatctggcgaagtctcttctcatgtgatgttgtgctttatattttgggggtgacgacggagtatctattattgtgtctggatgacactattctttttgttagcaacggagaaagaaaaatgtctgaagcatttgaatgtgtagagtggcacattgcttccaaaattctcatggtcatctataagccttcaaagttctgtagcatgattgttcttatattgactggttcagttatttgtcgttacttgttttgttt

SEQ ID NO: 150078 - DNA, 855 bp, Zea Mays
cgccgttttccccatctcgcgcagcgctactgccggctgtcccgagtcccgaccaccgtcctccgctcccggacgtgaatccttcctcctaccgcgatggagaccttcccgtcggtgaagaacatcctcctactggactccgaggggaagcgcgtcgccgtgaagtactacagcgatggctggcctactctctccgcgaagctggccttcgagaagtcggtcttcgccaaaacccagaaagcgaatgctggaacggatgcagagattgtaatgtttgatggtcaaattgtggtatacaagttcatccaagacctgcacttttttgttactggaggagaagaggagaatgagcttattttagcatcagttcttcagggattctctgatgctgtcgaacgacttctcaagaacatggttgacaaaaggacagcactcgagaatttggacctgatcctattgtgtcttgatgaaattgttgatggagggattgtacttgaaacagaaggaagagagatagctgaaaaggtgtctggtcacggatcggagggtgcttcatcggctgagcagactttagtcaatgccctaacgcaagcaagagagcatctggcgaagtctcttctcatgtgatgttgtgctttatattttgggggtgacgacggagtatctattattgtgtctggatgacactattctttttgttagcaacggagaaagaaaaatgtctgaagcatttgaatgtgtagagtggcacattgcttccaaaattctcatggtcatctataagccttcaaagttctgtagcatgattgttcttatattgactggttcagttatttgtcgttacttgttttgttt

SEQ ID NO: 150079 - DNA, 503 bp, Zea Mays
cacctgcactgcaccgcaagtaacccaaccctgcttccagtgcaagtgactgaccccgtgacccggcccatcataacaaatcaaaccatcacccgacttgtttacccccgaaaatttgccgtcttctcatctcgctcccctctttgcgccgcccccagatccggcaccgcccgctgctcgaacccgcaccccacgcccgcaggccgggaccggtgggcgcgcgccgggcagtaggagggagaggaagggcggcatggcggcgccgccggcgagggcccgggccgactacgactaccttatcaagcttcttctcattggggatagcggtgttggcaagagttgcctcctgttgcggttctctgatggttccttcactacaagctttattaccacaattggtattgactttaagatacggacaatagaattggatggcaagcgtataaagctacagatttgggatacagcgggccaagaacgcttccgtactattaccactggta

SEQ ID NO: 150080 - DNA, 2103 bp, Zea Mays
agaagcatgctgtcagtctgcagaaagagcagcaggcagggcagaggcgccaccaaaccaaaccaaagccgggttttcatcagaaaagaaggcgccaaagccagggatggagcgatgagtgagcgacacccggaggacagcgacggccagggccactgttgctgttgctgttgctgttggcttcgtgctcgtgcagcggcagggacagggagatggccgagagcccgagacgcgaacaagaagcagatcatgcgggaggagacggtagggcgggccggcggggcggggcccctgtaaagcacgagccttgttagcaaaattatatataaataaaccccactccatcgattcctctgccgtttttagcaccgaatcatcgcagacgcacgccacgccgcagcactcagcactccggttcgggcgttcgggcaggcgaattagggatacgttggaggagcaatggcgggaaggcgagaggagtggggtggagaggtactgcagcggcaacgggaggaggaggaggaggaggatgaggaagagcaagaggatgaggatttcatcgacatggacctgagctctgccgcggccaggacgcccgtggcgcatgagttcgagttcatgtcggcgccgctggaccggtggggcgagaccctggctgcgtcgccggcagacgagctcttctacaaggggaagctgctgccgctgcacctgccgccgcgcatccagatggtggaggagctcctggacggccggggccggggccgcggcagggacagggacagggacagggagctcctgttccgcggcgtcagcagcacggccccggcgacgccgtacgagtcgtgcaacgcgtcgccggccaactcgtcgtgctacggctacggctacgccagcggggagctcaacgtcgaggagtacttccaggagtacgcggccggcctggcgctggcggaggacgccgccgcggcgccgaggaagccgtggtccaggaggctacggttcatgaggcagctcaacctgggcctccggctcagggcgtccaaggcgtacctcaagaccatcttgttcgcggccaggccggggagcccggccgacgagaagagcggtcttggcgccgtcgccgcgaggggcgcgcgggaggagatcgccgcccatggccacggccacctcagggcgtggacaaagaacccgttcgcccagaccagaatgaacaccaggtgcgtcgcctctcacggtggcaccagccgcgccgctgccgctgccgctggagggcggtgcaaggaacgcgagcacggggcgcacaggcgctccttctccagcgtcatcgtccgctactctccgtcgaacaagacgtcccccgtccccgcgctgccgccgtcctcgtgctcctcctcatcggcctcctcgtcggtccggacctcgagcgggtcgtccgacggcggcgtggggccgacgctgaggaggagcagcagcgcgagctcggaggtggagaaccccgtccaggggctcatcgcctactgcaagaggtcccagcagctggcctccgtccggaagagcgccagcgacgccggcttccgcttcctgtcgtcgtccgcgtccaggatcgccgccgagtccgagtccgagtccgacggcctcgacgagctcaccgagatctgcagaggatgacgatacgatagtgctccatgaacgatgaatcccgatcattgtacaatgatgcaaatgcgttctggagattttgtgaaggaaaaaaaaactgaaatttgtggcgttgaccgcgcgccctttgtcaagtgtcatgatgatatcgttcaaatgaatggcatctgaactttgagccttgactagttcaagaggacattgcgtgttgtggaacagctgtagggtttttccatggatgaggaaaaccaatagcagagccttatttacatcactttagaattggttcaagtacattacaagctcgttatggaacagctgagtttcatggatgagtagaatcaatagcagagccttacttccattacatcactttagagcccgttcagtgacaagggtattcaaataaatacctaagatttcaatacaaaaaataaatataaa

SEQ ID NO: 150081 - DNA, 3989 bp, Zea Mays
cggctgtctccgcccatctcgcctgagaactaaggcggccgccagtcgcagccctcggtggtcggcacctcctcagcccgtttcccctaacgctcacactctacgccgccgcgtcgtcggcctcgccctccctctcgacgaactaagccatccccggccgagcttccgacgcattcccgggccacttccctcccttccggccttcctactccctccacgcaccgcaactgtgacactccgctccgacgcgggcgccgcaggccgttgacgacacccgaacccaaccggcaacgcgcccgaaaggggcagggactccttttgcttgtccttcgcccctcttctcgctttctgcggagggaaaaactttcccagtcaattaaaaaaaaaatcgacggacggctttacgcacgcgattcgctgctcgcccccaaatttctcctctgcttctggttcctttgacgcatctgatcatttccccctcctctacgcgggtcgaatcgcgagagtgtggcggcggctgtggtggttgactggtgcttagggttggagctccaggaggatggcgagccacggcatcggggcggccgctggatctgacgccccgcacgctgaggtcgtcactatgggacagacaaatccatctccttatcctcctgtatcttccagtcatcattcatggtcctctgcaactgggtcagtttcatggaacaatacagtggacaaacttagccaagatacagtttattatgatccacaaagggatgtatcggtttcaggagggaatcaaaatgtaggaagcagtgcgcctcatgttgcccaggcgagtatggggataacagacgcagctcattcccatgtaccttactctagttcagatcaacatggctataaccctgtagaatatgccaattattattatagctacccacaagcggcaaatgattcttctgtccagcaaggagcaaaccaacatccaggtgcagcttatcagcctcttacttcatttcaaaattcagggtcttacattgatcctacaagtaacacatattacaatgctggggatcatcagactgtgccaggatatggaagcagcagctactattttcagaacaacacatggaatggtggaagcacagggaataattttgctcaatcataccagaactactcaccatctgatacaaatgcacaacagagctctacttcagtgcctgccaattctttaccgtatcagcagcagtataaccagtggccgtactattacaatcaatctgtgccaagtgcttctagcaatccagttgctgggaacagtactacagataacttagctgttaacaccccttctagctactcctatcctaatagccagccacctccaccaggaacaacatcatggaaaagtaattcaagtgcttctgttgcgcctcctatgcaggtaccaggtgttttggaacatcaaaatcaatatggcaaccaggcggaaggtcattataaccagggaccaggtgtccaatggtctcaaaaccattacgcctaccagacacagccataccctcagaagattaattccaattattcgcaactaagcaaccctgaagatcaactgaggactgtagattctaacggtccaagcacaaatctttcgtctaaccatgtttctgaaaattttaaaccaaacttgctggattctgtgacaatgaacacttccagcgaaagcaaaatacaagttcctataaatcctcgaattgcccaaggtttctctatggtgataccaaagaatgagaagaaaagttctggacttgatttatcaaggaaacctgcctatgttagtgtgtccatgccggcgaacgatgctaaagcaagtcaagttggtcctgatgctagatcgatacccttttcactccgtaactatgctatgaggaacctcaatcgttgcaagaatgatacccagagggcagcctgccgaagcataatggaggagatcacaaaaaaagcttttgctgagggaacccttcttactaagaactgggacactgaaccactatttcctttgcctgaaagtgttgtgggcatggctggagcaagcagtgatttaagtcccttcttgtcagtatctaccccaaggaaacgtgtgaaaagtagatgggagcctgttgtggatgaaaatgttaccaataaggtggaacaaatagcaaaaggattgatcagcagtaatgtccacagtactttggaccctaaaaatagaattccaaatcctgtgcggggtagcagttgggatcgtgggaagtttctccagtcttgtcaagcatcatcaaataaagtcaatcagaggcctgccaagaagcaaaaaatggctagtaatttgagtcaaatacagaatggaagtgcttcaagtgacagtgagaaggaacatgatctaaccaaacattatgccagtgcaactgcactagcaaactcgcctgaggaaaagaaacgtagggagcatagatccaagcgttttgaaaagagtaaagattcatcattaaaatcaagaaatgcttctgcaaataacgatggtatggctagttttcgtgcaagaagggcaatttcgtctcttcgtactagaacctatgaagaaggcactttggctgtggaggatatggattgggatgcactgacagtcaaaggaacatgtcaggaaattgagaaacgctatctacgacttacagaagcacctgatcctgccaaagtaaggccagaagatgttctggagaaggcccttgcaatggttgaaacatcagaaaagaattacctttacaagtgtgatcaactaaaatctatccggcaagatcttacagttcagagaatccagaatgaactgactgtaaaggtttatgaaacccatgcccgattagctatgcaagctggcgatttacccgaatttaaccagcttgtcaaaagaagccaaacaagatgcagctgttaagcattcccttgcagttcatgcttctgttttatcttgcaattacgttcaatttttcaaactatacaagaaggcacccaatttgaactcatgcctcatggatctatatgtggagcggatgcgctttgaagctatgaaatgcatgtctaggtcatatcgcccaactgtacctgtgggatatgttgcacagattttggggttcttgagaacagatacaggctgtgcaaccaatggggatgatggattagaaggatgcgaaaaatggttgaaagcgcatgggacagttctttcagaagatagcagtggggaattgcagatagatacgaaggcctcttcttctacactctacatgccagagccagagaacgccgttgcacatggtgatgcatcacttgctgttgatgacttttttgcacggactgacggacaacttaaaaggggcagcagcgatggaccaacagtggatactccgtagtagtattgggggctgccgtggcagtagtgctgaggtggcttcttccgtagaaattacaacagggggcatgaaatggaactgaccaacgatgccagcggagctacagtcggaacatgggtgctctaactgatccagtcatcgggttctggcatttgcctcaaagtgatctagtcatccagagttgcaccgcgatgagcttcgttgagaaggcagataagaaagcagcattacaagtttttaatgtcttggtggtttactcacccctaactttaagcgtagaaagaactgtgaaaaaacaactacaggtctacagctttgaagcatacacgtatgttttccggggctcctttttttctggctgccccttagtccgtgaagattgtaaaaatatttttaatgcacataaatttgctttcctatcctatcgaataacaacatttatgtacgtactaatactcctatagttatatctctcgctcgctcgagccgaaccgtttactgatactaagtctttcatatatatgatgatgcgatagcccgaaatggcttgtt

SEQ ID NO: 150082 - DNA, 3991 bp, Zea Mays
cggctgtctccgcccatctcgcctgagaactaaggcggccgccagtcgcagccctcggtggtcggcacctcctcagcccgtttcccctaacgctcacactctacgccgccgcgtcgtcggcctcgccctccctctcgacgaactaagccatccccggccgagcttccgacgcattcccgggccacttccctcccttccggccttcctactccctccacgcaccgcaactgtgacactccgctccgacgcgggcgccgcaggccgttgacgacacccgaacccaaccggcaacgcgcccgaaaggggcagggactccttttgcttgtccttcgcccctcttctcgctttctgcggagggaaaaactttcccagtcaattaaaaaaaaaatcgacggacggctttacgcacgcgattcgctgctcgcccccaaatttctcctctgcttctggttcctttgacgcatctgatcatttccccctcctctacgcgggtcgaatcgcgagagtgtggcggcggctgtggtggttgactggtgcttagggttggagctccaggaggatggcgagccacggcatcggggcggccgctggatctgacgccccgcacgctgaggtcgtcactatgggacagacaaatccatctccttatcctcctgtatcttccagtcatcattcatggtcctctgcaactgggtcagtttcatggaacaatacagtggacaaacttagccaagatacagtttattatgatccacaaagggatgtatcggtttcaggagggaatcaaaatgtaggaagcagtgcgcctcatgttgcccaggcgagtatggggataacagacgcagctcattcccatgtaccttactctagttcagatcaacatggctataaccctgtagaatatgccaattattattatagctacccacaagcggcaaatgattcttctgtccagcaaggagcaaaccaacatccaggtgcagcttatcagcctcttacttcatttcaaaattcagggtcttacattgatcctacaagtaacacatattacaatgctggggatcatcagactgtgccaggatatggaagcagcagctactattttcagaacaacacatggaatggtggaagcacagggaataattttgctcaatcataccagaactactcaccatctgatacaaatgcacaacagagctctacttcagtgcctgccaattctttaccgtatcagcagcagtataaccagtggccgtactattacaatcaatctgtgccaagtgcttctagcaatccagttgctgggaacagtactacagataacttagctgttaacaccccttctagctactcctatcctaatagccagccacctccaccaggaacaacatcatggaaaagtaattcaagtgcttctgttgcgcctcctatgcaggtaccaggtgttttggaacatcaaaatcaatatggcaaccaggcggaaggtcattataaccagggaccaggtgtccaatggtctcaaaaccattacgcctaccagacacagccataccctcagaagattaattccaattattcgcaactaagcaaccctgaagatcaactgaggactgtagattctaacggtccaagcacaaatctttcgtctaaccatgtttctgaaaattttaaaccaaacttgctggattctgtgacaatgaacacttccagcgaaagcaaaatacaagttcctataaatcctcgaattgcccaaggtttctctatggtgataccaaagaatgagaagaaaagttctggacttgatttatcaaggaaacctgcctatgttagtgtgtccatgccggcgaacgatgctaaagcaagtcaagttggtcctgatgctagatcgatacccttttcactccgtaactatgctatgaggaacctcaatcgttgcaagaatgatacccagagggcagcctgccgaagcataatggaggagatcacaaaaaaagcttttgctgagggaacccttcttactaagaactgggacactgaaccactatttcctttgcctgaaagtgttgtgggcatggctggagcaagcagtgatttaagtcccttcttgtcagtatctaccccaaggaaacgtgtgaaaagtagatgggagcctgttgtggatgaaaatgttaccaataaggtggaacaaatagcaaaaggattgatcagcagtaatgtccacagtactttggaccctaaaaatagaattccaaatcctgtgcggggtagcagttgggatcgtgggaagtttctccagtcttgtcaagcatcatcaaataaagtcaatcagaggcctgccaagaagcaaaaaatggctagtaatttgagtcaaatacagaatggaagtgcttcaagtgacagtgagaaggaacatgatctaaccaaacattatgccagtgcaactgcactagcaaactcgcctgaggaaaagaaacgtagggagcatagatccaagcgttttgaaaagagtaaagattcatcattaaaatcaagaaatgcttctgcaaataacgatggtatggctagttttcgtgcaagaagggcaatttcgtctcttcgtactagaacctatgaagaaggcactttggctgtggaggatatggattgggatgcactgacagtcaaaggaacatgtcaggaaattgagaaacgctatctacgacttacagaagcacctgatcctgccaaagtaaggccagaagatgttctggagaaggcccttgcaatggttgaaacatcagaaaagaattacctttacaagtgtgatcaactaaaatctatccggcaagatcttacagttcagagaatccagaatgaactgactgtaaaggtttatgaaacccatgcccgattagctatgcaagctggcgatttacccgaatttaaccagtgccagtcacaactgaagaggctatatgcacaaggaatcaagggttgctattttgaattttctgcttacaatttgttgtgtgtcatgctacactctaataataaacgagacttgctgtcatcaatggcaagcttgtcaaaagaagccaaacaagatgcagctgttaagcattcccttgcagttcatgcttctgttttatcttgcaattacgttcaatttttcaaactatacaagaaggcacccaatttgaactcatgcctcatggatctatatgtggagcggatgcgctttgaagctatgaaatgcatgtctaggtcatatcgcccaactgtacctgtgggatatgttgcacagattttggggttcttgagaacagatacaggctgtgcaaccaatggggatgatggattagaaggatgcgaaaaatggttgaaagcgcatgggacagttctttcagaagatagcagtggggaattgcagatagatacgaaggcctcttcttctacactctacatgccagagccagagaacgccgttgcacatggtgatgcatcacttgctgttgatgacttttttgcacggactgacggacaacttaaaaggggcagcagcgatggaccaacagtggatactccgtagtagtattgggggctgccgtggcagtagtgctgaggtggcttcttccgtagaaattacaacagggggcatgaaatggaactgaccaacgatgccagcggagctacagtcggaacatgggtgctctaactgatccagtcatcgggttctggcatttgcctcaaagtgatctagtcatccagagttgcaccgcgatgagcttcgttgagaaggcagataagaaagcagcattacaagtttttaatgtcttggtggtttactcacccctaactttaagcgtagaaagaactgtgaaaaaacaactacaggtctacagctttgaagcatacacgtatgttttccggggctcctttttttctggctgccccttagtccgtgaagattgtaaaaatatttttaatgcacataaatttgctttcctatcct

SEQ ID NO: 150083 - DNA, 1999 bp, Zea Mays
ccctctctctgggaaggcccttggatccctcgatctccaaggccttccttccattgccatcgccatcggcatcaattgttccccgtggtggtcttgtggctctctccggtcgcctgagcaagccacacctagtcggtcacactcccctgatcggcgtcgggcggtcgggttcatttgatgcgcagtgggcccggcgggcatggcgttccacgaagtggagacgtcgcgtcggtgctaagacgtcggggcatggtcggcgcgcagtgacggcggtcggcggctgggtccgatccgtgcatgcatgccctgcgctcttaccctcatcgagtcgtcgctcgaccggtggtgccccctcccccgcgcctgctcggcgcccacaaggtcgcagccacggggaggcgcagagggaaaaggaagatgagctgctttccgtgcttcggtggcggaaagggcaatgacgacgacgacgacgcggagagcccaggtgatgcggccccggcatccaacatggcgccacccgcgatggtgcaggcgcccgccgcatactccccggctcccacggccgctccaacagccgcggctccgcccatgcccggtggcgcgaaccacgcgcacgaggcttccgccgacgagtcgtcgttgcggctcgccatcacggggcaagcgttcgcgttccgcgagctcgccgcggccacagaccatttcacgccatacaacctcgtcggagaaggcggattcttccgggtctacaagggccaactagagaagagcggccagaccgtggccatcaagcagctggacaagcatgggttccaggacaacaatgcgttcctgagcggggtcgccaagctcagcaagctccaccacgagaacctcgtcgacatcattggctactgcgccgacggagaccagcggctgctggtgtacgagtccgtgcccgccggcaccttagaagaccacctgttcgatctgccggcggacaagaaaccgatggactggtgcacgaggatgaaggtggcgcacggcgcggcacaggggctggagtacctgcacgagacagcgaacccgccggtggtgtacggggagttcaaggcctcccacatacttctcgacgagaggtccacgcccaagctctccgacttcgggctcgcgcagctcggccaggcggggggcagcatgccggtggcgtcgcccatgatgggctccttcggctgctgcgcgccggagtacgacaggaccgggcaggccaccatgaagtccgacgtctacagcttcggggtggtgctggtgcagctcatctccgggaggagggccgtcgacaccagcaagccggtggacgagcagaacgttgtcacctgggccatgccgatgttcaaggaccagaagagataccatgagctggttgatccactcataaaaaaggagtacgctgccaaagcgctgaaccaggtggtcgccatggctgcgatgtgcttgcaggaagaggactccgtgcgaccgctgatggccgacgtcgtcatgacgctgggcttcctcacggcgatgccgccggatccaccggcccctgctgctccacctgccgccgcctcggagccgaagaaagacaaagcagaatcggatcattcagactcatcgtcatcttcttcggacgacgaagaggacgaagaggaggaaaccgaggagcaatgataagggcatgcaggtgtgttcctaggcttcagatgtggaaggccggccacgcagatgaatgtggcttcatgcacctattctgtaaggagctcaatatgtagaccgtggattaattaatcctttgggggctagctacatggtgtggttgcggttgcggcagtgtaaatttggggtgttcataatttttttttttttgactgtcaacgggggaaaggctccccacctgatttttcattgatatgttcttgtcgcccctaaaggctttacataagtttatagacccggcttgccggggtgagggggggaagaa

SEQ ID NO: 150084 - DNA, 404 bp, Zea Mays
agaaataaaagtgactaaaatagtaaaaatgtattagacacttttagcttcttaggaggagctaaactttagacattttgctttagctcctagatccaaataggcccttaatgttttcacgatccatgggctacctcaccagtcacgcgtccaccgacctcaagcacaacaggcaagttgctcagctaggcccaagcactcagccaagtcaaccattggctcatcgctcggttaaagaccattttaacttaattaaaggactagttaggtgtccgtgcgttgaaacgacatacaaaatattcgatgagcatatgaaggaaatccatgtatggcgtgtttgtcatgtttgtggggcttctagttcaattttttgcaataaaatagagagacaaacactactttag

SEQ ID NO: 150085 - DNA, 255 bp, Zea Mays
atgttccttggagctttcctctatgtcatcaggcacattgttctgtatttccttatcaaaatgagctatgccattatcactttcattattctttgtcccaggctccacgtttacatgatcttcaactttgttagattcggcttcagcatgttcaggaatggcagaaccaccaccagcagcagcagcaggcacatgtaccacaagaaccggattcttctccgtctcagtgagcagatcacgagctcctgcttctag

SEQ ID NO: 150086 - DNA, 115 bp, Zea Mays
ctgtgcagggtctggggaagggtatctttaagcgccaagccttacccgcataatatgcagaggctggggctcgaacccgggaccttccggttacagacggtaggctctaccgctg

SEQ ID NO: 150087 - DNA, 530 bp, Zea Mays
gagagagagaggacggcagtcacagtcaggcagtctgcaggcacatccatggagtactactacgcctaccagcacagcaacagcaacagcagcggcggcttgagctcaaaggagaagaggccgccgctgaagcgggggcagctcaagcggcagatcgtgaggaccatcagcaacctcgtggtgccgaggcacgccgccgtcgctgggtcgagggagaaggcagatcgcggcagcggattcggcggaggacggagctacaactgatgatggatctctcggagaaggcgtgatcagagatacgattcgcagcgccaggtttgtgtgtacgtactacttgccgatgccgatgcaaaagcagcacgtagcgcatctgttcttcttagagcttagtaatagcttaattatccttgtttttccccctgttgtacaaaacaaaacttgcaggcttttttagatggttgatagagttttgttacataaatgtaatgttagcttcatagcttgtgtgaggtcatgtaaagttccttttg

SEQ ID NO: 150088 - DNA, 925 bp, Zea Mays
gtggtccccgccgccacgctgtggcccttcttcgacgccgtctgctccgacaccgccgtcaccttcggctcgctcgtcgcgctccacgagtacctttgagaattcgtcggtagtaccattgtatcattgcactggattaaatcgatgctattcagtcctatatccccgaaggagacgccttgaagttgatagccggacagttcatcaggtctttactatgactgcaactttgaagtttggtattcatataatcaataggctcaacagtatgtcccttgtaaatgttcttgtttcttacaagtggtgatggtggtagtggtctggtctctgtgtgagcattggtctagaggatcgtgaagctatgcggctcttctttcatgttcaagatgaagttcatgaagcttggatcgaatctggatacctttaatgatgatggcaatgaagtcagaggttataatcactcctgagcacaacgaagaagggatttacacgatcagattctacattcaggtatttattgtttaaaccatttgaccgataagtttgaggctgcttctcatgaaacatttcctacaagctttatgaaacatctgctgataaagctttgtttcttaacatgtccagcgaagctttctttcttaacatgttgctattgtgtccagcgaagatgcaggctatctcctgctaatgttgctgccgaagaaatgaacttcttacttttatgtagaggcaacacttactaatatgatgctcgaatttgcaatgaatgatgtgtgtgtgtgctatttttggaccactggtatttaaaactgacaaccatgaagttttggtacacatgaatcccaagcaatttgtgtaaaatatggctaaacaaaacattgatgcctgatttatgatccagctgattttgatgtcaatttattat

SEQ ID NO: 150089 - DNA, 704 bp, Zea Mays
gtggtccccgccgccacgctgtggcccttcttcgacgccgtctgctccgacaccgccgtcaccttcggctcgctcgtcgcgctccacgagtacctttgagaattcgtcggtagtaccattgtatcattgcactggattaaatcgatgctattcagtcctatatccccgaaggagacgccttgaagttgatagccggacagttcatcaggtctttactatgactgcaactttgaagtttggtattcatataatcaataggctcaacagtatgtcccttgtaaatgttcttgtttcttacaagtggtgatggtggtagtggtctggtctctgtgtgagcattggtctagaggatcgtgaagctatgcggctcttctttcatgttcaagatgaagttcatgaagcttggatcgaatctggatacctttaatgatgatggcaatgaagtcagaggttataatcactcctgagcacaacgaagaagggatttacacgatcagattctacattcagatgcaggctatctcctgctaatgttgctgccgaagaaatgaacttcttacttttatgtagaggcaacacttactaatatgatgctcgaatttgcaatgaatgatgtgtgtgtgtgctatttttggaccactggtatttaaaactgacaaccatgaagttttggtacacatgaatcccaagcaatttgtgtaaaa

SEQ ID NO: 150090 - DNA, 2623 bp, Zea Mays
ctatatgcacaggttgaagatgatggcaacgacatcttgtgtcttccaattgatttccagcagcttcaggagttacgcatgtttattgaagataaactcaatgagtccccaaaagaagccttgctttgcatgggagttgcagctcatctggctctgtgctcggacaaggacaacaaaaggaacaagataaatatcaggctttacaacacgggagcagctattgcattaaagaaactaaaagcagcctttattaagaaacttgtcacagtgcgtggtactgtgctcaaagtcagcactgtaaaacctcttgttttgtggttgaaattccgatgcatgaagtgccgtaaagaaataccccgtgtgttttgtgatggaaaattttctcctccaatgtcctgtaccatccagggatgcaagagcagaagctttatcccagatagatctagtgcacagctgatggattttcaaaaaataagaatacaggagcttgcaagcgctgacaaccatgaagaaggccgagtgccacgcacagtggagtgtgagcttacagaagatctcgttgattgttgcatccctggagaaattgtaacggtaactgcaattgtgaaagtgctcaacaaccatatggatgttggtggagggaagtccagaatcagcagtcaaggtttatactacctgtatctggaggcagtttcagtgagaaagttgaagtcccatgctgtttctgacaaagaaattcaagctagtggaatttgtcattctcagtcttctactgtaaatgatgattttgctgtcaaatataaagaaaaatatggcaccgatgtttttcgcagaatacttcaatccttttgtccctctatctatgggcatgaacttgtaaaagctggtatcacacttgctctttttggcggtgtgcagaagaactcaatggatcaaaacatggtccctgttcgaggagatattcatgttattgtagttggtgatccagggctaggcaaaagccaactcctccaagctgcagcagctgtttccccacgaggaatatatgtatgtgggaatacgacaacaaaggctggcctaactgttgctgtggttaaagattctatgacaaatgattatgcatttgaggctggtgccatggtccttgctgatcgtggaatatgctgtattgatgagtttgataaaatgtttacagagcatcaggctttacttgaagccatggagcagcaatgtgtttctattgcaaaggctggtcttgtagcaagtttgtcagctcgaacttcagtgttggcagctgcaaatcctattggtggccattatgaccgagcaaaaacagtgaacgagaatctaaaaatgagtgctgccctcctttctcgatttgacttggtgtttattctacttgacaagccagatgagtcactagataaaagagtgtcagaccatataatagctctccataccaatgatgttgataatttcagacccaacaagaggaccagaacagggtcacattttgatggtgatccggggcttggagttggtggaaattcagtagcttcaaggctgaggctacacccagagaaagacaaggacttcactccattatctgggcaacttcttcgcaaatatatatcttattcaagagaacatgtcttccccagaatgtcaaaggcagcagctgcaattttgaaagaattttatttgaagctgagaaaccgcagtgcttctgctgatggtacacccatcacagccaggcagttagaaagcctagtcagattagccgaagctcgtgctcgcgtggatctaagagatgaagtgactgaagaagatgctcaggatgttgtcgatatcatgaaagaatctctgtatgacaaatatgttgatgaacatggttttgttgattttactcggagcggtggaatgagccaaccgaagcaggcaaagaagtttctgaatgcattaaacaaggaatctgagttgcagcaaaaggactgcttctcgagaactgaactttacaccatagctgataagatcagcttgcaagttccagacttggacactcttgtagaaaagatgaacattgccggttaccttattcaaaaaagatcagggatgtatcagctggtgactgcgccatattaacaatgcagccaacgaggtcaagatggagagttttcttgaatgaaactagaatttgcacctgctttgtctgtactagtgcctgctctagatctccagacactctggaaggccttaatccatttcaacataattgacatgtacctttcagctcatttccccccgtcccgtgagagatgtatggtttggaagctatgcgtatcgtcatggctgcgcacatacgtgctgcagtgtacaggcgactgaagtgcacgcgtcgcaggatgagcactaactttggtagcttggtgtatgccatggttgcgatatgatatattattgtgaaacaggaacctctagcggttattagtttatagatattcaagtttgccaatgaaacatccagaatagcatatgatgcattttacaccccttacacccgatcactcggaaaacatctagcacgctgtaaattactccctcagcaatagtaattattgctgtt

SEQ ID NO: 150091 - DNA, 505 bp, Zea Mays
ctaccaaagtcaccatcatttcgcgtgcccagcaggccgaaggcatggaggtccgtaccatgagccgccgaagcggcggaggcgacgcgtcagcaggcgcctcgggtgggagctgcacgaaggccagctcaggcgacgcggtaactgggaggagccggtggcgcaggcgcacgaaggagagaagctgcgcccaggaggagcggatgatccggagcaggatctggaagagcagaccgaggccgagccaccccgccgccgccggatggctcggttgctgaactggcgcaacctccgtcgccgccgacatctgtctctggaggcggagacttagccgcgattgggagaacggaacggggaggaagcaccgaagcaatcatagagtcgtggtcgctgctctatctttcatttgtgtcggcaggttccctcaattccctcttaagggctggtttgacagtatcccgtgtatagctagagcccagggagataattgcatatttgggactcg

SEQ ID NO: 150092 - DNA, 1854 bp, Zea Mays
ggaaggatccgcctctcgcgcgcccccgccgacgcacgcaactcgcagacggcgcccccccagatccacttctcgctggccgctcagatcctccatatcctgacctctccctcctcttgctgcagatgatatgctagagcgtcagcaaggcggactctccaaacctccagagagggagggaggcagcagccaatgcccagcacgtaccaatctgcgtggcgggaggtgcccggactgcgtacccacgggcgagcaggattttgacgatccacgacccgatgaagtcgccggcgtcggtgacgcacaaggcggcagtggccatcgtgcgctgacgcccagtcccttcctctcgcgagcgaaacggggggcggtggtgccgccgggcgaatggattcgtccgagagcgagcaaataggggtaagcatttatcaagcggaagtgggaagaaatggtacagtgaagtggaggaaatgacacagaacacgagcgaagctggcatctcaaggcggtcgcactcgcacgttctattcttgtgtagtgcagctccgaagtcgctgctaccaggtgcccccgtgctggggcataggtgcagtcgccgctgcgcccagcctacacaaaggcagctaccgttgcgacaacgagagggagctcccaaggcaccaatgttgttgctgccagttcttcaaagagttattgatggttcacaaaagaccactgttgctctgccaattcacaaagccttgatgattgttatgatggaaccaatgttgaggcctacaacaatgatgtcattgttcccatgggacctcaatctccaaaaaaccaagaggccgtgggaagaggaatgtgacaatgagaaggttcagttaaagactattggaaaagatgtcgccctaaccgttgggcaaacacctggatgacatcatcttctctgctaaaggcaccatattctcttcaaggatccaaacaattaccccacttgggaagaggaatgtgacggagttagcactacctccacataatgggaaggttgggttaaagcctattggtacctggtgagtattttgtttttatttcagcacatgctcgcttgctgctctcatattttaagccatgttatatttacactgcttgccttggaaaattttaatttgtagcaataatttttggataatttgtactatatgtaacttttaagttataattacactgcttatcaacgggctatacccttgtatggtggacattcacgaatagcaaggtagggttgttgaaacaaggataggattttcatggcatgattactactgcaagaaagatgaaatactttggttacaaatgtgtagctccggcaccgttgctgttctggtctcggccgtggagatggaactatgattaaaagaaaagagaacactacggaaggaacctactgatgctcagtgtactgcgactttcccacgatgctcatgatgtcgaagtctgcagttgctagactggcccgagtaattgctaagttttgtagaaaatgtttaggcccatttttgaacgcatgaatttcgtataggctgtatttcacacgaaatacacaggaacaaacatttttcctgccttccaaacaggtcgttaggattagttgaagttccagtttgatcataggcacctaggtcgatgctctttagtaagatgtaagtaatatgtcttctggccaggttgagcaaggcttagctgcagtgtatcagtgtggtacagctgatgtatttatactgttacaatctaatgagactatatggattagagctatcagaacctgcacagatatttcacaataaactcttaggttatatattgctcgag

SEQ ID NO: 150093 - DNA, 1783 bp, Zea Mays
cgatccgcttctcccccgcgcccctcggcaagctcgcagtccaggatccgattctcgcgtcgccctcccgccgcgcccctcggcaagctcgcaatccaggatccgattctcgcgtcgccctcccgccgcgcccctcggcatctcaactacctcgtgatgcctcccccacccccgatctataaaccagccgctcgccactcctcccgtactctcgcccccgacctcatggaaggatccgcctctcgcgcgcccccgccgacgcacgcaactcgcagacggcgcccccccagatccacttctcgctggccgctcagatcctccatatcctgacctctccctcctcttgctgcagatgatatgctagagcgtcagcaaggcggactctccaaacctccagagagggagggaggcagcagccaatgcccagcacgtaccaatctgcgtggcgggaggtgcccggactgcgtacccacgggcgagcaggattttgacgatccacgacccgatgaagtcgccggcgtcggtgacgcacaaggcggcagtggccatcgtgcgctgacgcccagtcccttcctctcgcgagcgaaacggggggcggtggtgccgccgggcgaatggattcgtccgagagcgagcaaataggggtaagcatttatcaagcggaagtgggaagaaatggtacagtgaagtggaggaaatgacacagaacacgagcgaagctggcatctcaaggcggtcgcactcgcacgttctattcttgtgtagtgcagctccgaagtcgctgctaccaggtgcccccgtgctggggcataggtgcagtcgccgctgcgcccagcctacacaaaggcagctaccgttgcgacaacgagagggagctcccaaggcaccaatgttgttgctgccagttcttcaaagagttattgatggttcacaaaagaccactgttgctctgccaattcacaaagccttgatgattgttatgatggaaccaatgttgaggcctacaacaatgatgtcattgttcccatgggacctcaatctccaaaaaaccaagaggccgtgggaagaggaatgtgacaatgagaaggttcagttaaagactattggaaaagatgtcgccctaaccgttgggcaaacacctggatgacatcatcttctctgctaaaggcaccatattctcttcaaggatccaaacaattaccccacttgggaagaggaatgtgacggagttagcactacctccacataatgggaaggttgggttaaagcctattggtacctgctccggcaccgttgctgttctggtctcggccgtggagatggaactatgattaaaagaaaagagaacactacggaaggaacctactgatgctcagtgtactgcgactttcccacgatgctcatgatgtcgaagtctgcagttgctagactggcccgagtaattgctaagttttgtagaaaatgtttaggcccatttttgaacgcatgaatttcgtataggctgtatttcacacgaaatacacaggaacaaacatttttcctgccttccaaacaggtcgttaggattagttgaagttccagtttgatcataggcacctaggtcgatgctctttagtaagatgtaagtaatatgtcttctggccaggttgagcaaggcttagctgcagtgtatcagtgtggtacagctgatgtatttatactgttacaatctaatgagactatatggattagagctatcagaacctgcacagatatttcacaataaactcttaggttatatatt

SEQ ID NO: 150094 - DNA, 1523 bp, Zea Mays
ctctgccccacgatccgcttctcccccgcgcccctcggcaagctcgcagtccaggatccgattctcgcgtcgccctcccgccgcgcccctcgatgatatgctagagcgtcagcaaggcggactctccaaacctccagagagggagggaggcagcagccaatgcccagcacgtaccaatctgcgtggcgggaggtgcccggactgcgtacccacgggcgagcaggattttgacgatccacgacccgatgaagtcgccggcgtcggtgacgcacaaggcggcagtggccatcgtgcgctgacgcccagtcccttcctctcgcgagcgaaacggggggcggtggtgccgccgggcgaatggattcgtccgagagcgagcaaataggggtaagcatttatcaagcggaagtgggaagaaatggtacagtgaagtggaggaaatgacacagaacacgagcgaagctggcatctcaaggcggtcgcactcgcacgttctattcttgtgtagtgcagctccgaagtcgctgctaccaggtgcccccgtgctggggcataggtgcagtcgccgctgcgcccagcctacacaaaggcagctaccgttgcgacaacgagagggagctcccaaggcaccaatgttgttgctgccagttcttcaaagagttattgatggttcacaaaagaccactgttgctctgccaattcacaaagccttgatgattgttatgatggaaccaatgttgaggcctacaacaatgatgtcattgttcccatgggacctcaatctccaaaaaaccaagaggccgtgggaagaggaatgtgacaatgagaaggttcagttaaagactattggaaaagatgtcgccctaaccgttgggcaaacacctggatgacatcatcttctctgctaaaggcaccatattctcttcaaggatccaaacaattaccccacttgggaagaggaatgtgacggagttagcactacctccacataatgggaaggttgggttaaagcctattggtacctgctccggcaccgttgctgttctggtctcggccgtggagatggaactatgattaaaagaaaagagaacactacggaaggaacctactgatgctcagtgtactgcgactttcccacgatgctcatgatgtcgaagtctgcagttgctagactggcccgagtaattgctaagttttgtagaaaatgtttaggcccatttttgaacgcatgaatttcgtataggctgtatttcacacgaaatacacaggaacaaacatttttcctgccttccaaacaggtcgttaggattagttgaagttccagtttgatcataggcacctaggtcgatgctctttagtaagatgtaagtaatatgtcttctggccaggttgagcaaggcttagctgcagtgtatcagtgtggtacagctgatgtatttatactgttacaatctaatgagactatatggattagagctatcagaacctgcacagatatttcacaataaactcttaggttatatatt

SEQ ID NO: 150095 - DNA, 1650 bp, Zea Mays
gagtttcatcgcctcgctcgcgtcgccaactacatccgctcgaaccgcgtccttacatgccatgcccaccatcctcgctcgctccaaccatgtatctacatgtcgcctccgacatccacgcccatgcttcgtgtagtgcttgacgcgcccgctccaaccgcgtctatgcatgccgtgactgccatcctcgccacccgcatgcctcatctgcatcctccgtttatcgtacttatccgcgatgatatgctagagcgtcagcaaggcggactctccaaacctccagagagggagggaggcagcagccaatgcccagcacgtaccaatctgcgtggcgggaggtgcccggactgcgtacccacgggcgagcaggattttgacgatccacgacccgatgaagtcgccggcgtcggtgacgcacaaggcggcagtggccatcgtgcgctgacgcccagtcccttcctctcgcgagcgaaacggggggcggtggtgccgccgggcgaatggattcgtccgagagcgagcaaataggggtaagcatttatcaagcggaagtgggaagaaatggtacagtgaagtggaggaaatgacacagaacacgagcgaagctggcatctcaaggcggtcgcactcgcacgttctattcttgtgtagtgcagctccgaagtcgctgctaccaggtgcccccgtgctggggcataggtgcagtcgccgctgcgcccagcctacacaaaggcagctaccgttgcgacaacgagagggagctcccaaggcaccaatgttgttgctgccagttcttcaaagagttattgatggttcacaaaagaccactgttgctctgccaattcacaaagccttgatgattgttatgatggaaccaatgttgaggcctacaacaatgatgtcattgttcccatgggacctcaatctccaaaaaaccaagaggccgtgggaagaggaatgtgacaatgagaaggaaaagatgtcgccctaaccgttgggcaaacacctggatgacatcatcttctctgctaaaggcaccatattctcttcaaggatccaaacaattaccccacttgggaagaggaatgtgacggagttagcactacctccacataatgggaaggttgggttaaagcctattggtacctgctccggcaccgttgctgttctggtctcggccgtggagatggaactatgattaaaagaaaagagaacactacggaaggaacctactgatgctcagtgtactgcgactttcccacgatgctcatgatgtcgaagtctgcagttgctagactggcccgagtaattgctaagttttgtagaaaatgtttaggcccatttttgaacgcatgaatttcgtataggctgtatttcacacgaaatacacaggaacaaacatttttcctgccttccaaacaggtcgttaggattagttgaagttccagtttgatcataggcacctaggtcgatgctctttagtaagatgtaagtaatatgtcttctggccaggttgagcaaggcttagctgcagtgtatcagtgtggtacagctgatgtatttatactgttacaatctaatgagactatatggattagagctatcagaacctgcacagatatttcacaataaactcttaggttatatatt

SEQ ID NO: 150096 - DNA, 1771 bp, Zea Mays
tcagtccgcgctcactctgccccacgatccgcttctcccccgcgcccctcggcaagctcgcagtccaggatccgattctcgcgtcgccctcccgccgcgcccctcggcaagctcgcaatccaggatccgattctcgcgtcgccctcccgccgcgcccctcggcatctcaactacctcgtgatgcctcccccacccccgatctataaaccagccgctcgccactcctcccgtactctcgcccccgacctcatggaaggatccgcctctcgcgcgcccccgccgacgcacgcaactcgcagacggcgcccccccagatccacttctcgctggccgctcagatcctccatatcctgacctctccctcctcttgctgcagatgatatgctagagcgtcagcaaggcggactctccaaacctccagagagggagggaggcagcagccaatgcccagcacgtaccaatctgcgtggcgggaggtgcccggactgcgtacccacgggcgagcaggattttgacgatccacgacccgatgaagtcgccggcgtcggtgacgcacaaggcggcagtggccatcgtgcgctgacgcccagtcccttcctctcgcgagcgaaacggggggcggtggtgccgccgggcgaatggattcgtccgagagcgagcaaataggggtaagcatttatcaagcggaagtgggaagaaatggtacagtgaagtggaggaaatgacacagaacacgagcgaagctggcatctcaaggcggtcgcactcgcacgttctattcttgtgtagtgcagctccgaagtcgctgctaccaggtgcccccgtgctggggcataggtgcagtcgccgctgcgcccagcctacacaaaggcagctaccgttgcgacaacgagagggagctcccaaggcaccaatgttgttgctgccagttcttcaaagagttattgatggttcacaaaagaccactgttgctctgccaattcacaaagccttgatgattgttatgatggaaccaatgttgaggcctacaacaatgatgtcattgttcccatgggacctcaatctccaaaaaaccaagaggccgtgggaagaggaatgtgacaatgagaaggaaaagatgtcgccctaaccgttgggcaaacacctggatgacatcatcttctctgctaaaggcaccatattctcttcaaggatccaaacaattaccccacttgggaagaggaatgtgacggagttagcactacctccacataatgggaaggttgggttaaagcctattggtacctgctccggcaccgttgctgttctggtctcggccgtggagatggaactatgattaaaagaaaagagaacactacggaaggaacctactgatgctcagtgtactgcgactttcccacgatgctcatgatgtcgaagtctgcagttgctagactggcccgagtaattgctaagttttgtagaaaatgtttaggcccatttttgaacgcatgaatttcgtataggctgtatttcacacgaaatacacaggaacaaacatttttcctgccttccaaacaggtcgttaggattagttgaagttccagtttgatcataggcacctaggtcgatgctctttagtaagatgtaagtaatatgtcttctggccaggttgagcaaggcttagctgcagtgtatcagtgtggtacagctgatgtatttatactgttacaatctaatgagactatatggattagagctatcagaacctgcacagatatttcacaataaa

SEQ ID NO: 150097 - DNA, 1382 bp, Zea Mays
gagtttcatcgcctcgctcgcgtcgccaactacatccgctcgaaccgcgtccttacatgccatgcccaccatcctcgctcgctccaaccatgtatctacatgtcgcctccgacatccacgcccatgcttcgtgtagtgcttgacgcgcccgctccaaccgcgtctatgcatgccgtgactgccatcctcgccacccgcatgcctcatctgcatcctccgtttatcgtacttatccgcgatgatatgctagagcgtcagcaaggcggactctccaaacctccagagagggagggaggcagcagccaatgcccagcacgtaccaatctgcgtggcgggaggtgcccggactgcgtacccacgggcgagcaggattttgacgatccacgacccgatgaagtcgccggcgtcggtgacgcacaaggcggcagtggccatcgtgcgctgacgcccagtcccttcctctcgcgagcgaaacggggggcggtggtgccgccgggcgaatggattcgtccgagagcgagcaaataggggtaagcatttatcaagcggaagtgggaagaaatggtacagtgaagtggaggaaatgacacagaacacgagcgaagctggcatctcaaggcggtcgcactcgcacgttctattcttgtgtagtgcagctccgaagtcgctgctaccaggtgcccccgtgctggggcataggtgcagtcgccgctgcgcccagcctacacaaaggcagctaccgttgcgacaacgagagggagctcccaaggcaccaatgttgttgctgccagttcttcaaagagttattgatggttcacaaaagaccactgttgctctgccaattcacaaagccttgatgattgttatgatggaaccaatgttgaggcctacaacaatgatgtcattgttcccatgggacctcaatctccaaaaaaccaagaggccgtgggaagaggaatgtgacaatgagaaggttcagttaaagactattggaaaagatgtcgccctaaccgttgggcaaacacctggatgacatcatcttctctgctaaaggcaccatattctcttcaaggatccaaacaattaccccacttgggaagaggaatgtgacggagttagcactacctccacataatgggaaggttgggttaaagcctattggtacctgctccggcaccgttgctgttctggtctcggccgtggagatggaactatgattaaaagaaaagagaacactacggaaggaacctactgatgctcagtgtactgcgactttcccacgatgctcatgatgtcgaagtctgcagttgctagactggcccgagtaattgctaagttttgtagaaaatgtttaggcccatttttgaacgcatgaatttcgt

SEQ ID NO: 150098 - DNA, 1340 bp, Zea Mays
gccatgcccaccatcctcgctcgctccaaccatgtatctacatgtcgcctccgacatccacgcccatgcttcgtgtagtgcttgacgcgcccgctccaaccgcgtctatgcatgccgtgactgccatcctcgccacccgcatgcctcatctgcatcctccgtttatcgtacttatccgcgatgatatgctagagcgtcagcaaggcggactctccaaacctccagagagggagggaggcagcagccaatgcccagcacgtaccaatctgcgtggcgggaggtgcccggactgcgtacccacgggcgagcaggattttgacgatccacgacccgatgaagtcgccggcgtcggtgacgcacaaggcggcagtggccatcgtgcgctgacgcccagtcccttcctctcgcgagcgaaacggggggcggtggtgccgccgggcgaatggattcgtccgagagcgagcaaataggggtaagcatttatcaagcggaagtgggaagaaatggtacagtgaagtggaggaaatgacacagaacacgagcgaagctggcatctcaaggcggtcgcactcgcacggttagcagtgcactcccctaatttctgccctttttatggtttcacgattatctgaatatggagttcaaggattgatcttttctgagttctttgttgccatatttttctgtccatgtaataaggttgtgggtaaaatattgtgtcaatcgggcttgtgtgttgcagttctattcttgtgtagtgcagctccgaagtcgctgctaccaggtgcccccgtgctggggcataggtgcagtcgccgctgcgcccagcctacacaaaggcagctaccgttgcgacaacgagagggagctcccaaggcaccaatgttgttgctgccagttcttcaaagagttattgatggttcacaaaagaccactgttgctctgccaattcacaaagccttgatgattgttatgatggaaccaatgttgaggcctacaacaatgatgtcattgttcccatgggacctcaatctccaaaaaaccaagaggccgtgggaagaggaatgtgacaatgagaaggttcagttaaagactattggtacattttatcgaatattttatttttatttcagcatatgctcgcttgttgctctcatgttttaaaccatgttataacttcactgcttgccttggaaaattttaatttgcagcaataatttctaggtaatttgtactacatgtaacttctaagttatagtagaattgtcccgaaaaacttgtcgctacaaatatgtctgttttcttttgagtgtgtgctcggattaacaatatacattgca

SEQ ID NO: 150099 - DNA, 1712 bp, Zea Mays
ccccacgccgtctccaccccccatcaggcaccccccccgccccgccccgctcgtcgccatagagtttcatcgcctcgctcgcgtcgccaactacatccgctcgaaccgcgtccttacatgccatgcccaccatcctcgctcgctccaaccatgtatctacatgtcgcctccgacatccacgcccatgcttcgtgtagtgcttgacgcgcccgctccaaccgcgtctatgcatgccgtgactgccatcctcgccacccgcatgcctcatctgcatcctccgtttatcgtacttatccgcggtataccttccctcatcgttcagtccgcgctcactctgccccacgatccgcttctcccccgcgcccctcggcaagctcgcagtccaggatccgattctcgcgtcgccctcccgccgcgcccctcggcaagctcgcaatccaggatccgattctcgcgtcgccctcccgccgcgcccctcggcatctcaactacctcgtgatgcctcccccacccccgatctataaaccagccgctcgccactcctcccgtactctcgcccccgacctcatggaaggatccgcctctcgcgcgcccccgccgacgcacgcaactcgcagacggcgcccccccagatccacttctcgctggccgctcagatcctccatatcctgacctctccctcctcttgctgcagatgatatgctagagcgtcagcaaggcggactctccaaacctccagagagggagggaggcagcagccaatgcccagcacgtaccaatctgcgtggcgggaggtgcccggactgcgtacccacgggcgagcaggattttgacgatccacgacccgatgaagtcgccggcgtcggtgacgcacaaggcggcagtggccatcgtgcgctgacgcccagtcccttcctctcgcgagcgaaacggggggcggtggtgccgccgggcgaatggattcgtccgagagcgagcaaataggggtaagcatttatcaagcggaagtgggaagaaatggtacagtgaagtggaggaaatgacacagaacacgagcgaagctggcatctcaaggcggtcgcactcgcacggttagcagtgcactcccctaatttctgccctttttatggtttcacgattatctgaatatggagttcaaggattgatcttttctgagttctttgttgccatatttttctgtccatgtaataaggttgtgggtaaaatattgtgtcaatcgggcttgtgtgttgcagttctattcttgtgtagtgcagctccgaagtcgctgctaccaggtgcccccgtgctggggcataggtgcagtcgccgctgcgcccagcctacacaaaggcagctaccgttgcgacaacgagagggagctcccaaggcaccaatgttgttgctgccagttcttcaaagagttattgatggttcacaaaagaccactgttgctctgccaattcacaaagccttgatgattgttatgatggaaccaatgttgaggcctacaacaatgatgtcattgttcccatgggacctcaatctccaaaaaaccaagaggccgtgggaagaggaatgtgacaatgagaaggttcagttaaagactattggtacattttatcgaatattttatttttatttcagcatatgctcgcttgttgctctcatgttttaaaccatgttataacttcactgcttgccttggaaaa

SEQ ID NO: 150100 - DNA, 2982 bp, Zea Mays
ccaacatttggggctccggttggctggctgtcacggtgtactcacggggacgccgccggccccttggcaggcgcagataatccccacttctcccagcgaagcagcgcaaagaggacggcgtccaggtatgctgcgggtccctgcgccagccaccgacaataatggcggcaatccacatcggagtccactccccacctccccgaccacccaccgcatcgccagtcgccacgcgacagcgacgccccgcatccccgcggacgccgacggctgggcctaccgcctgcgcctctgggggcggcgggtccagacgccacgcgcactctagaagagttgttgtgcggcgccgggcgcggcggccgttggatcccgtgccgtgccgccgccttcgccccgcccgtcctcggcgcgtcagcgaccccctcattgtggctgcgtgcctgcgtcggccagcccgcttgctttgcccctcgcttcgcttcaaatggtagagccgctgcaggctgagcgaccgcgagcttgacccgggcgcaagtcggctcgcacccagccatgtcggcgcctggattcgatgacccccagcttccgccgctgaggctccgcgcctcgtgcggcggcgcgatcgccagcccacgctcctgctcctcctctgataccttcgtcagcatgccttccacgccctcaggtatgctgaatccgtgcggtctatggtcaccaccacctcgcgcaccgtcggaggcgtcctcgtcggagatggagttcgggacggcccgcgagtacgacaccactgatgcgttcttcactgacaactggctctacgacaaccacctgttacacagcacggagagcgatggcagcgaaggggaggacaagttcattgttggtcctgacgtcagcttgcagcggactgagacgccggagcttggcgatggctgcggtctcagacacgtacatagagactgcaatgcggactctcatgggtgcacacaggcgaagaatgcttgctcttcgccaccttgtggttgttgctataatgaggagttgttgagagattcttgctccgctgtttctgtttatgggaggtatcataccatggaggaccacacggaggggcttgatgagtgtgttgcagaagctttcttgttcagactgaattcgttagttgatgctagcgaacagttagtggatttcaagaaaggagaggacgacggcttgaatcttagtgctctggagaaggaacttcaaatgcttactccgtacttggctgatgaagatgctcttgagattatctttttcaggtactggacttgaagatgacgtcagaggaaataccaacctagatgtatgtatggtaacaaacgaggaaaatgctaatggcaaagaatttctaaaagatagctactgcatacttccttctcctgagagtgcagtcccttttgatgtttatggggtggaagacttcaagacagaagatacagatcttcaaaaccctaccgctcgcaaatttcaggaagatccaaaaattgatcctgcactctctaagtttcagcaggagtatgaagtatttgacctgaaaatattccaccggaagaacaggactggctttgaggaaaacaaagaattccctattgtcatggattccgttatagctggaagatatcgtatcaatgagtatcttggttctgctgcattcagcaaggttgtacgggcacacgaccttcgcactggagttgatgtatgccttaaaataattaaaaatgacaaggatttctttgaccagagtttggatgagataaagctcctcaagtttgtcaataagtatgatccagatgatgatcatcatatattgcgtctctatgattatttttactatcaggaacatctctttattgtcactgagttactacgggcaaatctttatgagtttcagaaatataaccaggagtctggtgacgaggtgtacttttcactgcccagaatacaggctatagctcgacaatgcttggaggctttggtgtacttgcatcatttaaacatagttcactgtgatctgaaaccagagaatatccttctgaagagctacagcagatgtgaaatcaaagttattgatcttggaagcagctgcttcttgtcagataacttaaacttatatgtccaatcacgttcttaccgatctcctgaggtcatcttgggtttaccatatgatcagaaaattgacatttggtctcttggctgcatcttatctgaactgtacactggtgaagtactctttcctaatgaatcaatgccaatcattcttgctcgtatgattgggataattggtccaattgatatggaaatgcttgcatcaggacaggagacccagaagtacttcacagatgactatgaccttttccacacgaacgaggtaattattggattatatgcaagattaccaacataactttgtttcagtatgcactatagttgacaacaaatcagtgatgttgttcgtgttgattttgaatgatgacctgaaaaccacatgactggagacagatcagttggagtatttgatcccagagaaatcctctttgcggcgccacttgcagtgcccagacaagaaatttgttgactttttgtcttacctgctgcaaataaatcccagaaacagaccaacggccagcgaagcgttgcaacaccgatggctttcgttcaaatatagttcaacggccaatcagactcgttcctgacaagtaggcaacactttctgaagctactggctcctgaaacaacatgtttccttttgcagtaggatttggcttcgtggtttttttaggtcaacacttggcgttgaaaaacctgttttgcaaggtgaatcgatcgtgtatatgcgctggttcatgcatgtaaatatgagaaaagtggttcctttttttttctgtacagttgccatgtactacagtgttgatccaactcatggtatagcaaaatggaattcataga

SEQ ID NO: 150101 - DNA, 2764 bp, Zea Mays
ccaacatttggggctccggttggctggctgtcacggtgtactcacggggacgccgccggccccttggcaggcgcagataatccccacttctcccagcgaagcagcgcaaagaggacggcgtccaggtatgctgcgggtccctgcgccagccaccgacaataatggcggcaatccacatcggagtccactccccacctccccgaccacccaccgcatcgccagtcgccacgcgacagcgacgccccgcatccccgcggacgccgacggctgggcctaccgcctgcgcctctgggggcggcgggtccagacgccacgcgcactctagaagagttgttgtgcggcgccgggcgcggcggccgttggatcccgtgccgtgccgccgccttcgccccgcccgtcctcggcgcgtcagcgaccccctcattgtggctgcgtgcctgcgtcggccagcccgcttgctttgcccctcgcttcgcttcaaatggtagagccgctgcaggctgagcgaccgcgagcttgacccgggcgcaagtcggctcgcacccagccatgtcggcgcctggattcgatgacccccagcttccgccgctgaggctccgcgcctcgtgcggcggcgcgatcgccagcccacgctcctgctcctcctctgataccttcgtcagcatgccttccacgccctcaggtatgctgaatccgtgcggtctatggtcaccaccacctcgcgcaccgtcggaggcgtcctcgtcggagatggagttcgggacggcccgcgagtacgacaccactgatgcgttcttcactgacaactggctctacgacaaccacctgttacacagcacggagagcgatggcagcgaaggggaggacaagttcattgttggtcctgacgtcagcttgcagcggactgagacgccggagcttggcgatggctgcggtctcagacacgtacatagagactgcaatgcggactctcatgggtgcacacaggcgaagaatgcttgctcttcgccaccttgtggttgttgctataatgaggagttgttgagagattcttgctccgctgtttctgtttatgggaggtatcataccatggaggaccacacggaggggcttgatgagtgtgttgcagaagctttcttgttcagactgaattcgttagttgatgctagcgaacagttagtggatttcaagaaaggagaggacgacggcttgaatcttagtgctctggagaaggaacttcaaatgcttactccgtacttggctgatgaagatgctcttgagagtactggacttgaagatgacgtcagaggaaataccaacctagatgtatgtatggtaacaaacgaggaaaatgctaatggcaaagaatttctaaaagatagctactgcatacttccttctcctgagagtgcagtcccttttgatgtttatggggtggaagacttcaagacagaagatacagatcttcaaaaccctaccgctcgcaaatttcaggaagatccaaaaattgatcctgcactctctaagtttcagcaggagtatgaagtatttgacctgaaaatattccaccggaagaacaggactggctttgaggaaaacaaagaattccctattgtcatggattccgttatagctggaagatatcgtatcaatgagtatcttggttctgctgcattcagcaagagtttggatgagataaagctcctcaagtttgtcaataagtatgatccagatgatgatcatcatatattgcgtctctatgattatttttactatcaggaacatctctttattgtcactgagttactacgggcaaatctttatgagtttcagaaatataaccaggagtctggtgacgaggtgtacttttcactgcccagaatacaggctatagctcgacaatgcttggaggctttggtgtacttgcatcatttaaacatagttcactgtgatctgaaaccagagaatatccttctgaagagctacagcagatgtgaaatcaaagttattgatcttggaagcagctgcttcttgtcagataacttaaacttatatgtccaatcacgttcttaccgatctcctgaggtcatcttgggtttaccatatgatcagaaaattgacatttggtctcttggctgcatcttatctgaactgtacactggtgaagtactctttcctaatgaatcaatgccaatcattcttgctcgtatgattgggataattggtccaattgatatggaaatgcttgcatcaggacaggagacccagaagtacttcacagatgactatgaccttttccacacgaacgaggagacagatcagttggagtatttgatcccagagaaatcctctttgcggcgccacttgcagtgcccagacaagaaatttgttgactttttgtcttacctgctgcaaataaatcccagaaacagaccaacggccagcgaagcgttgcaacaccgatggctttcgttcaaatatagttcaacggccaatcagactcgttcctgacaagtaggcaacactttctgaagctactggctcctgaaacaacatgtttccttttgcagtaggatttggcttcgtggtttttttaggtcaacacttggcgttgaaaaacctgttttgcaaggtgaatcgatcgtgtatatgcgctggttcatgcatgtaaatatgagaaaagtggttcctttttttttctgtacagttgccatgtactacagtgttgatccaactcatggtatagcaaaatggaattcataga

SEQ ID NO: 150102 - DNA, 2845 bp, Zea Mays
ccaacatttggggctccggttggctggctgtcacggtgtactcacggggacgccgccggccccttggcaggcgcagataatccccacttctcccagcgaagcagcgcaaagaggacggcgtccaggtatgctgcgggtccctgcgccagccaccgacaataatggcggcaatccacatcggagtccactccccacctccccgaccacccaccgcatcgccagtcgccacgcgacagcgacgccccgcatccccgcggacgccgacggctgggcctaccgcctgcgcctctgggggcggcgggtccagacgccacgcgcactctagaagagttgttgtgcggcgccgggcgcggcggccgttggatcccgtgccgtgccgccgccttcgccccgcccgtcctcggcgcgtcagcgaccccctcattgtggctgcgtgcctgcgtcggccagcccgcttgctttgcccctcgcttcgcttcaaatggtagagccgctgcaggctgagcgaccgcgagcttgacccgggcgcaagtcggctcgcacccagccatgtcggcgcctggattcgatgacccccagcttccgccgctgaggctccgcgcctcgtgcggcggcgcgatcgccagcccacgctcctgctcctcctctgataccttcgtcagcatgccttccacgccctcaggtatgctgaatccgtgcggtctatggtcaccaccacctcgcgcaccgtcggaggcgtcctcgtcggagatggagttcgggacggcccgcgagtacgacaccactgatgcgttcttcactgacaactggctctacgacaaccacctgttacacagcacggagagcgatggcagcgaaggggaggacaagttcattgttggtcctgacgtcagcttgcagcggactgagacgccggagcttggcgatggctgcggtctcagacacgtacatagagactgcaatgcggactctcatgggtgcacacaggcgaagaatgcttgctcttcgccaccttgtggttgttgctataatgaggagttgttgagagattcttgctccgctgtttctgtttatgggaggtatcataccatggaggaccacacggaggggcttgatgagtgtgttgcagaagctttcttgttcagactgaattcgttagttgatgctagcgaacagttagtggatttcaagaaaggagaggacgacggcttgaatcttagtgctctggagaaggaacttcaaatgcttactccgtacttggctgatgaagatgctcttgagagtactggacttgaagatgacgtcagaggaaataccaacctagatgtatgtatggtaacaaacgaggaaaatgctaatggcaaagaatttctaaaagatagctactgcatacttccttctcctgagagtgcagtcccttttgatgtttatggggtggaagacttcaagacagaagatacagatcttcaaaaccctaccgctcgcaaatttcaggaagatccaaaaattgatcctgcactctctaagtttcagcaggagtatgaagtatttgacctgaaaatattccaccggaagaacaggactggctttgaggaaaacaaagaattccctattgtcatggattccgttatagctggaagatatcgtatcaatgagtatcttggttctgctgcattcagcaaggttgtacgggcacacgaccttcgcactggagttgatgtatgccttaaaataattaaaaatgacaaggatttctttgaccagagtttggatgagataaagctcctcaagtttgtcaataagtatgatccagatgatgatcatcatatattgcgtctctatgattatttttactatcaggaacatctctttattgtcactgagttactacgggcaaatctttatgagtttcagaaatataaccaggagtctggtgacgaggtgtacttttcactgcccagaatacaggctatagctcgacaatgcttggaggctttggtgtacttgcatcatttaaacatagttcactgtgatctgaaaccagagaatatccttctgaagagctacagcagatgtgaaatcaaagttattgatcttggaagcagctgcttcttgtcagataacttaaacttatatgtccaatcacgttcttaccgatctcctgaggtcatcttgggtttaccatatgatcagaaaattgacatttggtctcttggctgcatcttatctgaactgtacactggtgaagtactctttcctaatgaatcaatgccaatcattcttgctcgtatgattgggataattggtccaattgatatggaaatgcttgcatcaggacaggagacccagaagtacttcacagatgactatgaccttttccacacgaacgaggagacagatcagttggagtatttgatcccagagaaatcctctttgcggcgccacttgcagtgcccagacaagaaatttgttgactttttgtcttacctgctgcaaataaatcccagaaacagaccaacggccagcgaagcgttgcaacaccgatggctttcgttcaaatatagttcaacggccaatcagactcgttcctgacaagtaggcaacactttctgaagctactggctcctgaaacaacatgtttccttttgcagtaggatttggcttcgtggtttttttaggtcaacacttggcgttgaaaaacctgttttgcaaggtgaatcgatcgtgtatatgcgctggttcatgcatgtaaatatgagaaaagtggttcctttttttttctgtacagttgccatgtactacagtgttgatccaactcatggtatagcaaaatggaattcataga

SEQ ID NO: 150103 - DNA, 675 bp, Zea Mays
gcggacggtttgatggcccatctttctccccgcggtgaccacgcttccctggaagcctcccctgcacaactatggcgtggccgcttccttccttccttctttctcgctactccgtccatccccgttgtttggaacaagtgatagttcccacggttgcccgaggggatgaggacgtcgaggaagggcatggccaccatgccgttggacgtttcgtctcgcggatttcagcatttgttcatggcaccggtattcccattcaacgaagtataggtggaacgattccgggtgcaatccgacacaaacgaacaagtcccaagtatatacgtcgattgagctgacatggtctcgttggagctggtttggaatttgaagaaggggcgatcggagtcggagcaaagggaaaagacagtggcgtcagaacatggaagatccaatccaaggagggcaatgctctgacagtggggttggttcgtcattgtcaacaactcaacatcattggttcccggcaccaaaatgtgtttggtttataaggttaaactaggatgagctgagggtgacaccgttctctcgattttttaggaccatgccggcacaaaaaattgcttcggtgttcatctcgctcccgcatgactatcattcaaacataattaaaaatgtgaccgtctccttccatca

SEQ ID NO: 150104 - DNA, 2278 bp, Zea Mays
cccccctcgcctcgtccttaccgttataccccgagtccccgacacaggtctcgctcgctggtcgcctccctcgtccctcgcatcttctccctctttctctctccagcccagtagcctgtagccccccccccctcctctctctctctcttcctcccccactcgcacagtgcccaatgccgcacaaaccctagtgcccccactcccaatctcgcgcggcggccatgggaaactgctgccgctcgccggccgccgcggcgcgggaagacgtcaagtcgtcgcacttcccggcctccgccggcgggaagaagaagccccaccagcaggcgcggaacggcggccccggctccggggagaagaagcgtctgtcggtgctcggggaggaggggtgcgacgtgggcgccggcgggatcgaggagaagtacgcgctggaccgggagctggggcgcggcgagttcggggtgacgtacctgtgcatggaccggggcacgcgggagctgctggcctgcaagtccatctccaagcggaagctgcggacccccgtcgacgtggaggacgtgcgccgggaggtggccatcatgcggcacctgcccaggagccccagcatcgtgtccctgcgggaggcgtgcgaggacgacggcgccgtgcacctcgtcatggagctctgcgagggcggggagctcttcgaccgcatcgtcgccaggggccactacacggagcgcgcggcggccgcggtcacgcgcaccatcgtcgaggtcgtccagctctgccaccgccacggcgtcatgcaccgggacctcaagcccgagaacttcctcttcgccaacaagaaggagaactcgccgctcaaggccatcgactttggtctctccatcttcttcaagcccggtgaaaagttttcggaaattgtgggaagtccatactacatggctcctgaagtcttgaagaggaactatggacctgaaatagacatatggagcgctggtgttatcttgtatattttgttatgtggtgttcctccgttttgggctgagactgaacaaggagttgcacaagctattcttcggggaaatatagattttaagcgagaaccctggcccaatgtttctgacaatgctaaagatcttgttcggcagatgcttcaacctgatccaaaactcaggctaacagcaaagcaagttcttgagcatccctggcttcaaaatgctaagaaagctccaaatgttcctcttggagacattgtaaagtcaaggctgaaacagttttcaaggatgaacagattcaaaagaaaagctctaagggttattgctgatcacttgtcagctgaagaggttgaggacataaaggatatgttcaaggtgatggatactgataatgatggcatagtttcttatgaagagttaaagagtgggattgcaaaatttggttctcatcttgcagaatcagaagtgcaaatgcttattgaagctgtggatacaaatggtagaggagcactagattatggtgaatttttggccgtctcacttcatttacaaaggatggcaaacgatgagcaccttcggcgggccttcctatttttcgacaaggatggcaatggtttcattgagcctgaggagcttcaggaagccctgatggaggacgggggagctgataccatggacgtggtcaatgacatattgcaagaagttgacacagataaggatggtaaaattagctacgaagaatttgtagcgatgatgaagactggaacagattggaggaaggcgtcgcggcattattcaagagggcgcttcaatagccttagcataaagcttataaaagatgggtctgtaaaactgggtagcgagtgaggttgtagcttgctgccgatgctcttctccacgcattgtagtctgcctctcgggcccgctaagcagaaacccccttccgtttgctaatgattattttgtctgggatttaggtagttggagcctccctgattggtttactcgtgtaattagtagcccttttcagtatcgctgaggagcatctgctgtaggatgcacgcctgcctccgtctgtctgctcatctcctccggtgtacccgtcgctcaaatggaagtgttgtaaaatgttttggtgttgacctcaaatgcaatttgctggtttcgtgtactgacacccaagattcatttgcgcctataaggctaactgtgaaaatttacgtcatttgatgaggaaatgatgaagcgctagctgatttgtcttgtattctgtttatgcggtgtaaagctagtttgag

SEQ ID NO: 150105 - DNA, 1274 bp, Zea Mays
gcccctcccgcgcacgcactatatatacacggccaacctagctagactgcacgaataagcaatggcgcgcatcatggcagccatcgcgatcttgctcgccgccttcttcgtcctcgctccggatctggccaccgcagcggcagcggcagcggcagcgccgcagagcgccgtcccggccgtgttcgcgttcggggactccacgctggacccgggcaacaacaacggcctggccacgctggtgcgcgccgaccacgcgccctacggccgcggcttcccgggcggcgcggccacgggccgcttctcggacggcaagctcatcaccgactacatcgtcgagtcgctcggcatcaaggacctcctgccggcgtaccgcggcagcggcctcaccgtggcggaggcgtccacgggggtcagcttcgcgtcgggcgggtccggcctcgacgacctgaccgcgcagaccgccatggtgtccacgttcggctcgcagatcaccgacttccaggccctgctcggcaggatcggcatgcccaaggccgccgggatcgccaacaggtcgctctacgtggtctccgccggcaccaacgacgtcaccatgaactacttcgtcctgccggtccggaccatcagcttccccaccgtcgaccagtacagtgcctacctcatcggcaggctccagggatacatccagagcttgtacaagctgggagcccggaacttcatggtgtccggcctgccgccggtggggtgcctgccgatcacgaagagcctccacagtctcgggtcgggaggttgcgtcgccgaccagaacgcggccgcggagcggtacaacgcggcgctgcggcagatgctgaccaggctggaggccgcgtcccccggcgccgcgctcgcgtacgtcgacgtgtacaccccgttgatggacatggtcgcgcagccccagaaatacggtttcaccgagacgagccgaggctgctgcgggaacggtctgccggcgatgggggcgctctgcaccagcgcgctgccgcagtgccggtcgccggcgcagttcatgttcttcgactcggtgcacccgacgcaggccacctacaaggctctcgccgaccacatcgtccagtcacaaaaacctaagacttagattagattagattaggaacggcattgcacatgaagctggctagctcggtgctttttgtagatccatttattagcaggcatgcagagatcgagatgtttacatagcgaagtttttaatatacagagagtcgtttattttgaaa

SEQ ID NO: 150106 - DNA, 525 bp, Zea Mays
atggcggcgcaggagggcggcatgaggctggtgtcgcacccgatcgcggcgcacgacgggcggctgccgcggcagtacacggcggaggggcagggcgccaagaaggacatgtcgccgccgctggaatggtacggcgtgcccgagggcgcgcggtcgctggcgctgctggtgcaggacatcgacgccgaccccatcgtgccgtggacgcactgggtggtggccaacatcccgcccgccaccaggggcctccccgaggggttctccggcgccgcgggggcggggccggggcgcgaccagctcggcggactgcaggagggggtcaacgactggaagcagcccggctggcgcgggcccgtgccgccctcccacggccaccgcatccagttcaagctctacgcgctcgacgacgaggtgcacctcggcaacaaggtgaccagggataagctcatggaggcgatcgacgggcacgtgctggaagaagccgagctgatcgccgtgttccagggagtcgtcgccaacaactaa

SEQ ID NO: 150107 - DNA, 1584 bp, Zea Mays
atggcagccgccgccgattctgcctccgaccaaaaccctaaggacgccgagcggcacgtgctcaccgccgaatccgacgccgatttctccgaggaggactacgacgaggatggggaggaggaatacgaggaggaggaggagctggacgggccggcggcggcggcggcggagcgggagcggatgcagtccgtgttacggaggctgtcatccgaccccgtgggcatccgcgtccacgacgtgatcatcaagggcaacaccaagacgcaggacgagctcatcgaggcggaggtcgccgagctgctccgcgccgcccccaccgtgcaggacctgctccgcgccgccagtgtcgccactgcgcggctgcacgatctcgacatcttcgacgccgtcaagatcacgctcgacgccgggccgcccgagctgcctggcaccaccaacgtcgtcatcgaggtcgtcgaggtggccaaccccctcactggcaccgccggcgtctattcgaagcccgaagcaagatcttggtcgctggaagggtcacttaagttgaagaacttgtttggctatggtgacatctgggatgcatcaggatcctttggttgggaccaaacaacagaggttggtgttggagtctgcctaccgaggtttaaatcaataccaacaccattgatggctcgggcatctttgtcatcacaagattggctgaagttttcatcatacaaggagcgcctacttggcctttcatttggtttgctgtcaacaaggaaccatgacttgtcatacaaccttgcgtggcgtaccttaactgatccatcacgtgtctcatcaaaggccataaggaggcagttagggcataaccttctttctgcattgaagtacacatacaagattgataagagggattcacatcttaggccaacgaaaggatatgcgtttcagtcaacttctcaagttggtggtctatggaatagcaaaggattgagatatttccggcaggagttcgatgtacgtggtgctgtgcctttgggattttatagtgctgctctcaacgttggtgtaggagcgggtgtcattttaccgcttgcagggggattcatgaattcgacttcatcagtgccagagaggttttatcttggaggtaattcttctccagtgtgcagcttgggcggaccgtcatctctgctgggtttcagattaaggggagttggcccaacagaggcgcggaggcatgtccttaataactcggagagtggctcggctgaccctggaagggattacttgggaggtgatctggccgtgtctgccttcgctgacctttcttttgatctgcccctcaagatattcagagacgctggaatccatggccacgcattccttactgctggaaaccttgcgaaactgtcggagggtgagtacaagaacttttcggcttctgaatttcggcaaacgttccggagctctgctggcgttgggattattttgcctaccaaacttttccgggtagaggtgaactattgccgcatcctaaagcaagctgagcatgacagcgcgaagactggaatccagttcagcttttcctcgcccatgtag

SEQ ID NO: 150108 - DNA, 1076 bp, Zea Mays
actccgagggccgaggtcagcaacgcaaagcagcacgttcccgtcccgacgcgcttcccgcctgagtccgccgcggacatcgatccccagttccgtccccatgtggccgtcctgggtcaagacgcgcagctctgacgactccgccgtcggcgccgccgcctccacctccaccgccgtcggcgcgtgccctcgcctctccatccccaacccgtgtctcaaggacctccggtccctgctttcgccggactcctccgcctccccggcgccgcgcgtcttccaccgcctccgcgtcgccgcctcggcgctccgggtcctccgcgcgatccagcatcccgcgtcccagtcccccgccggcggcaaggagccagcaccgggcgcctgcggcggcgggcgggtggtgctgtacttcacctccctccgcgtggtccgcggcacctacgaggactgccgcgcggtgcgcgccattctgcgcgggctccgcgccgccgtcgacgagcgcgacctggccatggacccgggctacctgccggagctggcctcgctcctgccccacgcgccgcgcggccgcgtggcgctgccccaggtcttcgtgggcggccgccacgtcggcggcgccgaggaggtgcggcgcctccacgaggccggcgagctccggcgcatcgtcgcccccgcgtcgtccggcggcagctgcgcccgctgcggcgcccagcgctacgtgctctgcgccgcctgccacggcagccacaagcggtacagcctcaagggcggcggcgggttccggtcctgcgccgagtgcaacgagaacgggctcgtccgctgtcccgcctgctgcgtcgtccccgcctcctgatccagatccgagatccaactgctccacgcaaactctgtatgactgcttgtactctgtactacttactactcgggcttaggactacttgtactcagcttgccatcaaacttggttgaaactaatgatgagtgtcttgttgtgggagttactttcctccgatcttcgattttccgtttcagttcctttccggtctgctcatggctaatctgcctttccgtctatcttt

SEQ ID NO: 150109 - DNA, 1410 bp, Zea Mays
cggcttcacttcactcgactcgtatcgtatagcaggctagcagcagcagcgtccttcagttcacctccctttctccactccccccggcccgtcgctctcccccgcatcccatcgcgaaccaaccccgcgcccgccccggacggtgcgcgtctccactgacccgcacgatcgcgctctcgcccgcgccccggccccggccggccgggtgagcagcagctgcgtgcatggatccctcggggccagccggcgccggggccgggccgtcctcggcggcgggggcgggcggcgacgacgcgcacgcgcacgcgccgccgcagcagcaccagatccagccgcttgctcaggcgcaggcgcagccgcagccgcatcagctgagcaggtacgagtcgcagaagcggcgggactggaacacgttcctgcagtacctgcagaaccaccggccgccgctgacgctggcgcggtgcagcggcgcgcacgtcatcgagttcctcaagtacctggaccagttcggcaagaccaaggtgcacgccgccgggtgcgcccacttcggccagcccagcccgccggcgccgtgcccgtgcccgctgcaccaggcctggggctccctcgacgcgctcatcggccgcctgcgcgccgcgtacgaggagagcggccacgcgcccgagtccaaccccttcgccgcccgcgccgtgcggatctacctccgcgacgtccgcgacgcgcaggccaaggcgcggggcataccctacgagaagaagagccgcaagcgcaagcagccgccgccggccgccgctgcgggggaggcggcggcggcgtcgtcgtcttcggccgcggcagcacgggtggccgccgggagcgccggggacgggtcgtccgccagtggcagcgcggcggcgaaagctgcaccgaccaccgcccagggaagcgccgctgctgatgcagcgaccagcacatcccgagtacagtagaggacctcgagctttagtttgcagcacttgagctagctatatttcttctctgccattcgggttcagcatcgttcttgcctttcttcctttcctttttgtttgctggatttcttcctgctcgccacttgagccattttaattatttcactatttgctgaactagccagctactgggtcagtcgaccagtaataatatcatgcgcatggcaattggcaaaaatttgtagtatatccaggagatcgagggagaagtgaattaatgaataggtcttgtacgtactcttgttgcttagcttgcccatgcatgcatacccgagataaaagagcaagctttattaatttgaggctatatataagtgcagattaatttgagatcgatcttcatgtatatatatgtctgagcagtgagcacacaggatttaattatccatcgagcttcttt

SEQ ID NO: 150110 - DNA, 1578 bp, Zea Mays
tcccctcctcgcacagtgtccgctccctccgcccctgctccctctgcagtccccctcccccgcacaacagccacgaccgttggggaggggagcagctgtcacaacatgttttgttttcctgacatctgtttgttcattggggagcacatagatttggtacaacaacgtccctcacccaaagctggtggagtataagaaagatcagaactgggttacaagatctggtgattatcttgtttttcctggaggtggaactcaattcaaagatggcgtgggaagatacattcagtttgttgaacaggtggaaaaccattgttggagcttaatagagtactgaggcctggaggatatttcatttggtctgcaacccctgtctaccgtcaagagcaaagagaccaagatgactggaatgcaatggttactctgactaaatcaatctgctggagaacagtggtaaagtctcaagatgtcaatggaattggagttgttatatatcaaaagccagcatcgaattcttgctatgctgaaagaaagaccaatgagccccctctatgctccgagagagatggatcacgctttccttggtatgctcctcttgatagttgccttttcacaactgccattaccacttcagatgaaagatataattggcctgttccatggcctgaaagacttgatgttagctatgcaagtgtacctgatgattctgcttctaacaaagagaagtttgaagctgatacaaagtattggaaacagctcatttcagaagtatatttcaatgacttcccacttaattggtcaagcattcgcaatgtaatggacatgaatgctgggtttggagggtttgccgcagcactcattgatcaacctttatgggttatgaatgctgtgccaattggtcaaccagataccttgccacttattttcaacagaggtttgattggggcatatcatgactggtgcgaatctttcagcacctaccctcgtacctatgatcttctccacatgagtaatctcattggaaatcttacaaacaggtgtgacctcatcgacgtggtggttgaaatcgacagaatactgagacctggaagatggtttgtgttgaaagacacgttagagatgataaagaagatacgcccaatcctgaagtctctgcactatgaaattgtcgtcgtgaaacagcaatttcttgtggctacaaagagtttctggcgtcctggcaaaccagcttccacatcagggtgacatatagatcgtactttcaagggagtcttcaacaaccaacgattctattgattctttgagacctgatcaaactaattctttctacaacacagtctatgtagattattacctgtataagtatagaaaatacatatggtaagttgaggtaataccccttttttttgccaaagcataataacaaggatgttatagacttatgcagtagtaggcaagttttgacaaatacatacaaagggaagggatcatgaaacgtgttgtgtatacttgctcgttgataacttttgtaaaaggagtttgaaataaccttgtactcagtactcatcatggttctgc

SEQ ID NO: 150111 - DNA, 1046 bp, Zea Mays
aaaattaaataagacgagtcggtctaatttagtctataaagtcaaacgaattaagacgaaggagtactgaggattgttcaaagtttcatactatgccaccatccgaaaaggaccagcaccggctgccaaggtgccaacgcagcaggcgtgatcgcgcgacggtccgcttccattccaaacccacccactcatccacccgcctaaccccaccacccgtcattgctgcggctgcctcatacttccacaatttcaccgctccggcctccggctggttccactccgcaccgcggcgcggaggcgatggccgtcccttcctccgaccgcgcgagacgccccttccccctctcgccctcgctctcgctcttcctcctcatctccgccatcctcgtcctcctcttcctcttcctcgacccctcgcccggatcgctcgcgttcctcccctcccgtctctccgcatcagccccttccctcgcacctcctctaaccccccagcaacaaagccgcgccccgcgaagcagaagcccacctcactcgagaccagacggctcgagcgccaccgagaaagcggaggagggcactactgccaccgcatcgcaacccgtcacaaaagccgatgccaacggtagcgcatcgggaccatccgcaaaggaatccagcggtggcagcggctcaggcggtaacagcggcgccaggggagtcggggcggacggggagacgggtacaagcgtcgtcgccccggtggagaaaggtggggacgacgaggaggaggcgccggtgagcgtgaggtggcagacgtgcagcaggctggggaggggcgtgtcgtcgacggactacatcccgtgcctggacaacgtgcgggcgatcaaggcgctgcggtcgaggcggcacatggagcaccgcgagcggcactgccccctgccgccccggctcaggtgcctggtgccgctgcctgcagggtaccggacgcctgtgccgtggccgcggagccgtgacatgactgcccccactctctacccgcacgcgccagcgaacggcctcccgcacct

SEQ ID NO: 150112 - DNA, 700 bp, Zea Mays
atgaccgcgccgagcgcggccaccgagaggaacgcccagagcgacgtcacggccgaaacgaggaacgcctcggcgaggatgtaccccaccatgatgagccacgcgatgccgtcggtggtcatcgaggccgacatggcggtgcggcccaggtcggagttgaggaggttgagctctgacaggatcggcgacagcaccgcgaaggacgtgaccgagagcgacgtggccagcgcgaacaggaacgtggaacgcctcgttacgtcgggttcctcgaccatggcggcgccggataagcccgcggtggtcatgaccagcgggaggatgaagccggagagggcgatgatcacgcccttcttgccggagcggacgacgagcatcgggtccatccgcacgccgatgaggaagatgacgtacatgagcccgaacgtcgcgatggtgtgcagcaccgggtcgcccctcgccgggaacaccgtctccttgaacgccgggctgcgtgacagcatggacgggccgagtatgatgccgccctgaaacacatcagatagagcagcacgtttcagttgatttgcgccaaaaagctttcaatcaagctggtgaaagcaaaaaaacgttcatggcgtcgctgcaaagtgcaaactactaggatggacgtgccatgatctcagacacgacgcggggctgcttgaatggcttgagaaggaag

SEQ ID NO: 150113 - DNA, 2616 bp, Zea Mays
tttcaccgtcaagactcaagaccgtccgtgactggcccaacacccaccgcaagtttacgccgcgcactcggcatgacggcactgcaactcgagagctgcccgtgccccgtgccgtagcagtggccaccagtcaagcaagcggtcgctctcgagtctcgactagacgccaccgcgttccagagcgagaagcgagaagtcttcccctcgcctcgtctccgcccacaacaaacatcacccgaagccgcgtggagccatcatccagatcggagccagcgcgccgggtgatgctgttccggccacgaaagtagccgtcttgcaccccgacccaagagccatggcggaggatggcgaggagaagctgctcgcgacggtgcagcatatcgtgcagacgctggggagcagcgacacaatgacggaggacatcctcaaggtcttctccaactacgacggccgcctctcgctcgacaagctctacgccgcgcgcgcggcggcggcggccgctgcgtccggtggtggcggaggaggaggaggaggaggagggggaggaatcgtaggggagcgctcgatgccgacgtcaccgccgctgcccccgcctcccgcggcggcggtgtcggccgctgggccgaggccgctggtcacgtcgatggagcggaccgtgcgcgcgctggaccgccagatctcgcagttcgtggccatggatcggctgatttgggcggactccgccgacgcggacgcgttcctggaggcggtcgacgacctcatcggcaccgtgcaggagctggacgccgcggggaccaaccgcgccttgctcgaccgctccgacgagctgctcagccggtgcatggcgcgtctggaggatgagttcagggagctcatagagcgccccgacgccgccgcccccgtggtgccgggtgggttcgggtcggacgggagcgacgacgacgaggaggacttcggaggtgggaacaactacggcgacgagcctatcccgatcgccaagccggtgacggactacgacgtcgtgatcgatgctctctctccggggtccatcgccaacgtgcaccagatcgccaggaggatggtggacgccggctttggccgcgagtgcgctgaggcctacgccgcggcgcgccgcggcttcgtcgacgagagcgttgcgcgcctcggcgtccgttcccgcaccgccgaggaggttcatgcctcaccctgggaggagcttgagttcgacatcgcccgctggatcccggcgttcaacatggtgtttcgcatactgattcccagtgagcgccgcctatgtgaccgcgttttcgacggcctcgcccccttcggcgatcttgccttcatcgccgccgtgcgtacccaggctctgcagctcatatcgttcggcgacgctatctcttcctcaagccgcgcgccggagcgccttttccgcgtcgttgacatgtacgaggctgtgcgtgacatcctccctgaccttgatcctgtgttctctgacccatactccgctgcactccgtgcggaggtctcctcgatgtgcaacacactggggtcctctatcaagggtatatttatggaattggaaaatctcatccgccgtgaccctgcccgaattgctgcccaaggtggcgtcatacatcctatcactcggtatgttatgaactatctccgagctgcgtgtggatcgcggcagacattggaagaggtgatggaaggtgactttggggctaatggaggtgcgcctgtggctgttgatcctgaccgtcccacatcatcccttgctgtgcacattgcttggatcatggatgttcttcaaaagaatctggatatgaagtctaagatataccgtgatccatctcttgcttctatcttcctgatgaataatggcaagtacatcatacacaaggtgaatgacagtgagttgggtgttttactcggtgatgagtggataaagcagatgacaaatagagttcgacgctggagcatggattatcagcgggcaacatggggcaaggttacaactgtgctgcaaagtggcactccaggcattggtggactcccagccaaggcaatgctgcagaaactgcgaatgtttaatacatattttgaggagatctatgcggcacagtcagaatgggtgatagcagatgaccagctaaaggttgacattagggcagcggtggaggagacagtgatgccagtttacgcctctttaattgccaagttaaagtcttctcctgaaactgggcgtgatttgtacatcaaatacaccccagaggatgttgtagcccacatccagcacttgtttgaaggagcagcaaagtgataaatgatatgtatccttgtagcctgttatactgcagcttctgctcttctgaacttgtgaagatgctaccatggattctccatttgtggttaatgtcttgtactcacatatggtgatgctgttgctcaaattacaactgtgcatcactgtttttgtcctccatgagtagcatgattattttgtaacaatattaggattccatatctgttttaagcactactttaatttaaccccattaagtgttatgtgtgcatttcaatatttaattcaataagtttgtgctcaaccttttg

SEQ ID NO: 150114 - DNA, 155 bp, Zea Mays
cttcatcattgcagagaggctcaggaagaggaggatgcggtcggggctcaacaacagcctgcctctgccaccactggctttctaagtagccgaagctgaacagagaaggtagagggatagttgcggcgactcgaaagattacgactatttatttg

SEQ ID NO: 150115 - DNA, 2306 bp, Zea Mays
gtccaaccctgttcgcaaaaggcgtcccaaaacaaatgccactatgcggctgctagagcgtcgtctcctttcctcccccaatccgccctttggcttcgctggcggcggcggcggctggggaaggcaggaatcccggcctttgcttgcgcgccactccgggcaccggctgcagctcgcagaaatggttagccagtagtatgtatgtgcattctgtatatatacaagagagcaatcatttctttggaaaatggcacttccactctgagtgttaaatagggtgccttaccctgtggaaaggggttgaactgtatctgtaatctgacactccacatctccagctgaacaaaatggcctccaatggtaatggaaatctcaaagctgatattcaacaagtagagtcaacagcttcagataatgttcaaggcgcaacaggcgtcaacactcttgccactcagggtgtttcacgaaatgaaaagcggtggagcgggtttagggatttctggaatcgcctttgtactggccccaagttaaagaagcttggtccctccacttcgttcaagtttcaacagatcgcacttcaacgtgatgagttctcacgttcgatccattcggacaaccatgttagccacgagcatttccagtttatccggaagattaattgggaacaactgtgggtgatggctaggaactggataaaagagcctatgaatatggccctttttgtttggattgcttgtgttgctgtatccggtgcaattctcttccttgttatgactggaatgctgaatcgtgttttgcctagcaaatcaaaaagagacacctggtttgaagtgaacaaccagatcctgaacgcattattcacgctcatgtgcctctatcaacatcctcaacggatctacaactttgtgcttctttgtcgatgggagcagcaggacatcttaaggcttaggaagatatattgcaaaaatggaacatataaacctaacgagtggatgcacatgatggtggttgtgatcctccttaatctgaactgctttgctcagtatgccctgtgtggtctaaacgtagggtaccgcagatctgaacgccccgctatcggtgttggtctcactatttctgttgcaattggggctgcagcattcgctggtctgtacaatatcatcagccctcttgggaaggattacgacacagaacatccagatatcgaccaagaagcacagatccatgccacctcaaccgagagcggcagaccaacttcacggcttcagtcattcgagaggagatactctttcatccagagcgacgaacgccgttttgtggagagaaggcctcagtgggttggcgggctaatggatttctgggaccagatatccattgcgtatttgtcacttttctgcagctgctgtgtctttggctggaacatgcagaggcttgggttcggtaacatgtacgtccacatcgcaacgtttctgctcttctgcctggcgccattcttcatcttcgtcctcgcagccggcaacgttgacaacggatccgttcaggtggcgttggtgctcaccggacttttcctgtgctttttcggtctactgtatggcggcttctggaggatccagatgaggaagagattcaacctccccgaaaacagcttctgctgccacaacccggacgcgtcggactgtttccactggttattctgctgctcgtgctcgcttgcccaggaagtcagaactgcggattactacgatatcacagaggacaggtcgcacacagggcaggtagttggtgaaagccaccgcataatgtccccgttgcagcgcgaagacggtctgcctcttttcaagtcgagcccaagctcgccgtacaggagcggcaacgttagtccgtcgatcttcatcctggagagcccgtcaccgtcggccccacgtaggtcgtctggttcgtcgcctcagggtggtggttcaccgacgatgggccatagggcgatgaaggcgccagttccatctgttcttcaaagagagagtggaccagatcatgcacaggggtgatccaatgaagcagctaccgcttgccagcccaatgagatatgtatatttttgtaaaggagatacatcgtcggcagatattttttttctgtgctgtctttcttgttcgtaagaaatgtatagaccttcgagttctgttgtgcatttgagctccgtcatgcatggttgcttcttatgtgaggcacgattattgaagagacctctcgtttgctgctcggtatctgccgatgtgttcatgataacagaagtgtgctggtgctgata

SEQ ID NO: 150116 - DNA, 1035 bp, Zea Mays
ggagtgcgagcgaggccgatgtgacgcggctacagtgcgtgcgggggagacgacgacaccggccaaggcaagcagaagcgagccctgatccaagctagccaaagcgagctaattaagctacctccgaggtcgtcctgtggtggacgccctcagcagctagagccgtctccttccgcccggcggcacggtcgtcggccgctatacggacagtgggtagtgagtggttcatcgatcgggttgctcatggggaggccgaggtggtgggccaagcggtggaagaggagctccgggtccgcgcggacgctcggcgtcgcggcggtggtcgcgctcgtcgtccccctctgcttcgtcgccagcagcagccgtctcccggggacactgggtggcggcgccctcgcttcagggaccatggcagcggcagcaggagcccatcatcccggcgatcaggcggcggcgactcatgggttgcaggagctgttctacatcgcacgacgacgacgccggcggctcgcgggaggcggcttggggtcgcacccgccacggtgcgcctccaaatgcggacgctgcgacccttgctacccggtgtccgtgcccctgcccgtgccgcggggggttctggacttggtcaccccggagtcggagtactacccggaggcgtggcggtgcaggtgccgggaccagctctacatgccgtgacggaggccggccggagatcgatccaagtaggtgtggagatcgttggccgggaccagctccacatgcgctagagcttggagatgatagcgcgacgacgctcgatggagatggcagcacgacaacgcgcactagaaatgggggcgcgatggggctcgctagaggcagcgctaggcgactacggccgcacggggccttagtcgtagggttacggttgaataggatagtgtacatctagatcgcaataggaaaggggaacaggtgtctacgtggcagtgtgagtagcccacgtgtcatatataaagatggcaacagagactcgttacctattatcccgcaggt

SEQ ID NO: 150117 - DNA, 1042 bp, Zea Mays
agctgatcattaagaatgggaaatggtcaaaagtagaattttcttgctatgttatatgttctgcttgcctctgcttgagcacatcttatttgaaatatcatgtttttttgggactaatacgttgccccgatggcaataacagtgcctgcgggatgaacaggtcccaatatttactaccattttgctcactttgtcagctattattcacattattagctgatcatttaaggatgggaaattcttacagttgtattattcatgtactggcttgccaagtgctgttctttcgtgcaaactttgccagtgcttagaccttaatttgtcctgctacttgcaatttagattgctatatatgcttctcaaggaatgcatgctgtttgttctttgtatccttctgttttcccgttctgcctcctcaatgctattttgtggtggataataatatgtttattttcgcattgtgttgtgttcaggaggataggcctgctggtggacaaggaggcccccgccctggtcctggtgctgctgctacagctccagctccagcaccggttgctgctcgcccataggctttagcttttcgaccgtgttaagtcttctgcccactcagtttcggagttgtcccccgtgcgtgtgtgaagctgctatattagagttactttttgtctaaagtctgaacattttcgaagaatttgaatatctgaacatttgaatgtttgtgctgagtttttcaaagaatttgaatatctgaacaattgaatatctcacttgaacgttatatggcttattttaggcattttttctttttgtatggatttggtttcaaatcataaatacttgttgtaatcttattagcctctgagggcacaccttgcttcaacatatttgtctacggaattgatgacaagtatccatgcttcaacatattatatgcctttctttgtcgatcatgcatgcctttgctccatatgtgtgcaaattaatgcattcgcgcagcaggaagcagtatgtacgagctgcagtgaggtatcgtgctaaaata

SEQ ID NO: 150118 - DNA, 921 bp, Zea Mays
cctactgcggcttcaggactcgacctcttgcgccgccgccatgaccttcaagcgccgcaacggcggccgcaacaagcatggccgcggtcacgtcaagtacatccggtgctcaaactgcgccaagtgctgccccaaggacaaggcgatcaagaggtttcaggtgaggaacatcgtggaacaggcggccatcagggacgtccaggaagcatgcgtctatgatggctacgtcctcccgaagctgtacgccaaggtgcaccactgcgtctcgtgcgcgatccacgctcacatcgtccgcgtccgatcccgtgagaagcgcagggaccgcaagccgccggagcgcttcaggcgcagggaggataggcctgctggtggacaaggaggcccccgccctggtcctggtgctgctgctacagctccagctccagcaccggttgctgctcgcccataggctttagcttttcgaccgtgttaagtcttctgcccactcagtttcggagttgtcccccgtgcgtgtgtgaagctgctatattagagttactttttgtctaaagtctgaacattttcgaagaatttgaatatctgaacatttgaatgtttgtgctgagtttttcaaagaatttgaatatctgaacaattgaatatctcacttgaacgttatatggcttattttaggcattttttctttttgtatggatttggtttcaaatcataaatacttgttgtaatcttattagcctctgagggcacaccttgcttcaacatatttgtctacggaattgatgacaagtatccatgcttcaacatattatatgcctttctttgtcgatcatgcatgcctttgctccatatgtgtgcaaattaatgcattcgcgcagcaggaagcagtatgtacgagctgcagtgaggtatcgtgctaaaata

SEQ ID NO: 150119 - DNA, 921 bp, Zea Mays
cctactgcggcttcaggactcgacctcttgcgccgccgccatgaccttcaagcgccgcaacggcggccgcaacaagcatggccgcggtcacgtcaagtacatccggtgctcaaactgcgccaagtgctgccccaaggacaaggcgatcaagaggtttcaggtgaggaacatcgtggaacaggcggccatcagggacgtccaggaagcatgcgtctatgatggtaaagtcctcccgaagctgtacgccaaggtgcaccactgcgtctcgtgcgcgatccacgctcacatcgtccgcgtccgatcccgtgagaagcgcagggaccgcaagccgccggagcgcttcaggcgcagggaggataggcctgctggtggacaaggaggcccccgccctggtcctggtgctgctgctacagctccagctccagcaccggttgctgctcgcccataggctttagcttttcgaccgtgttaagtcttctgcccactcagtttcggagttgtcccccgtgcgtgtgtgaagctgctatattagagttactttttgtctaaagtctgaacattttcgaagaatttgaatatctgaacatttgaatgtttgtgctgagtttttcaaagaatttgaatatctgaacaattgaatatctcacttgaacgttatatggcttattttaggcattttttctttttgtatggatttggtttcaaatcataaatacttgttgtaatcttattagcctctgagggcacaccttgcttcaacatatttgtctacggaattgatgacaagtatccatgcttcaacatattatatgcctttctttgtcgatcatgcatgcctttgctccatatgtgtgcaaattaatgcattcgcgcagcaggaagcagtatgtacgagctgcagtgaggtatcgtgctaaaata

SEQ ID NO: 150120 - DNA, 1266 bp, Zea Mays
agagggtgaaatgcatggttgtctaaatataatactccctctgttccccaaattatagttcgctttagttttgtcaaaacttaaacttctctctaactttgaccaattttttggtaaaaatatattatcatctgcaagctgaaataaattcactatcaagagatttcatggagaattcaatgaaactaatttgatgtcatagtcttgtagatattggtgtatttttctataaattttctataaacttggtcgaagttagagaagtttgacttaggataaagctaaagtgaactactctactatttggaacagagggataaattactattccaagtttttgtttgaaattttattatatgtgctgtcattttgattctgttgtcctctaatttttttggttcaatttttataaccagatgaacataacatataccacttcagatgctgggaatattactttaagtgatggaaaggtagactgcatcatacatgttgggcagccagtagagaggaaatcggtttatgatttgcaacaacagtttcagcagcttacagcctatgcaatgcgtttgaatccagcttatggagcctctttttttgttttcactgttgttttggttgctgttggatgtgcctgttgcaagtttgcaaagagaaaaggcaatgatggtgtcccgtaccaacagcttgagatgggaggtcaggcaccaaactcttcgggggtggacaacaccgcaagcacaacagatggctgggaagacggctgggacgatgactgggatgatgaagaagcaccggcaggacctgtggataaaaagcctacgggcagtgtctcagcaaatggcctttcgttgagatcacagacaaatagcaaagatggttgggatgtggattgggatgactaagctcctaagaacttggagtgtagctgtcaaatgagggaggaagatacttccatctgtctgacctgcaggaaagacatctacagttcgaaatgatggaacttagtcttgaccaagtgacccttatcctgaggtgaaggattgcctcacgccctcacttcatacggtttgtacaatattgttccaccccccgtctgagttgatacacgaactgttagcggtactgatttagttcttttcggtttgtaatggtacagaagaattgtcagtatatatatatataaaaccaaagcacacatttttattctttggttgaggtaattattctttattctgcacacactcctgagtcccataccattat

SEQ ID NO: 150121 - DNA, 711 bp, Zea Mays
cgtttgtcgacgcgctccgactccatgccgctgtcgccgccgccgccctcctccagcccgaggcaagcagcgatccaggagctcaggaggggtacccagctggcggagctgctcaggcagcaggtagagctcatcccggagcctaaccgccgccacgctgcagcggtcaacgtgggcgagatatccatggctatggagtcgtcgctctccatcctccagtctcagatggagcaccccttctctgagcctgaggtcatggcggctgcgctcactgcccactccgacggaggcaccagcggggaaagaaatggcggtcccgtggcccgtacaaggaaggtgagggtgcggcaccggccaggcagaggcaggcctgcagctggagatgaactgccgatcaaggagatactgactgaggcaccagaaaatgatcgtttccactggaggaaatatggtgagaagaatatcctctattctgaatatccaaggttatactacaagtgcgggtacagcgacgaccacaagtgcccagcgaagaaatacgtgcagcagcaaagcaacagctaccctccgattttcttggtcaccctgatcaacgagcacacgtgcgacgccttgttccgagacgacgagcccatcatcagctcaagcagcagtggctcgtcgcaggtcctcgacttcacgaaggcgtcgctttcttctcctctccattga

SEQ ID NO: 150122 - DNA, 1149 bp, Zea Mays
aggctaggcaagggcatcctcaataagcacggccagaaagtcaggggtagggagaaggatgacgatggcgatggcaagtatgccgccggcttgtgcggcaaccgagctggtggccaaggggagggagtcggctgccgttctcaaggccatgctcggccagcttcctgcggcggcgacgccccatgatggtctccgggatctggccgagcaggtcctccgctgctgcgaccgagctctggcggccttgctcagaggcgcggcaacggaggaggctgcctgcagcagttcggccaggaagcgccgcaagcagccagcagagcggcagggcggcctggctcctcctcctccttctcctgctgcgacgggatccaagaggatgaggatgagccgtggagagcgggggacacgagcggagaagaaagaaacaatggaggacggcttcatctggaggaagtacggccagaaggacatccacggcagcaactaccccaggctctacttccgctgcacctacaaggacgaccgcggctgcgaggcccggaggcaggtgcagcggtcggacaccgacccctgcgcggcctacctcatcacctacttcggcgagcacacctgctgctgccgcgacgacgccgtcgaggcgccagcgccattcgtcatcgacttcggcttgagcgccgctgcctgtgacgacggcctgcagctgccgcaatacggttcgccttggccgtcttgcgacgacgacggcccgggcccggtggaattgcaaacgccgccgccgcgcacatcagctgatctgtgcagttcaccgccggaggaggagttgcgggctggcgcgtgcgacgtggctgagttcgtcgccgagcagtcaacgacggtgacagcagagctcatgggtaggatgacctcgccggagtgggacgggtgcttggactgggagttgggcgaaggcgacagctcactcgacgttgacggtttcgacagatactacttcgattacagtgatctgctttagagcctgtacaatctattaatctaattaaataaggagtttttttgagcggtctctagaagagacagattcttcgtcaagagttcgagagttcgtctctactcaatttctatatatatatatattatattttgactgta

SEQ ID NO: 150123 - DNA, 953 bp, Zea Mays
cgactcggacccgctttgaaagttgaaacccgtctcgcaccacaagcgagcgagggacccggggcggaagaagagagagaagacgtctctctcctctcggcgtccccgttccccaacctctcgtctgctgcctgcctgcctgagtttgtcatggcgtctaagcgcatcctcaaggagctgaaggacctgcagaaggacccccccacatcatgcagtgcaggtcctgctggtgaggacatgtttcattggcaagcaacaattatgggaccacctgacagtccctatgctggtggtgtttttttagtgaacattcatttcccgccagattaccccttcaaacctccaaaggtttctttcaagacaaaggtcttccatcctaatatcaacagcaatggaagtatatgccttgacattctcaaagagcagtggagccctgctttgacaatttctaaggtcctgctctccatctgctccctgctgaccgaccccaacccggacgaccctcttgtcccggagattgcccacatgtacaagacggaccggccgaagtacgagtcgacggcccgcagctggacgcagaagtacgcgatgggctgacgaacgctttcctgctcgtccacccgactggcgtctcaagaaagtcgttcctgggcgccattgttcccttggatttgttgttggtcgtcgtgtgtatccctgatccatctaggatcatcgtattgtattgtagtgtatgtatatcgtcggcctaccatcgttgccattcaccatagtgaggtggttggacatgcttcgcctatatgcacctgtgcttgccgtccttcgggtcggtgctctttggttaatgttcatcgaagacgttgatttcgttgcccctggctctttcatgcccatgtgaatcattttgccatacgtgttcttataggtttcgggcttgtgtaattgtagagcac

SEQ ID NO: 150124 - DNA, 1119 bp, Zea Mays
cccaacctctcgtctgctgcctgcctgcctgcctgcctgcaaaaaggtgagaagaaagaagccgtgtccgcgtgattttctgggtgaatttttcccggcctccgctccggccagatcggcgcgggtgaaccccagcccctaccgatccggatccgtccccatcgcctcgtgtgttttccgtcgagtattttagcgtgtgtgtccccccctcttcgcttcggttggtgcgtgcggctgtctcgggtagatctggtggtttagttcgccttgaaggcgcgcggcggcggtgtcgcggcttgtagcttgcgatttcacggtggagcttgtcggctgttggggtcggatttggagtttgtcatggcgtctaagcgcatcctcaaggagctgaaggacctgcagaaggacccccccacatcatgcagtgcaggtcctgctggtgaggacatgtttcattggcaagcaacaattatgggaccacctgacagtccctatgctggtggtgtttttttagtgaacattcatttcccgccagattaccccttcaaacctccaaaggtttctttcaagacaaaggtcttccatcctaatatcaacagcaatggaagtatatgccttgacattctcaaagagcagtggagccctgctttgacaatttctaaggtcctgctctccatctgctccctgctgaccgaccccaacccggacgaccctcttgtcccggagattgcccacatgtacaagacggaccggccgaagtacgagtcgacggcccgcagctggacgcagaagtacgcgatgggctgacgaacgctttcctgctcgtccacccgactggcgtctcaagaaagtcgttcctgggcgccattgttcccttggatttgttgttggtcgtcgtgtgtatccctgatccatctaggatcatcgtattgtattgtagtgtatgtatatcgtcggcctaccatcgttgccattcaccatagtgaggtggttggacatgcttcgcctatatgcacctgtgcttgccgtccttcgggtcggtgctctttggttaatgttcatcgaagacgttgatttcgttgcccctggctctttcatgcccatgtgaatcattttgccata

SEQ ID NO: 150125 - DNA, 1284 bp, Zea Mays
ctttgaaagttgaaacccgtctcgcaccacaagcgagcgagggacccggggcggaagaagagagagaagacgtctctctcctctcggcgtccccgttccccaacctctcgtctgctgcctgcctgcctgcctgcctgcaaaaaggtgagaagaaagaagccgtgtccgcgtgattttctgggtgaatttttcccggcctccgctccggccagatcggcgcgggtgaaccccagcccctaccgatccggatccgtccccatcgcctcgtgtgttttccgtcgagtattttagcgtgtgtgtccccccctcttcgcttcggttggtgcgtgcggctgtctcgggtagatctggtggtttagttcgccttgaaggcgcgcggcggcggtgtcgcggcttgtagcttgcgatttcacggtggagcttgtcggctgttggggtcggatttggtgcgtggctgcttcggcgctaggcgatccttgtgctgtttccgtgggatatttgtcgttgaatagataggagtttgtcatggcgtctaagcgcatcctcaaggagctgaaggacctgcagaaggacccccccacatcatgcagtgcaggtcctgctggtgaggacatgtttcattggcaagcaacaattatgggaccacctgacagtccctatgctggtggtgtttttttagtgaacattcatttcccgccagattaccccttcaaacctccaaaggtttctttcaagacaaaggtcttccatcctaatatcaacagcaatggaagtatatgccttgacattctcaaagagcagtggagccctgctttgacaatttctaaggtcctgctctccatctgctccctgctgaccgaccccaacccggacgaccctcttgtcccggagattgcccacatgtacaagacggaccggccgaagtacgagtcgacggcccgcagctggacgcagaagtacgcgatgggctgacgaacgctttcctgctcgtccacccgactggcgtctcaagaaagtcgttcctgggcgccattgttcccttggatttgttgttggtcgtcgtgtgtatccctgatccatctaggatcatcgtattgtattgtagtgtatgtatatcgtcggcctaccatcgttgccattcaccatagtgaggtggttggacatgcttcgcctatatgcacctgtgcttgccgtccttcgggtcggtgctctttggttaatgttcatcgaagacgttgatttcgttgcccctggctctttcatgcccatgtgaatcattttgcc

SEQ ID NO: 150126 - DNA, 990 bp, Zea Mays
ctttgaaagttgaaacccgtctcgcaccacaagcgagcgagggacccggggcggaagaagagagagaagacgtctctctcctctcggcgtccccgttccccaacctctcgtctgctgcctgcctgcctgcctgcctgcaaaaaggtgagaagaaagaagccgtgtccgcgtgattttctgggtgaatttttcccggcctccgctccggccagatcggcgcgggagtttgtcatggcgtctaagcgcatcctcaaggagctgaaggacctgcagaaggacccccccacatcatgcagtgcaggtcctgctggtgaggacatgtttcattggcaagcaacaattatgggaccacctgacagtccctatgctggtggtgtttttttagtgaacattcatttcccgccagattaccccttcaaacctccaaaggtttctttcaagacaaaggtcttccatcctaatatcaacagcaatggaagtatatgccttgacattctcaaagagcagtggagccctgctttgacaatttctaaggtcctgctctccatctgctccctgctgaccgaccccaacccggacgaccctcttgtcccggagattgcccacatgtacaagacggaccggccgaagtacgagtcgacggcccgcagctggacgcagaagtacgcgatgggctgacgaacgctttcctgctcgtccacccgactggcgtctcaagaaagtcgttcctgggcgccattgttcccttggatttgttgttggtcgtcgtgtgtatccctgatccatctaggatcatcgtattgtattgtagtgtatgtatatcgtcggcctaccatcgttgccattcaccatagtgaggtggttggacatgcttcgcctatatgcacctgtgcttgccgtccttcgggtcggtgctctttggttaatgttcatcgaagacgttgatttcgttgcccctggctctttcatgcccatgtgaatcattttgcc

SEQ ID NO: 150127 - DNA, 912 bp, Zea Mays
ctttgaaagttgaaacccgtctcgcaccacaagcgagcgagggacccggggcggaagaagagagagaagacgtctctctcctctcggcgtccccgttccccaacctctcgtctgctgcctgcctgcctgcctgcctgcaaaaaggagtttgtcatggcgtctaagcgcatcctcaaggagctgaaggacctgcagaaggacccccccacatcatgcagtgcaggtcctgctggtgaggacatgtttcattggcaagcaacaattatgggaccacctgacagtccctatgctggtggtgtttttttagtgaacattcatttcccgccagattaccccttcaaacctccaaaggtttctttcaagacaaaggtcttccatcctaatatcaacagcaatggaagtatatgccttgacattctcaaagagcagtggagccctgctttgacaatttctaaggtcctgctctccatctgctccctgctgaccgaccccaacccggacgaccctcttgtcccggagattgcccacatgtacaagacggaccggccgaagtacgagtcgacggcccgcagctggacgcagaagtacgcgatgggctgacgaacgctttcctgctcgtccacccgactggcgtctcaagaaagtcgttcctgggcgccattgttcccttggatttgttgttggtcgtcgtgtgtatccctgatccatctaggatcatcgtattgtattgtagtgtatgtatatcgtcggcctaccatcgttgccattcaccatagtgaggtggttggacatgcttcgcctatatgcacctgtgcttgccgtccttcgggtcggtgctctttggttaatgttcatcgaagacgttgatttcgttgcccctggctctttcatgcccatgtgaatcattttgcc

SEQ ID NO: 150128 - DNA, 617 bp, Zea Mays
ctttgaaagttgaaacccgtctcgcaccacaagcgagcgagggacccggggcggaagaagagagagaagacgtctctctcctctcggcgtccccgttccccaacctctcgtctgctgcctgcctgcctgcctgcctgcaaaaaggagtttgtcatggcgtctaagcgcatcctcaaggagctgaaggacctgcagaaggacccccccacatcatgcagtgcaggtcctgctggtgaggacatgtttcattggcaagcaacaattatgggaccacctgacagtccctatgctggtggtgtttttttagtgaacattcatttcccgccagattaccccttcaaacctccaaaggtttctttcaagacaaaggtcttccatcctaatatcaacagcaatggaagtatatgccttgacattctcaaagagcagtggagccctgctttgacaatttctaaggtcatcctgaacactggtttttttctacatgtgatctcttttcatatttgtttatgtttataagatgagtaatgatggcacaagatttttatactgatggttatcagttatcacttactttccattgatcagcttagcataaatttgttttcttaatccaa

SEQ ID NO: 150129 - DNA, 2316 bp, Zea Mays
acatcacagcgcagcggcgcagagcttcacgctctcccacgcagccctcctccagacctccaccactaccgctaccagcggcagcagcgtcgcccccctccgcctctccgcttccttctagccctctcatcggcatctctagcgcggcgcatctgtagcggaggaggaagagcggagcgtcgtctcgccccgcccgcggcattggctgcgggaactgggaaaggaggaattgaataggtacaagcttcgggaacctgcctgatccggatccgaatccgcgctgccgaccggcggagtttgggggcaacatagcttgctcgagagatggaggacctgttgggttcggagatcgggaagaacgactacgattggcttctaactcctcctgggaccccacgtgttcctgcactggagtttgctgaggaaacaccatcctcaaatatattactgaagcgcactgcaactagatcgtcctcaactactagagcatctaggcttccagtatctcaaacagagaatgggcattcgatggttcccactagaccaacaagaagtaacagccgaccatctatccaatcggctctcatgaatggcaacaacaggacatcagttccgaacacaagcatttcttcagtgacttcaagacctacaacccctagtaggcgaagcagcacagttgtcgcaccaaaacaatcagttccagctgcacgtacagtgcctgcaagatcctctacacctgttaaaactcgtctatctacaccagcaaaaacccgcccatctactcctacaagtactcgcccaacagcaccaaactcttcaactgattcgtctgctgccaagaccacatccacacataatgtgaggccatcgactccaaattcccgaccccgtattgttcccaattcatcttcaggtgcagctcatacaataagccgcccgagcgcctcctcgagtacaacaagcagatcagggtcttcctcaggtaatgttcctgggataagccgtgccacctcgttgtcctcaagttcgattccttccatgagccattccagctcacgatcatctacacctacacgccaacctgcaattcgttcatcggctccagctattggtcgttctccttctgttggacggagttctagcatcaacagctttacatctgtgtcccagtctgcagccagtagtggtcggaactcagcaccttcatcagctccatcatctcgtccaagttctccgaatccacgaccccgagctccagtgcgaccacttaatatccctgatttcccaaatgaagctccaccaaatctaaggacaaaattacctgaaagaccactatctgctggcagatcacggcctggaatggctttaggcataagatcaaccccaaatactgaaccttcagccgcctcagctcctatgaagaaggtctctgtgtctgctgttagtcgaagtaaattttctgatgcatcatcaaagacctctactcccacaaatgggcaccaaaatcgacaggctgaaaggtccactgttgacagccaagctaatagaccctcaagacctgtcacaggcacagataatggatttgggaggtcgatatcaaagaggtcacttgacatggctatcaggcacatggacattcggcagaacttgggtggcattcgaggcgcatccctgtttccccagagcacccgctcggctgctgccaaggtccgtccagctcggacatcagacccagggcatggcatctcaaaaggcgaccagcaccgcactgacaatggaaacagcttgaacgggcacctctatgtctctggggactcgaacggagctctctcacgcaatggtggcagctcaaccggttcgccagacagggagagcatcaggaccaaggagaccctgatcgagctggacatctatggtagctcgcgctatgaagcaatgctgctgagcgaggacttgcggaacacaagctggctgcatggattcgacgacaagcccgaccaaagcccgctgtttgaccaccggttcgagccgctgccggagcccttcagcccgttatgacagccgctgcttgtaaagtacagtatgatcaccactagctagctcttcgttctgtgctccttttgtgctgcaaaatgtgtatgatttggtctgttttatgtcttataaattatacgtgattggttggttctgcactccctccgatcccatttcagaaaccgaagatctattgatttgtccctgggcattagctttccacgaattgatgtacagaaagaaagaaagtttggtgcgggtttaatccgactgcggtttata

SEQ ID NO: 150130 - DNA, 160 bp, Zea Mays
aatgggtcatagtcaatcgagagccttgctaggagataggcgagaacctcgtcatcacggagagggcattggtgtcgacaagctccgtaaccttgcgaaagatgtcgatgagtcccatgaccttgcgaaatatgacagacatatcatgtttctttgatgc

SEQ ID NO: 150131 - DNA, 1529 bp, Zea Mays
aggtatgccagccgcgacgtcgtgccgggcggagggttttgccgagattttcccaaaaaagggcattgccacccgcaccgagaaaagaaaacgatacacgccgcgatagaaacactcagacacaccctctccatccgcccctcctcttcctcctcccggtcgcggcttcccccgattggcatccggggcgggcccatcccccacccggccgccgcgcgcgtccatggacggcctgcacggtacggacgcctgcttctcccccgcgagggccgtctcgccgcaggtgaggctcccggggccgccggacgtgggcagtcagtacctggcggagctactgcaggagcaccagaagctgggacccttcatgcaggtgctcccaatctgcagcaggctgctgaatcaagaaataatgcgggtgttgaatatacggcgccagcatggtgctgctgtggactttgagaagtttgcagccgcaagccccaaccagatacatccgtcaccccccatgccgaacttttgtggaaacggttttagtccatggaatgggatgcattcagagagagtaggtgttccgcaaggagctatgggttggcaaggacccccacagagccctgcttcttatatcgtcaagaagattttgcggttggaagtaccgacagaaacataccctaatttcaattttatcggtcgtcttcttggaccaaggggaaattctttaaagaggattgaagcctgtacaggctgtcgtgtattcatcagagggaaaggctcaattaaagattctggcaaggaggaacaactcaagggaagacctggctatgaacacttgagtgaacccctccatatcttgattgaagctgagttacctgctaatgtgattgatgcaagacttgcaaaggcacaagagatccttgaagagttgttgaaaccagtggacgagtcacaagactactacaagagacagcaactccgagaacttgccatgttgaattcgccactccgagaggagagtccacgttcaggcggtgctcctccaagtcccttcagtaagactgtctccggtaggccgaataaaacaggggacacagaattgtagatgacactgtttaccactgtttgaagagagaagtttgaaataggatctactggagatagcctaacggcggcatgaaaagagtgaaacaatgacacccattcctccatcttgatcctccggcaaccccacttagtccatgccttcacatcctattttccatgagcaaagctttcatgatggtgttggtagtgtgtgacatcctttaatgtactagcaggtgaattttgatctcccatcccatgtgacattaaccttgagtgacagatgactatgcgtagtgtatcctctatgactgtataattagaacatttgatttatttgttactggtaatgctgagagatagtactgtgcagaattcggagttacagtgtagtgtgccaatatttatctcaaacctgtttgattttcagttcaacatatttgcactgagga

SEQ ID NO: 150132 - DNA, 1482 bp, Zea Mays
atggcacacccatcgctcccggcccgcggaaccgggagccccggaaagagctcaacgccgcctaggagctcgctccacccaagaaacggtgcgcagagcgcccggttcctcccccgcctgcgtgcgacggccttggtgatggcgtaccgtcggaagcaggccatccagcgatcggccaccttcgtcgaggaccaccgccagacgtcgtcgggcggctccgcgtcgccggccgtcgcgtccccgcgcgccacgcggttcgcggacgacagccgccgcccagaccgctcctcttgcctcgccgcgcaggccatggcgacctcgtccgacgcgcgtggggatggggacctaacgctaccttccttcagcgagcgcctccccaccgcggcggcggcgtcccagtgcgccgccgagccgagtagcccggtgcaggaccctgtcacccatctctacacatccacgacgagcctaaacgacgaggggcccaagtacgacctcgagctatccaagaaagaccaccggaagcatgggttctgggggcttgtggctcagaaagccaaagtcatgctggacgaaaacggcacaccacgccctcaggctaagacctctgaatcgctctggtcctacgatcgggtccaaggatcgttgggaggcaggctggacatcagagggaagatcaaggacgttcttcagcaggagggcctgctggtggtggccgacagcacgacgcccggcaccagcggcggtgtcgtcgtcgctgcccggaagctgcagatcaggaggaaggcgtgcagcatggcgaacctgactccggccacccccgacatggagtcccctcggatcatcaaggcctctcgcgacgtagcgaacgccatggcggccaagttgaagctgctgcagcgggagctcaaggcactgaaggccgacctgtccttctccaaggagtggtgcgcgcagctggaggaagagaaccggctgctccgggacggcaaccacgacgccgacgaggacctgatacggcagcagctggagacgctgctcgcggagaaggcgcggctggcgcacgagaacacggcgtacgcccgcgagaaccggttcctgcgggaggtcgtcgagtaccaccagctcaacatgcaggacgtcgtcggcctcgacgacgacgatatcgacgccgacgccgattacgacgtggagttggaggctgagcagtaccaagatcgccgcaggtccctgccgttccaccaactcgtgctggaggaagaggagcaccaggcggccgatccgggcaccgagccgcagtcgccgtctcggtgcacggagtcgccgcgaatgctaagcacgaacagcggcggcagccctgaccacgagtcgtcgcagcggatgctgaacacgaacagcggcgtcgggattgcaatcgaatcccctaggaataggatgctcagcacaaacagcggcgagtcgacccagagcttcgatcaagaatga

SEQ ID NO: 150133 - DNA, 958 bp, Zea Mays
acaaacacaaccataaactgctagcgagcgagctaactttctccgtcggtccttcccttcccatccctctaccattcttaaatcttgctcccaccagtctgcttacctaagcatgacggcgaaggtacacccgaacgtcgccgcgccgtccccaggcctcggccagcaaccggcggtggcgccgggcgacggggaaccggcggcggtcaccctgacggtgtggcgcaagtcgctgctgttcaactgcagggggttcacggtgttcgacgcccgcggcgacctcgtgtaccgcgtggacagctacgcgtccgactcgcgcgcggaggtggtgctgatggacgccgcgggccgccccgtgctcacggtccgccgccgctgcaggaagctgatcggcctggtggggctggggctgtcgtccgaccagtggctgctgtaccggggcgtggacgaggcccggcgcctgccgccgctctacgccatgaagcgggcggccgcgcaatcgcaacacatgcgtggaggtgccaagtccgtggcgcacgtcgcggcgtgctctgcgggcgccgggtacgaggtggaggggtcgtacctgcggcggcgctgcacggtgtacgagtacgacgggcggcggcgagccgtggcggaggtgcggcccagccccaaggaggcggtgggctcggacgtgttccggctggtggtgcggcccgggatggaggtgtcgctggccatggccgtcgtgctcgcgctcgaccagatgttcggcaagccgtccctgctcaggagctggtcctcgtagcctgtacatcgccgtgccgttcgttccattggcatggcgtgggtgctttgtttcccttcttttgcgcccccccccccccccccccccccccccccccaatgcaattgttttgggcccgggagggagcacgataattgctcctggctgcctttttttcttcagctc

SEQ ID NO: 150134 - DNA, 2874 bp, Zea Mays
atggccacagtagagctgccagcggcgggcatggccggcatgctgccgccgaggaacgccacggcgcaggtggcgccgggcaacaacttctccaaccccgcctcggtcgtgtgctactcgccgatgatggtgacggcctacggcatctggcagggggtcaacccgctggagttctcgctcccgctcttcatcctccagacggccatcatcgtcgccaccacccgcctcctcgtcctcctcctcaagcccatccgccagccccgcgtcatcgctgagatcctcgccggcgtgattcttgggccttccgtgatggggcaggtggaagtctgggggaccacggtgttcccggtgcggagcctgctgacgctggagacggtggcgcacctcggcctcctctacttcctcttcctggtcggccttgagatggatgtcaacgtcatccggcggtcggggaagaaggccctcatcatcgcggtggcggggatggcgctgccgttctgcatcggcaccgccacgtccttcgtcttccggcaccaggtgtccaagaacgtgcaccaggcctccttcctgctcttcctgggcgtcgctctctccgtgacggcgttcccggtgctggcccgcatcctcgccgagatcaagctgctcaactccgacctcggccgcatcgccatgtccgccgccatcgtcaacgacatgtgcgcgtggatcctactcgcgctcgccatcgccatctccgaggtcaacagctccgccttctcctccctgtgggtgctcctctccggggtcttcttcgtgctcgcctgcttctacggcgtgcgcccgctcatgtggtggatcgcccgccgcgtccccgagggcgaggccatcagcgacgtgcacgtcacgctcgtgctcaccggcgtcatggtcgccggcgtctgcaccgacgccatcggcatccactcggtgttcggcgcgttcgtctacgggctggtcatacccagcgggcagctgggcgtcgtgctcatcgagaagctcgaggacttcgtcaccgggctgctcctcccgctcttcttcgccatcagtggcctccgcagtccgcaccaacatttcccgggtgcacgatcccgtcaccgtggggctcctcgtcctcgtgttcaccatggccagcttcgccaaggactcgtggagatgatcgtcctcaacatcggaagggacaaggaggtgctcgacgacgagtcgtttgcggtgatggtgctggtgtctgtggcgatgacggcgctcgtgacgcccgtggtgacgtcggtgtaccggccggcgcggcggctggtcggttacaagcggcgcaacctgcagcggtccaagcacgacgcagagctgcgcatgctggcgtgcgtgcacaccacccgcaacgtgccgtccatcatctcgctgctggagctgtcaaacccgaccaagcggtcccccatcttcatctacgcgctgcacctggtggagctcaccgggcgcgcgtccaacatgctcgccgcccaccactccgccgccaaccagaaccgcggctccagctcggaccacatcttcaacgccttcgagaggtacgaggagagcgtgggcggcgtgtccatccaggcgctgacggcggtgtcgccgtaccagacgatgcacgaggacgtgtccgtcctggcggaggacaagcacgtgtccatcatcgtgctcccgttccacaagcagcagacggtggacggcgggatggagcccatcaacgcgtccctccggggcttcaacgagagcatcctctcggcggcgccgtgctcggtgggcatcctcgtggaccgcggcctcagcgccgcggcggcgcgcatggcgagcgtgcaccacgtggcgctgctcttcttcggcgggcccgacgaccgggaggggctcgcgtacgcgtggcgcatggtggagcacccgggcgtctgcctcaccgtcgtccggttcatcccgccggactacagggcccccgcgctggcgccgccgcagcacatgcccgcgtccagcgtccacgcgcgcgccatcaccatcgtccccaagagcgagcggcagatggacgaggagtacctgaacgagttccggacgcgcaacgtcggcaacaacgcgatcctgtacatggagcaggtggtggccaacagcgaggacacgctggcggccatccgggacctggacagcgcgcacgagctgtacatcgtgggcaggcaccccggcgaggccgggtcggcgctgacgtcggccctggcggagtggatggagtcgccggagctggggcccatcggcgacctgctggtgtcgtccgagttctccaagatggtgtccgtgctggtgatgcagcagtacgtgatcacgacgccgcagccggcggccgtgggaccagcagcggcagcgcccgtgacggacgaccccgtccggcagtacgtgaccaacgccaaccagcggacgtcggtggccggtctcggcgtcggcggcaaccagatgggccgcggcgggtggggcggcggtgccggagggatggggaggcgacaagctaggtgtcacgagattgtcaagaagacaagaactatgggtgggctgttcgtaggtgtgtgcctagcagatggtgaggcggcgtcgcgcggccctcccgacggctcgccggccgcgctacggggcctgctgcagcagcccctcctccacgcctacgaggccaaggacccggccgcgtgcatggacatccggcgccctcgtggagcggcggctgcctcgccacgtccgtgttcgtctactttggagcctattcccggaggaggacaatctggacaagctgttcctaggcagcaacctaagcctttggcaaggatgctacagctgttttggagctga

SEQ ID NO: 150135 - DNA, 149 bp, Zea Mays
cttccttggaggtataggagtacaaggattgtcgtcactagaactatcctccccgctcccttcaccggagctgctcgttgtctgccattcaagtttggtcgcgtcttcatcaactttgttagacgcaccggtgcagaccacatccatcc

SEQ ID NO: 150136 - DNA, 2508 bp, Zea Mays
cgaaaaagaaaaaggaacggccagcccaggacgcggtggcgaacgacgggcggacgcgcgaccaacccgcccgccccgcgcgcgcgaccttccacttggggccatggccggcacgcattctaaaacgagcaccgcccgttggcgctataaagccccaccccggcgtcccctcgtcaaaccgaagcctccccggttatcccccggcctccacctgaccactaccaccacccgggacgtcttccatggcctcctcatagaataagctctatctcaccgcaacaactcctcattacaatccttcaagagagcagcactacactacactacattagagagaggtcgagcgcccctcctccgatccgccggcccgccgagagctagctgctgatcggtcgaggagagtcatggcgacgtcgacgatgcgcgttgccgccggcgtgctgctggtcgtgtcggcgctggcgaccttggcccgggccgaggacccctacctgttcttcgagtggaaggtgacgtacgggaccaggtccctgctgggagtgccccagaaggtcatcctcatcaacggcgagttccctggccccaggatcaactgctcctccaacaacaacatcgtcgtcaacgtcttcaaccagctcgaccatccgctccttttcacctggaacgggatgcagcacaggaagaactcgtggatggacgggatgccaggcacgcagtgccccatcgcgcccaacaccaacttcacgtacaagtggcagcccaaggaccagatcggcagcttcttctacttcccgtccatcggcatgcagcgggcggcgggcgggtacggcgccatcagcgtggtgagccgcctcctcatcccggtccccttcgaccagccgccgccggagagcgaccacgcggtgctcatcggcgactggtacaccaaggaccacgaggtgctggcgcgccagctcgacgccggcaagagcgtgggccgccccgcgggcgtgctcatcaacggcaagggaggcaaggacctggaggccgccgcgcccatgctcaccttcgaggcgggcaagacgtaccgcctccgcgtgtgcaacaccgggatcaaggcgtcgctcaacttccgcatccagggccacgacatgaagctcgtggagctggagggctcacataccctgcaggacgtgtacgactcgctggacgtgcacgtcggccactgcctctccgtgctggtcgacgccgaccaggcgcccggcgactactacatggtggcctccacgcggttcatccacgacgccaagtccgcctccgccgtcatccgctacgccggctccagcggcgccccgccggcgcccaacatgaccgagccaccggccggctgggcctggtccatcaaccaggccaggtcgttccgctggaacctgacggccagcgccgcgcgccccaacccgcagggctcctaccactacggccagatcaacatcacccgcaccatcaaggtcatggtctcccgcggccacatcgacggcaagctccgctacggcttcaacggcatctcccacagggacaccgagacccccctcaagctcgccgagtacttcaacgtcaccgacggggtgttcagctacaaccagatgggcgacgtgccccccgccgttaacgggccactccatgtcatccccaacgtcatcaccgccgagttccggaccttcatcgagatcgtcttcgagaaccccgagaagagcatagactccctccacctcgacggctacgccttcttcggcgtcgggatggggcctgggacgtggtcgccggagatgaggaagacgtacaacctactggacacggtgagccggcacacgatccaggtgtacccgcggtcatggacggcgatcatgctgacattcgacaacgcgggcatgtggagcgtccggtccaacgtctgggagcggtactacctcggggagcagttctacatcagcgtcatctcgccggcgcggtcgctgcgcgacgagtacaacatgcccgacaacgccctccgctgcggcaaggtcgtggggctgccgctgccgccatcctacgcccccgcgcgctaaagacgacgaaggcgccgttttcacctcgtgttctgaccatccagtctaactaatccattcctgtgctgctcggcgaaataaaatcatcaaaaagaacaaagacgaaggaagcctagggaagggagaagggacgttgggtgggggtgagccaaatgagaacgcacggatatatctattgatgtaatcttgagatgccctctcaaatcactgtaatggggtttaaaaaacaatcattgtaatgggagttatatatacttttatcttaacatttatttacaccagcaagtcctggtgtatgcatgctgtaccgtgtttactagtgaacactacactggcggacgggtccgcgccaccgcgatcagattaactcgggaaattattgctatatcgtgagtggttatctatttaatcacgtgagatttgt

SEQ ID NO: 150137 - DNA, 739 bp, Zea Mays
cgaaaaagaaaaaggaacggccagcccaggacgcggtggcgaacgacgggcggacgcgcgaccaacccgcccgccccgcgcgcgcgaccttccacttggggccatggccggcacgcattctaaaacgagcaccgcccgttggcgctataaagccccaccccggcgtcccctcgtcaaaccgaagcctccccggttatcccccggcctccacctgaccactaccaccacccgggacgtcttccatggcctcctcatagaataagctctatctcaccgcaacaactcctcattacaatccttcaagagagcagcactacactacactacattagagagaggtcgagcgcccctcctccgatccgccggcccgccgagagctagctgctgatcggtcgaggagagtcatggcgacgtcgacgatgcgcgttgccgccggcgtgctgctggtcgtgtcggcgctggcgaccttggcccgggccgaggacccctacctgttcttcgagtggaaggtgacgtacgggaccaggtccctgctgggagtgccccagaaggtcatcctcatcaacggcgagttccctggccccaggatcaactgctcctccaacaacaacatcgtcgtcaacgtcttcaaccagctcgaccatccgctccttttcacctggtccggccgtgtgatgaatatgcatgcatgcgtgcatttcatttcgatacatgacatgacatgacatggctttgcacg

SEQ ID NO: 150138 - DNA, 841 bp, Zea Mays
acgaactgatataagaaaccctagcggagccactaacacagtcgcctccttcctgcgccgccgccgccgccgccgccgctaccaccgcctcgcggccgcctgcggctccgcgtttccgcacggaagttggtgaaggtttcttgaggctgagaacatggtgctgaagacggaactttgccgcttcagcggccagaagatttatcctgggaaaggcattagatttatccgtgctgattctcaggtcttcctttttgccaactcgaaatgcaagcgctacttccacaaccgcctgaagcctgcaaagcttacctggacagcaatgtacaggaagcagcacaagaaggatatccatgctgaagcggtaaagaagaggcgccgcgccaccaagaagccatactccaggtcaattgtgggtgcttccttggaagtaatccagaagaagagagctgagaagccagaggtccgcgatgctgctagagaagctgctcttcgtgagatcaaggagcgcatcaagaagaccaaggatgagaagaaagcgaagaaggcggaggtgagcaagtcccagaagacgcagacaaagggtgcggtccagaagggttccaagggccccaagttgggcggcggtggtgggaagcgctgaaagaacttagtgtcgtttctcgacattgcagtcgttccttagccaaagccactttcgtagaacctgtgttgaatttgcaagacttattcaagcgttgcttgtgcgtgctaaataccatggcaagagaacggatttatatttatgcctgaaaaaaaatgaccgttcatattcttaactcatcttggataagggcttgttttg

SEQ ID NO: 150139 - DNA, 861 bp, Zea Mays
acgaactgatataagaaaccctagcggagccactaacacagtcgcctccttcctgcgccgccgccgccgccgccgccgctaccaccgcctcgcggccgcctgcggctccgcgtttccgcacggaaggtgattaggtgtgactgtagtcactgtcatgcagttggtgaaggtttcttgaggctgagaacatggtgctgaagacggaactttgccgcttcagcggccagaagatttatcctgggaaaggcattagatttatccgtgctgattctcaggtcttcctttttgccaactcgaaatgcaagcgctacttccacaaccgcctgaagcctgcaaagcttacctggacagcaatgtacaggaagcagcacaagaaggatatccatgctgaagcggtaaagaagaggcgccgcgccaccaagaagccatactccaggtcaattgtgggtgcttccttggaagtaatccagaagaagagagctgagaagccagaggtccgcgatgctgctagagaagctgctcttcgtgagatcaaggagcgcatcaagaagaccaaggatgagaagaaagcgaagaaggcggaggtgagcaagtcccagaagacgcagacaaagggtgcggtccagaagggttccaagggccccaagttgggcggcggtggtgggaagcgctgaaagaacttagtgtcgtttctcgacattgcagtcgttccttagccaaagccactttcgtagaacctgtgttgaatttgcaagacttattcaagcgttgcttgtgcgtgctaaataccatggcaagagaacggatttatatttatgcctgaaaaaaaatgaccgttcatattcttaactcatcttggat

SEQ ID NO: 150140 - DNA, 778 bp, Zea Mays
atatattgttacatgaacagctgcattgtctaatgtacatataatcaattctgatttatttctttggttcttgtaaaatatgtagttggtgaaggtttcttgaggctgagaacatggtgctgaagacggaactttgccgcttcagcggccagaagatttatcctgggaaaggcattagatttatccgtgctgattctcaggtcttcctttttgccaactcgaaatgcaagcgctacttccacaaccgcctgaagcctgcaaagcttacctggacagcaatgtacaggaagcagcacaagaaggatatccatgctgaagcggtaaagaagaggcgccgcgccaccaagaagccatactccaggtcaattgtgggtgcttccttggaagtaatccagaagaagagagctgagaagccagaggtccgcgatgctgctagagaagctgctcttcgtgagatcaaggagcgcatcaagaagaccaaggatgagaagaaagcgaagaaggcggaggtgagcaagtcccagaagacgcagacaaagggtgcggtccagaagggttccaagggccccaagttgggcggcggtggtgggaagcgctgaaagaacttagtgtcgtttctcgacattgcagtcgttccttagccaaagccactttcgtagaacctgtgttgaatttgcaagacttattcaagcgttgcttgtgcgtgctaaataccatggcaagagaacggatttatatttatgcctgaaaaaaaatgaccgttcatattcttaactca

SEQ ID NO: 150141 - DNA, 275 bp, Zea Mays
acgaactgatataagaaaccctagcggagccactaacacagtcgcctccttcctgcgccgccgccgccgccgccgccgctaccaccgcctcgcggccgcctgcggctccgcgtttccgcacggaagttggtgaaggtttcttgaggctgagaacatggtgctgaagtaagtttctacttcttttattgcaattgaaatatgttaatagatctggttagtctatgactctatgtccttatttttctgcatggctaatgtattttctgtgattgatt

SEQ ID NO: 150142 - DNA, 795 bp, Zea Mays
gtggtccaactataaaacccgcggcgtcatccatccccattgcagcttcagagttcctgactcctcgttcgttctgcgtttcgcgactgagatagccaaccctgcgactgcgtgcgtgcgggcgagcgagcaggcagaatggagcgccacgcccagaagcaggcgccgctagtcctcgcgctgtcctgcctcctcctcctcgcccccgccctcgtctccgccgtccccactccaagaagcctgcgcctggggggccagcagcagcacccgccggctctgaagctcacttcttctcagcaggaggcggcgatcgcggcggcgatgaacatgggcaggccgacggcgagggtggccgtggaggtgaacgactaccaaccgtccggccccaacaaccgccacgacccacccaagggcccctgaagagcttgttgaacggcgctcggctggacgtggacgacccaataatgcttctccttcgttgttgtcatctttaccagcagtatatatagagtgctttgctagtgctcttgtattctaccccaccagtagagattaaggatttaaggtagacacaaagttacctagttatatttgtacactggccgataggaacttggaagcacatcggtagtttgtgttgttcttaggttgccgttcgtcagaactgcatgcagatcgatttcatctcctgctgcagctgcaggtgtcgatacagcacctgcagcagatcgagattgttcagcttaattattctgttcctccgatcttgtcactgatgacacatatatcatgtcc

SEQ ID NO: 150143 - DNA, 788 bp, Zea Mays
gtggtccaactataaaacccgcggcgtcatccatccccattgcagcttcagagttcctgactcctcgttcgttctgcgtttcgcgactgagatagccaaccctgcgactgcgtgcgtgcgggcgagcgagcaggcagaatggagcgccacgcccagaagcaggcgccgctagtcctcgcgctgtcctgcctcctcctcctcgcccccgccctcgtctccgccgtccccactccaagaagcctgcgcctggggggccagcagcagcacccgccggctctgaagctcacttcttctcaggaggcggcgatcgcggcggcgatgaacatgggcaggccgacggcgagggtggccgtggaggtgaacgactaccaaccgtccggccccaacaaccgccacgacccacccaagggcccctgaagagcttgttgaacggcgctcggctggacgtggacgacccaataatgcttctccttcgttgttgtcatctttaccagcagtatatatagagtgctttgctagtgctcttgtattctaccccaccagtagagattaaggatttaaggtagacacaaagttacctagttatatttgtacactggccgataggaacttggaagcacatcggtagtttgtgttgttcttaggttgccgttcgtcagaactgcatgcagatcgatttcatctcctgctgcagctgcaggtgtcgatacagcacctgcagcagatcgagattgttcagcttaattattctgttcctccgatcttgtcactgatgacacatatatcat

SEQ ID NO: 150144 - DNA, 742 bp, Zea Mays
gtggtccaactataaaacccgcggcgtcatccatccccattgcagcttcagagttcctgactcctcgttcgttctgcgtttcgcgactgagatagccaaccctgcgactgcgtgcgtgcgggcgagcgagcaggcagaatggagcgccacgcccagaagcaggcgccgctagtcctcgcgctgtcctgcctcctcccctggggggccagcagcagcacccgccggctctgaagctcacttcttctcagcaggaggcggcgatcgcggcggcgatgaacatgggcaggccgacggcgagggtggccgtggaggtgaacgactaccaaccgtccggccccaacaaccgccacgacccacccaagggcccctgaagagcttgttgaacggcgctcggctggacgtggacgacccaataatgcttctccttcgttgttgtcatctttaccagcagtatatatagagtgctttgctagtgctcttgtattctaccccaccagtagagattaaggatttaaggtagacacaaagttacctagttatatttgtacactggccgataggaacttggaagcacatcggtagtttgtgttgttcttaggttgccgttcgtcagaactgcatgcagatcgatttcatctcctgctgcagctgcaggtgtcgatacagcacctgcagcagatcgagattgttcagcttaattattctgttcctccgatcttgtcactgatgacacatatatcat

SEQ ID NO: 150145 - DNA, 1182 bp, Zea Mays
atggagcagcatccgtttttgcgtggaggaaatgcccaaggagattctgggctggttctctcaactgacgctaaaccaaggctgaaatggacacctgagttacatcagcgatttgtagatgcagtcaatcaattaggtggagaagagaaagctactccaaaaacagtcatgaggctcatgggaattccaggactcaccttgtaccatttgaaaagccatctccagaaatacaggctcagcaagaacctccaagctcaagcaaatgccagtacatcgaagaatgccataggatgtacgcccgttgctgataggattcccggaacaaccgcagcaacaatgagcagtacaaatgttcttcctcaggcagagaagactattcaaattggtgaagcactgcagatgcaaatccaggttcaaagacagttaaatgaacaacttgaggtgcaaaggcatctacaactacgaattgaagcccaagggaaatatcttcaggcagttttggagcaggcacaagagacacttggaaaacagaatttgggccctgcaaacctggaagatgcaaaaataaaaatatcagagttagtttcacaagtatcaaatgaatgcttcagtaatgcaattacagatgtaaaagaaagttcaagtgtgcatagattagagcccatacaaattgagtttgttgaaagttcaacaaatagttatttgtctgttgctgaaggattcatcaaggagcacaaactacagcaccatggagtactaaaagcatatgatgatagttcattattttgcagaaaaagatctcatgaacatgagacacagtttgccctcaacagaagcctaagcgaacataggatggctcatttgcagaatgaggaaggataccataaagcagagtttgggtatgaaagtgacacagagatggcgcatgagtatactgcacctcaaaagaatggtagatgtagtaccaccagttcggcatccggaagcaaagtagatgcagagaagctatatctggaagaacaaaagtgtgcaagacaggcagttgaataccccagagaaagcaagctagtagattttgagcatccgtgttcagtgaacaaacttgatctgaacacccacaatgtcgatgacacaaatcaagcttacagacattttgacctgaatggcttcagctggggctga

SEQ ID NO: 150146 - DNA, 2407 bp, Zea Mays
gaggtggaatggaaatgaaatcccttctcgccctatcccagttcgcacggggtttcattttttttcttcatcgaagcggagctgaaggtcgagtggtcgacaagtgaccggcggcagacgcaacctcctggaagcgttcgttggattggaactggacggacggcctctcgcacgcggtcaatgccatgctgtgctgtgctgtatacaccggaaatttcttcggacgttggggctgcaactgcaatgcaagaatcagctctcaatccgagaaataaataaactaggaagaagccaacaacagttggggcaggaggaggattagctggtaggcacctttgcttgaaagggaggttttatcggtcaagctgcagatccagaggcactgaataatagaaactctccgagagaaaagcgcaaaaaaaaaaaaagcaggacggcaatcgcatgcttgcgacgatgaccgccagcaagtgaagaatccagccacctgcccgcgtaacttcttcttctttcgtcgttctactcccatcgaagctactactgaggacgggcgcaggcggagaacgagcggatccgctagcaggggaacagccggcgcggaggaagggtttggaggatgacagaagctgcagttaatacaaggtactggtgccatggatgcgagaaggtcatcgaggaggccatggtgggggaggatatcaagtgcccgttttgcggtggtgggttcatcgaagagatggccggggaggattccgaggggttgcagttagagcgggagtggggaacgccgccaggggacagcgaggacgacgatgacgacgatatagcccatgagttcgagggctttatcaggaggcacggacgggcatcggctctgcgccgggtgctcgacagcatccaggacgaccttagagccgacagggaaagggacaactccgtcctcatcaacgccttcaaccaagccctcgcctcgcaaggctcggcgctgctggatgccgacgaggcccgagacggccgaggtggatccagcaacagcaacgacgatggcttgctggaagagtatgatgtcctgggggctgggctgagcctactgcttcagcatctggccgagaacgacccgaaccggtacggcacccctccggcgaagagagaggcggtcgaagctctgcccactgtccagatagcggaggccgtcagctgttcggtctgcctcgacgatcttgagctggggtccccggcgaagcaaatgccctgtgggcataggttccactcttcttgcatcctgccatggcttgagctccacagctcttgccccgtgtgccggttcgagctgccgtctgaagagacgaaagatctgaacgagcctagcgatgtgcacagaagaacagagagcacccgagagaacgacagcgagagcggtaacagcgcgtggccccttgtcccttggttcttcagcgggctgttctcggtacctgaaccgtcgcacactgacagaggcactctcaccaccgatcaacagagtccttccaccaacccaaatgctggaggaaattgatttcgtcatcctttgtgaataatgctcatacatctgagaatagcaaggagccttgtcagtagatggcttattttttttctgtactgataatccttctcggatgaatcgcaaggtacggagtctgtgtctgctctattgtcaggattctagcgatcgtttcgcctctagttaatctcatagctactgagactgtctgtctgcatcctatgcaaaagatcggttgctttctttgttcttggctcttctgactggatgtctttgagctatttctggaatatgtaaactatcatgccttgtatttattcattgtttagttgaaatatatcttcatatcaagtacgaagtacctgctggctggacatgaggaaattaaccctattgaaatccacctcattcaacaagcctggaacaagtgctcatggccactcagggatactaaaaccagaaacatgaagggcgtgtgatatgtgatatagcacaggaaatacacatcttcagaaacatacatggctggaaggctgttgtttttcccctcaagaaccagaaacataaaggacatgtttgggctcgcaaaggaacttcctgctctgctcaggttctagtatccttgagtggccatctgttcgcttcagattaaaaccgactgtttagactgctgcagttataattcatagagacaaaaacactatagaagtagtagaagttggtacggactaaagccaaacgaacaagcttcgctggcctctcctttctctagaaagtaaacggctcagtgtgcagactaaagctaaatgtatccacatgggcacgttttttttatagacgaggcagcaatcttttcgtcgattaagg

SEQ ID NO: 150147 - DNA, 1192 bp, Zea Mays
cgtagcgccttgttgacacctttttgtgtgtctctctctctgtgcaagcaggaagggtttggaggatgacagaagctgcagttaatacaaggtactggtgccatggatgcgagaaggtcatcgaggaggccatggtgggggaggatatcaagtgcccgttttgcggtggtgggttcatcgaagagatggccggggaggattccgaggggttgcagttagagcgggagtggggaacgccgccaggggacagcgaggacgacgatgacgacgatatagcccatgagttcgagggctttatcaggaggcacggacgggcatcggctctgcgccgggtgctcgacagcatccaggacgaccttagagccgacagggaaagggacaactccgtcctcatcaacgccttcaaccaagccctcgcctcgcaaggctcggcgctgctggatgccgacgaggcccgagacggccgaggtggatccagcaacagcaacgacgatggcttgctggaagagtatgatgtcctgggggctgggctgagcctactgcttcagcatctggccgagaacgacccgaaccggtacggcacccctccggcgaagagagaggcggtcgaagctctgcccactgtccagatagcggaggccgtcagctgttcggtctgcctcgacgatcttgagctggggtccccggcgaagcaaatgccctgtgggcataggttccactcttcttgcatcctgccatggcttgagctccacagctcttgccccgtgtgccggttcgagctgccgtctgaagagacgaaagatctgaacgagcctagcgatgtgcacagaagaacagagagcacccgagagaacgacagcgagagcggtaacagcgcgtggccccttgtcccttggttcttcagcgggctgttctcggtacctgaaccgtcgcacactgacagaggcactctcaccaccgatcaacagagtccttccaccaacccaaatgctggaggaaattgatttcgtcatcctttgtgaataatgctcatacatctgagaatagcaaggagccttgtcagtagatggcttattttttttctgtactgataatccttctcggatgaatcgcaaggtacggagtctgtgtctgctctattgtcaggattctagcgatcgtttcgcctctagttaatctcatagctactgag

SEQ ID NO: 150148 - DNA, 587 bp, Zea Mays
tctccacataatcacagcatgcagcaacaatgagtccccaagaggagctcagaaaattcagtcttttctttgcttcttttttgaagagcttacatctcgaattctacaaccatgccgggccaacaaggccgcaaagtaggaaaaggaaaaaaatcaaatcagacaactgccggccgccggagagtcacttactggtctcggagatgaagaggagcagcataacgacggcggcgacgagcgtgacgatgcctccggagagcgtccgcttgtagaaatcttcgttcaccttggggtacgcgtccagccgcttgagcctgtgcaggaacgcgtccatctctcctcgtactactcggccgccggcgcccgacggcagtacccacgctggcgattggcgaaccctagcccgcccctctgatccgagctcccgagagcactagcacgcggaaaccgcggcgatgcggcgcgacgtgaggtggggtggcgtataggctttgaccgccgcgattccgcgagacgccggcgggatcggggtccggtcagggtatggaggcagggaggcggagattgattagacgaggacgcggtcg

SEQ ID NO: 150149 - DNA, 557 bp, Zea Mays
caacaatgagtccccaagaggagctcagaaaattcagtcttttctttgcttcttttttgaagagcttacatctcgaattctacaaccatgccgggccaacaaggccgcaaagtaggaaaaggaaaaaaatcaaatcagacaactgccggccgccggagagtcacttactggtctcggagatgaagaggagcagcataacgacggcggcgacgagcgtgacgatgcctccggagagcgtccgcttgtagaaatcttcgttcaccttggggtacgcgtccagccgcttgagcctgtgcaggaacgcgtccatctctcctcgtactactcggccgccggcgcccgacggcagtacccacgctggcgattggcgaaccctagcccgcccctctgatccgagctcccgagagcactagcacgcggaaaccgcggcgatgcggcgcgacgtgaggtggggtggcgtataggctttgaccgccgcgattccgcgagacgccggcgggatcggggtccggtcagggtatggaggcagggaggcggagattgattagacgaggacg

SEQ ID NO: 150150 - DNA, 1977 bp, Zea Mays
gagaaggaaaaagcattccaacgctgcatctgcactgcacggtacctcatcctcctctatctctaagaatttaaaagagaaggaggaggaaagtcctcgactgctcgttccataaaccctaacctcgttggattctcggcaaaaatcctcccaattcggaaccctccgatgttccagctacctgcgggagctgagccgtgctcggtttggcgaaattttgcacccctcttgtgctaggaccacccggttcaagctgttcctcgctcctcggaaggatcaggtcttcaccggtgctctccggcgccggatccaggtttgtttcggcgagaggtcgggctcttggcgggggccagcccagcttcgagctcaatttgccggcctgagatggaatcgcgactgcggtgccggtgccggtggctcagctagtcgcgtcgagtcgacgcgcgattcctgccatttgggtgggccagcctttcctggcaatctcggggggcgtttcgcctcgctgcgtggcagaaaggtgtgacgtgtgatgcatcccaaggcacgaatccacgccgacccggtgcgcgaggtcgaccacttcgactgcctgccggattcgctcgtcctgctcatcctgaacaaggtcgaggacgtgcggtcgctcggccggtgctacgccgtgtccaagcggctctgtgggctcgtttccctcgtccatgatgtgtatgtcaagattgaccgcgtcgttgcggtcgacggcgacgccgagggcacgctcaacctgtcctcgccgaagcctcggagcatcttctcgcacttcctgaagctgatgctcttcacaatcatcaagccgttccacaacatgcgcagccctaatggtactgcgaggccattgttcccgcagctctcgcagcactcaccggcacaggtgctcaggaacttcacgcacgtcaggaaccttcggatcgagctcccctctggggatgtgggtactgaggagggagttctcctgaaatggcgagcagagtatgggagcacacttgagaattgtgtgatcctggggggtacccgggttgaccgcaagcctgttggtggagagcatgagccagctttggaggacaatggaagcatgccagagtctttctataccaatggtgggctgaaacttcgtgtcgtctggacaatcagctctctaatcgcggcatcaacaaggcactatcttctccgctcaatcatcaatggccatcccacactacagagcttggtactgacagatgctgatggccaaggcacattgtgcatgggggcaaagcagctggaggagttcagagagaaccagttgtcgacctcggcatgttccaacaggactcaggtcccagcctgcaacatgaagctcaagtatgctccatatgttgaactgcctggtggtatggcgttgcaaggcgctactttggtggctatcaaaccctcacctgagggaagcaatggaagccaccctaaccgcaaggaagccgaaggattcgtctttggagcattcgatgggccatttaaagctgctgtgaaggcgctgatgaagagacgcacttaccttctggagatgaatggcttctaggaatcttggtatctagcttgttggtgctatgcatggtacatttagctgagtgtctcatatgtgtaatattcaagaaggcaccatctctagttttgatgcttgctgtctgctgttttagctatttgtacagtgttaacatttggttagataaagatcatatcaagtcctctagcgcaatagtgaatctctctacagttcactattctggcccatgatgtcctgtgtgatatggaagactgaagcatcctactgttaactcttttcaagtgaaacagccttgtgaccatctaatgtgtcagcactgggattgagatattcagatgctctcaccagtggacacaagttattatatatataatgtacatttttctcctctttca

SEQ ID NO: 150151 - DNA, 2143 bp, Zea Mays
gagaaggaaaaagcattccaacgctgcatctgcactgcacggtacctcatcctcctctatctctaagaatttaaaagagaaggaggaggaaagtcctcgactgctcgttccataaaccctaacctcgttggattctcggcaaaaatcctcccaattcggaaccctccgatgttccagctacctgcgggagctgagccgtgctcggtttggcgaaattttgcacccctcttgtgctaggaccacccggttcaagctgttcctcgctcctcggaaggatcaggtcttcaccggtgctctccggcgccggatccaggtttgtttcggcgagaggtcgggctcttggcgggggccagcccagcttcgagctcaatttgccggcctgagatggaatcgcgactgcggtgccggtgccggtggctcaggtacaccattcttcgatttgcttgttgcagttctcggtttgagattcttgtcgtttcatggtggaacctctgaagtctgatgcatgcggacgcgcaggcttagttatgcgcttgccatttttctctactcgctgacccgtgttcttatcaccgatgtcttcgttctctgttcagctagtcgcgtcgagtcgacgcgcgattcctgccatttgggtgggccagcctttcctggcaatctcggggggcgtttcgcctcgctgcgtggcagaaaggtgtgacgtgtgatgcatcccaaggcacgaatccacgccgacccggtgcgcgaggtcgaccacttcgactgcctgccggattcgctcgtcctgctcatcctgaacaaggtcgaggacgtgcggtcgctcggccggtgctacgccgtgtccaagcggctctgtgggctcgtttccctcgtccatgatgtgtatgtcaagattgaccgcgtcgttgcggtcgacggcgacgccgagggcacgctcaacctgtcctcgccgaagcctcggagcatcttctcgcacttcctgaagctgatgctcttcacaatcatcaagccgttccacaacatgcgcagccctaatggtactgcgaggccattgttcccgcagctctcgcagcactcaccggcacaggtgctcaggaacttcacgcacgtcaggaaccttcggatcgagctcccctctggggatgtgggtactgaggagggagttctcctgaaatggcgagcagagtatgggagcacacttgagaattgtgtgatcctggggggtacccgggttgaccgcaagcctgttggtggagagcatgagccagctttggaggacaatggaagcatgccagagtctttctataccaatggtgggctgaaacttcgtgtcgtctggacaatcagctctctaatcgcggcatcaacaaggcactatcttctccgctcaatcatcaatggccatcccacactacagagcttggtactgacagatgctgatggccaaggcacattgtgcatgggggcaaagcagctggaggagttcagagagaaccagttgtcgacctcggcatgttccaacaggactcaggtcccagcctgcaacatgaagctcaagtatgctccatatgttgaactgcctggtggtatggcgttgcaaggcgctactttggtggctatcaaaccctcacctgagggaagcaatggaagccaccctaaccgcaaggaagccgaaggattcgtctttggagcattcgatgggccatttaaagctgctgtgaaggcgctgatgaagagacgcacttaccttctggagatgaatggcttctaggaatcttggtatctagcttgttggtgctatgcatggtacatttagctgagtgtctcatatgtgtaatattcaagaaggcaccatctctagttttgatgcttgctgtctgctgttttagctatttgtacagtgttaacatttggttagataaagatcatatcaagtcctctagcgcaatagtgaatctctctacagttcactattctggcccatgatgtcctgtgtgatatggaagactgaagcatcctactgttaactcttttcaagtgaaacagccttgtgaccatctaatgtgtcagcactgggattgagatattcagatgctctcaccagtggacacaagttattatatatataatgtacatttttctc

SEQ ID NO: 150152 - DNA, 2864 bp, Zea Mays
tgtgcttactcactaagaattttcgtttgtcttatgtccactaagattttactttctttggcagaaattttctatacatttaagatgtacagggcctcaaatttcatacctgatcctaatcaggtgcttctagatgccaatccattaaggtctttagctccaatgttccctgcccccatgggagtcaatgttaatcagtcaagtacaccaccattggtttgtgtcactccggttggtcaatttccaattgggtttggtgcagggaaccttcctgcctttggatcgttcactactttcagcgccactacaaacggtgtttcttatacgggcaccagtggtaatggtgccattgatgccactcctatctctgcatacaagacaagatcaagcatatcacttgatgatgatgatgatgagccttactcgggcaaccaaggtttggcatctgaacggaaggctaggagaggccgtcctcctggttctggtcgtgatggatcaaatggtaagttaaagcgccctaagcctacatacaagaattttgttgctggcaaagagcttgtctttctgtcttctacatccgatcccagggagtttgtggaatcagttcacatgacttttgaggccctcaggcgaagacatctgcagatggatgaaacacaggatgctagcagacgtgcagacctgaaggctggtgccatcatgatggccagtaacatcagggcgaattcaggcaagagggtaggaactgtacctggagttgaaataggagatattttctattttaggatggagctgtgtgtcattgggttgcatgcacctagtatgggaggcattgattacatgactactaaatttggaaaagatgaggattctgtagccatatgtattgtctctgcaggaggttatgagaatgaggatgatgacacagatgtgctcgtgtacagtggtcaaggtggaaataataggaatactgaggagaggcatgatcagaagcttgagaggggtaacctagctcttgagaggagtttgcataggaagaatgagataagggttgtacgcggcttcaaggatccattttgcctaactgggaaaatttacatatatgatggtctctacaagattcacgagtcctggaaggagagaacaaagtacggtgtcaattgcttcaagtacaagctgctgcgggaacctggacagcgtgatggagctgcattatggaagatgactcagagatggatagataatcctgctaccagaggcagggtcctactagctgatctgtcatctaaggctgaaattttgcctgtttgtctcgtcaatgaggtagaccatgagaaaggacctgtacatttcacttatactaatcaggtcaaatacttgaggcctctcagttctatgaaaaagttgcagggctgtggatgccagagcgtttgcttgcctggcgacgccagttgtgcttgtggacaacataatggaggcgatttacccttcagttcatcaggattgttgtcatgccgcaaaccaatagtctacgaatgtggtgaatcttgcaactgttctacaaattgcaggaacagagtgacccaaaaagggtccaggctacatttcgaggtcttcaggaccacaaatcgaggctggggtcttcgctgctgggaacctattcgtgctggttcatttatatgtgagtatgccggtgaggttattgatgagctcaaatttaatttgaatgatagtgaagatgattacatttttcaaactgtatgccctggcgagaagacattaaaatggaattatggacctgaactgataggtgaagtaagcacatatgtatcgcctgatgaatttgaaccactgcctgtcaagataagtgcaaaaaacatgggaaatgtctcccgtttcatgaaccacagttgctcacccaatgtcttttggcaaccagttcaatatgatcacggagatgatggacacccgcatataatgttctttgcactgaagcatattccacccatgacagaactgacttatgactatggtgttgctggagctgaatctagtggttcaggttctcgtagaacgaagaactgcgtgtgtggatcacaaaactgcaggggattattttgatgggttgagagacgtgctcttggtggttaatcatgcaaaccactttctgctagatcctttctatgaaaccaaatttagtctccggataatatgacagatgatgtcatttgccatgtgtactgtgaagacagtaagttgtcgagcgagctgtagaatttctgttgctctgaactgcatggtggtcgctttcccaccatttcctcggatgtttatgtgggcgtggattgctgcattgcttccgctaaacttgtccaccaattgcaccggcttttgtagacttgttatcagccccgcttgcgttggacgcctggttgttaggatatggtcttgtaaattatcctggttaaggatcatgttgctttcgactcgaattttcgtcctcccttgcccttatgttcagcaatgttcaggtgtatgctgagtgctcaggtagggaccaaaggatgcagttgatgcaatttggaaccaggttttcttgtgggcgccggccaagggaatttgctgcgagaggtacaggtgagatgcaatgtggctggcacaccataaggccatctctctctagcagccgtgtgtgtacatgtgaacattgttttgcagtgtagactttacggggtggataggtcgggtagagatgttactccttagaaccgcggtcccagcacttgggcgcgagcgtaactacgtacacgagtcccggacccgccgactagcctggtcggctcgtctcctggtcctctacaccc

SEQ ID NO: 150153 - DNA, 279 bp, Zea Mays
atggcgatccctgccgatgcggcagcccatccattccaccctaggttggtcaaggcctcgaagtttaaaaggcgaaaggaggtcaaggccaaccgtacgaagaaggcagtcgctgccgcagctattgacgaggtctccccgttaggctatgcgcagcgcatcccgccgcacgccctctccccttcgtttagcgtgtgcagagcaacgctacatgctgcagcgctcaccgctacaactgctacagtacaagcgcgaggcacagtgacccgccagatgtag

SEQ ID NO: 150154 - DNA, 1110 bp, Zea Mays
tgtgtggtttttttgtggtataaactggctagattacataagaagagtatcaaatatggtcctttgttacaatgagatttggaacgagagaggcggctcaaccggttgtataatgggacaaaagccaattgtattagtgagttgcgcatgcgcaaatttgttttccataggttatgtagccatttaaggtctcgtaggctgttagaggataccatcaatgtctctattgaagaacaggttgctatgttcttaaagtttgttggtcatagatggacaaataggtcagttgggtttgaattcctacggtccggagaaacagttagcaggtacttcaaccttgttttagatgctctatgtgtcatgtcatgtgacctcattgctatgagaaccatagagacacatccaaagatatctagtagcccgggaagatttcacccttactttgagagatgtgtaggagcactcgatggcacacatgtaccatcatgggtccccatttatatgcaggataggtttagaggttgaaaacactacccaacacagaatgtgttagctatcgtggattttgatcttaggtttacatatgtgttgactggatgggaaggatcagctcatgactcatttgtgctccaagatgcattgtcacgtccctcaggcttaaaaattcccgaaggtcatttctttctagcagacgcgggttatgcagcacgacctggcatattacctccatataggggtgtttggtacaatcttaaggagtttcaaggtactaggcagctagagaatccagaagaactgttcaaccttcgacactcttctcttaggacaacgatagaacgagcatttggtacactcaaaaatagatttaagatactcacaagccaatcgttcttccctctcaaaactcaagtgaagatagttttggcttgttgtgctttgcacaacttcataatagaggatgggattggtatttatgtttatgaagatgaggcatggtttggaagtcttccaagaagcagtcgtacccatgctaatatgaacagagataataaactttgggccactatgcgtgatcagctagcgcaacaaatgtgggacgattgggatgga

SEQ ID NO: 150155 - DNA, 722 bp, Zea Mays
atggcggagaagctgacgccggagcaggtggacgagtgcaaggaaatcttcgacctgttcgacgccgacgaggacggcaagtcgccatcccatcgaactcctatccaccggccaccgcgcgcgcacctagctccgagcctcactcaactcatatgtcgcatcgccacgggtgagctcgtgacggcgctgcgctccctgggccagaacgtggacgaggcggaggcgcggcgcttcctggaggacgcgggcgtcgccgcgggcgccggcgacatcgacctcgcggcgttcctggccgtggcggcgcgcaagatgggcgccaggcagtcggaggcgcgcctcgccgagtgcttcgacgtgttcgacgacgcctgcagcgggtccatccccgcggagcagctgcggcaggtgatggtgagccacggcgaccggctcacggaggaggaggccgacgcgatgctccgcgaggccgacccgcgcggcgagggccgcgtcgagtacaaacactacgtcaaagtactgctcagggacaagaagtgatccggtgatccttcgcccgccggtggccacggccggccacgagtgggggaggaggatgtcaactcgatctgctctttgatcatgtgcgcgtcctagtcctagcaccgccgcttaattattatcacggcatcagatccagtagctagtggctaccgaattcttgaagttgacatcaccagttctgt

SEQ ID NO: 150156 - DNA, 960 bp, Zea Mays
agaagtcttcaaaatgtgtatattatagcacagataagttactgtatttggtatttctttgaaatgaaacagtgatattgatgtgtaccccttgatgagaagattgtatgttcttccaatactaatttaggtttgatctattcacccgctgcaggctgcatcactaccaaggagcttggaactgtgatgcgctcccttggccagaaccccactgaagcagagctgcaggacatgatcaacgaggttgatgctgatggcaatgggaccattgacttcccagagttcctgaacctgatggcaaggaagatgaaggacaccgactccgaggaggagcttaaggaggcctttcgcgtcttcgacaaggaccagaatggtttcatctcggctgctgagctccgccatgtcatgaccaacctcggcgagaagctgactgacgaggaggtcgacgagatgatccgtgaggccgatgttgacggcgacggccagatcaactacgaggagttcgtcaaggtcatgatggccaagtgaggagcgatccccgttatctatgaatgaattgaagtgaaatatcaggcacacaagctgtactttgccatgtcccttttgagtacacatcagtatcatgcaggaggtaatgtctagtagtggtcggtttaggtggtgtagtcatgggaactcgacatcagatacctggtctcttttgattgtgatgttatcttgcattattgctcctgctggagcttttaggatttgttgtaagctcatattttcagggggttttggatcttttgtgcgagtcttgtatctcgtgtacgttgcattgcattgttgtgttatgcttctgctggcttgtaccgccttgttatgtgacatctggtgtgtgtggattctgggaatccaaagaaagctcgggagctgcagcgggcgctgcgcggcatggaatgatttgccaaattgaaa

SEQ ID NO: 150157 - DNA, 1069 bp, Zea Mays
ggaatcctcccctcgcggtcgcgtcctcgccagtcgccacaccgctgcctataaatccggcccacggaccgcacgaccagccacctggttctccgtccggtcagaccaatcaacaaagtgacgcgagcacgagcatccatcgtttccccttcttccccatcgcgtgccctcgccgcagccatcttccatggcggaccagctcacggacgagcagatcgcggagttcaaggaggccttcagcctcttcgataaggatggcgacggctgcatcactaccaaggagcttggaactgtgatgcgctcccttggccagaaccccactgaagcagagctgcaggacatgatcaacgaggttgatgctgatggcaatgggaccattgacttcccagagttcctgaacctgatggcaaggaagatgaaggacaccgactccgaggaggagcttaaggaggcctttcgcgtcttcgacaaggaccagaatggtttcatctcggctgctgagctccgccatgtcatgaccaacctcggcgagaagctgactgacgaggaggtcgacgagatgatccgtgaggccgatgttgacggcgacggccagatcaactacgaggagttcgtcaaggtcatgatggccaagtgaggagcgatccccgttatctatgaatgaattgaagtgaaatatcaggcacacaagctgtactttgccatgtcccttttgagtacacatcagtatcatgcaggaggtaatgtctagtagtggtcggtttaggtggtgtagtcatgggaactcgacatcagatacctggtctcttttgattgtgatgttatcttgcattattgctcctgctggagcttttaggatttgttgtaagctcatattttcagggggttttggatcttttgtgcgagtcttgtatctcgtgtacgttgcattgcattgttgtgttatgcttctgctggcttgtaccgccttgttatgtgacatctggtgtgtgtggattctgggaatccaaagaaagctcgggagctgcagcgggcgctgcgcggcatggaatgatttgccaaattgaaa

SEQ ID NO: 150158 - DNA, 542 bp, Zea Mays
tccggtcagaccaatcaacaaagtgacgcgagcacgagcatccatcgtttccccttcttccccatcgcgtgccctcgccgcagccatcttccatggcggaccagctcacggacgagcagatcgcggagttcaaggaggccttcagcctcttcgataaggatggcgacggctgcatcactaccaaggagcttggaactgtgatgcgctcccttggccagaaccccactgaagcagagctgcaggacatgatcaacgaggttgatgctgatggcaatgggaccattgacttcccagagttcctgaacctgatggcaaggaagatgaaggacaccgactccgaggaggagcttaaggaggcctttcgcgtcttcgacaaggaccagaatggtttcatctcggctgctgagctccgccatgtcatgaccaacctcggcgagaagctgactgacgaggaggtcgacgagatgatccgtgaggccgatgttgacggcgacggccagatcaactacgaggagttcgtcaaggtcatgatggccaagtga

SEQ ID NO: 150159 - DNA, 1084 bp, Zea Mays
acgcctcttgtgtttcctatcgccgtctcgcgttaagattttgacggcgcccgccggctgactgaggtaggcaaggcaagcgcacggcgcgtcaggggcgggcggacgtgctcgcttgtgcagttgtgcgcatgacgccaccagccggccctcggcctgatcgagaggccatgtgagtgtgtcgcccatctgaccggccccccccacccactcgccacccacgcaagcgagggagcgacgccgaggcgcgcagatcggaatccccgtccccggttcctcctcgctcatcacgccgtccaccggctaccggaaatccacgtcccacagccggctcgttgcgctcgcaaatggccacgaaggccgcggaggcgccatctcccccgccgccgaccgcggaggcggaggctcctgcgacgcctgggaagcgcgtgccagcggaccgggccgacaaggggcgtgagggagtggagcggccggagccgaagcgtcggcgcgcccgcgcgcgcatcgcggtgctcgacagcgtgccccgagcgtcggaggtcgcggccgcggccgcggctgccgctgcggcgagcagggaggaggacgagtccgtgggcggctgcgacggagtggactcgtccttctcgttccacgcgcggaacttctccagtgcgcaaaccacgcccaagttcgggtccttcgaccccgccgccgcggagcttgtggccttccacctgatgaaggccactaggcgtcgcctggatgcttcggcgacggatgagccgggggatcacggaacggttgccggcggcggcggcgaggaagcggcggccgagggcagcgatgagaattcacgctagcagggacagggtaggcagtcaactagtcaagtggacgactcggtttttacttcggcatgtttaatgggctgtgtttattatgaagaacactttattttcttcttcctataccttctactgttgtgtatctgtatatcgtgatttaatttaatggagtcagtctttttattgtacaattggtttgtacatttgaagctgaactcataaccaagtcaaattaaaaataaaaatgaacaaaa

SEQ ID NO: 150160 - DNA, 1714 bp, Zea Mays
tgttgacatccgcccccttcccctcttcgactcacggcccacccactgcacgcgcaagcgagaggacggctccgcctccgtcccatggatggccgccggcgccacctcatggtgttcacggtcgcggtcactgctaggtggtggtccggcgtgctagatctcacgcctccagggcaggctccctcgcatgggtcgccgtttcctcatggtgttcacggtcgcgctcatcgctcgcagcgcggaggcgtcgatctgcatctatgatcaggagcccttctgcgaggtggacaatgcctcctcctctctggccaatacttctctgccagtcgcctgctcccaaggggaggggcgctggaatacgggcccgcagatggcgtcggctgtgcaggcggccatgatcgacgaagcctcctcagatctgtgctcatcgccaccagggtgataacctttgtatctcgatcctgctcagcatctcggtggtcgtgcggtgccagctggttcggtcggggcagcaggcgctcctggcacccgcctatccccgagggcgcgaccaaagggagtccacgacgaggaagcgacagggccgaaatcagatatgaatgccattggaggggtgcccaccggccggcgaggccccggctgcccgaccggccagccagtcggagtcgggccgggtggtctccgtcgcagggtcggcgtcgtcctcgtcgctggcgccggcggacgtgtcgtcggcgtcgggtccggtgccctcgctgtcggagaggcgcgcgagccagcagctgccgtggaggtggccgctgacgcagacgaagtactcgagccggccctcgtaggcgccgagcctgcgggacgcgctgcgcggggcgagacccgcggcggccatgctccagacgcgcgcgccgcagtaggggcatcgcgcgcgggggtccagcgcggcgcggtggcccaccagccacgcccgcgtccgggaccgcatgaagccgcggaacacgccgcggtagacgccgacgtcgtcggcgcccgccacggcgtgctcgcaggggtccgacacgtacagcaggtcccccgcgcagcggcgcggcaggaagctccgcccggacgtcttggagaagcgggagaccggggcgaagtggcccgtcacgcccgcgcccgcggcgccgcagcagaagagcagcagcttcgccagcgccggccacccgccgccgacgcgcccggccgccggcgccgagcccgcggggcctcccgtcagcgccgccaccatccgcggcgcccgcgagacgcagagctcccgccacagcacccgctccgccacggcgcgcaggcgccggctcacccgcgccaccgcgcacagcgactgcgggtcccagttgagcgccaggaacacgagctgcagcaccttctcgtccatgagccccacgttgacgccccggatgcgcgccgcattgccgccgccgccgcctcctcctccccaggtgccgaccgcgcaagagctagctcccgcattgccgccgccgttcgacggcccgctcagccgccttatggtcaaggcgctctcgctcatccctccgcgcccatcaacctcacctcacgcaccggcaccgcgagcgaagcgctgagcgcaggaggccgcgaccgacaactggcgagctgctcacttgcctaaactggtgctcgcagctcgctcattcggtgtccaatatcggcgtgccgc

SEQ ID NO: 150161 - DNA, 1553 bp, Zea Mays
cgtgttgacatccgcccccttcccctcttcgactcacggcccacccactgcacgcgcaagcgagaggacggctccgcctccgtcccatggatggccgccggcgccacctcatggtgttcacggtcgcggtcactgctaggtggtggtccggcgtgctagatctcacgcctccagggcaggctccctcgcatgggtcgccgtttcctcatggtgttcacggtcgcgctcatcgctcgcagcgcggaggcgtcgatctgcatctatgatcaggagcccttctgcgaggtggacaatgcctcctcctctctggccaatacttctctgccagtcgcctgctcccaaggggaggggcgctggaatacgggcccgcagatggcgtcggctgtgcaggcggccatgatcgacgaagcctcctcagatctgtgctcatcgccaccagggtgataacctttgtatctcgatcctgctcagcatctcggtggtcgtgcggtgccagctggttcggtcggggcagcaggcgctcctggcacccgcctatccccgagggcgcgaccaaagggagtccacgacgaggaagcgacagggccgaaatcagatatgaatgccattggagggttagtactaaattcttgttgatatttatagttttctctatttacataggtacaataagccggcgaagtttcgtggtggaatcagcagggtgcccaccggccggcgaggccccggctgcccgaccggccagccagtcggagtcgggccgggtggtctccgtcgcagggctatcaactttagatcttgaacatgggacccaaatcactggcctggagcacaatacgaagaaaactagcttatgattgcagatctcacccatgggttcaatgagtcaaaaaatcgaaattttcacggaagatgagatcgcaagtattactagcaattatagcactcttattgatcttctcagctttgaacattattaatgtttatactattgaatgattggcatactgataaaattcgatgttaaacttgaaggtcgatgatgaggtatatgatgctttagccgtcaccttctttctatcttggaggatattgaaaatttgattcaaagtaagcctttcctgttggtgctgtttcgggacattgatcgttgcatggtcatgttcttctattgtagacttgcagttatcaaagctgggttggttttgaatgtcctgcactaggacatgttaatttttgaacatcgccaatcatgtttgtggtctggttgctttcactcttaattttaattttaaaaaacatagttggcttgtactgtccaaccttttttttggtcaagcgtactaaactactaatttgcttccaagagaatctgtagcggttgttcagttatctagcttgggaatagataaatatattcaagaaagtctatatagccaccagatgtctataaactacagagatgagactgtttaggatatagttttgaagaaaacatcgtatcattcatttttttcacaatgataataataaaaagattaccgtttgttttc

SEQ ID NO: 150162 - DNA, 861 bp, Zea Mays
cgtgttgacatccgcccccttcccctcttcgactcacggcccacccactgcacgcgcaagcgagaggacggctccgcctccgtcccatggatggccgccggcgccacctcatggtgttcacggtcgcggtcactgctaggtggtggtccggcgtgctagatctcacgcctccagggcaggctccctcgcatgggtcgccgtttcctcatggtgttcacggtcgcgctcatcgctcgcagcgcggaggcgtcgatctgcatctatgatcaggagcccttctgcgaggtggacaatgcctcctcctctctggccaatacttctctgccagtcgcctgctcccaaggggaggggcgctggaatacgggcccgcagatggcgtcggctgtgcaggcggccatgatcgacgaagcctcctcagatctgtgctcatcgccaccagggtgataacctttgtatctcgatcctgctcagcatctcggtggtcgtgcggtgccagctggttcggtcggggcagcaggcgctcctggcacccgcctatccccgagggcgcgaccaaagggagtccacgacgaggaagcgacagggccgaaatcagatatgaatgccattggagggttagtactaaattcttgttgatatttatagttttctctatttacataggtacaataagccggcgaagtttcgtggtggaatcagcagggtgcccaccggccggcgaggccccggctgcccgaccggccagccagtcggagtcgggccgggtggtctccgtcgcagggtcgatgatgaggtatatgatgctttagccgtcaccttctttctatcttggaggatattgaaaatttgattcaaagtaag

SEQ ID NO: 150163 - DNA, 948 bp, Zea Mays
cgtgttgacatccgcccccttcccctcttcgactcacggcccacccactgcacgcgcaagcgagaggacggctccgcctccgtcccatggatggccgccggcgccacctcatggtgttcacggtcgcggtcactgctaggtggtggtccggcgtgctagatctcacgcctccagggcaggctccctcgcatgggtcgccgtttcctcatggtgttcacggtcgcgctcatcgctcgcagcgcggaggcgtcgatctgcatctatgatcaggagcccttctgcgaggtggacaatgcctcctcctctctggccaatacttctctgccagtcgcctgctcccaaggggaggggcgctggaatacgggcccgcagatggcgtcggctgtgcaggcggccatgatcgacgaagcctcctcagatctgtgctcatcgccaccagggtgataacctttgtatctcgatcctgctcagcatctcggtggtcgtgcggtgccagctggttcggtcggggcagcaggcgctcctggcacccgcctatccccgagggcgcgaccaaagggagtccacgacgaggaagcgacagggccgaaatcagatatgaatgccattggagggttagtactaaattcttgttgatatttatagttttctctatttacataggtacaataagccggcgaagtttcgtggtggaatcagcagggtgcccaccggccggcgaggccccggctgcccgaccggccagccagtcggagtcgggccgggtggtctccgtcgcagggctatcaactttagatcttgaacatgggacccaaatcactggcctggagcacaatacgaagaaaactagcttatgattgcagatctcacccatgggttcaatgagtcaaaaaatcgaaattttcacggaagatgagatcgcagtcgatgatgaggtatatgatgctt

SEQ ID NO: 150164 - DNA, 1751 bp, Zea Mays
cgtgttgacatccgcccccttcccctcttcgactcacggcccacccactgcacgcgcaagcgagaggacggctccgcctccgtcccatggatggccgccggcgccacctcatggtgttcacggtcgcggtcactgctaggtggtggtccggcgtgctagatctcacgcctccagggcaggctccctcgcatgggtcgccgtttcctcatggtgttcacggtcgcgctcatcgctcgcagcgcggaggcgtcgatctgcatctatgatcaggagcccttctgcgaggtggacaatgcctcctcctctctggccaatacttctctgccagtcgcctgctcccaaggggaggggcgctggaatacgggcccgcagatggcgtcggctgtgcaggcggccatgatcgacgaagcctcctcagatctgtgctcatcgccaccagggtgataacctttgtatctcgatcctgctcagcatctcggtggtcgtgcggtgccagctggttcggtcggggcagcaggcgctcctggcacccgcctatccccgagggcgcgaccaaagggagtccacgacgaggaagcgacagggccgaaatcagatatgaatgccattggagggttagtactaaattcttgttgatatttatagttttctctatttacataggtacaataagccggcgaagtttcgtggtggaatcagcagggtgcccaccggccggcgaggccccggctgcccgaccggccagccagtcggagtcgggccgggtggtctccgtcgcagggtacgtttccctatctgaatctctctgtctgtcttcttctccgagacgcaggaaaccatttcgtcgagataattttagagctttttttgttttgttttgccccaaccgtcaatctttgtgcagagtggtgtgatacgtaatgctcgagtagagttgttgagacgtacctgggatgttgggggtaatttcttgagatttagaactaggaggaaactgaaagtcgccaacttgcctatgaagtttgagttcccaggttgcctatgaattacatatttgcatccattaggtggctccattttattttgtaggaataccagagattttccttcggagcatccaatcggctcagctgagcaaaacctgcgattcgaattcctactgaaaactaactagataacccttttggattgctggtgttcttaaacaaaacgaagatgaaagatagtagtacattgcagctggggtgacaagtgttggataaacccatgaattggcctcgttgaattccttaaattctcaacaaaatgttataggattctacagaagcacataggtgataggtcgaatttcgttcatgtctccttaaacaaaagggcaaatatttttcattacgttgtgcgctatgctaactgaaatgttcaggtcttgtaggaaactaatagcaaatacagtaccctctgcacatgacagatggaagttagatgaatcaacatttacctcgtcttgaaagtaacgacaccgatttttttctatcaggctatcaactttagatcttgaacatgggacccaaatcactggcctggagcacaatacgaagaaaactagcttatgattgcagatctcacccatgggttcaatgagtcaaaaaatcgaaattttcacggaagatgagatcgcaagtattactagcaattatagcactcttattgatcttctcagctttgaacattattaatgtttatactattga

SEQ ID NO: 150165 - DNA, 865 bp, Zea Mays
tgttgacatccgcccccttcccctcttcgactcacggcccacccactgcacgcgcaagcgagaggacggctccgcctccgtcccatggatggccgccggcgccacctcatggtgttcacggtcgcggtcactgctaggtggtggtccggcgtgctagatctcacgcctccagggcaggctccctcgcatgggtcgccgtttcctcatggtgttcacggtcgcgctcatcgctcgcagcgcggaggcgtcgatctgcatctatgatcaggagcccttctgcgaggtggacaatgcctcctcctctctggccaatacttctctgccagtcgcctgctcccaaggggaggggcgctggaatacgggcccgcagatggcgtcggctgtgcaggcggccatgatcgacgaagcctcctcagatctgtgctcatcgccaccagggtgataacctttgtatctcgatcctgctcagcatctcggtggtcgtgcggtgccagctggttcggtcggggcagcaggcgctcctggcacccgcctatccccgagggcgcgaccaaagggagtccacgacgaggaagcgacagggccgaaatcagatatgaatgccattggaggggtgcccaccggccggcgaggccccggctgcccgaccggccagccagtcggagtcgggccgggtggtctccgtcgcagggctatcaactttagatcttgaacatgggacccaaatcactggcctggagcacaatacgaagaaaactagcttatgattgcagatctcacccatgggttcaatgagtcaaaaaatcgaaattttcacggaagatgagatcgcaagtattactagcaattatagcactcttattga

SEQ ID NO: 150166 - DNA, 1845 bp, Zea Mays
gtccatgctcccccaccggcccacctaaaccaagaaagatttttgggacactccagcggtccagcccgacctctttccaaaccggcaaatcctcagatccgccccctcctccgcctccgcctccgcctcctgtaccctcacgccgtgcttccacagccctcccacctccgaatccagatccgccgccaccaactcctgcttctcacctcctaggctgcttcgcgcgacaacctccgcgaggagcagcaggagcggcggcggcggcatggggcgggacggcggtggcggtgtcgccggcggaatgtctgaatcggtgctgcggaaggtgctcctctcctacttgtacgtcgcggtgtggatcttcctctccttctccgtcatcgtctacaacaagtacatcctcgaccccaagatgtacaactggcccttccccatctcgctcaccatggtgcacatgggtttctgctcatccctcgccgtcgcgctcgtccgcgtgctccgcgtcgtcgacctccccacctctccctccatgacgccacagctctacacctcctccgtcgtccccatcggcgcgctatacgcgatgtcgctctggttctccaactccgcatacatctacctgtctgtgtcatttatccagatgctcaaggcgcttatgcccgtcgccgtctactccatcggcgtcctattcaataaggagaccttcaggtcctcctccatgctgaacatgctctccatctccttcggcgtggccatcgccgcctacggcgaggcgcgcttcgacgtgcgcggggtcgcgctgcagctcgctgccgtcgccttcgaggccacgcggctcgtgctcatccagatcctgctcacatctaagggcatctccctcaaccctatcacctcgctctactacgtcgcgccgtgctgcctctgcttcctcgtcgtgccctgggtcttcgtcgagctgcccaggctacgcgccgtcggcaccttccaaccggatttcttcgtctttgggaccaactcactctgcgcctttgcgctcaaccttgctgtgttcctgctagtgggcaagacctcggcgttgaccatgaacgtcgcgggagtagtcaaggattggctgttgattgcattctcgtggtctgtgatccgggacaccgtcaccccgattaacctgttcggatatgggatcgcgtttttaggggtggcctactacaatcatgtcaagctgcaggcgctcaaggctaaggaggcccagaagaaagccgcacaggctgatgaggaggttgggtcgctcttgcaggagcgcgatggacatggtgatcataagagcgacaatcaggcttagactgtcagatctgatcctggccttcccatattggggatctgatgcaaggtgcaaagaccggagtttggtctacggttgctttcaaggaggtggatgacggtttcttgcacttctttaactttgtgtctggagagaaaatcagaggtatttaacgtttaggaaatatgcacctgcttggtggagagctttgccttgttattttagacactttgttctactgaaaggcagccatgccttactacctcacttgtccattgcctagatttatttgttctgctagtagattagggactaaaaatgtactgctgcagaatgttaatttggtggttattttcgatatataatgagcttaccgtaatctacgagctgagcctctcgtgccgtcgtgtgaagtcttgtttattcgtgggactggtagcacgtgttatatggattattttttactggtgatggttattgttaggatgccttttcagatttaaggtcagatgtatatattctagtct

SEQ ID NO: 150167 - DNA, 1545 bp, Zea Mays
cgggcgcgcgggctccacctgtactcaatcgtcactcagagacgacacccttccattcctcctcctaggctcctaccaatcaatccagcagcacagcaccctataaaatccagccatcacctctgcccacttccagctccaacaagtcacctgctggtctctgagctccctacctatcactctgtcccattgccatccccatcctcctgctgtgagcgtgttgtgtgagcccggccggccggactctgttgacgagtgagaagcaaggatctccatggcgcggtgcaccgggttcgtggagaaggcgaagccctacgtggccatgatctcgctccagttcggctacgccgggatgaacgtgctcaccaaggtgtcgctgaaccagggcatgagccactacgtgctcgtcgtctaccgccacgccttcgccacgctctccatcgcccccttcgccctcgtcctcgagaggaaggtcaggcccaagatgacgtggccaatcttctggcagatcttcgtcctcgcgatgctcgggccggtgatcgaccagaacttctactacgccgggctcaagttcaccggccccacgttcgcctgcgccatgagcaacatcctgccggccatgaccttcgtcctggcagtcatcttcaggatggagaagctgcagatgaggaaggtgacgtgccaggccaaggtcctcgggacggtgctgaccgtggccggcgcgatgctgatgacgctctacaagggcccgctgatgcagctggcgtggacgaccaacaggcacgcatcatcgtcgcgcgcggccgccgaggcccccgccgccgccgccgcggagatcagcggcagggactggttcctcggctcggtgttcgtcatcgtcgccaccctcgcctgggcctccctcttcgtcctgcagacgcacaccatcaagcagtactcggcgcagctgtcgctcaccacgctcgtctgcttcgtcggcacgctgcaggccgtcgtggtcaccttcgccatggagcgccgcgcctccgtctggaccatcggattcgacatgaacctgctcgccgccgcctacgccggcatcgtgacgtcgagcatcgcgtactacgtgcagggcctggtgatccagaagaccgggccggtgttcgcgtcggcgttcagccccctcatgatgatcatcgtcgctgtcatgggctcgttcatcctctccgagaagatctacctcggggccgtcctcggcgccgtgatcatcgtggctgggctctactccgtcctctggggcaaggagaaggagacgcgggagaaggaggcggacgccaagacggcgctgccgatggcagtggtggcgtcgtcgtcgtcttccgacgacgacgacgatggagcagcagggatcgccgccgccggcgtcgttggagatggcgccgcggggtgcacaacgtcgggaatgacggcgtgaggtcatcctccggtgtacgcggagcagctgctagtacagtttgattggcctcagatcgacgtactcccaataattatttgcctccaagcaca

SEQ ID NO: 150168 - DNA, 1796 bp, Zea Mays
ctcaccaacaccaaaaggcacaagcctcgcccctccctccctccctttccaatcctcagaaccaataaaccgtagacgagagaagttacgagcttctccttgtcccgtgtcttttcaaggatagcccgggcgcagccgcagcatttcttggcgtcggtgtccgcgggttggcgactaagcaatggcgacgaggaaccaccgcgccgctgccgctccgcagccggcgaacagaggtgccgcgagggtcgccgggaaacagaatgccgccgccgccgccgccgggacacgccgagccctcggtgacattggcaacgtcgtctccgatgccctcgacagggcgatcaagctgccggaggggatccatcgccccatcaccaggagcttcggcgcccagctcatgaaggccgctttggcgaacaagaacgccgacgccgccgtagctcctgctcagcctgtagcggcgcgcgccgttacgaaaccagctaggaaagtgactacgaagaacgtccctcgtcctggcgctgggcaggctcccaaggagaacaagaagccatcagcagagggtgccgccgccggcagcggccgctctgtgcagaagaacaggaggaagaagcccgcgtgcacgctttcgaccgtcctttctgcgcgttctaaggctgcctgtggccttaccgagaagccaaaggagcccatcgaggacattgacaagttcgacggcgacaaccagcttgctttggtggactacgttgaggacatctacacattctacaagaccgcccagcatgagagccgccccattgactacatgggcaaccagcccgagctcagccccagaatgcgctccatcctcgcggactggctcatcgagtctcaccgaagattccagctcatgccggaaacgctctacctcacaatatacatcgtggaccggtacctgtcgctgcagcccacgccgaggagggagctccagctcgtcggcgtggcagcgttgctgatcgcctgcaaatacgaggagatctgggcaccggaggtaaatgacttaatccatatagccgatggcgcgtttaaccggagccagattcttgccgccgagaaggctattctgaacagcatggagtggaaccttacggtccccaccccgtaccacttcctgctgcggttcgcgaaggctgccggtagtgccgatgaacagcttcagcatacgataaacttctttggagagctcgcgctgatggactacggtatggtgatgaccaatccttcgacggcggctgcttgcgctgtgtacgctgctcgcctcacgttggggaggagtcctctctggacagagaccttgaagcaccacactggcctcaacgagcagcagatcatggaaggcgccaagacactggtcggatctcatgctgctagtgctagccctgatgcgaggctgaaggccgtctaccagaagtacgcgacggagcagtttgggcgtgtggctctgcacccaccggcaccggctgctcttcccgaccttgtctagagtttttacttgacaagctgagggatttggttgagttcgctttgattgacaagttcgagagttgttttcgtatactctattctcgcgagtgtattagacactagtagtaacaactattcataactatatgaataaccacaatgaaaatttatgattggctgaacttctttcgaaagactgtgaggtttatccacagtttttgtaagactgtcagaatgaaacggttcttgattaaaaagagctgctgtcaactgcatgaagaagcatgttttta

SEQ ID NO: 150169 - DNA, 467 bp, Zea Mays
gcttcgagtggtggcatgtatataaggctttcttctgtacaatgatcgtcagggaaggcgccaagacactggtcggatctcatgctgctagtgctagccctgatgcgaggctgaaggccgtctaccagaagtacgcgacggagcagtttgggcgtgtggctctgcacccaccggcaccggctgctcttcccgaccttgtctagagtttttacttgacaagctgagggatttggttgagttcgctttgattgacaagttcgagagttgttttcgtatactctattctcgcgagtgtattagacactagtagtaacaactattcataactatatgaataaccacaatgaaaatttatgattggctgaacttctttcgaaagactgtgaggtttatccacagtttttgtaagactgtcagaatgaaacggttcttgattaaaaagagctgctgtcaactgcatgaagaag

SEQ ID NO: 150170 - DNA, 1577 bp, Zea Mays
cttctccttgtcccgtgtcttttcaaggatagcccgggcgcagccgcagcatttcttggcgtcggtgtccgcgggttggcgactaagcaatggcgacgaggaaccaccgcgccgctgccgctccgcagccggcgaacagaggtgccgcgagggtcgccgggaaacagaatgccgccgccgccgccgccgggacacgccgagccctcggtgacattggcaacgtcgtctccgatgccctcgacagggcgatcaagctgccggaggggatccatcgccccatcaccaggagcttcggcgcccagctcatgaaggccgctttggcgaacaagaacgccgacgccgccgtagctcctgctcagcctgtagcggcgcgcgccgttacgaaaccagctaggaaagtgactacgaagaacgtccctcgtcctggcgctgggcaggctcccaaggctgcctgtggccttaccgagaagccaaaggagcccatcgaggacattgacaagttcgacggcgacaaccagcttgctttggtggactacgttgaggacatctacacattctacaagaccgcccagcatgagagccgccccattgactacatgggcaaccagcccgagctcagccccagaatgcgctccatcctcgcggactggctcatcgagtctcaccgaagattccagctcatgccggaaacgctctacctcacaatatacatcgtggaccggtacctgtcgctgcagcccacgccgaggagggagctccagctcgtcggcgtggcagcgttgctgatcgcctgcaaatacgaggagatctgggcaccggaggtaaatgacttaatccatatagccgatggcgcgtttaaccggagccagattcttgccgccgagaaggctattctgaacagcatggagtggaaccttacggtccccaccccgtaccacttcctgctgcggttcgcgaaggctgccggtagtgccgatgaacagcttcagcatacgataaacttctttggagagctcgcgctgatggactacggtatggtgatgaccaatccttcgacggcggctgcttgcgctgtgtacgctgctcgcctcacgttggggaggagtcctctctggacagagaccttgaagcaccacactggcctcaacgagcagcagatcatggaaggcgccaagacactggtcggatctcatgctgctagtgctagccctgatgcgaggctgaaggccgtctaccagaagtacgcgacggagcagtttgggcgtgtggctctgcacccaccggcaccggctgctcttcccgaccttgtctagagtttttacttgacaagctgagggatttggttgagttcgctttgattgacaagttcgagagttgttttcgtatactctattctcgcgagtgtattagacactagtagtaacaactattcataactatatgaataaccacaatgaaaatttatgattggctgaacttctttcgaaagactgtgaggtttatccacagtttttgtaagactgtcagaatgaaacggttcttgattaaaaagagctgctgtcaactgcatgaagaag

SEQ ID NO: 150171 - DNA, 765 bp, Zea Mays
aaattacttgagaaagcagggatgacaaattgtaatggatgtgcaacaccaatggagtctagaattcagctatctaagagaagtgaagctctagcagtggacaaaactgaatatagaagtataattggtagtctcagatatctacttcatacaagaccagacctctctttcagtgttggatttttgagccagttcatggagtctccaaagcatgatcacaaggtcgcattgaagcgtgttttacgttatctgtcagcggcaacaggttatggactacagtacagtcgaggaagagagtctgagattgattgggtattcaaacagtgacttggccggtgacattgatgatcgccgcagtactataggtgctatatttttcttggggggagtcgagtgtcatggatgtctcagaagcaaaacgcagtggccacatcgtcgtgtgaagcagaatacatggcgagcgcagccgtggcagctcaagctgtgtggttgcagaagctactcgaggaggtcgttggcatccctgctaagccaacgattattctcatggataacacggctgctattgcgttggcaaagaacccagttcaccatgatcgaagcaaacacattgatgtgaaatattattttactagagaatgtgtggaacgtggtgatattgaattggtgcaggttgggactgatgaacagcttgcagatacgttcaccaaagctttaaggaggctgcgtttccaggagattcgcacgaagattggagtcatttag

SEQ ID NO: 150172 - DNA, 1065 bp, Zea Mays
ccgtttgcacggctcgctaattcttcttccgtgccagttgtccttccatggctactgaatcgggaaacccaacccatccactatcttatactcctcccatccctcgctcaccacagcatcgccactactcgctccaccatcccctgaccccgtgcacccgcaccattagctcggcctagcttgcttcgatcatcggctcgatcggttctctgactctgatctgatctggagatcgatctcggccggccggccggctatggacggttcgaagagcaatgctcaccaacaaggcgcggcggtgactagcaccaccagctcggcgggcaagcgcaagggaaaggcggcttcatcttgcggcggcggaaagaagccacctatcaaggtggtgttcgtcggcaaccccgtgcgggtgaagaccagcgtggcgggcttccgcgcgctggtgcaggagctcaccggccgccacgccgacccgtacaagcacagcgttggcgacgccgacgccgacgacagcagcagcggtggcagtggcagcccggtggagctgcaggtgggcggcgcgctgtcatcggactccgcctctgctgccggcgtggcccaagtcatctcagtgccggcttacgacgacgacgacgacgacggcttcgcgccacagctgatcgacaacagctactccgtgttctcgccgcccacgttcctctacggcccgcacggcggcgagctgtgattccaacagtacatgtatgtatgtgtagttgtgtatcgcattctagctagctccaacgagcatcatgtgtatcgtatgtgcatgcgctgcaggctcggtagcacgcaagtgtaatacgtaattaggattgatttctgcacgctagctagctagcaacgcaaatctctgttatgctgccaccggccggcaaagtagtggtacactaatataatgccctccggtttgatgggtggtgcttgtggtgtgtgggagccacgtaatctttgtttggaagggaattgcgttgtacaatgatgaatcgtcaggtattttgagttaacaattccctttcgtgctaa

SEQ ID NO: 150173 - DNA, 2329 bp, Zea Mays
gctgagcaccaccgtgctccaggctggtcgggcaaaaccgcaaaaccattttttttgggtttgttttgaagacgaacaaagcaatgcatgtcgtgtgcgtgatctgctcggccacggtcgcagcggcaagctcggcgtgggtgcacggacgcagggaaaaatttgctattttagcccttttaatgtgggctaaatgctattatgtgatcctctgtttatgacttatgagaccatctgtgtctatgatttatgggcctggtgctaaaatagagaagttggacgcaagcttctgttgtttttctctgttgagcataaacaaggcaacagaaggcaaaagcaagcagccgttacgttcccgccatttcctcccagccttccctttcatggccagcgctcccacccgtccgagacacctccccggttcgctgcgcccgcgcctgcgcgtccgcgtccccggcgcgcgaggcccccgcgtctccgtcgcccccctcgccgtcgccgacatgggcaactgctgcccggggtcgtcgtcgtccgcggagcccgcgccgccgcagccgccggacccctccggctcgtcgcgccccgtggcttcgcctgcctcggtgtcgccgaccgcggcgcccgcgcccgccaggcccccggcccccatcggccccgtgctgggccggcccatggaggacgtgagggccacctacgccgtgggcaaggagctcgggcgcgggcagttcggcgtcacgtcgctgtgcacgcacaaggccacggggcacaggttcgcgtgcaagaccatcagcaagaggaagctgtccaccaaggaggacgtggaggacgtgcggcgcgaggtgcagatcatgtaccacctgtccggccagccgggcgtggtggagctcaagggcgcgtacgaggacaagggctccgtgcacctcgtcatggagctctgcgccggcggcgagctcttcgaccgcatcatcgccaggggccactacaccgagcgcgccgccgcctcgctgctccgcaccatcgtcgagatcgtgcacacctgccactccatgggcgtcatccaccgcgacctcaagcccgagaacttcctcctcctcagcaaggacgaggacgcgccgctcaaggccaccgactttgggctctccgtcttcttcaaggaaggggaggtgttcagggacatcgtcggcagcgcctactacatcgctccggaggtgctgaagcggagctacgggcccgaggccgacatatggagcgtcggcgtcatagtctacatcctgctctccggcgttccgcccttctgggcagagtcggagcacggcatcttcaacgccatcctgagggggcaggtcgacttcaccagcgacccatggccgcgcatctcgcagggcgccaaggacctcgtcaggaagatgctcaaccctgaccccaagcagcggatttctgcatacgacgtcctcaaccatccgtggatcaaggaggacggcgaggcgccggacacgccgctggacaacgcggtcctcggccggctgaagcagttcagggccatgaaccagttcaagaaggcggcgctgcgggtcatcgcggggtgcctgtcggaggaggagatccgtgggctcaaggagatgttcaagagcatggactccgacagcagcggcaccatcaccgtggacgagctgcggagagggctggccaacaagggcaccaagctgagcgaggccgaagtccagcagctcatggaagctgccgacgccgacgggaacgggacgatcgactacgaggagttcatcacggcgacgatgcacatgaaccggatggatcgcgacgagcacctctacaccgcgttccagtacttcgacaaggacaacagcgggtacatcacgatggaagagctggagcaagccctgagggagaagggcctgctggacggccgagacatcaaggagatcgtggcggaagtggacgccgacaacgacgggcggatcaactacaccgagttcgcggcgatgatgaggaaaggagacccggagccgtccaaccccaagaagcggcgcgacatcgtcctgtagaggaggggcgtggagctcgggagcacgtcacgtacgtacggctgctggcaggaatcttcgtcttcgtggtggcggagaaattaagcagacgcgtgcgcgttctatctctggacatgtataatattgcacgcgacaggagcggaggagctgagggggggagtgaccgcgcattattaatatgaaaaaatggcaaccgggtgtcggttattcttgtctgcatgtcgttactcggatgttatagtagaacgaactgttcgtactgc

SEQ ID NO: 150174 - DNA, 2410 bp, Zea Mays
gctgagcaccaccgtgctccaggctggtcgggcaaaaccgcaaaaccattttttttgggtttgttttgaagacgaacaaagcaatgcatgtcgtgtgcgtgatctgctcggccacggtcgcagcggcaagctcggcgtgggtgcacggacgcagggaaaaatttgctattttagcccttttaatgtgggctaaatgctattatgtgatcctctgtttatgacttatgagaccatctgtgtctatgatttatgggcctggtgctaaaatagagaagttggacgcaagcttctgttgtttttctctgttgagcataaacaaggcaacagaaggcaaaagcaagcagccgttacgttcccgccatttcctcccagccttccctttcatggccagcgctcccacccgtccgagaaaggttcccccgcgcgccccaccgctcgcccggacacctccccggttcgctgcgcccgcgcctgcgcgtccgcgtccccggcgcgcgaggcccccgcgtctccgtcgcccccctcgccgtcgccgacatgggcaactgctgcccggggtcgtcgtcgtccgcggagcccgcgccgccgcagccgccggacccctccggctcgtcgcgccccgtggcttcgcctgcctcggtgtcgccgaccgcggcgcccgcgcccgccaggcccccggcccccatcggccccgtgctgggccggcccatggaggacgtgagggccacctacgccgtgggcaaggagctcgggcgcgggcagttcggcgtcacgtcgctgtgcacgcacaaggccacggggcacaggttcgcgtgcaagaccatcagcaagaggaagctgtccaccaaggaggacgtggaggacgtgcggcgcgaggtgcagatcatgtaccacctgtccggccagccgggcgtggtggagctcaagggcgcgtacgaggacaagggctccgtgcacctcgtcatggagctctgcgccggcggcgagctcttcgaccgcatcatcgccaggggccactacaccgagcgcgccgccgcctcgctgctccgcaccatcgtcgagatcgtgcacacctgccactccatgggcgtcatccaccgcgacctcaagcccgagaacttcctcctcctcagcaaggacgaggacgcgccgctcaaggccaccgactttgggctctccgtcttcttcaaggaaggttgatttgcttgctctcactctcctccatggttgcattgcatcatcacattcatatctgttgctctgcatatgcattgcaatgcgatgcaggggaggtgttcagggacatcgtcggcagcgcctactacatcgctccggaggtgctgaagcggagctacgggcccgaggccgacatatggagcgtcggcgtcatagtctacatcctgctctccggcgttccgcccttctgggcagagtcggagcacggcatcttcaacgccatcctgagggggcaggtcgacttcaccagcgacccatggccgcgcatctcgcagggcgccaaggacctcgtcaggaagatgctcaaccctgaccccaagcagcggatttctgcatacgacgtcctcaaccatccgtggatcaaggaggacggcgaggcgccggacacgccgctggacaacgcggtcctcggccggctgaagcagttcagggccatgaaccagttcaagaaggcggcgctgcgggtcatcgcggggtgcctgtcggaggaggagatccgtgggctcaaggagatgttcaagagcatggactccgacagcagcggcaccatcaccgtggacgagctgcggagagggctggccaacaagggcaccaagctgagcgaggccgaagtccagcagctcatggaagctgccgacgccgacgggaacgggacgatcgactacgaggagttcatcacggcgacgatgcacatgaaccggatggatcgcgacgagcacctctacaccgcgttccagtacttcgacaaggacaacagcgggtacatcacgatggaagagctggagcaagccctgagggagaagggcctgctggacggccgagacatcaaggagatcgtggcggaagtggacgccgacaacgacgggcggatcaactacaccgagttcgcggcgatgatgaggaaaggagacccggagccgtccaaccccaagaagcggcgcgacatcgtcctgtagaggaggggcgtggagctcgggagcacgtcacgtacgtacggctgctggcaggaatcttcgtcttcgtggtggcggagaaattaagcagacgcgtgcgcgttctatctctggacatgtataatattgcacgcgacaggagcggaggagctgagggggggagtgaccgcgcattattaatatgaaaaaatggcaaccgggtgtcggttattcttgtctgc

SEQ ID NO: 150175 - DNA, 1585 bp, Zea Mays
cgtctaaacccacgacgcatgcatgcacggacgcacctcaacggtcgagacgccccgacgcctcctatccgacggcggagaaaacacgcgtgagggggcgtgcgactcgccacgttatatttcgtccgccttgctccgcctccggcgcaccattttcgtcagctcctggcgcccggtggctcgccggcgcaaattaagtaattaacccgaactccctggcattctccgcgggcctgtagtcttgtagcctatcgcttgcttcgccgtagcacttgcttaattagggcggtgttcgagaggtgggtgtggtggtgtactagtagtactactcgcctcgcctcgcctcgagggtttgactggcggaggcaggagcggggagtagctgcggcggtccgggagcgcatggggaacgcgagcgccaaggagggggagaacggccacatggcggcgtctccggagccggcggctcccaacggcggcggaggaagcagcagctcggcgggtggcgccgccgcgcgaccgccaccgttgtcgccgccggacgacgtgatgctggagcgtccaccgcccgtgccctatctcttcgtgccgcaggttccagagactccactgcacagacctactgagctctctcctcttctcaaccattcaccagtaaacgaatccaccgaccaccactcccaggagcagggtattccgactttgattacatggagccaaggaggagatgaggtgttcctggaaggatcgtgggataactggacatcgaggagggcacttgagagatctggaaaagatcacgccgtcttgttggttctgccatccggagtctaccattaccggatcatcgtggacggggagctgaggtacatccctgaactacctcacgcagctgacgaaagagggcgagtggccaacgtcctcgatgtccatgactacgtgccagaaagcctcgacagcgtagccgagttcgaagcgcccccgtctcccgtgcacagctacgacctgcattgcccgggcgacgaggagttcgccaaggagccgcccacgctcccgccccagcttctcgtgtccgtcctcgggggggacgtcgatagcgctggccatggcaatcaagctttgaagccacagcacgtcgtcctcgaccacctgttcatcgagaaagggtgggggtcgcagtcgctgctcgccctcggcgtcacccaccggtttgagtccaagtacgtgagctttgtgctctacaagccgttggagaggtgatggtggtactgtctactagctgtgtgtgagtggaagaacagagtggactgctggaggtgaataatgtgtgtgtgtgcccttgtatagaagggaaatgcatgcaggagcttgtagctgtagctgatcttttattttatttttttattttcctttcactttcgacgaaagtaataaattagttgaccatgcatgcatgcttcgtgcaaatctgaatgtttgtgtggtctgaatgcgtgcagatatccggactttgttctgatgtggagacaccatgggaaaaaagaaaaaaaaaggaaaataacgacaccagcaaatcagtggataa

SEQ ID NO: 150176 - DNA, 966 bp, Zea Mays
cacggacgcacctcaacggtcgagacgccccgacgcctcctatccgacggcggagaaaacacgcgtgagggggcgtgcgactcgccacgttatatttcgtccgccttgctccgcctccggcgcaccattttcgtcagctcctggcgcccggtggctcgccggcgcaaattaagttccagagactccactgcacagacctactgagctctctcctcttctcaaccattcaccagtaaacgaatccaccgaccaccactcccaggagcagggtattccgactttgattacatggagccaaggaggagatgaggtgttcctggaaggatcgtgggataactggacatcgaggagggcacttgagagatctggaaaagatcacgccgtcttgttggttctgccatccggagtctaccattaccggatcatcgtggacggggagctgaggtacatccctgaactacctcacgcagctgacgaaagagggcgagtggccaacgtcctcgatgtccatgtcagtaagaatggcattattcaaacctgtgacagttttaaacagcaaagacaagcaaattaccatctctcattctcgtctgtgttctttggacaggactacgtgccagaaagcctcgacagcgtagccgagttcgaagcgcccccgtctcccgtgcacagctacgacctgcattgcccgggcgacgaggagttcgccaaggagccgcccacgctcccgccccagcttctcgtgtccgtcctcgggggggacgtcgatagcgctggccatggcaatcaagctttgaagccacagcacgtcgtcctcgaccacctgttcatcgagaaagggtgggggtcgcagtcgctgctcgccctcggcgtcacccaccggtttgagtccaagtacgtgagctttgtgctctacaagccgttggagaggtgatggtggtactgtctactagctgtgtgtgagtg

SEQ ID NO: 150177 - DNA, 462 bp, Zea Mays
cgggaagaaatgttgtttggtcaaaacagctagactcagagcgcagagggcgtaacctaatcatcaagcggcagtacagtcatgcctccagccgtgtctggtagcctggtagtggtagtaatactagttgttttggagactgcatgcaagttcttttcaaggagtgctgaacaagtttatttatcaagtcctttttaggagtgctgaacaagtttatttatctcattacgcgctgaagaactcaaggcacagcaagctacctgaagccgtttcgttgatcttcgaaccaatggatacctctaatcttcagcgaagtatgcacgtacaaaactctattcagcaagctacctgaccgcctgagtccttattagggactaggagggatggtaatgggtcggttggatggtaatgggtcggttggattcgggtcgggtgaagtaaaactctatccacaattacacg

SEQ ID NO: 150178 - DNA, 793 bp, Zea Mays
aatctgtagttttgggagaggtcggttgaagggtgaagggtggagtttggttgaagggtcgagctatgcttacgttcgtcgattgaagggtggaggttgttttttttccagcaactggattgtatatggatggattggggcctaagttcgattctgcattctgcatgagcaataataagtctgagctattcctgtcaaatgttcttgtttcctgtgtttgttcaataataaccatatcctgtcaaatgttcttggaaaatttagttccctacttccctcataggctacctagtacctactcttttattggcactcctaaatttcttgtttcttattatatttgggctggtgttcttctccagcaactggattatagcagctggtttatatacggatggattggagtcagttcgattctgcttattcggggttccctttttttgtccaaaaaaccatcctatcctgtggaaatttattttactcgtaggctaccttcaacgatttgattgtaatctgcagttttggaggcatcgccacagagataggactttgcagctgaacttgtcggtgaatgattgatcggactttatcctattccacattatttgatgaacgttcatgctgtttaagtgttctaagtggtaactatcaaataaatagttatcagagggtggtcttgctgattgcagatctccaggtggtcttgtgtttgttcagtgtcttctatcttgaagtagataatgattggggcctttattgcaggtcttctcatatttttggatgagcatgtcac

SEQ ID NO: 150179 - DNA, 1650 bp, Zea Mays
gcgctctggttttcatctcttcgcgtcggtgttgctgttcaagcgcctcacctgtccccctgtcttcccctttgccccttcgtcgccgcggcgcgtttgcgttttccaattcttccttgtctatactgtctccgtttggacttcgagctggttcggtttcgacttcggctgatctgttccgctgctgttgcccttccttgttctcgcagatctccatcgggcgttccgctttcgtgcgacgcggggagcgagcctttgttcggttgcggggttgttgggtttgcggtttattttttcccctgcgattcgtctagtcatcgtgtgcagttcgtctagtcatcgtgtcgatcttgtttcgtcccgtcttctcatcgcgtgggttgcaggattggatccgatctggtgttgggagttcgtcatgttcgccagaactcggaagcaggtcagtgttctgtcagatccgacggttcattggttttgtcacttggaaagcatggattcggtggtttcaggcccaatcgtctcccggtgtggtaccaccagaaattgtcacttggacatggattcggtggtttcaggttcaatcgtctcccggtgcggtagcatcagaaaccgatagtgcagttgtggcctgcacaccaggtggatttggagaaccttcggtacattcttatgttaacggctgatctcgcttgtggccttttggttgtttgtcctccttaaacttcagatgcaagaaggtctttgctggttatggagagatcagttgaagggtggaggtttgcttatggttcattcgtcgtttctcattctgatatcatcatattggtgcgaagattagcatttagcaccggacttactctaagcttgattggaaatgctgctagctagatctgcagaggcaacatagttttggaagtaggttgagccgttgactggactggagttcgtagtattggagagaagatcgtttggatatatttacctatcgccgttcatattattaattttctatccgttgcaattttaatttcttacattggggtgatggttttctccagcaacttgattaaatggatggatgggttggaggcaagtttgatcctgcttctgtttaagcaatcagaagttcggaattggtctgagttccttgtgtttgttcactaaccatcctcctgtagatgttctaaaattaactgcacacataagctcccttcaatgcttcgttactgaatctgcagttttgggatatatcaattcagagttgtgtggaggtttgcttacgttccttggttttgatctgatatatatggctatttttatgttgatcatggtggcgtgaagattgccaccagactaagcttgattgtccttaattggaaaaatgcagtagaggcaattgaggtgatgttttggacctgggttgaagctttgacctgactaagttcatgacatgctgataacattgttgggatatatgtatctctcacacttctattggtactcttaatttcttgtttcttatatttgggctgatgtttttctccagcaactggattacaacatctggattgtatatggatggattgaagcctgagtttggtcctgcttctacatgaacaataataagttctgaactattcagggttc

SEQ ID NO: 150180 - DNA, 109 bp, Zea Mays
tttttttcatatgtaagtacaagtgaattcccctttgctgaacaaatagttagctctatcttagacagcaggaacgaaacaactagtactatatgccatggagtttcag

SEQ ID NO: 150181 - DNA, 747 bp, Zea Mays
tgttgactgcattgtttatgaaagtcaagaaaggatgttactgcttctgtgcatttcaaaagaaaatctctctgaacaaacttgtcttctatgtgcttattgtttgaccatttctgtcgtggactagcagtagtgccttatatacatggattctcaatttatcacaagtttgggttcgagttgactcatcctaatttatagatcaataaggttgttgcattgatattaatatgccaaagtcagtggaagcttagtgcttgcttaaatctgtttcaactgggtttcttgaaccttgaccttgagtgaacttgaatggttggttccatttgtgtcatctgtacagcttggtgtttggtcatgcaagctaggatatgattgcttctttttctgtaattctgcactatctccaaattagcatgttcattcttgttataatggtgattgagtagttaggctaatttaacactaggattgattatcttgcatttggttaggtccttgcaaagtggtccaggtaacattggggatgacaatagtaccttaacctagctaggatatgtttggtcatgcaagctatgatgttggaaactgtacataagattgcacgagtgtacactagctgattttttagctgtgcacttgcttaaatttctatgggtctttgttgatggtatgattttttattaaagctggttcctgtatctgttcagtcctcgagatcattaggtattcgaattaggaatacac

SEQ ID NO: 150182 - DNA, 1529 bp, Zea Mays
attggtagtccaacggtcactatacttgttttggtttgggatttctgtggatgcttttgtctactttatctatgttgttgtggttgcttttacatgtggttgtatggtaagtttggcaattggaaatccctgtagcgaaaaactgatatttaaaaagtcattctggttgtgttggtttcatcacttacttccagtgatttcagatctgaatgattggctaacattctgccctccatggatactgctggtgtagcagtagtgaagcaaggttcaagatctggatttatttggtactgtatatcaaatgatcatagtatgtggttgtgtcctttagaggtgcaggacattggaggtggattttcctcgctctccgattattcatctcggcgcgtttgtgttttccatttcttccttctctgtacactccatttcgacttcgagttgggtcagtttcttctctggctgatctcttctgctgctgttgcggttctgcagatccctttggggcgttccgctttcctgcgaccctgggagtgagcctgagttgtggcagggtcgttgggtttgtagtttttttttctgcaatccgtctagtttttgtgtcgatcttgtttcgtcttcgctttcttggtgcgtgggttgcaggattggatccgatctggtgctgggagttcgtcgtggtgtcgtgtggcaatctgtttgcccaagttcagaggcaggtcagtattctgttagatccaacggttcattggttttgtcgcttggacatggatttggtggtttcaggctcaattgtctgtccctggtgtggtaccatcagaatcagatagcgcagtcgtcgcttgtgcaccaggtgaatttggagaccttcgttcttatgttaacgactgatctcgcttgtggccttttggttgttttgtcctcaaacttcatcagatgcagaagggtcctttctggttatggagagatcagttgaagggtggagatttgcttatggctcacttgttgtttctcattctaatatcatcatattggtgcgaagattattagaaccagacttgctctaagcttgattggaaatgctgctggttagatctgcaggggcaacagagttttgtaaagtagattgaggctttgactcgaatggagttcgtagtatcatcgatgagatcgtttggataaatttacctatcgttcttcacattcttaaatgtctatctgctgattggaaatgttgctggttggatctgcaggggcaaccgagttttggacattcttaaatgtctatctgctgaatggagttcatagtatcggcgataagatcgtttgaattaatttacctatcactcttcatattcttagatttctatccgctgccattttaattccttatgttgggattatgttgggatggtggttttctccagcaactcgatttgtggatggatgggttggagccttggaggcgagttagatcctgcttcttcttttgctatcagaagtttggaaatgttcagagttgtttgttc

SEQ ID NO: 150183 - DNA, 380 bp, Zea Mays
gaggcatcgccacagagataggactttgcagctgaactcgtcggtgaatgattgatcggactttatcgtattccacatcaattgatgaatgttcatgctgtttaagtgttctcagttctcactatcaaatagatagttaccagagggtggtcttgctgattgcagatctccaggtgggatacttgcacgggcacagaaggatacagatctattcaaacctacaatgacctttaactcattgtgtttgttcagtgtcttctatcttgaagtagataatgatcggggcctttattgcaggtcttctcatatttttggatgggcttgtcatgcggaatatgttgatagaagtttctgggcatgtttgggatgtgggagattta

SEQ ID NO: 150184 - DNA, 311 bp, Zea Mays
gcattgactggagtgggagctcgtagcatcggcgagaatatcgtttggatatatttacctacctctcttcatattattaaatttctatccgctgcagttttacattggggtgatgattttctacagcaactcatggatggatgggttggaggcgagtttgatcctgcttctgcttgtgcaatcagaagtttggaattgttcagagttccttgtgtttgttcactgaccatcctcctgtcaatgttctttgaaaattaacttcacacataggctcccttaatgcttcgttagtgaatctgcagttttgggag

SEQ ID NO: 150185 - DNA, 907 bp, Zea Mays
gaactattcagggttccctttttgttcaaaaaacagttctaacttctatcctgtcaaatgttagttcactcgtaggctaccttcaatgattctattgtgatctgcagttttggaggcattacaacagagataggacttcgcagctgaacttgtcgacgaatgattggacttcatcctatcccacattatttgatgaacgttcatgctgtttaagtgttctaagtggtaactatcaaatatatagttaccagagggcggtcttgctgattgcagatctctaggtgggatatttgcatgggcacagaaaggaacccgatcaattcaaacctacaacaacctttaactctcactgtgtttgttcagtgtgttctaccttgaagtagataatgattggggtcttcattgcagtcttctcctatttttgcatgggcttgtcatgctgcacggaatatgggctgagtactaaacttatccaatttacaaaatgctagtatatgacccatgatgaaaattcggatacttctaatttaatctgtagttgtagaaggcactgggtatgtttgggacgtgggagattcaagcagatatgggtagaactacaactttgatttaatcaatcgtgtttctgcttcatcatgctatatatgctctgactgaagctttaattcttgtgttgctatcatttctgcgttctgcagatcatttagctcaagtaattggtagtccaacggtcatgatacttgttttggtttgggattagctttatctacatttttgtgctcgcttttacatgtggttgcagggtaagtttggcaattggaaatccctgtagcgaagaactgatatttaaaactgggggcaggtcagagatcattccggttgcgttggttccatcacttgttttcag

SEQ ID NO: 150186 - DNA, 261 bp, Zea Mays
gatctgcagaggcaacttaatattggaaataaattggggcgttgactgcactgcaattcgtagtattggcgagaagatcattaaatggatggatgggttggaggcgagtttgatcctgcttctgcttgtgcaatcagaagtttggaattgttcagagttccttgtgtttgttcattaaccatccttctgtcaatgttcttcgaaaactaacttcacacataggctccctttaatgctttgttagtgaatctgcagttttgg

SEQ ID NO: 150187 - DNA, 615 bp, Zea Mays
gcgttctggttttcatctcttcgcgtccgtgttgctgttcaagcgcctcacctgtccccctgtcttcccctttgccccttcgtcgccgcagcacgtttgcgttttccaattcttccttgtctatactctctccgtctcgacttcgagctgggtcggtttcgacttcggctgatctgttccgctgctgttgcccttccttgttctcgcagatctccatcgggcgttccgctttcgtgcgacgcggggagcgagcctttgttcggtggcggggttgttgggtttgcggtttattttttccctgcaattcgtctagtcatcgtgtgtagttcgtctagtcatcgtgtcgatcttgtttcgtctcgccttctcatcgcgtgggttgcaggattggatccgatctggtgttgggagttcgtcatgttcgcctgaactcggaggcaggtcagtgttctgtcagatccgacggttcattggttttgtcacttggaaagcatggattcggtggtttcaggcccaatcgtctcccggtgtggtaccaccagaaattgtcacttggacatggattcggtggtttcaggtcaatcgtctcccggtgcgggtagcgtcagaaaccga

SEQ ID NO: 150188 - DNA, 1764 bp, Zea Mays
ggatcgtcgcccctccctccgtctccacgactccacccccgcccctaaaccaaccacgtcggcgtccatctcctccacaacacaacacccctccctttccaggattctcctctcctccaaaagatcggtggcgggtgagacgagaaagaaagaagctgacaaaggcgagaagggatagagagaggagagaaagggaaggtagaaactggacagaaagtttctccccgctagaagtagctcggcggtgagggagcgagagacctgccgcctacccttgccccaccgtttttttcataccgtctcgccggaatcctgctttattttcccggccagtccaccgccttctcgggctaccacgctgatccggcgtcgtctgcggtccttccgaccaactcttcaatcttgtgaattgcttttcgcccagttagggcagatcaccattccttgcaggagttcgttgccgtctctccaatcctccctggctcgactgctcagtggtgactgatgtggtccactgccctgccctgcacctgcaagttagtttcactcgtgatccgtcagcttgccacccagcaaccgctgattatcagaaatccacttctcaaagcttcaaggagcatccttcgaacaagttcctgattccttcgcctcccgccctccccgtttcttctctggcatccttgtccgttgaccacagagggaagaaatctgttccgggcaggcaggcgcattctccgccacaatggacgatggagctgacctcccctgccagttgctcttctcccacccggagatgcctcacagcttcgacgagttcttcagcagcgccacgaccacgaccacctgcacccacacgcacagctgcgaccctccgggcccctcggccgccatgcatacccacacgtgcctgcacacgcacacccaggtcctgggcagcggcggggaggacgacggctcagcgaagccgcggaggcccctgggaaacagggaagccgtgcgcaagtaccgcgagaagaagaaggcgcgcgcggccttcctggaaggggaggtcaagaagctgcgcgccgccaaccagcagctcgtgcggcggctgcaagaccacgcggctctggaggcggaggtggcgaggctcaggggcctcctgctcgacgtccggggcaggatcgacgccgaggtcggcgtgtccccgtttcagaggccatgcagcgcgggctctgtggagtgcggcgctgatccagctctgcgcttcgatggcagctcggaggtagtaggaggtggtggctgggagaagagctcaagccctcaagttgcggactgcaggatcgatgaagggggaggagggatgtcacgggaacttgatgttctagaaggtttgcgtcactccattgatgctggggcaacctttgtgagttctgattctcttgctgaacgatcgtgtttgcctggttgacagtttcggggcctctgccagcttctttgggctttgctttaaagataaattaaattattcatggatttaggagaatgaggaaccgacagtgagtagaactatcttcgcatcgctgtggtttatgtttcttatgctggtgttcagtgtgtatatatagggtacagaatactttcatatgagcactgaagaaatcgaaattgacaatgtttcatgcgaaattgtactgcgggtatgtaaatgaagtgcgcctgacttctgacttgtagcctgtttgtgcttagctgaaatattattaagctattaatataaaatgc

SEQ ID NO: 150189 - DNA, 512 bp, Zea Mays
aacactgcctttgccggtcccaagcccggatgagaaaatgtggagggaactgcagggtttcttcttagtcccatgaatggtatcagggtactgggaagaaatgttgtttggtcaaaacagctggactctgagagctcagacgggcgtaacctaaccatcaagcgcaagcggcagtacggtcacgtctccagacgggcgttacctaaccatcaactgcaagctggtagcctggtagtaatactggttcacggctgcctgcatgcaagttcttttttcccctgttgaacaagtttatttatctcattacccgctgaagaactcaacgcacagcaagctacagctacctgaagccgtttggttaatcatcgaaacaatggatacctctaatcttcttcaaagtaagccatgtacaaaagggacttaggtccttccctgggagatgtctgtaccgatggactagcttgactttagtgatgtagctgttacctggtcttaatttgttcttgtccttc

SEQ ID NO: 150190 - DNA, 2948 bp, Zea Mays
ggatgtggtgggagatttaagcagatatgggtagaattacagcactaactttcatttaatcaaacttgtttctgctttatcattctatatgcttcaactgaagctttaactcttgtgctgctggaatttctgtgttctgcagatcatttagctcaaataattggtagtgggtcacgatacttgttttggtttgggatttctatggatgcttttgtctagcttatctatgttgttgtggttgcttttacatgtggttgtagggtaagtttggcaattaaaaatcctgtatttaaaactggggacaggtcagaatgtcattccggttgtgttgatgcaaaatgaaaggtgggctggttttgtcctcctagatgcggaaggaaaggtctgctggttatggagagatcggttgaagggtggagatttgtttacgttcgttggttttgatttgttacatggatattcttatgtcaatcatgggggtgtgaagatagccacctgattaattagaagcttgatgattgtccttgattggaaaaatgatgtagaggcaacataggtgatgttttggacgtagattgaagctttgactgaactaacttcatggcatgctctcttttattggtactcttaaatttcttgtttcttatttctgggcgggtgttcttctccagcaactggattacagcaactggattgcatatggatggatttggggcctgatttggattctgcttctgcgtcagcaataataattctgaactattcagggttccctgtgtttgttcaataactaacctaccctgtcaaatgttctttgaaaatttagttccctcataaactatctactcttcttgttttttatatttgggctggtgtttctctccaacaactggagttacaacatctggattgtatatgaatggattggagcctgagctcgattctgcttttgcatgagcaataataataagttctaaactattcagggttcaaaaaaaatcatcctatcctgtcaaatgttctttgaaatttagttcactcgtaggctaccttcaaagatatgattgtaatctgcagttttggaggcatcgcaatggagataggactttgcagttgaacttggcggcaaatgatcggacttcgtatcccacattatttgatgaatgttcatgttgtttaagtgttctcggttctcactatcaaattgatagttaccagagggggtggtcttgctgattgcagatctctaggtgggatacttgcatgggcaccgaaagatccagatctattcaaacctacaacaacctttagctcattgtgtttgttcagtgtcttctacctggaagtagataatgattggggtcattgttgcaggtcttctcatatttttgcatgggcttgttacacggaatatgtgttgggagtactaaacttatctaatttacaaaatgcaatgctagtatatgaaccatgatgaaaattcggttacttctaatttaatctgtagtggtagaaggcactggacatgtttgggacttgggagattcaagcagagatgggtagaactacaacactacaacttccattcaatcaaactgtttctgctttatcatgctatatgcttctgtggaagctttaaattcttgtgctgcaggtcatttagctcaagtaattgatagtccaacggtcatgatatttggtttgggattcctgtggatgctttcgtctggctttagctatgtttttctggttgcttttacatgtggttgcagaataattttggcaattggaaatccatgtatcaaacaactgatattcgaaactgggggcaggtcagagataattccggttgtgttggtttcgtcacttgtgttatcagtgatttaagatctgactggttggctaacattctggctctccatggatattgctgatgtagtgatgtagtaaagcaaggtttttgatacctgggtttattcgtatatcaaatgatcgtagtgtgtgttttgtgtcatttagggatgcaggctgacattggaggcggattttcctcaattggagatataacaatttggaaataaattgtgacacttgacctctcacttataacttctgtctttggcctgtaatcacttgttatgtttccagccactttaactatagcatacggcattgacgcctaggagttcttttgtgctacaacaatctaaattacaaggatgcttctaattcttcatttctgtcaacagtcctatccagttactttcttcaaccagtaactctctgtgctgcaacaatctaaattacaaggattcttctaattcttcatttctgctgccaacagtcgtatccagttacttccttcaacctgttactcttcaagtttgtgcagatgtgacacacagaagctgagatagaatttccaaccatctatgccgtcttcaaagcccatcactgttccactggccatttatttgatttgccttggatttgaaggttttttaaggctatcactgaaccaaaatagacaaaccatagatggtctctttggaaaatgtagatttagcacttgaaattttaaagttcagtctgatcctgatcataatatgtgcctatcttccgaattctactacctccaattttgctagccagagaactttcagatagtgtgcattgaagttcaagcttgattacttgtactgatctgctgtttcggatgctttggatgctccatgctagttatataatccacatgatcacaaccaagacgatacattgttcagagattgcactaactactgttcctgaatattgactgcatatcactttccatttcacttgtgatttggattgttggtggtttgcttggtttccagttatttgaaagcattaatgcttggatgttaggagtgatgaggcactcattacgatactcttcaatctaacca

SEQ ID NO: 150191 - DNA, 3422 bp, Zea Mays
tttcttacattggggtgatggttttctccagcaactcgattaaatggatggattggtggaggcgagtttgatcctgcttctgcttgtgtaatcagtagttcggaattgttcagagttccttgtgtttgttcactaaccatccttctgtcaatgttcttcgaaaactaacttcacacataggctccctttaatgtttcgttagtgtatctgcagttttgggagacatcactacagagttcatccccctaaatgcataatggaagtccttgctggtattgtcctcctagatgcaaaaggaaagatcccttggttatgaatagatcggttgaagggtggaggtttgcttatgttccttggttttgatctgctatatggctatttttatgttagcaagtttgatccagcttctgcttgtgcaatcagaacttctgaattgtttagagttccttgtgtttgttcactaaccatcctcctgtcgatgttctttgaaaattaacttcacacataggctcccttaatgcttcgttagtgtctgcagttttgggagatgccactccagagttggtccccctagatgcaaaatggaaggtccttgctggtttgtcctagatgcaaaaggaagatcccttggttatggatagatcggttgaagggtggaggtttgcttacgttccttggttttggtctgatatatggctatttttatgtcaatcacggtggcgtgaagatcgccaccggactaattagaagcttggttgtccttaattggaataatgtagaggcaactgaggtgatgttttggacgtagattgaagctttgaccggactaagttcatgtcatgcagataacatcgttgggatatatgtatctctcactcttctattggcactcttaaatttcttatttcttatatttcggctgatgtttttctccagcaactggattacaacatctggattgtatatggatggattggagcctgagtttggttctgcttctgcatgagcaataataagttctgaactattcaggggtccctttttgttcaaagaacaattctatcctgtcaaatgttagttcactcaggctacctaatgatcggactttatcctatcccacattatttgatgaacgttcatgctgtttgagtgttctaagttctcactaccaaatagatagttaccagagggtggtcctgctgattgcagatctctaggtgggatatttgcatgggcacagaaggaaccagatctattcaaacctacaacgaactttaactctcattgtgtttgttcagtggttctaccttgaagtagataaacttatccaatttacaaaatgctagtatatgaaccatgatgaaaatttggatacttctattttaatctgcacttctgcagtggtagaaggcactggatatgtttgggacgtaggagattcaagctgatatgggtagaactacaacttcgatttaatcgaacttgtttctgctttatcatgctatatgcattaactgaagctttaattcttgtgctgctgtcatttctgtgttctgcagatcatttagctcaagtaattggtagtccaacggtcatgatacttgttttggtttgggattagctttatctacatttttgtcctcgcttttacatgtgtttgcagggtaagtttggcaattggaaatccctgtagcgaagaactgatatttaaaactggggcaggttagaaatcattccggttgtgttggttccatcacttgttttcagtgatttcatatctgaatgattggctaacattctgactctccaatgatatcgctggaacagtagtagtagtattagcagcaaggttcgagatgcggacattggaggtggattttccttgcactctggtttttcttctcttcgtgtcggtgttgctattcaagcaccttgcctgtcccgtcttgccctttgtcacttcgtcactggcgtgtttgcgttttccatttcttccttctctgtactctctgtttcgacttcgagctgggatggtttcttctccggctgatctgttctgctgctgttgcggttacgtgctcttgcagatccccttggggcattctgctttcgtgccacgcgggagtgggcctgtgtttggtggcgggattgttggatttgcggtttatttttaaggcaaatcgtctagttatcgtcgatcttgtttcgtcttcgccttctcagcatgtcggttgcaggattggatctgatctgagttcgtcatgacgttgtgtggcgatctgtttgtctgagttcggagataggttagtattctgtcagatccaatggttcattggttttgtcacttggacatggattcggtggtttcaggctcaattgttcatctcctgttgtggtaccatcagaaaccgatagtgcagttgtagcctgcataccaggtgaattgtgtggagaccttcagtccattcttatgttaactgctgatctcgcttgtggccttctggttgtttgtccttcttaaacttcagatgcaaggagggtccttgctggttatggaaagatcagttgaatggtggaggtttgcttatggttcattcgtcgtttctcattctgatatcatcatattggtgcaaagattagcaccagacttgctctaagcttgattggaaatgctgctggctagatctgcagaggcaacataattttggaggtagattgaggcgttgactggagtggagtttgtagcatcggcgaggatatcagttggatatatttacctatcgctcttcatattattaaatttctatctgctgcaattttaatttcttacattggggtgatggttttctccagcaactcgattatatggatggatgggttggaggcgagttttgatcctgcttgtgcaatcagaagttcggaattgttcagagttccttatgtttgttcactaaccatcctgctgtcgatgttctttgaaaatcaacttcacacacaggctcccttaatgctttgttagtgaatctgcggttttgggagaggttgaagggtggaggtttgcttacatccgttggttttgaaatgttttatggctatttttatgtcaatcatggtgccgtgaagattgccacggactaattagaagcttgattgtccttaattgaaaaaatgctgtagagggctaaaggtaacagaggtgatgttttggacgtagattgaagctttgactggactaagttcatggcatgccgataacatcatttggatatatgtatctcactttttattggtactcaaatttcttgtttcttatattcgggctggtgtttttttccagcaactgcattgtatatggatagaagtcttctcatattcttggatgggcttgtcactcggaatgtgttgagtaaacttatccaatt

SEQ ID NO: 150192 - DNA, 819 bp, Zea Mays
cataaatagggcctacccgactactccttcccctcgcgctctgccctttgcgccttcgtcaccgcgacgcgcttgcgttttccaatccttgtcttatactccgtttcgacttcgagctgggtcgatttcttcttcagctgattccttgttctcgcagatctccatcgggcgttccgctttcgtgcgacgcggggagcgagcctgtgttcggtggcggggttattgagtttgccgtttatttttttcctgcaattcgtctagttatcgtgtgcaattcgtctagtcatcgtgtcgatcttgtttcgtctcgcctcctcagcgtgtgggttgcaggattggatccgatctggtgtggggagttcgtcatgttcgcctggactcggaggcaggtcagtattctgtcagatccaacggttcattggttgtcacttggacatggattcggtggtttcaggcccaatcatctcccggtggggtaccaccagaaattgtcacttggacatggatttgaagatttcaggcttaatcgtctcccggtgcggtagcatcagaaaccgataatgcagttatagcctgcacaccaggtggatttggagaaccttcggtccgttcttatgttaacggctgatctcgcttctggtcttttggttgtttgtcctccttaaacttcagatgcatgaagggtccttgctggttatggagagatcatttgaagggtggaggtttgctattatggttcattcgccgtttctcattcctattcatcatattgtcggaagattagcaccgaacttactctaagcttcgttggaaatgctg

SEQ ID NO: 150193 - DNA, 3023 bp, Zea Mays
gacagcactccggagctccaccattcgattgggcaactcgtcaccgtaccaaccaaaccatcattccagccgcggcgggacacaccgcctccgccgaactaacgcgacgacgacgcacggcggcctcgtccggcaccggcaggagcgcgatggggcagaagcgcgccttgctggtgggcatcaactacctgggcacggacggggagctgaagggatgcctcaacgacgtggcccgcatgcgccgctgcctggtgggccgcttcgggttcgacgaggccgacatccgtgtcctggccgacgccgacccgtccacgccgccgcccactggggccaacatccggctggagctcgagcggctcgtggcgggcgcgcgccccggggacgcgctcttcttccactacagcggccacggcctgcagctccccgccgagactggggaggacgacgacaccgggtacgacgagtgcatcgtgccatgcgacctcaacttgatcaaagaccaagatttcacggatctcgtggccaaggtccctgacggctgccgcttcaccatggtctcggactcgtgccacagcggcggcctgatcgacaagaccaaggagcaaatcgggaacagcaccaagcagaacagaacccagcagcgccgagagcgcgaaatgaagcctcctcctcccgctcccggttccgcactccgcgtctccctcgcgcgaatcgtccgtggcgtgctggagtctctgggtgtgcaagtgcgaaggggcggcgatccaagatcacacaaaggacaggggaaatcgaagccaccgagcccccacacgtcgccatcgccgtgatcgattataccgccgtctcctccccccgcagcccgcacccaccccaccggaaccgtcgtcccgacctctcgccagcgataagcaaatccccgcctcactctctcgtccacagacaaagccacgacccacaagtgcccccctcctcccgcgctcccaaatcactccctctctgtctctccactccactcgccgccgccgccgcccgaatctcaatggcgtccgcggccgccccgccaacctccctctccctcgcggcccgtgcggcaagcagggcggccgccgccccgctccgcaggggaggcctcgccgcggcgcgccagccggcgcggtcgctggcgttcgcggcgggcgacgcgcggctcgcggtccacgtcgcgtcgcggtgccggcaggcgtcctccgcgcgcggcacgcgggccatggccaccatggcgaagaagagcgtcggggacctcacggaggccgacctcaaggggaagcgcgtcttcgtgcgtgccgacctcaacgtgccgctcgacgagaaccagaacatcaccgacgacacccgcatccgggccgccatccccaccatccagtacctcctcggcaagggcgccaaagtcatcctctcaagccacttgggtcgccctaagggttttacacccaagtttagcttagccccccttgttgcacggttgtctgagcttcttggcattcaggtgcaaaaagccgacgatgttattggccctgaagttgagaagctggtggccgccttgcccaatggtggggttttgctccttgagaacgtaagattctacaaggaagaggagaagaatgacccagagtttgcgcagaagcttgcctccgtagcagatctttacgttaatgacgcgtttggaacagcccacagggcacatgcatcgactgagggagttacaaagttcttgaagccttctgttgcagggttccttttgcagaaggagcttgactaccttgtcggagctgtttcaagccctacacgcccatttgctgccatcgtgggtggttcaaaggtgtcatccaagatcggggttattgaatccttgttggagaagtgtgatatccttctcttgggtggtggtatgatcttcacattttacaaggcacaaggtctttctgtcggtgcttcgttggttgaggaagacaaactcgatcttgcaacatctctacttgcaaaggctaaggaaaagggtgtctcccttatgttgccaaccgatgttgtcatcgctgataagtttgctcctgatgctaacagccagattgttccagcatctgcaattcctgatggttggatggggctggatattggcccagattccattgctgcattcaacgcagccctggaaacaacccagactgtcatctggaacgggcccatgggtgtttttgaatatgacaagttcgctataggaactgaggctgtggcaaagaagttggcagaacttagccgcaagggtgtgacaactatcatcggaggtggagactctgtcgccgccgttgagaaggtcggagttgctgacgttatgagccacatttccaccggaggtggtgccagcttggaattgttggaaggaaaggagcttccaggagttactgcattggatgaagcagccactgtgactgtatgaagcaagttttcattttgtttcatcttcttttttggaagttaccgggggagggactcccacctgaataaggtgcgcaaggccaggattgttggctcaaccacagggagcgcacgccaccgcatcatcttcatgtaccattgtatacttgctacattcttgcttgctcctcctcagccgctcgaaatgtaggagatcaatgatttatagagctctggaaatcgtttgaacaaggagtaagcgacccaagtaatatgcttactgagtcatctttcctttgtgacgtaacaaattacataaaaacccttcgaaggtaacctagcctattcaaccattggtaactaggagttttatcctttgtgcaccaggaccagctttgccgagctaagtgtgaattttcttttctgttctttgtcaaagaagcaaactctagcgtcatgcctcgttagaatctagattttacgttatggagttctgctgctgaatctttttctgggccatgacattgtaaaattactgtttggtctctggcacaattttttttcgcttt

SEQ ID NO: 150194 - DNA, 1236 bp, Zea Mays
acacacccggtcagcgacagcctcaaagcccaggcccagaaacctacctccccgtttcacgaggcgcggccattagtagccagtagccacagtccacagagactgggagcggaggaaggaggaaggggaggtgcggccagggcgccaagccagcaggcagtggtataaaagagagagcgagttgttactcccaccgctgccttgccgttgccggtgccggtgccgacaccaaccaagcagctacccccactcgccggccaaccacacagggcgcgcggtggggatgcagcagatggagtgggacatgagaggaggagggcacggtagcgctgtcggggacggtgggcctggtggacgcggccttactgtcggaggcggcgtcgctctcgctgtcgggggaggggaccagcagcgcgtggaggcgcactaccgcggcgtccggaagcggccgtggggtcggtacgcggccgagatccgcgacccctggaggaagacgcgcgtgtggctgggcacctacgacacgcccgtcgaggccgccatggcctacgaccgcgccgccgtcgcgctgcgcggctccaaggccaggaccaacttcaccgcgggccgcggcggcgcccgggccacgcccgtccaggcccgcccgctcccgcaccccgcgctggcgcccggccacttcagcgggctcgacgccacacactcgtcgccctggcacgtcgtctatctcccaccgcccaggttgcaccagcaggccctggcgccgccgatgcccctcgtggcagtggcaggcgacgtcgccacgtcgctgccgtccacggcgctggagctccggacggggcccaaggccctcccgttcgacctcaacgaaccgccgtcgttgctgttcggctcgctgtctccgtgaacgcacatggagacggagctctgtagtgtcaggtagggatcgtggaccattggacgcagtggtaggattgatcagtgagggtaatcggaaatggtggtcatgggtccggttgtatatatactagcactctagcagcacctatttaaggaaatcttgcctttctcgtcttcgttcgtgttcttgttcttccatctccgttcggtgtctcgtcggcgacgcactttttcctggttgttttgtttggtaaaaacaaaggaggcgcatactgttgccaggagctctttctccttttcgttgtaaacttgtccctatttattagtttgagacgccaattt

SEQ ID NO: 150195 - DNA, 324 bp, Zea Mays
atgggactactcgctcgagttggatatggctacgctaggcggctaacgccggcaacactttattatcacgcgcagccagccgcgcgccaaaagttggtggtgcccactggtcccgcaggcctagccctaaaacttagctgggccgcggatcccaagaagaccaagaaaagtcggacagacggtcaaaagtttttgccgcggctgcaggcaaatgtgcctctttatgtgcagttacccaatcagtttgctttgcccctggttggagagctcggaaatactgcagcacactttttgtttacggtactgaccagtgtcaaggtctag

SEQ ID NO: 150196 - DNA, 1193 bp, Zea Mays
gttgccgctccaccacccgctctcgccattgccaccctttttaacccccccttcctctcctccaccaccgctataagtccctcctccgctctcctctcccacctcaaatcccagacgccacgccacccaacacatacaaacacacgcacgcgcgcgcgcgcgcctcccgctgttccgcaaaacaaaggaaacgaaggagaggaggccatggcgccgagaacgtcagagaaaaccatggcaccggcggcggccgctgccacggggctcgcgctcagcgtcggcggcggcggcggggccggcggcccgcactacagaggcgtgaggaagcggccgtggggccggtacgcggcggagatccgcgacccggcgaagaagagccgggtgtggctcggcacctacgacacggccgaggacgccgcgcgggcctacgacgccgccgcgcgcgagtaccgcggcgccaaggccaagaccaacttcccttacccctcgtgcgtgcccctctccgcagccggttgccggagcagcaacagcagcaccgtcgagtccttcagcagcgacgcgcaggcgcccatgcaggccatgccgctcccgccgtcgctcgagctggacctgttccaccgcgcggcggccgcggccacgggcacgggcgctgccgccgtacgcttccctttcggcagcatccccgttacgcacccgtactacttcttcgggcaggccgcagccgcagccgcggaagcagggtgccgtgtgctcaagctggcgccggcggtcaccgtggcgcagagcgactccgactgttcgtcggtagtggatctgtcgccgtcgccaccggccgctgtgtcggcgaggaagcccgccgcgttcgatctcgacctgaactgctcaccgccgacggaggcggaagcctagtcgtcgaagcttttaatgactgtctgtcttcttagttctttcttctcctttttctcgaggaaaattcggtactactaagctgagagacgctctcctccgacagacgacgtcgacgacgggcatttttgtaaatagtttttgcgccgggacctttttagtttatgatgaaagctgtattgtcaccgaagacaggtcctgccggcgttgttatggaccggattactatattatattatgcactactagtattttgatagccatgagaaacggccggccgagaaaac

SEQ ID NO: 150197 - DNA, 1035 bp, Zea Mays
ttctcgtacagcgaagtagcgaacaatgcttaccgggaggacttggtcaccggaaacatatgtgcattttcttcctcttcctcacctcaagttcgggcaatatttacgggctgcgttggagccgttcgggagacactgtgccccctacgttcggtccggggagatcccggagatataaggagcaccgttggagagagcctaacagcgttgattggtgggtggaggttagacaccagaggctgatggagcagaggtcgtaggcacaaataggtggaggccatggaggcgcagtaggagccgtgaattggtggagcggaaggggctggagtgacttgatgaggcagcaggacttgccgctggattccaggaagcagaaaccatataagcaatgaagaggccgtgcgaggggttgtgtgagaggctgccgcagtggactgtggaacttggcggaggttgtcacaactcatgaacatttcgtcgagaaccaatctagcaagctagccggcctagaagtggagatagctgatgaggtctccggtgcaactgaagcaaaagaggttactacaccaatgagcagtgccagggcttttccctaagaaacattgacatgaatgtagatccaactgatgaagaggatgagattacagtgccacccccaagccccagtcatcaggtccagcaactaagttagctgcagccagtttaggactaactgctccagcgactagttccattgcaggcattgcaggactatctgtcccactttctgggtgcttgggaactgcctgacatgaacgatatggagatgtgccatgtccagtttgctttgtcaaaaaaaaaatattggagaggatggggattttgacaatcaagacttgttccacctctatagcttcagaggggataagtaggatagctccagtttgttttgtcagccttgcggctgaactgtggaaagctgagcaccgtggtgttcgatgttcttagcaggttctccttatgggttagccaatttcaactgtgtcttgaagcctg

SEQ ID NO: 150198 - DNA, 1738 bp, Zea Mays
ttctcgtacagcgaagtagcgaacaatgcttaccgggaggacttggtcaccggaaacatatgtgcattttcttcctcttcctcacctcaagttcgggcaatatttacgggctgcgttggagccgttcgggagacactgtgccccctacgttcggtccggggagatcccggagatataaggagcaccgttggagagagcctaacagcgttgattggtgggtggaggttagacaccagaggctgatggagcagaggtcgtaggcacaaataggtggaggccatggaggcgcagtaggagccgtgaattggtggagcggaaggggctggagtgacttgatgaggcagcaggacttgccgctggattccaggaagcagttcatacgaacatagtatgtttatgactgcttgggggaagtagtcagcgaagttccagacatcggtgcatctgatgttattgctgatgataagcttggcaaagggcaaccttttatagctgccaagggagtggattaatcgccggttggagattgcatcatacattccttataatggctagtttggaaactttatcccctagggatcctagacttttcctgggatagttaatccatggaccatgggtatgctattttacttagccacttagttctccaccgggggctttccatcctgttacacctgaagtatctgaagaagacacctgaagtatctgacgaaagggaatggcgaaggtcttctctgaagctttgtgtcgggtgcataacagtgaatgtaataaggaagaatgtattcagtattcatatcctggtagtgtatgtacatagtaccggtagtggtgtacgtatacatacagttggtcgtataaccgacctaacaggagtccatatatgctgtaatgtctggagaagaaaattatgaaataaacaaaaacacaaattacatgtctgtcgagttggtgttccatctcccagcagacgctcatgtctcggtctctcgccggggccaagggccttaacactagtgctgggaattgggccgtgccgggccggcccggcccaagcccatcgtgcttcgtgccaaacgggttcgggccaagaaagcccaaacaatttttgggccgtgccgtgccagcccgaagtgtaaaaacagtggcccagcccggccctaaaccacgtcgtgccttcgttgggccgtgccggcccaagcccggtccgtatatttgaccacataaaatcaaaatattatagccatataaagttcatatcttactaaattaaagatattaaacaattatagcatcatttaaccacataaactctaaatataacaacaatataaactcaatatcttactaaattaaagagattaaacagtttgggcttaattgggccgtgccggcccaagcccggcccatctatgcgtgccgtgctgggggcccgacgggtcggaatttgaggcccggcccaggcccgccttcgggccgtgctagcccggcccatattatttcgtgccgggccgtgctttgggctcttattttcgggccgtgctcgtgctggcccgaaaagcccgacccagattcccagcactacttaacacatccctaggtttgcctcccctccccttgtttccaaattttagtattggagcaaaacaagggtaaaaggaacttctcttccataatgactagtgaggagttatacctgtagataggggtggaaacgagccgaggctcggctcgc

SEQ ID NO: 150199 - DNA, 741 bp, Zea Mays
agcgttgattggtgggtggaggttagacaccagaggctgatggagcagaggtcgtaggcacaaataggtggaggccatggaggcgcagtaggagccgtgaattggtggagcggaaggggctggagtgacttgatgaggcagcaggacttgccgctggattccaggaagcagttcatacgaacatagtatgtttatgactgcttgggggaagtagtcagcgaagttccagacatcggtgcatctgatgttattgctgatgataagcttggcaaagggcaaccttttatagctgccaagggagtggattaatcgccggttggagattgcatcatacattccttataatggctagtttggaaactttatcccctagggatcctagacttttcctgggatagttaatccatggaccatgggtatgctattttacttagccacttagttctccaccgggggctttccatcctgttacacctgaagtatctgaagaagacacctgaagtatctgacgaaagggaatggcgaaggtcttctctgaagctttgtgtcgggtgcataacagtgaatgtaataaggaagaatgtattcagtattcatatcctggtagtgtatgtacatagtaccggtagtggtgtacgtatacatacagttggtcgtataaccgacctaacaggagtccatatatgctgtaatgtctggagaagaaaattatgaaataaacaaaaacacaaattacatgtc

SEQ ID NO: 150200 - DNA, 1292 bp, Zea Mays
ctacgttcggtccggggagatcccggagatataaggagcaccgttggagagagcctaacagcgttgattggtgggtggaggttagacaccagaggctgatggagcagaggtcgtaggcacaaataggtggaggccatggaggcgcagtaggagccgtgaattggtggagcggaaggggctggagtgacttgatgaggcagcaggacttgccgctggattccaggaagcagttcatacgaacatagtatgtttatgactgcttgggggaagtagtcagcgaagttccagacatcggtgcatctgatgttattgctgatgataagcttggcaaagggaaagctgaagaatggaagtgaggaggaattaaagaggaagataataaacttaagtcactattatccataactccgtgtggatgttgcatatttcacaattctcatgcatctttcataataatttggcaaaatatccaatttcaccccaaagtttcactactgaactttcagatcgtccgtttcaatcccataaggccataaccttctcttcttctgactcaaaactgtcttggccctcatatggcatgctacgttgtcacccctggacatccattgctgtttcatcacacatgaaatgtctcttctgccctcgttctgctcagtttcaaagggaatggctacaataatatctcaatccaatcaactatgagcatcagtttttactttttaccttgacgtttttgtttcttcctttatctttactttctcctccaatgctcttgttttccttagttaattctactctcacttgtcacataatctatccataggcaaccttttatagctgccaagggagtggattaatcgccggttggagattgcatcatacattccttataatggctagtttggaaactttatcccctagggatcctagacttttcctgggatagttaatccatggaccatgggtatgctattttacttagccacttagttctccaccgggggctttccatcctgttacacctgaagtatctgaagaagacacctgaagtatctgacgaaagggaatggcgaaggtcttctctgaagctttgtgtcgggtgcataacagtgaatgtaataaggaagaatgtattcagtattcatatcctggtagtgtatgtacatagtaccggtagtggtgtacgtatacatacagttggtcgtataaccgacctaacaggagtccatatatgctgtaatgtctggagaagaaaattatgaaataaacaaaaacacaaattacatgtc

SEQ ID NO: 150201 - DNA, 125 bp, Zea Mays
ctttatttttctttttattaggctttggtaacgagagtcatatactcatatcgatgcctttattgattgatccacagatacacaaaagatggaaataagaaaaataaaagtactcatgtaatcaa

SEQ ID NO: 150202 - DNA, 299 bp, Zea Mays
tcattcataaaaacaacacatgttattatgttttgcacatatttgcaaacactttacaaaatcattcacaaaagtactaacgcttcaagtgattcgcaaatgccttcacaaaagcactccaacttcttgtatcctcttgttttaagacacaagcttgtaggggttgtgatgtcgccacttacttgatgctaacaagacatttccttcaccaaatccatcttcaacacttcgcccataaaaaagatcaattctctttttcaattgcctgtcatccgatcatccaaccatctaatccaaac

SEQ ID NO: 150203 - DNA, 312 bp, Zea Mays
atggcgcaaatggaggagcgcttgaccgatgtgctgactggccgtggtcgcgagcaggccacccacggacgtacttcctccttcaacgacgattcgggcgccgactgcatcctcatcaacgtcggcaccgactgtaccgcggaagacgacgccccctactctgtcaccgccgccgccgagaagggctactcgtgcatcatgtcggcgttattggacgcggagaggcagaggtccaaggacacggcggctgccatggcagagcctgaagccaagcaagaagaagtggcaacagtgcaagagaatgccacttga

SEQ ID NO: 150204 - DNA, 2305 bp, Zea Mays
gcggacgaaaaaatggcttcttggccagagaacgagagaacgagagaaccaaagagacaaggggggaggaccccttgctgttgttcgtttgcatgcagggatcggcacgagggtgctcgcccactctcgcgtcgatccggcaatttccatggggctgctgagctccgccaacagatgcggctgcaagaacatcctgagctgcaacctactaaggtgcgcgtgctgctgctcgtggatccgctccgtctgcggcggcaggacgacgacgagcaataaggcggccgcgcagcaggaggcgtcggacgcggagaggaaggcgaagaggaagttggcccgtggcttgtgcggcggagcggtgcgagaggcggaggagcccctgacgtcggaggcgaagaagaagaggacgaacacggcggcgacgatccccgagccgcagaagtgcaagtggacgaagaaggcgcggaagaaaaagaagacgaagaatgagcagaacgggctggcagccctagtggaggagatctcgctctcgacagacagtcccaagcacagggcagcagcaggggagatactgcggatcggcaaccacaacatccccagcagggtgtttacgttccgtgaactggtggacgccaccaactctttctgcccagaaaacctgctgggcgagggcggcttcgggagggtgtacaagggatgcattccagacaccatggaagtcatagcggttaagcagctcgacaaagatgggctgcaaggtaaccgtgagttcctcgtcgaggtgctgatgcttagcctgctgcaccatccaaacctagtcaccttggtcgggtacagcacagactgtgaccagaggatcctagtgtacgagtacatgtcactcggttcactgcaagaccatctcctcgatctcagtccgaaatcccagccactttcctggcacacacggatgaagatcgcagtgggtgcagctagaggcatcgagtacttgcacgaggtagccaacccgccagtgatctaccgcgatctcaaggcatccaacatcctcttggacgcaagcttcaacgcgaagctgtcggacttcggtctggccaagcttggtccgagcggcgacaacacccatgtcagcacaagggtgatgggcacgtacggctactgcgctccagagtacgccatgactggcaagctgaccaagacatctgacatctatagctttggcgtggttctcttggagctcatcactgggaggcgagcgatcgacaccacgaaaccaactcgggagcagatccttgttcactgggcagcaccattcttcagggataagaggaagtttgtgaagatggccgacccattgcttgacatgaagtttcctctgaaaggtctgtaccaagcactcgcgatctcatccatgtgcttgcaagaagaagcaagcagtaggccgctgatcagcgatgtcgtgaccgcccttacatttcttgctgatccaaactatgaccctccggatgacatcaaggatcctctgcccataacagttccaaacctagacatggaaacaactggccaaaacggaacagaaggaggtggacgtggtttggttaggtgtaatcaatttctcaacattcttgaaaccggtgtatgtcatataggcaaagatgtaatatcagctcattttcttgaatgaaactagcgtgtgcagtttggttaggcacaatcaatttttcaacatatcataagagataccttagggctccacgaaataaaatactcatggctcgcccgatttgtgatcgtttgaatttttttatgctcacgaactcaaacgagccatcctatatttcagcaaatggaaactatatgtatatcatttacgacgatcttgcagtctcttaggcgcgcggatgatgctgtgggggctcctgcgatgtgactactcctctgttaagtgatcggctcatcaccattagatggacatgtttgtgtcctctagcttcatgtagatgatggaccgaagctgttcttgtaacatgaccgaccctgtactgtaatcgctgcctgctcgtataatcctccaaacagaggcccccacccaccaagccgaggaaataaaatgatcctcggggcccggcagcatggaagcacacaggcagtggtgtggagctccatttctttctgtcccggtagagagaatcagggtcgcaaacaagcgcacaacgagacatcagactgtcagagtggttgtagacttaattgtggtggtgtcaaggtggcagcatatgtgtacgcgtgcggggatatatttcaaaattca

SEQ ID NO: 150205 - DNA, 1530 bp, Zea Mays
atggggctgctgagctccgccaacagatgcggctgcaagaacatcctgagctgcaacctactaaggtgcgcgtgctgctgctcgtggatccgctccgtctgcggcggcaggacgacgacgagcaataaggcggccgcgcagcaggaggcgtcggacgcggagaggaaggcgaagaggaagttggcccgtggcttgtgcggcggagcggtgcgagaggcggaggagcccctgacgtcggaggcgaagaagaagaggacgaacacggcggcgacgatccccgagccgcagaagtgcaagtggacgaagaaggcgcggaagaaaaagaagacgaagaatgagcagaacgggctggcagccctagtggaggagatctcgctctcgacagacagtcccaagcacagggcagcagcaggggagatactgcggatcggcaaccacaacatccccagcagggtgtttacgttccgtgaactggtggacgccaccaactctttctgcccagaaaacctgctgggcgagggcggcttcgggagggtgtacaagggatgcattccagacaccatggaagtcatagcggttaagcagctcgacaaagatgggctgcaaggtaaccgtgagttcctcgtcgaggtgctgatgcttagcctgctgcaccatccaaacctagtcaccttggtcgggtacagcacagactgtgaccagaggatcctagtgtacgagtacatgtcactcggttcactgcaagaccatctcctcgatctcagtccgaaatcccagccactttcctggcacacacggatgaagatcgcagtgggtgcagctagaggcatcgagtacttgcacgaggtagccaacccgccagtgatctaccgcgatctcaaggcatccaacatcctcttggacgcaagcttcaacgcgaagctgtcggacttcggtctggccaagcttggtccgagcggcgacaacacccatgtcagcacaagggtgatgggcacgtacggctactgcgctccagagtacgccatgactggcaagctgaccaagacatctgacatctatagctttggcgtggttctcttggagctcatcactgggaggcgagcgatcgacaccacgaaaccaactcgggagcagatccttgttcactgggcagcaccattcttcagggataagaggaagtttgtgaagatggccgacccattgcttgacatgaagtttcctctgaaaggtctgtaccaagcactcgcgatctcatccatgtgcttgcaagaagaagcaagcagtaggccgctgatcagcgatgtcgtgaccgcccttacatttcttgctgatccaaactatgaccctccggatgacatcaaggatcctctgcccataacagttccaaacctagacatggaaacaactggccaaaacggaacagaaggaggtggacgtggtttggttaggtgtaatcaatttctcaacattcttgaaaccggtgtatgtcatataggcaaagatgtaatatcagctcattttcttgaatga

SEQ ID NO: 150206 - DNA, 2119 bp, Zea Mays
tgaagttggcagcctctggttttacagatagagtgtttaactgagagttcataggtcaatgaacataagacatgcatctactccatatatttgattactgcccacgagattagcaggctggcttgcgcatccaacctaccgcttgatttaatcaaagtagcaagacagctcttgcagcagtcttgctgctcctcaaaaaaggctcggaccaatacaagctgcagcaacagccatggcttcagcgaagcagagcaagaagatgcgcatacttctgatcccattcttcgccaccagccacatcgggccctacatcgacttcgccgtccgtctcgcggcagccaggccaggagccgtcgagcccaccgtcgccgtgaccccggccaatgttgcggtggtccggtcggcgctcgagcgccacggccccgcggcgagcggcacggtcaggatcgtcacgtacccgttcccgcgcgtggatggcctcgctccgggcgtggagaacctctccaccgccggagacgacgcgtggcgcatcgacgccgccgccatcgacgaggccctctcgcggccggcgcaggaggcgctcctcagggagcggtcccccgacgccgtcgtgtcggactaccacttcttctggaccagcagcatcgccgccgagctgggcctgccgtgcgtcgttttcagtgtcatcgcccccttctcgggtctcgtcatgcgcatcctcgccggcgccgtcgtctctgggtcgcgtgacgttaccgttcccgggttgccagggccggagatacggatccccgtcagcgagctgccggagttcctgagacgcccggcgaaggaccaaggcacgttcagcccctgcaacgcggcgcaggccaggtgtttgggcgtcgcctacaacacgttcgcaggcatggagcaggagtaccgcgaggcgaacgtgcgcgccaaatccttgaagcgctgctacttcgtcggccccgtctcactgccgctgccggcggcagcggcaggcaccagcgagtctccatgcatcaggtggctcgactccaggccaagctgctcggtggtgtacgtgtgcttcggcacctacgccgccatctcggaggaccagctccgggagctggcgctcggcctggaggcctcaggggagccgttcctgtgggtggtgagggccgacgggtggacgccgccggagggctgggagcagcgcgtcggggagagggggatgctggtgagagggtgggctccgcagacggcggtgctggcccatccagcggtgggcgcgttcctgacgcactgcgggtcgagctcgttgctggaggcggcggcggccggcgtgccgatgctgacgtggccgctggtgttcgaccagttcatcgaggagaggctggtgacggacgtgctcgggatcggggagcgggtctggagtggggcgcggagcacgaggtacgaggagagggagctcgtgccggcggaggcggtggctcgggcggtggcgaggttcttggagccaggcgggccgggggaggcggcgaggggcagggcgcgggatctcgcagtgaaggcccacgctgccgtagcggagggcggctcgtcgtcccgtgatctgcatcgcctcatcgacgacctggtcgaagccagagcggcaacgagcagctgcaacgctgacagcgagtaagagatggaattgctggagatgtctcgatctggcgagcaactggaagaaggtctcgaacagccttcacggacaagtacgccatctgcaacgtacgtacgttctcggagtcgaagaaaacacttatggaaataatatggtactgcaccacctcgatttctgtcactcgtgcttgctttgcttcccaagatattgtgccagcaggagctgtcgccatctccgatccaccgcaaaccaaaccgcttggtagttggcaggtgtcgccatctccgactccgatccaccgcaactactcctaccgtccaattttcgtttcgagcacctctctctctgacccttccccatgtacagggaaatgctctcgtcgccttggactatcctgcccaaaccgacgctgtcgttcagctatttatttttctgaggaacaaaagaatggttcaaaaggtt

SEQ ID NO: 150207 - DNA, 2231 bp, Zea Mays
agggccgggtagtttcttccgcacatagggtgtgccggtgtagtgtcggggaagctcttagagctccatttccttatagtgatagtacacggtagcataggtggagggggtgtgaggtgtgtgtggttggagtggggctaacaattgagcctgccgcgcacaatcaatggccgcgctcgagtccaacaagaagctgcgcctccttctcgtgcccttcttcgccaccagtcacataggcccgttcaccgacttcgccgtccgtctagccacagccaacccggacgccgtcgagctcactctcgccgtcaccccggcgaacgtccacgtggttcgctcggccctcgggcggtacggcgccgaggcgggcggcgtggtcaagattgccacctacccgttcccgcgcgtggacggcctcgctccgggcgtggagaacctctcggccgccggggacgacgggtggcgcattgatgccgtcgccgtcgacgaggcctcgacgcgaccggcgcaggaggcgctcatcagggaacagtcccctgacgccgtcatcaccgacgtccacttcatctggaacaacgccgtggccggcgagctcggcgtgccgtgcgttacgttcagcgtcgttggcatcttctcgacgctcgtcatgtaccacctcggccgtgacgtcgtcatcagagatggccaggaggtgaccgtccctgggttgccgcttgccggggccggagatacggatccccgtatccgagttgccggagttcctgagacgccggcaggagcacgacggggtcaggcggtgccatgtggagatgggcaggtgcttcggcgtcaccctcaactcgttcgtggatctggagcagccatactgcgacatgtgcgtgagcagcggatacctgaagcgcgcctacttcgtcgggcccctctcgctgccgttaccaccggccggagcaagcaccagagattcgccatgcctcgcgtggctcgacaccaagccgaggttttcagtggtgtacgtatgcttcggcaccttcgctgccatctcggaggaccagctccgggaactggcgcttgggctagaagcttcaaagaagccattcctgtgggtggtgagggcggacggatggacgccgccggaggggtgggaggagcgcgtcggagagagggggatgctagtgagagggtgggcgccgcagacggcgatactgtcccatccagcggttggcgcgttcctgacgcactgcgggtcgagctcgctgctggaggcggcggcggccggcgtgccgatgctgacgtggccgctggtgttcgaccagttcatcgaggagagactggtgacggaggtcctcaagatcggggagagggtgtggagcgggacacggagcacgagatacgaggagcaaaaggtcgtggcatggcagcagaggtagtggcgcgagcggtggcaaggttcttggagccgggtggcaccggcgaggcggcgaggagcaaggcgggggtgctcgctgcgaaggcgcgctcggctgtggcggagggtggctcgtcattctgtgatctgcgccgtctcgtcaatgacctgatcgaagcaagaacggctgccggaaccaacgcctgagttacaaaaatcacgagctctccactcgctttcctgcagagcatcagggcgaaatgtcagtggcagagtcaatatgcagaggatccactccggttcaaatgggatttttttctcataaataaatgtaagtaaagttaatcgacaaaaatcgctggaattctaaagtgagacttcgacaaaaaccgctatgcactcaagattctcgatgtaatcgatgtacaataaaattattaatcgatgtaggactaaatattacccttgtgttgtaaccagagcaacaaaaaatatttgttatttttgtacccaagtttaaattaaggccatgatcagtggcggagctccgtaaaaataacgttccgggccactctacaaatataacgatatactacatgtcttttaatttttcacactttaggggtagaaacatttaaaacaattcagtgtaactgtggcagatagggaaagcgaatcagacattcaggaacaattactcacaatagaggagaatcacgaacacatggcagcaggcagtcaacactcagcacacagcgctcgccgctcaggtggtcactgcccatttgctagggaggcgctccgccctcgcctatgaataaaaaagaaa

SEQ ID NO: 150208 - DNA, 187 bp, Zea Mays
ccctgatttgcactgttttaatttaatatgatttttgaaaatgcaggatagctttggtagcaggttgcatgaaagaagcaaagaaagtccgaaaacaatgaaacatctaaataaacttttcccaaacaaaattttgatctagcttccacaggtgattatatctattgtcacactcatttggttgtta

SEQ ID NO: 150209 - DNA, 447 bp, Zea Mays
atgaggatcaagagtccaagacgacgcgatgcatcgggcctcgggccactaacgcacacggcagtacggcacataccttgggacctgggggcgtggagcttgggcagtcccgataagcacgcatcgacctttgcatctcggtcgccgtggcccgtggggagatcaggagatggccgctggggagatggccactgggctgacgcttgggaagatggcgcttggggagatggccgctgggcgcctggggagatccggagatggccgctgggcgcctgcctgggcgtgcgtgcctgcgcagtgcacatcgtggccgtgggcgcgtggcccgacaggcagggccgctgggcgtgcgcgagcgcgcctggggagaccgggagatggccgctcgccactgggcgcctagggagatggccgctgcccgctggtgcgcattgtggcgtgggctag

SEQ ID NO: 150210 - DNA, 289 bp, Zea Mays
cccctcgccaaaatcttagtaaacgatagtgagaatacacaaccctggtccctggtcggttctcctctgtcattgctggtctctactctctcgtctcttccttccaccgtgaaaaaaaaaactagtacctaacgtgcgccctgcgcgcgagaaataatttatttctttgaaggtatttgatagcgagataattggattttcagtttacaaataattaccatgaacaattacagtgagttgtgatcttcaaaataaaataacaatcttcgaacttggtttataggaacag

SEQ ID NO: 150211 - DNA, 1458 bp, Zea Mays
ggacggaaaaaattatttgttactccgactgtgcaatgtgcatgtatcgacgtctagacgagcagtgttgccacgtaccgaggtctgcggcggcgagccggaagtagagttcctggccgaaggaggggtacacgcggaggtcctcgaggccgccggtccacatcacgcagccgcggcgccccggcgcggcggtgaggttggcgctggcgtacgccgtgcaggagcagttcctcaggcaccgctgccggcactgctccaggctggagttgaagtccaccaccgcccgcgtcgcgtcgggcaccttggcgtgcggcagcaccaggaagccgtcggtgcggttggcgcagtccagcggcgtggcccggacgcagccgtcccgcccgtcccgcatcgcccacgacgccggggaccgcggcgtgaacccggggaggcaggagcaggccgggaccttgttggtgtcgcacaccccgttgggcccgcacggggacaaggcgtcgcactggtccttgggcgcgtaccagtagagggcccacgcgccggcgacatccagccacgtccacctctgcatcagcccgccgccgacgcccgtgctgttgagcaccagcctcgagacgatgcccgcgtcccggacctggaagctgtaggtggcctcgcgcccgtcgttgacgaagcggaagctgaagcccatgcccttgtaggtgacggtgtccgggactcccgtgaactgcacgccgtcccagggccccgaccgccacaccttggccggcccgttccagatgaacacctccgggtcgcccgacgtgtccatggccgccaccacggggctcggcgacgggtcggaggggctcgcccacgccgtcagcgtcatgttcgcccccgccgcgaagtccaccccgagccgcatccccgggagcagcgtgtcggtggggtggtcgaacccctgccacaccacccgcccgcgctggtccgacaccaccaggttgccgtcgtcctggatccgcgccgcgcacggccgcggggaagacgacgacaacgaccgccacaccaccgtggcgttggcgtccgccacggcgagcgcgcactcgctggacacggagagcgtggcgccggcgctctcgctcgccgcgccgcgcacgggggcggcgcggttggccacccagacgacggtgcggacgggcaccttggcgtaccagatcccgacgtaggtgctgttggagcccggcggggagaagaagccgagcacgaagctgccggcgccggacgatacgagcgtgtcgtttccccgcagcggctggcccggcgtgatggtgtccctggcgcgggaagccgcggggagaagcagaagcagcagcagagtcagaaccatcgcgtcgcggcgagtgaactagcggagcaacgagctcgcagtcgcacggggtggacaagatgacagcacccgtatggttggctcgtgtcgtg

SEQ ID NO: 150212 - DNA, 634 bp, Zea Mays
cgcgccagggaccaacacccgtcgctgggcacgactgtggcacattgttgttttttttttttggggggggggggatgtttggatggatgatgttggattgtggcgcacatcggagagggatgtggctgcggggcaggaccgcaggagacggacgcgcgaggagaggaggtgaatagctgagatcggttgatgagacggggaactgaatccaggagatagcggattattggtctcttggcaccgcctgcaatgcaatatgagttgaggcaccatgacggcttcagtgtgatcttccttgcagcgatgcaatttctcaagttcttagccgcaggcttgcagcagacagagaggcaaacatttcaggttttatcctttatacacccaatatatctttatttctttcagtcagacagcacgcattgcaaaatttagctcttttttcccctagttggctagttgaatatcattcacaatacatagctaaaaaaagctgtagtctctatcccccatggcaggaagccaggaagggtattttgactttgactcgtaatgattggttccccatggcaggaagccaggaagctgtagtctcttgtttgattttgactcgtaatgagaagaaagagaccccggc

SEQ ID NO: 150213 - DNA, 1218 bp, Zea Mays
aagaaatcttccccacttgttccctcgcgtccatggccttgctccagcctactcttctcactcctcccccgctctgctgctgctcgcatggcctcctctacccagggttcctgaaactgcctcccaaattctcaaatggggcctgctgttccacggcgagggcgtcggaccggagcgagctggcgggtaaaagcgggggcttggcttggagagcggcggggagaaaggggcggctgcttggcgtcaccggagctgggcgaggccccttctttggcggcggcgggaggcgtatggacaagggcactagccgggtcgtggggaacctcgccttcgccgccgtcgtgacgtacctcgccgtgaccggccagctccggtgggttattgacgccatcgtctctctctggctcctcacaatactgctgcctgtactggctctcggtgcatttttcttctttgcaggacaagatatactgcagggcgattgtccgaactgtggaaaaagcttccagatactgaagtcagctttgaaggatggcccacaactctgtccctattgcactcaacctttctccgttcaaggcaacaaatttgttagagaatctgctagattttcatctgggagggctgctactgctacaaatggtccagtgttcaatgagttcttcaaccgcaacatgagaggaggaaacgcggcgccttctgagacgatcgtggatgtggaggctgaagtcaaggacgtggagtgatgtttcttctcagcagaagaagagcacgatttgcttctgaatctgtgagaaatggggagaaaactgaaactgtgagagactaggcaaacgtgcatatagatagatgggtatcggggatgggtagttgtgtagtgcccgcgcgcatgagaaactggacaaggcccctgtttgtttcagcttctggcagcttctggccaccaaaagctgctgcggactgtcaaacgctcagcttttcagccagcttctataaaattcgttggggcaaaaaccatccaaaatcaacataaacacataatcggttgagtcgttgtaatagtaggaatctatcactttctagatcctgagccctatgaacaactttatcttcctccatacgtaatcgtaatgatacttagattctccccacagctagattttcagaaaagctggtcagaaaaaagctgaagcattgctttgtggtctacgctccatt

SEQ ID NO: 150214 - DNA, 792 bp, Zea Mays
gtccgcgaacgtcgccgtccgggacggagagcctcgctcgcaacccacccctcctctctcggcgactcggttctccctcccgcgggacgccaccggaactgactgccgctgctggggcctggccgttctctcatggtcatggagacgccttcgcaggggagcttttggcagcttttgcttctccagaaagctcgaagctctctcaaactggatagcttctccaagctgacaaaagctgcactttgtagtaaaagcagagaagctccctcaaagcagcttcccgagctttatccagaaagcttctcttggaggcgcttttggaaaagctacagctcccccagacaaggaaatttatcttggtgttcattgtcattttttataacttacacaggagatggacccagagcaacatggggacaacatggcaggcaagggtggagctggacaggtctattggtccaacgcaatgtctagtttcgtgctcaaatatttgtccgacctagttgcgagtggaactaaaaccacgagcggcttcaagcaagctcatcttaacagctgtggtagagctttgtatgagaagctaggtgtccagtgttggggacttgttctcaaatgctaagaattaagaacaaggcaacataaaaagtgttaagtgttaaagtccttcgtccttcgaagcattatgtcccttcgggaaataatgagtttcggacgaaggtcataagagacataccttcgtaaacataacaagtaatgacgaaggattcatataaagcatgaaatataatataa

SEQ ID NO: 150215 - DNA, 417 bp, Zea Mays
gtccgcgaacgtcgccgtccgggacggagagcctcgctcgcaacccacccctcctctctcggcgactcggttctccctcccgcgggacgccaccggaactgactgccgctgctggggcctggccgttctctcatggtcatggagacgccttcgcaggtgattgccccctcctcgtcgtcacactccctagctgctaaggggtcacgtggtggtgtgctgcccgattggaattgggtgaatcggatgcccaaggggctcacctgggggattcgttctgaacttaacacaggttgatttgctggattgaaggtcccggattattctccctggtttctcatgtgtttgcatcagtgcagatgcaagttagtccttgttaacagaggattatacatttatactcacctctctctctctctc

SEQ ID NO: 150216 - DNA, 1970 bp, Zea Mays
atggtagaaatttagtattttcaaacggagaaattgctgggccttggttggacggtggacgctgtccctttcccaatcccaaacgagaacaacaagagagcagcccgcatcacttcctcgctctcctctcctctacgctcctcgtcgcgagcccgcgtctcccacgcctccctcgctggctccccctccctccggacctccccactccagatccagtctggcccgccgccgccgatgtccgaggatcccgcgtgctcccgccgctcgcggtgcgacctcggcggcgacgagcgctggctctcggggcccgccggcgacgaccacttcgaccgcctcccggacgcgcttctcctcgtcatcttcaaccgcatcggcgacgtcaaggcgctcggccgctgctccctcgtctccctccgcttccacgagctcgtccccctcgtcgactccgtcctcgtccgcgtcgactgcgtcatccccgacgagcccccctcctcgtcctcgccgtcgacgccgttctctcctacggcgtccgtgcgagcccgtggggtcttctcacagatcgcgcgcatcgtgctcggcggcatcgtgaagcccatacaggcgctcggtcagatcctctcccccgccaactccgcctctggctttccggcatcctccgattcctcgccatcgtcgtcctcctcatctttgccactgcctcttgcggatgtgtcgcaccactctccctcggaggtgctccgctccttcaaagagctccgccaccttcgcatcgagctcccggcgggcgagctcgatatggacgacggcgtgatgctcaagtggaaggccgactttgggtccacactgggcagctgcgtcatccttggagcatcctcggcctcggcctcggcctcggtctcgccctcctccgctgactcagatagcacgagcaccgctccctctgttgacggtggccgcactgaacctgatgaatgtgtcgattcaggaagcatcccggagtcgttctacacaaacggggggtttaagctgcgggtggtttggacaatcagctcattgattgcggccgccgccaggcattacttgctgcagccgatcattgctgatcacaagacgctcgagaggttggacctgacagatgctgatggccagggagtgctcaccatggacaagtgccaactgcaggagctgagggtgagaccgctatcaacatctaggggctcacaccggacgctcatgccagagcttagcatgtggctgtggtacgcaccatgtattgagctgcctggggggctggtgctaaatggcgcaacgcttgtggccatcaagccaagtgaggaaggaacatgggacacagtttggaatggggctgctggtgcagcctgggtgttggatgcattcgaggagccgtataggacagcggtgaggatgcttctcaagcagaggacctacagtcttgagatgaattcgttctaactatggggagatgacattttgaaagcttcagatgtgagaggatgctataactactgatgtcctggatgccttttatgcaccaatctgcacctacttcagatgtgccaagtatgtgctattgtatgcttcttgttgagcatctgacagcaggaacatggatgaattcaaagacactgttaatttatggaaatgccaaaggcatagttgagttggtggtgttctctgagatcagatgtggcacagatagttttttttctatatgtatccacatcaactcatcaatgtactagccttatgtaatttcaactgttggattgtgggattttgctgcttgtttgcagaacagcatccagcgtgctctgtacctcaatgtgtgtcaagagtgggctcgaagatttggcgtcagcggaagctacaaaattgttattccaaacgagttcggaaatgttgtatccttgcacagttgcaccgtgaatctggaaacgttgtagccctat

SEQ ID NO: 150217 - DNA, 1348 bp, Zea Mays
tgttctaccaaaggtaatgtactgatgcccttgaagaatggcaagactgcatcaggtccacttatcaagccgattcactttaagaacagtgcagcagaaaaggttatgtcaaatggcaaagtaaacctcacttcaaaaaacaatccagaggttaatggaactgctaaatcatcagaatcaaacagatgcaagactggacaatttgtgggacccagtaaaaataatgctgataatactatttcttgtggagagagaggccaacagtcagaaagaatacatgatgcaaatggaaatggccagtcaattcatcattcacagtattttggtgagatcagtaacggcaatgctatgcctacatctgctcaacaagagaccagtcatggcaatgccacgcccgcccgacaggagaccaataatagcaatggcacgcccgctcaacaggagaccagtaatggcaaggcctcacatgctgaacattattctgagcggtcatctcaccaagaagagcatgcaaacttctcaggaaacaaacgccgacttgaagaagataagtttcaggaaatgcttgcagagttagctaattctgagcttcggatgtctgtatggacggatgatgtctacagctttatgcgctcgcaaaagaggcgtcgaattcaaagttctgacatttctcaagattttgatgcaatgagaaagcagctagtatcagatgctgcaagagtatgtaggtcaaaagttccggagtcgctgatggaaaatcttattaaacgcctgagatcatactttgaggacaaatatccaccaaaagcgtagtttttcatgcagcagttctttagaagctacttaggtgtcaattggatcttggtggtggtcaactccctaactcctcgcgcggcttaattttgaggacatttttgtattctttgctgagacagagacgaggtgttctaaattgcatgtacaaatatacttttcgttgttatccctgatgttataggtaccacaccaccatccccaccacttttctgtagaatgtagatccctttttatcctggcagattaaagcatgagtttatggtgtttttgacacgtatttttgccccgaccagacccagttttagtcaatgtttttcttttcattcttttttgtcctgattttggtttctgtctggccttgctcagcatggccttcttgtaaatatctttgctttcttcctatataatgatacgcagtgctcttgcgggatcgaaaaaaaatgttttgttatgggggttgattcaataacaacattttttagtttttggagcgtaatctccggaagcaaattgacttgacagtatatttatt

SEQ ID NO: 150218 - DNA, 1209 bp, Zea Mays
ttcgcccatctctcttccaagctctgagttctgattctgacccagacggggaataatcagactcctcgcatcccctctcttctctcttcaccccgtcgccgtcccgttactcgattcgagggcgcgacccttccccatctctcttgcctcgccttgccggcggcgccaatcccagggctcgcgtcgggagtgcccaacttctccacagtggccgttccgccgcggcgcccgcaggtgggcgatgcgatcggatgagttggcggcggcggcggcgcttcgtggaaaggaggaggaggggggccttgtgctttcccgcggcggtgctatccccgccgcatccgcccctcggagccggtgatggccccgaccgcggagccgtcttcgcggccgccccaatggcgcccccgcacgggcccacccccggggctgaagaacctcggcaacacatgctacctcaacagcgtcctacagtgcctcgcgtccacgccgcccctcgccacgttctgcctcgcctctcgccactccaaccagtgcaagaaggtgttcccgaatagggacaatgactgcgcgctatgcgtgcttgagcggcagattgctcggctgcttcgggcagatgctggggcgctcgattccccagcaaaggttatccgctgcatgcccctatttgccgagcacttcaggtgggggcgccaggaggatgcacacgagttcctccgctatgtcgtagatgcctgtcacactgctgacctccgcatgcgcaaggggttacgtgcagcagctgccagtggaaactgtggtgaggatgtccgggggcagggggtttgtctggttatgagggagacatttggcggggcattactgagtcaagtgaagtgccttgagtgcaagggagaatctaacaagactgatgagataatggatatcagtctcgatctacctgggagcagttctgttgctgatgccctttcccgcttctttcatccggagaccttggatggcgcaaacaaatattgctgtgaaagttgtaaaaagctcacctcagcacggaagcaaatgtttatgctcagggcacctaaggtgctcgtcatacaactcaagaggtttgaggggataaatggtggaaagatcaacaggaatatagaattcaaggaggcacttgatctttctgattgcatgtacaataaaaaccaggtaacacatcaaatttgg

SEQ ID NO: 150219 - DNA, 813 bp, Zea Mays
ccgtttccccccttcacttgctaaaccctctccagcccgcgttcctcgctttccctcccaaaaccctagcgctgcttccaccagccacccagatcccatggcgcgctcgacctcactctccgaggcggaggcgggcatctcctgctttgcctcctccctccctggattccgcggcgtcctcaagcaccgctatgccgacttcatcgtccatgaggttgcccgcgatggcgctctcgtccagctcacctcgttcgacctccccaccgagagcgttggtgtgaacgaagaggacaaggcggccccgtcggctgaagcggatcactcgcaggccctcgagtcgttccgttcgctctgcggcgatgccgattgcaacgcattgaggggtctcctggagaaggtgtcgggcgagggtggcggtgatgtctcgcctgtcattctatcgcctgatgccgacaaagcacaccgttcggaggtgcataacttctttaagaagaccttcaagttcctggtcacggacacggtggaacacagtgatggggtccagaagtgcatcagggtgcggttcgggtcagaagcaggtgtcggaaggggtgctggcggccgtgggagaggaaggaaacggaagaacatgggtagttctgattggagagatggtaggccatttgatagtagagggtcaagtaattggccagataatgttgggaagttcctgaggtgatgacatcctgttttatttgttaactatgttatgtgttatttaacttgtatcggactgggttcttttcacatgtatggcatacttgatatgctcta

SEQ ID NO: 150220 - DNA, 3721 bp, Zea Mays
catcatcgaagaggggcaccagccactggcagtatacagcaccacaccagtgagagtgtcagttacagctggcatggtggtcgattgcatatccatattgtatgaatggggcactgtacacagcatgatttactttttcttgttcttttgtatttttaattactttgtgttgatcttctgttactattcatccatggcatatcaaagcttatcgaacctgctcatcaacctagattagttggggtcactcgatcatatctagcccctttgatttatttttctagatatctgtggctcacgtccccagccctgacccagtcagcccaaattttgcggtgattattagttggatagagttgtggaaatactactataaatcttatatgaagcctcttcagcttagcttattacaaccatttgcaaaaatatgactgatacatgttcaccaaatatattttgtaaatgctctagagcacatgccaaatatcaaaccaatgttttcaagtcggatgacttgctggtcgttctagctaaccgactagggtgattaatcgtgattaatcacgattagtcggacgatttggacgattaatcgtgattggtccaaactgacttggacgacttgaaaacattgtatcaaactcagaagaggctaaaagacattttctggttatttttatacactaaaaaaagagggcctattttatcgtaaggtttgaatttcaaaaagaaaacttggttagtggaatatctttaaatcgctggctagctgttctctaatggcgatataagctggctgtttcttttgcttcttacattttgtttttgttagtggaattgaagttgcgtaccaagaagctgttgcattgaaaaggcaagaggagcttattcgtgaggaggaggaggaggctgggcttcttgaacatcagatgaaggggaagcgtggtggtggtgtaaatgaaaaggacaagcgtgccaagaaaaagcagaccaagcaaaagaagaaccgtaaggctaaagacaaggaaagagatgagaaatgcgaggttaaaattctggaaaggcttcgtgatgaaactgccattgataatagtgatggcttaccatctcaggtggaagtgatagcaaagattgatgccttggaagaaggttcttcagatgggtcagacatgtcaaatagagggaaaaatcagcgtaacaagggcttaagcattattagctttgccgaggaaggtgatggtcttccctccacctctaatgtcactggtggtttaggccgcaatagttctggctgctgcacagctccaaaactggatcaggatactgttctacttaccttgagagatagacttcgtaagttggggcagcgtctgcatgagaaaaacattgaggggcagaaacttctcaaaaaacattttgaagctagggacgcaaaagcgaaggaagaaccttctgactcatctaattctttggataagccacctgatgttccagagatcccggtgcattcatcagaagataccgttgatcttaaagtgaatggaacaccaaagaaggatgcatctgtggtcaaccctgttctggaggattctgtttcaggcataccagtcactgcaaacaatgaacctgtgccttctcccaccacaacaaaaatggacccagtttcaaacaaagttaatggatcaagtttgaaaatgaaagtcaccatggcatctccttgctccaaatcacatccagctgatatggataaagatgcctctcttccttctaaatcaccacgaaccaatagagctgctccagttcctcctaagctgccttcagctgataaagcaacgctagttccctcaaagctaccttcggttgataaagctactccagttcctcaaaaatctccgttggtaaacaaagtagctcaggcccgtcccaaatctccagcagttgacaaagcaactccacatcgtcccaaatctccagcagttgacaaagcaactccagttcgttctcaatctccagcagttgacaaagccactctagttcgccctcaatctccagcagttgacaaagcaactccagttcgtcctcaatccgcagcagttgacaaagcaactccagttcgcccaaaatctccagccattgataaagcaactccaattgctcccaaatctccaccagttgataaagcctctccagctctgccaaaatcattatcaggtgctaaagatgcgctttttccttctaggtcgctgcagattgataagtttactccagccgccccaaggttatcacaagatgataaggctgctctgccttcttcagaacagtcacatatatctccagctactagttctgaagctcaaggggcaactactaggaaggtcacaactaccacctcactttcagaggctgctgcagcatggaggccttcaagtgctcctgtgttacccacaccaagatcaaccgggccagctgcttcacatattcaaacttccacattgctttcccgctcgatgagtgaagcagctgggagaaggccagtaaatgatccttcattttctgccccatcttatactccacagacctaccggaatgcaataattggtaagtctggtctgtctatgacctccgcaagccttgcgtatcagccgtcttctctggatcaagacactgctccttcacggcctctatcagcatatgcatcaagtacagtcatgatgcctcctgcaggaagatctgatcagtcatcagctaggcatggattcaagtctgggcctggtaagttagaagcacatgacggctggcagcagtggaaaggtgacagtaatgttgatatgcatctctggagggaccacgctccttaccaacaaatgaccaacagtcaagcatatgagcagtctcggagggacgatacttatcagcaagcatgcagcagaggaacagaaaagttcagcaggcatgcaggactgcaagctaggcagcagttccaaaccgagacacccgccagtcatgtatggcatcaaccgcaggggccagtggcagaagaatttccacaccttgacatcataaacgacttgcttgaggaggaccagatcaacggcagtataccggagtcgtttcgtcaagactacaacgtgtttggcctgccgttttcaccgagaggaaacttgtcagacatggaaatggcttctgttagaagtcccgctcggttcaattcacccaagtacgatggtggattgtcgggggcttatgacatgaatgctgtcaatgggttgagggaacggcagtttccctcgttggatatctactctaatggcctgtctgacgtgagtgcttctaagccttggctgaatggctctgccagtccatcggtgagccttggggtcaacacaaatggataccacccccaggtgggtgagtacctgggaggtggggtgaacggggtctccttgtggcgccgccatgccaacggccgctggtaatgcgaggtgcctgtatacaatcatacagtcggaataatgttttgttgtaacagatggtttcgggcctgagctgatgcgccatgtaattaaaagtttttaagttttaaaagggaaagaaagagatacaccctgtaaagtctgcgcctttattaggataatttgagtgcttttctggttgaagttgaactctgacctaactttgttaaatttcaaagctaaatttggcggtggcctgtgggagagag

SEQ ID NO: 150221 - DNA, 3967 bp, Zea Mays
acaggccccaagccttcagaattgtttggacgttacacttggaggattgaaaacttctcgaaggagaagaaaagagaaatgaaaagtgagccatttgaagctggtggttacaaatggtatattcttgtatatcctcaaggatgtgatgtctctaatcatctttcattattcctttgcgttgctaatcatgacaaacttctcccaggatggagtcattttgcacagttcactatagctgtagccaatatagatcctaaaaagatgaagtactcagatactttgcataggttctggaagaaggagcatgattggggatggaaaaaatttatggagctatcaaagattcaggatggttttcttgttgatgatgttcttgaaatcatagctcaagttcaggttatcagggagaaagtggatagaccttttcgttgccttgatcgtccttaccggagagaattgatccgcatctatatgacaaatgtggaacaaatataccgacgttttattgaggagcgaagaagtaaattaagcaagctcattgaggacaaaataaaatggtccagttttcgtgctttctggtcagcaattgacccaaacaccaggcatcgcatgtccagggaaaagactgacaccatattgaaaatgttagtgaagcaattctttgtagagaaagaagttacttccacattagtgatggactccttgtatacgagtctgaaggcacttgaataccagatgaagggcaggaaaggcaaaacaaaattagcagatttggaagaactacctgcgcctatggtccatgttgacatggacatgtttattttggctgatgatgtcatagctttgcttgagagagctgccttagaacccttgccttgtcaacctttagcccccaaggatgataaaacttcccaaccccgcatgaaggatggaagttctggtgaggtttacaatgtttctatggagcgtgaggaaagacgtctaactgagcttggtcagaagatactagagacatttgtgctatctcatatatttagtggaattgaagttgcgtaccaagaagctgttgcattgaaaaggcaagaggagcttattcgtgaggaggaggaggaggctgggcttcttgaacatcagatgaaggggaagcgtggtggtggtgtaaatgaaaaggacaagcgtgccaagaaaaagcagaccaagcaaaagaagaaccgtaaggctaaagacaaggaaagagatgagaaatgcgaggttaaaattctggaaaggcttcgtgatgaaactgccattgataatagtgatggcttaccatctcaggtggaagtgatagcaaagattgatgccttggaagaaggttcttcagatgggtcagacatgtcaaataggttagtgaacacttgaaaacaagttatgcatcactttcttgtaagattggcatttgctccagctagacttatgtgcagagggaaaaatcagcgtaacaagggcttaagcattattagctttgccgaggaaggtgatggtcttccctccacctctaatgtcactggtggtttaggccgcaatagttctggctgctgcacagctccaaaactggatcaggatactgttctacttaccttgagagatagacttcgtaagttggggcagcgtctgcatgagaaaaacattgaggggcagaaacttctcaaaaaacattttgaagctagggacgcaaaagcgaaggaagaaccttctgactcatctaattctttggataagccacctgatgttccagagatcccggtgcattcatcagaagataccgttgatcttaaagtgaatggaacaccaaagaaggatgcatctgtggtcaaccctgttctggaggattctgtttcaggcataccagtcactgcaaacaatgaacctgtgccttctcccaccacaacaaaaatggacccagtttcaaacaaagttaatggatcaagtttgaaaatgaaagtcaccatggcatctccttgctccaaatcacatccagctgatatggataaagatgcctctcttccttctaaatcaccacgaaccaatagagctgctccagttcctcctaagctgccttcagctgataaagcaacgctagttccctcaaagctaccttcggttgataaagctactccagttcctcaaaaatctccgttggtaaacaaagtagctcaggcccgtcccaaatctccagcagttgacaaagcaactccacatcgtcccaaatctccagcagttgacaaagcaactccagttcgttctcaatctccagcagttgacaaagccactctagttcgccctcaatctccagcagttgacaaagcaactccagttcgtcctcaatccgcagcagttgacaaagcaactccagttcgcccaaaatctccagccattgataaagcaactccaattgctcccaaatctccaccagttgataaagcctctccagctctgccaaaatcattatcaggtgctaaagatgcgctttttccttctaggtcgctgcagattgataagtttactccagccgccccaaggttatcacaagatgataaggctgctctgccttcttcagaacagtcacatatatctccagctactagttctgaagctcaaggggcaactactaggaaggtcacaactaccacctcactttcagaggctgctgcagcatggaggccttcaagtgctcctgtgttacccacaccaagatcaaccgggccagctgcttcacatattcaaacttccacattgctttcccgctcgatgagtgaagcagctgggagaaggccagtaaatgatccttcattttctgccccatcttatactccacagacctaccggaatgcaataattggtaagtctggtctgtctatgacctccgcaagccttgcgtatcagccgtcttctctggatcaagacactgctccttcacggcctctatcagcatatgcatcaagtacagtcatgatgcctcctgcaggaagatctgatcagtcatcagctaggcatggattcaagtctgggcctggtaagttagaagcacatgacggctggcagcagtggaaaggtgacagtaatgttgatatgcatctctggagggaccacgctccttaccaacaaatgaccaacagtcaagcatatgagcagtctcggagggacgatacttatcagcaagcatgcagcagaggaacagaaaagttcagcaggcatgcaggactgcaagctaggcagcagttccaaaccgagacacccgccagtcatgtatggcatcaaccgcaggggccagtggcagaagaatttccacaccttgacatcataaacgacttgcttgaggaggaccagatcaacggcagtataccggagtcgtttcgtcaagactacaacgtgtttggcctgccgttttcaccgagaggaaacttgtcagacatggaaatggcttctgttagaagtcccgctcggttcaattcacccaagtacgatggtggattgtcgggggcttatgacatgaatgctgtcaatgggttgagggaacggcagtttccctcgttggatatctactctaatggcctgtctgacgtgagtgcttctaagccttggctgaatggctctgccagtccatcggtgagccttggggtcaacacaaatggataccacccccaggtgggtgagtacctgggaggtggggtgaacggggtctccttgtggcgccgccatgccaacggccgctggtaatgcgaggtgcctgtatacaatcatacagtcggaataatgttttgttgtaacagatggtttcgggcctgagctgatgcgccatgtaattaaaagtttttaagttttaaaagggaaagaaagagatacaccctgtaaagtctgcgcctttattaggataatttgagtgcttttctggttgaagttgaactctgacctaactttgttaaat

SEQ ID NO: 150222 - DNA, 4849 bp, Zea Mays
atggcggtgaaggggaagggtaagcaggtggccgccgaatcccctggccctggcgctggcgctggcggtgcctccgggtccggcgggaagcggcggatggcctctagtgacgcgggggcggggccctcgtcgtcatccgctgcgaagcgccgccgccgcgccggggtcctccagttcgtcgacgacgtagctggcgtcgacgacgattatgaggaggacgagctcgagtccgaggatgacaccgatgatggtttctttactggtggggaacatgcacaaaatctgagtcacaaaagaactgaaaggtcacaccctcttccatttcttgtgaaggaagaggagcttagtggcgatgaacttgaggaattcatcaagaaccgatacagtaatcgtgtgaaatacgctgctgatcggagctattctagagaagacgatgacattttctccatggattgtgcactcaaagagccgactatttggagagttaaatgcatggttgggcgtgagcgccaaatggccttctgcttcatgcaaaaatttgttgaccttcgaaaaattggtaccaaagtgccaattattacagcatttgcacttgatcacataagagggtttgtttttgttgaagcggagaaggcctgtgatgttacagaggcatgcaaagggttttgtagtgtgtacacaagcagaatcacttctgttcctgcagctgaagttcctagcttgttatccagccgtacgaaaccatttgaaatctctcgtggtacatggatccgcatgaagaatggaaactataaaggtgatctggcacagggtggtgcagtttcactaaaaggagctgcagttcctgctccacggttgatcagctcccaagaactagagttcttcaggcctcatattgaaataaagcgcgaccgtcagactggtgaagtttttgaagtacttgatggtttgatgttcaaagatggatttctgtataagaaggttgcacttagttctttgatttattgggggatacaaccgacagaaacagagcttttgaagttctcttctagcccaagcaatagagcttctgctgatgacttggattggctctccggcatgtatggttctaagaaaaggaaccttccagaaaaacgagatatggaatcatcatcttctaaaataagatcctccaaagcatcagaccttaaagcgtcaacttctactgaaaattatgacgagaacgatgaattcaaccttcatgatcttgtactctatgggcgaaaagattttggtgtgattgttgctgttgagaaagatggttttaggatactaaagggtggtcctgaaggatctgcggtgaaagtgagaaagcaggatattaagaaaggctgcgtagataaaatgtttacagctgttgatcatcaaaagaagacaatatccattaacgacactgttaatgttgtggaagggccatttcagggtaagcaaggggtcgttaaacacttgtacttgggaatactgttcatttataatgaaagtgaaagtgagaactgtggatttttctgtgctcaaagcgggtcatgcgaaaagatacgaaagggtctgggaagctctactactgaaagttcggactttacaactcctatgtttcctgaacctgcttatgagcaaaatgggcatcgggacactgaaaggccttacaggagcaccagagaacaacttttctctattgggcagatgctgcgcattagaaagggtcctttgaagggctacctctgtcgagtagttcggatatttcggaatgatgtgactgttaagctagattctctactgaaaattgttacagtacaagctgatcttctctcagtcccagctaacaggggggataacttgtctggtgccccagctagtaaatttggaagtcaagatacatccttctttggttcagaagcaggcaaaacttcatgggacaatgggttgccatcgtttggaagtgactcatggcaacccttttcgagttcaacactatcagttcagaatgcaggtggagaatcagaagctgatccatggtctaagaaaacttctgccaaagatgattctgatccatggggtaagaaaactgatggtgattctgatcgatggggtaagaaaactgatggtgattctgatccatggggcaaggaagcggtatctgctgctgatggtgattccaatccatggggtaaggaaacagtaccttccgctgctggtgattctgatccatggggtaagaaagtggtgtcttctgctgatggtgattctgattcatggggtaagaaagcaacatcatcagctgttgacactgaaaaggaaggttctggtggtactgcatgggacaaacaagctggagttggtggatctgatgctgctggcagctcctgggacagagcggttgtcaatgagagtgaaaagagtgacaactggggagaggcttgcagggttatggacatgggaactggagctgaagctgacactgacccttggggaagcaaggtcaaagcagtagatatggaaggaccaaataactgggaaaaggctacagtgcctccaaacaataagctggaggatgtcagtcaaggatggggccaacctaagggcaactcaactgaagaccaagcaatagacaacgtttctaaagacgtggacaacaacagggcttgtgacagttctttgcctgtcactgaagatggtacctggggcaagtcaaaagacaacagttgtggtggagcaggtggtgcgggaggttgggatgtttctgttggcaactggaataaatcatctgttgtggctgatgcacaggatgaaggttggggcaaaggaaactggtcatctgctgagtctgaagaaacaaacaatcaaagcggaaattggaacaaaactggagcttcggaccaagctggttacaacaattgggataaaccgaaatcctttggtggtaatggttggaacaagggtgatgatcagaatagcagttggaacaggcctgaaaattttggaggtggacgtggctttgggcgtggacaagggagaggtaggggtcaacaatctggatatttcaatggcagaaatgatcaaggaagctggaagaagtcatggggtagtgacaatgctgaaagaccctcttggaggtctgataatcaggtagacaatgaggctggagagtctggtggatataggggaaggggaagaggaggaagggggcaatatggaggacgaggtaaagacaatggttggagaaatgatgatagaagcaattctgggtttggaagggaaaataacagtggcgatggaccaaaatggggtggtggaggtaattggaacgctacaaatccaccaagtagcagtgtaggcaccaagtcatatggtcaaaatcagcctttcacttggaataattctgaggataacaaaccatctgtaggtgaacaaggtgatccttgggcaagcaaggtgtcttctactgaagatacagaacaacagaatgattcttggtcaagcaagatgatttctggtggtgctgaggataccagtggtggctgggacaccaaggtgaaagactcttcctgcaatgatgggggtgaaggactacaaaatgatccatgggcaaacaagattggttctaatgaaggtaaagaacaagaaactgatccttgggccagcaagatgtcttctactgtgtgtgctgatgacaagaaaggtagctggaacactacagcaaagggcattccatctaaggaaaaggctgatgatccatggaatagtaaggggggtaatgatgacagcaagaaaactgacacctggggtgctggctcgtcaggtggggatcaggaactttcttggagcaaacctaatttctctttgggggaccaggaatctacttggaacaacccaaggttcagtgacgatgacaatgcgaataatagaggtggatttggacgtggaaatcgaggcagagggagaggaaggaattttggggatggtggtgggtcatcatggaatggaggcaatagaaacgatgaatcaggtggcggaaggtctggagagccatggaacagaagggactttgatggtggcggaggaagaggcagaggtcgttttgggcgaggtgaccgtaaccagggcaacaacttcgggtcaggagatggtggcagctggggctctggcaggggaaatggtggccgcggtggttacaggaactggaacgataacaatgagcgatccttcggtgaaggtggtggctggtcccagtcccagtcttccgattggaatgccaacaaaggaaatggcgaaggaaatcaagctttctcgaaaagcaagcccagctgggaagcacaaaacacctctggtagagatggtcaggcaggaaagggtgatgcaaacaactcctggagtaagaacagatcatctccatctagcgcttggggcgctcccagtggaggagctggcggccgaggttcttggggaaagagcaacgaggatggctggaactcagcgggaggatcagccaaagagaagcctgcatggggtggtgggtcagaagcgtctaccaagaaagaggacaaaggtggtgaggggaacgggagccaaggaggaggtggtgtcagttcctgggataaaggggcagatgatgcatggaacggcaacacgggtagtgatattgggagtggtggatggtaagatttccgccaaaataatatgaactctgtcggtgcgtgtgtctagttcgtatccgttacttcgccatgtgtactctacactaaaaagaacatggcttgtgaccatttaaacattaccttagtggtggcagtaactagtaaaaaagataaataaa

SEQ ID NO: 150223 - DNA, 955 bp, Zea Mays
aggtaggggtcaacaatctggatatttcaatggcagaaatgatcaaggaagctggaagaagtcatggggtagtgacaatgctgaaagaccctcttggaggtctgataatcaggtagacaatgaggctggagagtctggtggatatagaggaagaggcagaggtcgttttgggcgaggtgaccgtaaccagggcaacaacttcgggtcaggagatggtggcagctggggctctggcaggggaaatggtggccgcggtggttacaggaactggaacgataacaatgagcgatccttcggtgaaggtggtggctggtcccagtcccagtcttccgattggaatgccaacaaaggaaatggcgaaggaaatcaagctttctcgaaaagcaagcccagctgggaagcacaaaacacctctggtagagatggtcaggcaggaaagggtgatgcaaacaactcctggagtaagaacagatcatctccatctagcgcttggggcgctcccagtggaggagctggcggccgaggttcttggggaaagagcaacgaggatggctggaactcagcgggaggatcagccaaagagaagcctgcatggggtggtgggtcagaagcgtctaccaagaaagaggacaaaggtggtgaggggaacgggagccaaggaggaggtggtgtcagttcctgggataaaggggcagatgatgcatggaacggcaacacgggtagtgatattgggagtggtggatggtaagatttccgccaaaataatatgaactctgtcggtgcgtgtgtctagttcgtatccgttacttcgccatgtgtactctacactaaaaagaacatggcttgtgaccatttaaacattaccttagtggtggcagtaactaggtacctttgctccatcgtatttcgggctacgtgtgtttgtttcgcttttttttacgatcttttctgagaa

SEQ ID NO: 150224 - DNA, 417 bp, Zea Mays
atggtcaacgtgagcaggtacccttttcccttcttcctcctgtgcctcggcgagctcccctacagcctggtcgtggtcgagccacccttgcccctgcgccccgacgagtcccccagacgcgaggtccacgcggcggcctacagccagccaggccgtgtgatctgtccagcctgctccgccccctgcgctccctccgatgcacctggccacccgcggtgccgccctgtgctcccggcgcggctgttcgcagccttgcgcggcggccttcatggattgcccgtggcagcctgcgcaacagccggcgtggtagcttgcgaggcttgccagcggcagccccggcgtggctcgctcggcgtagcctgcacgacgtgtgcgaggcttgccagcggcagccccggcgtggctcgctcggcgtag

SEQ ID NO: 150225 - DNA, 855 bp, Zea Mays
atgatcatgggcggcggcatcatcggcattggtaccggtccaagactcgccgggcgtgtagtacaagccgtgagccagcggcatggtggcgttgacgaggcggatggaattgttgaggcccatgagccctttgacgccggcgtggcagtggcgtttgtcgccgtcggcctcggcccggtcggctgcgaagggcgccaccatggatggcggcggcagatgggcgacgaggtcctgcgctgcctgcggtgggaactgaagcggaggcagcttgtcgatctcgtgctgcgcggcgtcgagcagccagtccaccaccttgctcggctggctgaggcccagccggtcctggaggtcgtagagctgtatcgccgtcggcacggacagccgcacgcgccggtcgcgcagccccttgaccgtcctcaccttgctgtgccggtccttgccgccgaagacccgcgacacgcgcacgatcctggactccgtcgacggcggccagtgccgggagctcggcagcacgggactcttcgcgacggccctggccgcggtcgtcggcccctcggccttggtgcgcccggcccccaggtcttcattggtgaggttgccgcttatcatctcttattatccactcatgatcacacacacacaagcatcatcaaattgccggcccagctcagctcagagatagatcaaatagcttcgaccatggctcctagtcctactacggctgatgaatcaaaaaacgggatggcccagctggcgggccggcctgacgccgcacgggtcggaggagtccgtccggccggcgactcagcccggagcgagggaggagctctcgatcggtatcaggagatggagtaa

SEQ ID NO: 150226 - DNA, 690 bp, Zea Mays
atggacgactgcttcctcgtcgcacgaccactatgccccgccgcgacctccgccctgccgccgttagagcccaaacgagcgaggcatcaccatgcacgatgtgcaagacctacccgcagtaggccaacaccgtctgcaagaacgacttcatcatcatcaagaaccgtccctgcaagggagctggactggatgttcatgttgcaagtgtactatctactacatgaacatggtatccacctacaacctgaagttgaggccaccacagtactgggtacaaactacaattcatatttggtgtccagtggggctggcgcctcattaactaaaatatcatgttgcagtatttcaaaagatcatcacataaatcatgttgaagaggatggttcgatcgttaagatcggtcatgaagagaagcttgatgagtacatgaagttctttgatggtctccctggttagacgtttaactgcaactggcaatgttttcttggggacaattggattttatttgtcgttttgctttcttatggtcgttatatggaatgttactagatagttagttcggtctgttggtgtatcctcctgaactttcctgtcattgctgttagttatggcaccaggtttgttctcaattgctatttagggaagttattgcataaagggttatttggcactaggtttgttcccaattgc

SEQ ID NO: 150227 - DNA, 1816 bp, Zea Mays
acccctttcggtgtccttgcctctctcggcctctccccactctcgcgaatctcgatcgccgtcttctccgcgtccttgcctaaaccctgcgctcaaaaccaaaacctaaactaaaacctccgcatctttttcacttcctttttccctcccttctcccgcaagccacgagctcgctgccgcgccaatcgccatgtcgcgtctcctcctccgccaccgcagcttcctcctcccaggggcgcggagcgacgccagccaccccttcacggccgcctcctcctcctcccgctcctcatacacttcccggttctcccctctcgcctaccacgcctccgccgcggccacggccgcaggcgcccaatcagagggtgcggcggccgagtccacacccgcagcgggcgaccagccctcatcgacacctccccccgcggcacgcgggcggtggggcttgctcaagttcggcgccttggcagcagtcgccggggccatcggcggcgtcggatacgtcacctacgcctattcgctgaatgaagtggaggagaagacgagagagttcaggaagaacccaaggctgctcatccctgaggatgcctccacgttcgagaagtataaagctatggtgtactcgacggctatgaaagctatagagctgtatttggatattaggagcacaattgaagaccatgtcaggggatttactgaacccacatcagacaaactgctaccagatctacttcctcaagatcagcatgtcttcaccctagttcttgatctgaatgaaactcttgtctactctgattggcagcgtgagaggggatggagaacttttaagaggccaggagttgatgcgtttctggaacatatgtcaaaattatatgaagttgttgtgtattctgatcagccacctatgtatgttgaacctgtgtttgagaggctgaactcaaggggtaccatttcacacaggctatcaagacctgcaactaagtacgtggatggaaaacattaccgggatttgtcaaagttgaacagaaaccctgctcaagtgatctatctcagcgcccatgctcttgaatcttgcctgcagcatgaaaattgtgttgaaatcaaaccttttaaacttgaagataaaaatgatacccaactgctggatctcattccatttctcgagtatgttgccatggctagaccttctgacattaggacagtgctggcatcctatcaaggtcatgatgttgctgctaagtttattgagcgttcaaaggaacaccagcggcgcgtgcaggaacagagcaaacttgggcgcttatggcgacggtgatggatcctggaaggatagtggactttctgatttgtgaatcctagacgtcatgttttcgaaagagcgcatggaacctttttattcttgtccggagtcaaattgttggctgctgttcagggatatcttagttttggcagtttaggtttgggcctttttataaaatttaggcattctagtgagaacatcggttggattggatggtcaatgctgagacttttgagaccatgtgactcaaaggttgctatgatggagctgtcaaaacgtgcttcatgcggaagactgaaaagcgattgttcatgggtcatcgtagcatcttcggtcaatattttcttggattgtttggtttcgcaactactactctcagatttatggacttgaagggcttttgtatttttgtcgacatgtaagagcgcatcacataatactggatttacctgagaattcatgtgagatacatctagtttctggcacttaaaagttcaactggtgtccgtggaaccc

SEQ ID NO: 150228 - DNA, 1804 bp, Zea Mays
ctttcggtgtccttgcctctctcggcctctccccactctcgcgaatctcgatcgccgtcttctccgcgtccttgcctaaaccctgcgctcaaaaccaaaacctaaactaaaacctccgcatctttttcacttcctttttccctcccttctcccgcaagccacgagctcgctgccgcgccaatcgccatgtcgcgtctcctcctccgccaccgcagcttcctcctcccaggggcgcggagcgacgccagccaccccttcacggccgcctcctcctcctcccgctcctcatacacttcccggttctcccctctcgcctaccacgcctccgccgcggccacggccgcaggcgcccaatcagagggtgcggcggccgagtccacacccgcagcgggcgaccagccctcatcgacacctccccccgcggcacgcgggcggtggggcttgctcaagttcggcgccttggcagcagtcgccggggccatcggcggcgtcggatacgtcacctacgcctattcgctgaatgaagtggaggagaagacgagagagttcaggaagaacccaaggctgctcatccctgaggatgcctccacgttcgagaagtataaagctatggtgtactcgacggctatgaaagttcctgtttcagctatagagctgtatttggatattaggagcacaattgaagaccatgtcaggggatttactgaacccacatcagacaaactgctaccagatctacttcctcaagatcagcatgtcttcaccctagttcttgatctgaatgaaactcttgtctactctgattggcagcgtgagaggggatggagaacttttaagaggccaggagttgatgcgtttctggaacatatgtcaaaattatatgaagttgttgtgtattctgatcagccacctatgtatgttgaacctgtgtttgagaggctgaactcaaggggtaccatttcacacaggctatcaagacctgcaactaagtacgtggatggaaaacattaccgggatttgtcaaagttgaacagaaaccctgctcaagtgatctatctcagcgcccatgctcttgaatcttgcctgcagcatgaaaattgtgttgaaatcaaaccttttaaacttgaagataaaaatgatacccaactgctggatctcattccatttctcgagtatgttgccatggctagaccttctgacattaggacagtgctggcatcctatcaaggtcatgatgttgctgctaagtttattgagcgttcaaaggaacaccagcggcgcgtgcaggaacagagcaaacttgggcgcttatggcgacggtgatggatcctggaaggatagtggactttctgatttgtgaatcctagacgtcatgttttcgaaagagcgcatggaacctttttattcttgtccggagtcaaattgttggctgctgttcagggatatcttagttttggcagtttaggtttgggcctttttataaaatttaggcattctagtgagaacatcggttggattggatggtcaatgctgagacttttgagaccatgtgactcaaaggttgctatgatggagctgtcaaaacgtgcttcatgcggaagactgaaaagcgattgttcatgggtcatcgtagcatcttcggtcaatattttcttggattgtttggtttcgcaactactactctcagatttatggacttgaagggcttttgtatttttgtcgacatgtaagagcgcatcacataatactggatttacctgagaattcatgtgagatacatctagtttctggcacttaaaagttc

SEQ ID NO: 150229 - DNA, 1205 bp, Zea Mays
cacatcgcgtcgcgattcgcgagggctccccccaaccccatcaagtctggccaggtctctcccatatcgggttctcccttcctcttcctgtttccgcgcgcgagatcgccgccccgggtgggctctagatcccgatggcctcgcgccgccgcaccctgctcaaggtcatcatcctcggcgacagcggggttgggaagacgtctttgatgaaccaatatgtgaacaagaagttcagcaaccagtacaaggctacgattggggcggatttcctcaccaaggaggtgcagttcgaggacaggctcttcactctgcaatctttgtagatatgggacactgctggtcaggaaaggtttcagagtcttggcgttgcattctaccggggagcagattgttgtgtcctagtctatgatgttaattctatgaaatcgtttgataatcttcacaactggcgtgaagagtttctaattcaggcgagcccatcagatcctgacaatttcccttttgttctgttgggtaacaaagttgatgtagatggtgggaacagccgtgtggtgtcggagaaaaaggcaaaggcatggtgcgcctctaaagggaacatcccgtactttgagacgtctgctaaggatggaacgaacgtggaagatgccttccagtgtattgtaaagaatgctctgaagaatgaaccggaggaagaattgtatgtgccagataccgtggatgtggtaggtggcaaccgggctcagagatcatctggctgctgttaagacatgaggcatccacgaggcgtggtgatcatcatcggctatgcagtgaccaaacaatacctcaacattgctgggcctccatggttatctacgtgtccgtattccatttgttacctttccagtctcctgctatgtacccaagggcgcatttcccatgctgtcagtcaatccgtagacttcatttgtgcagttccatcagtagcgtcataccttgtgaatacagttggacaaaataagagcaagcctgaactgaagttcgtctctgtgtgggatgggggtcgccttttcctcgctttctgcttcaatgcgagttgccacacccgtgctggctagaaatgccgtcccttctggaaagcgacacccagttggcaccataaattcaatgcaagacgtcttcaaaatcagttgccataatttgaatttcaattggagcagatttgc

SEQ ID NO: 150230 - DNA, 1973 bp, Zea Mays
cacatcgcgtcgcgattcgcgagggctccccccaaccccatcaagtctggccaggtctctcccatatcgggttctcccttcctcttcctgtttccgcgcgcgagatcgccgccccgggtgggctctagatcccgatggcctcgcgccgccgcaccctgctcaaggtcatcatcctcggcgacagcggggttgggaagacgtctttgatgaaccaatatgtgaacaagaagttcagcaaccagtacaaggctacgattggggcggatttcctcaccaaggaggtgcagttcgaggacaggctcttcactctgcaagtaagattggttaccctagccgtatgccgtgccgtgatctgggagtagttatgtttctttacgccaacttcagccccgattagtactttcttaattagttcgcgaactcattcatcagctgggatatttagaaagtataggagagggtgtttgccgctcaacatttgttaggtcatagcgtcgtgcttgtcgcgtctgattcagtatcctcaatatgctgtttcgtttatgcagtttgcttacacttggaatgtctagctccagtactaggtcctgttggcaaaatttcagtttcatcaattttattgcatcattgattactgtaatggcaacaatgtagtgaagtatttctgctagaaaacgtgcctcctaaattttctgaggaaaacagtactactaaaaggtgtaccctttataacatctgggcatctgcattgtttttcattctttactagtgaatcagatgttgctgtttatattggcatgttggcatgatgttgtttatattaacatagggcatttgggacagatgtattattaactccttttctatacttgaccgtaatcttgctctttgcttaattcacaaacggctgttttcagatcatttcaaaccttctagatatccgttattttttcatgctactttgtaaagcaccatcttcatcgtctctattgtgcacataagaaatctatgtagatccagattaatatcatgtcaagagaaatgtcaaaggtattgtcttctggtttatggtgtttaacaagtctttgtagatatgggacactgctggtcaggaaaggtttcagagtcttggcgttgcattctaccggggagcagattgttgtgtcctagtctatgatgttaattctatgaaatcgtttgataatcttcacaactggcgtgaagagtttctaattcaggcgagcccatcagatcctgacaatttcccttttgttctgttgggtaacaaagttgatgtagatggtgggaacagccgtgtggtgtcggagaaaaaggcaaaggcatggtgcgcctctaaagggaacatcccgtactttgagacgtctgctaaggatggaacgaacgtggaagatgccttccagtgtattgtaaagaatgctctgaagaatgaaccggaggaagaattgtatgtgccagataccgtggatgtggtaggtggcaaccgggctcagagatcatctggctgctgttaagacatgaggcatccacgaggcgtggtgatcatcatcggctatgcagtgaccaaacaatacctcaacattgctgggcctccatggttatctacgtgtccgtattccatttgttacctttccagtctcctgctatgtacccaagggcgcatttcccatgctgtcagtcaatccgtagacttcatttgtgcagttccatcagtagcgtcataccttgtgaatacagttggacaaaataagagcaagcctgaactgaagttcgtctctgtgtgggatgggggtcgccttttcctcgctttctgcttcaatgcgagttgccacacccgtgctggctagaaatgccgtcccttctggaaagcgacacccagttggcaccataaattcaatgcaagacgtcttcaaaatcagttgccataatttgaatttcaattggagcagatttgc

SEQ ID NO: 150231 - DNA, 2095 bp, Zea Mays
cacatcgcgtcgcgattcgcgagggctccccccaaccccatcaagtctggccaggtctctcccatatcgggttctcccttcctcttcctgtttccgcgcgcgagatcgccgccccgggtgggctctagatcccgatggcctcgcgccgccgcaccctgctcaaggtcatcatcctcggcgacagcggggttgggaagacgtctttgatgaaccagtatcctgcgattcagatcgattcttgacaagctgacttgatttcgtttcgttgaattttttattcttctggttggttggttggtttgggttgtgttttctttgagctgtgatgtaattcagatatgtgaacaagaagttcagcaaccagtacaaggctacgattggggcggatttcctcaccaaggaggtgcagttcgaggacaggctcttcactctgcaagtaagattggttaccctagccgtatgccgtgccgtgatctgggagtagttatgtttctttacgccaacttcagccccgattagtactttcttaattagttcgcgaactcattcatcagctgggatatttagaaagtataggagagggtgtttgccgctcaacatttgttaggtcatagcgtcgtgcttgtcgcgtctgattcagtatcctcaatatgctgtttcgtttatgcagtttgcttacacttggaatgtctagctccagtactaggtcctgttggcaaaatttcagtttcatcaattttattgcatcattgattactgtaatggcaacaatgtagtgaagtatttctgctagaaaacgtgcctcctaaattttctgaggaaaacagtactactaaaaggtgtaccctttataacatctgggcatctgcattgtttttcattctttactagtgaatcagatgttgctgtttatattggcatgttggcatgatgttgtttatattaacatagggcatttgggacagatgtattattaactccttttctatacttgaccgtaatcttgctctttgcttaattcacaaacggctgttttcagatcatttcaaaccttctagatatccgttattttttcatgctactttgtaaagcaccatcttcatcgtctctattgtgcacataagaaatctatgtagatccagattaatatcatgtcaagagaaatgtcaaaggtattgtcttctggtttatggtgtttaacaagtctttgtagatatgggacactgctggtcaggaaaggtttcagagtcttggcgttgcattctaccggggagcagattgttgtgtcctagtctatgatgttaattctatgaaatcgtttgataatcttcacaactggcgtgaagagtttctaattcaggcgagcccatcagatcctgacaatttcccttttgttctgttgggtaacaaagttgatgtagatggtgggaacagccgtgtggtgtcggagaaaaaggcaaaggcatggtgcgcctctaaagggaacatcccgtactttgagacgtctgctaaggatggaacgaacgtggaagatgccttccagtgtattgtaaagaatgctctgaagaatgaaccggaggaagaattgtatgtgccagataccgtggatgtggtaggtggcaaccgggctcagagatcatctggctgctgttaagacatgaggcatccacgaggcgtggtgatcatcatcggctatgcagtgaccaaacaatacctcaacattgctgggcctccatggttatctacgtgtccgtattccatttgttacctttccagtctcctgctatgtacccaagggcgcatttcccatgctgtcagtcaatccgtagacttcatttgtgcagttccatcagtagcgtcataccttgtgaatacagttggacaaaataagagcaagcctgaactgaagttcgtctctgtgtgggatgggggtcgccttttcctcgctttctgcttcaatgcgagttgccacacccgtgctggctagaaatgccgtcccttctggaaagcgacacccagttggcaccataaattcaatgcaagacgtcttcaaaatcagttgccataatttgaatttcaattggagcagatttgc

SEQ ID NO: 150232 - DNA, 1163 bp, Zea Mays
cacatcgcgtcgcgattcgcgagggctccccccaaccccatcaagtctggccaggtctctcccatatcgggttctcccttcctcttcctgtttccgcgcgcgagatcgccgccccgggtgggctctagatcccgatggcctcgcgccgccgcaccctgctcaaggtcatcatcctcggcgacagcggggttgggaagacgtctttgatgaaccaatatgtgaacaagaagttcagcaaccagtacaaggctacgattggggcggatttcctcaccaaggaggtgcagttcgaggacaggctcttcactctgcaaagtcttggcgttgcattctaccggggagcagattgttgtgtcctagtctatgatgttaattctatgaaatcgtttgataatcttcacaactggcgtgaagagtttctaattcaggcgagcccatcagatcctgacaatttcccttttgttctgttgggtaacaaagttgatgtagatggtgggaacagccgtgtggtgtcggagaaaaaggcaaaggcatggtgcgcctctaaagggaacatcccgtactttgagacgtctgctaaggatggaacgaacgtggaagatgccttccagtgtattgtaaagaatgctctgaagaatgaaccggaggaagaattgtatgtgccagataccgtggatgtggtaggtggcaaccgggctcagagatcatctggctgctgttaagacatgaggcatccacgaggcgtggtgatcatcatcggctatgcagtgaccaaacaatacctcaacattgctgggcctccatggttatctacgtgtccgtattccatttgttacctttccagtctcctgctatgtacccaagggcgcatttcccatgctgtcagtcaatccgtagacttcatttgtgcagttccatcagtagcgtcataccttgtgaatacagttggacaaaataagagcaagcctgaactgaagttcgtctctgtgtgggatgggggtcgccttttcctcgctttctgcttcaatgcgagttgccacacccgtgctggctagaaatgccgtcccttctggaaagcgacacccagttggcaccataaattcaatgcaagacgtcttcaaaatcagttgccataatttgaatttcaattggagcagatttgc

SEQ ID NO: 150233 - DNA, 1196 bp, Zea Mays
cacatcgcgtcgcgattcgcgagggctccccccaaccccatcaagtctggccaggtctctcccatatcgggttctcccttcctcttcctgtttccgcgcgcgagatcgccgccccgggtgggctctagatcccgatggcctcgcgccgccgcaccctgctcaaggtcatcatcctcggcgacagcggggttgggaagacgtctttgatgaaccaatatgtgaacaagaagttcagcaaccagtacaaggctacgattggggcggatttcctcaccaaggaggtgcagttcgaggacaggctcttcactctgcaaatatgggacactgctggtcaggaaaggtttcagagtcttggcgttgcattctaccggggagcagattgttgtgtcctagtctatgatgttaattctatgaaatcgtttgataatcttcacaactggcgtgaagagtttctaattcaggcgagcccatcagatcctgacaatttcccttttgttctgttgggtaacaaagttgatgtagatggtgggaacagccgtgtggtgtcggagaaaaaggcaaaggcatggtgcgcctctaaagggaacatcccgtactttgagacgtctgctaaggatggaacgaacgtggaagatgccttccagtgtattgtaaagaatgctctgaagaatgaaccggaggaagaattgtatgtgccagataccgtggatgtggtaggtggcaaccgggctcagagatcatctggctgctgttaagacatgaggcatccacgaggcgtggtgatcatcatcggctatgcagtgaccaaacaatacctcaacattgctgggcctccatggttatctacgtgtccgtattccatttgttacctttccagtctcctgctatgtacccaagggcgcatttcccatgctgtcagtcaatccgtagacttcatttgtgcagttccatcagtagcgtcataccttgtgaatacagttggacaaaataagagcaagcctgaactgaagttcgtctctgtgtgggatgggggtcgccttttcctcgctttctgcttcaatgcgagttgccacacccgtgctggctagaaatgccgtcccttctggaaagcgacacccagttggcaccataaattcaatgcaagacgtcttcaaaatcagttgccataatttgaatttcaattggagcagatttgc

SEQ ID NO: 150234 - DNA, 207 bp, Zea Mays
atggcgaaaacgatgccactgcgcgagtcgatgtcagggctggtgtcgaacgaatacggggaggaggcgcatgctcctacgccctttgccgagaatgaggtggcgcggaggtggaggcatgaggggggagagaaaagaagtagaatgacgaacgaggtggtggcaactgaggtgatgaccatcattatcgtgcggaggtatagatga

SEQ ID NO: 150235 - DNA, 516 bp, Zea Mays
gacaatggtgggagataaaaaccaagaacagcatcagcatgtgccgtgagcagagagcactgtccgtgtcttcagaatgcagaaacaaaccaaaaaagaaaatagaggatgacccccccacaaaaacacacacacatggcaccagacgacgttcgttcgttcgttcgttcaagggtacacctcgatgatggagcggacgccgaggaccggcgtgactctgtagtcggtgaacccggcctcgacgaagatccgcttccactcctgctcgtcccgctccatgccgttgacgaccatgatgtagaggtcgaacagggcctgcatctccctgtgcctcgggtccgccggcccagccccgaccaccatgtcgatgattatcaccttccctcctccttccctcggagggatggccttcctgcagttcctcagtatcttcacgcactcctcgtggccccagtcatgcagaacccactgaaatcaaatagccactgtttacatctgacaactccactcttttct

SEQ ID NO: 150236 - DNA, 621 bp, Zea Mays
atgccggtaccgggcagggcggcggccgcgtgcaccggcgcggcgggcatcaagctgttcggcaaggtcatcaccacgccgccgcaccacgcgggcgccgcgcctccgaggctgcagcaggcggcagcggcgtcggggcgcgggagcgccgacctactggaggaggtggcgcgggcgcgcgcggcggcggccgaggtgcggctgccgtgcccgcgctgcctgagccgggacaccaagttctgctacttcaacaactacaacgtcaaccagccgcgccacttctgccgggcctgccaccgctactggacggccggcggcgccatccgcaacgtgcccatcggctccggccgccgcaagaaccgcccggtgctgctcccaccgccggcgccgcacgctgtcaccgccaccgataacagccgccggtcgggcgcggggtctcctccggtgttcggctctgtgttcaccgcgccctaccagcagctcggcgcgcccacccagttcaccacgtcgccggcttacgccgccaccgcccccctggggacgacggggcagtgcttgtggctggtggcgacagcagatcatcgttctgttgcatcgggccgcgcttttgatctgatatga

SEQ ID NO: 150237 - DNA, 263 bp, Zea Mays
taaacaattatggtcacatacaacaaaatatatatacctttggagaagcaccttccaccaaatgagaatgacaatcgttttctgtatcttcagatagatatttgtcaagttcaccaaatatgatgagttgtcaaagttttagaaaaaagtcaacaacctaatatatttgtgaacagagggagcaaatgttatgagcatatggtcaaacatgagaagaaactgagataacagcccatgaaagatcttgattcagaaaaagattg

SEQ ID NO: 150238 - DNA, 2083 bp, Zea Mays
caggtaaacagccagagccgcggagcaaaataaacaggcagtatccgggctgttgccccctccaatgccggccggccacccatcaccttcctcccgcgcgctccggtgccctcgctaccaccaccacctaatcggccattctgccttccgctccgtttctccgcgcgcctgacctcctcctctacctgatggccgccaccccgccgccgtcgtgggacgcgtcaccgcagccccggcggccggcctcctcctcggggcccgccaagcgcgggggcctcctgctggggcgctacgagctgggccgcctgctcggccacggcaccttcgccaaggtgtaccacgcccgccacgccgacgacaccggcgagaccgtcgccatcaaggtgctcgacaaggagaaggccctgcgcaacggcctcgtcccgcacatcaagcgcgagatcgccatcctccgccgcgtgcgccaccccaacatcgtccgcctcttcgaggtcatggccaccaggtccaagatctacttcgtcatggagttcgtccgcggcggggagctcttcgcgcgcgtcgccaagggccgcctcaaggaggacaccgcgcgcaggtacttccagcagctcatctccgccgtcggcttctgccacgcccgcggcgtcttccaccgcgacctcaagcccgagaatctcctcgtcgacgagcgcggcgacctcaaggtctccgacttcggcctctcggcggtcgccgaccagttccaccccgacggcctcctccacaccttctgtggcacgccgtcatacgtcgctccggaggtgctcgcgcgccgcggctacgacggcgccaaggcggacatatggtcgtgcggtgtcatcctgttcgtgctcatggctggctacctccctttccacgaccagaacctcatggcgatgtaccgtaagatctacaggggggaattccggtgcccgagatggttttccaaggatcttagctgtctaatgaatcagctccttgacacgaacccggagaccaggatcacggtggctcagataattgagagcaggtggtttaagaaagggttccggccggtcaggttctacgtcgaggatgaccaagtgcacagcttggcagacagtgaggctgaggcgctggaagaactggggcccagtgacagtgagcctccacccccacctccccctcccccgccaccaccaccaccacagaaagaggacgacggcgatgattctggctgggagtcagactcctccgtagcgtcctgcccagccacattgtcatcagaggagaggagacggcctgtcggatctctcccacggccggtaagtctaaacgcgttcgatatcatctcgttctcaaggggattcaatctgtcggggttgttcgaggagcgaggcaatgaagtgagattcgtctcggcacatcccatgcaaacgatcataacgaaactggaggagatcgccaaggtgaagagctttgcagttcggcggaaggattggcgggtgagcctggaaggcacgagagaaggcgagaagggtccactgacgatcggggctgaagtgtttgagctcacgccaagccttgtggtggtggaggtgaggatgaaggcaggtgacagggaagaatatgaggaattttgtgagggggagttgaaacctgggatgctgcacctcgtgcaccgtacagcatcggttccggatataccttctgcatgatactgattagcttagaaggtaactcttgctcttgcttggaaggactatggaaaagaaatttggattgagaggttgcacctttctgcttcagcgtaagcatctgtgcaggaaaatgtcattcatagattttccttattagttactttttggttaatattctttccgcaatccaaaatgtcttgtgatatatagtagtcgtgtgctaatatcaattgtcaattttctagttcttaaagtttaaataaaagttgcggccatttcactgcagcattattatgaaagctataactctaatgttatttagccatgtaacggtgctgcacttatgtacattcagcttgtacaaatgtcatccgtaaattttt

SEQ ID NO: 150239 - DNA, 164 bp, Zea Mays
gttgctctccgaagtctccagcccgcccggaaatcttccgtagatgccgatgtgacgtgcaccggcctcggctgtgctgtgccgcccagaatgctccgcgtatgtcggctctcggctgcaccgccggacgccatctgtcaccgctgggcacgtagcacgctgcg

SEQ ID NO: 150240 - DNA, 656 bp, Zea Mays
ctcttgtgcactgtatttattcctaggttatattcacaacatatcaaattgtggccactcaccaaatacaagtggctttatgccacaataaaactgtcctcatttgatgcagaaagccatttttgagtggaggaaaccaatgatcccacacagcgaagatgcagtacaggttactcaacattttgccaatcattttatcagccaagcacgcaagtctccaaacaggcctcctgccgacaaagtgctggataacttaatttacaactacagtccgacatttaccgggaaaaaatcgaaatcgtttgaggaggtctacatcttctcctgagactggattgaacgcctgagtgtcttcaggaatctgtagttctgcactacattgctattgtagtgtaaccgtgcattagtattacccgtggtaccagaagttgtatttgtatagattcgttggactgcctgtattgcagtaacctttccaccgtatgggtggctctatagaatgcctataagcagcgcaataataatgataatgtaagactgaaaaaaaatacttgtatggagattttctgaatttaaaagtttctccaaatcaggtgaaggtcgaatgttcctggacctgattcatgaaatccatcgaatccaatttgtttggagtg

SEQ ID NO: 150241 - DNA, 1050 bp, Zea Mays
atataaaatataatatgatagcttattgaatattctcaattgtgaactcgataaaactatacacaatggaagagtaatgcttagtttgaagttagaatatcatttgcttgcctgtggttaggtactggagtgaagtactgcagccttcctgtttgctttgccaaaagtgggcactaattgttctcttgccgttgtgctaggacaataatatcttggaggcatttgacgcccaggatcaagcatcaactcttcagtttcccagctatgctttggagggttcagtttttcaaaggtttgacactgacctcatcaagaaagtcagcaccaactgtcttgtcatgcaaaatcacagatatggtatatcaccaaggcgatatcgagagaacgatgcactatcaagtttcttcaaaatcttgactacatcacctgatgaaaacggcaaggtctatgtctcaactgtacaagccaataattatccaatcacttgcacgcaatggcatcctgagaaagccatttttgagtggaggaaaccaatgatcccacacagcgaagatgcagtacaggttactcaacattttgccaatcattttatcagccaagcacgcaagtctccaaacaggcctcctgccgacaaagtgctggataacttaatttacaactacagtccgacatttaccgggaaaaaatcgaaatcgtttgaggaggtctacatcttctcctgagactggattgaacgcctgagtgtcttcaggaatctgtagttctgcactacattgctattgtagtgtaaccgtgcattagtattacccgtggtaccagaagttgtatttgtatagattcgttggactgcctgtattgcagtaacctttccaccgtatgggtggctctatagaatgcctataagcagcgcaataataatgataatgtaagactgaaaaaaaatacttgtatggagattttctgaatttaaaagtttctccaaatcaggtgaaggtcgaatgttcctggacctgattcatgaaatccatcgaatccaatttgtttggagtg

SEQ ID NO: 150242 - DNA, 1332 bp, Zea Mays
cgtgactcacgcaatatatcgagcaccttaatgagtatcgcactagcacattaatttattcaacgatcgaactattctgaataatttaccagcttaccgtttcagcagctgactcgaagccgcaagatcggtagcgattttccggtccaagcaatttgtcgaacacttggggagtatcgtgctgctagcctcgtcttcacctgattcttgggatttcttgatgacacacggatgacgacgatcagtagggtgacatatatagagctgtattcgcgacgcgatgacgaacgatgctaaccggcggaattgacgacgcaattgggaattaaaaccgagtgagccgagagggcgcaccggcgagcaagaaaccacacgagtacaagatatggaaaacgacgggctcgacaacacgcgaagcgacggcggtcgaatcggcaacaaatcgttggcgaattcgataaacacgacctcagtcgcgtgctgacgtggtcaaaataattgtggctagcaagcttgcgacagaggcgatgatggtgtgggaactcgacacgctgtgacgagcagataaaattcgtgcgcgcggcaacaaagaaagagcgagctacgcgtgagcagagagctccacacgaaaactcgatgcgcgcagggactacagcgagctagagcagacagtcatgggagatgtagagccgagctgggcgacaaagcgaaatccgggctggagcattgacgagcaaagagcttcgcgcgcgcaagaacaacagacgctatgcgcgcgacgcaaaggcgagcaggacgcagccaacaggggagcttcgacggcgagcaactgagaatggctcgacgatgtcatggagcagcaggaaataacaacgccaagatggtcgaggagacaagtccggcgacgacatagacggttagcacggcgagcaggggaggagctcgggcgagctgagggagcggtaaaggggacgattaggccgagcaggtcacggtgcgtgcgcaggatagcgcgcacaggaagaagaccttggttggagagagcgctggctggagatggacgccgagcgcgcagaccgagcagtcgccatggggacgagcgaagctccggtcggcgagctggagcaaggtccagtgcgcggccgagcaggagagagatggacggccgagcagtcgagcaagggcctggccgggatgcgtcaagtgaattcaggacgcgcgtgcttgattttattctcgagttgagcggtggctggagctggaacaccggtgagccaggcgcggcactggaaagatcggagcagggaacgacgggataagccaggcggccta

SEQ ID NO: 150243 - DNA, 852 bp, Zea Mays
atgctcccgatcagtggatctgtctccgccaccggaggggcgaaggcgcggatgatcacgagctgcagcggctgccgcgtcctgcgcaagggctgcaccgacgcctgcaccatccgcccctgcctgcagtggatggagaaccccgaggcgcaggccaacgccaccttcttcctcgccaagttctacggccgggcggggctgctcaacctgatcgccgccgcgccagacgacgccgactcccgcgcgtcggtcttccgctccctgctctacgaggcgtgcggccgcatcgtcaacccgctgtacggctccgtcggcctgctctggtcgggccagtggcagaagtgcgtcgacgccgtcgacgccgtgctcgtcaagggggacctcgtcgtgcaggccgacgctgcggctgcggcgccgccgccactcggcgccgcctgcgacatccgccacttccccaaagatccggacgccgccgtcgcggccgacctcctccgcttcgcccgcgcgggagtcaagcgcgccggttcgtcttccaacaactcatccaagcaggccaagcttcttaagggcaacgccggcaagaaacgcgcgtcgcgcagccctcctttggggcagcaacaagaggcggaggagctggtgccggtgccgatggtcgtcgagcttgagcacggcgaggagtccgcggccagccaccaccaccacctgcagctgcaggggtcggaggaggacgccggcgccgaggcggcctccctcgtgaagcaagctgaggccgcgccgccagtcagcaaccaggtgctggtagcggatcaggaggcagaagaggacgttgggctggagctcacgctgggttga

SEQ ID NO: 150244 - DNA, 1400 bp, Zea Mays
aaacgcccacccccaccccctccctctccaacaacttgggcgcgcgcgcggccgggtagcaaaagctcgcgatctgtgcgcccaccaccgggaggagcgaagatgcggatgagctgcaatggctgccgcgtcctgcgcaagggctgcggcgacgcctgcaccatccgcccctgcctgcagtggatcgaggcccccgaggcgcaggccaacgccaccgtcttcctcgcaaagttctacggccgggcgggcctgctcaacctgctcgccgccgcgcccgacgacggcgtccgccccgcggtcttccgctccctgctctacgaggcgtgcggccgcatcgtcaacccggtctacggctccgtcggcctgctctggtcgcgccagtggcacaggtgcgccgacgccgtcgaggccgtgctcaggggggaccccgtcgtgcaggtcgacgccgggtccgacgccgccgctgccccgccgctgctcgccggcgccaggccgccgccgccggccgccttcgacatccgccacgtccccagggatcccgacgccaccgccgccgacctcctccgcgccggccgcaagaggttcaagcgcgcgggttcgtcttccaacgcctccaaggcgaagcccctgcccctcgagctcgagggcaaggccggcaacaacgaacgcgcgtcgcccagccctcccccgacgcaacaacgagaggcggaggagctgcagccggtgccgatggtcgtcgagccagaacacggcgaggagtccgccggcagccacgaccaccacctgcagctgcaggggtggtcggaggaggacaccgacgtggaggcggcctcacacgtgagccaagccgaggctgagccgccagccagcagccagagccaggtgctggtagcggatcaggaggaagaggaggttgggctcgagctcacgcttgggttcgagcctgtcgtcaggcagcagccgaggtcgtcgcgctgcgacaagagcggcttgagcgcggcatcgagcctcatcggcctgcggctgcagctgccggccgcctaagcacaggcacagctcgcacctaaacgaatagagcagttttgcgaccctgcgcctgcggtgtttgcttaaaaataagcttttggacccccgggtgccaggagacacacagtagccaacttcaaattttctaggttttgtttatctttttcaatttttcttcttgtctttaactgtaaaagttgatggactgcacaattactcaggtagagggggtttggttccccgatcaaagagggcgtttggttactcggtttagttcttatatcgaatgtttaaatgccagttataagtattatatgtagtatatttaaaaattaattatataaatgaagactaaacattagtagacaaattaa

SEQ ID NO: 150245 - DNA, 802 bp, Zea Mays
atgctcagactgcagcttcctcagtcccatagggaggaagttgagagttctaataagagcaacggccaataccattagcgagttatttttctgcaatatatgtcagcaaccgatcatttggttatggctcgtgtcatacaggatgtattggatccctttacaccaaccattccactaagaataacgtacaacaataggctacttctgccaagtgctgagctaaagccatccgcggttgtaagtaaaccacgagtcgatatcggtggcagtgacatgagggctttctacaccctggtactgattgacccggatgccccaagtccaagccatccatcactaagggagtacttgcactggatggtgacagatattccagaaacaactagtgtcaactttggccaagagctaatattttatgagaggccggacccaagatctggcatccacaggctggtatttgtgctgttccgtcaacttggcagggggacagtttttgcaccagaaatgcgccacaacttcaactgcagaagctttgcacggcaatatcacctcagcattgccaccgctacatatttcaactgtcaaagggaaggtggatccggcggaagaaggtttagggaagagtagaaaccataggccactgcatggtcacactatagaaatatcatcaataatgtgcactatattgaatcaatgcaccacctctatatgctgaatgttatgtatctcaaactatgattgtactgacttgaaaggttgagagcttagtctcttagcagaatatagcacaatattactagta

SEQ ID NO: 150246 - DNA, 1463 bp, Zea Mays
cgcgaggaagactggactggactgacggaggcgcgtggagtgagaattttgcaaacatggcaccggctacgacgggcttcagaaatttggcaccgccatcgtggcaattgaattcgtagcattataatcctacacggtttaaaaatttagcatcggtctctctaaatggccattagcacatttcttcttcccgttttgccctcgcgccgtttcttccctgggcgtgtctccctccgccacgccttcttcgacctcgttttgccctcgcgtcgcgcccaccccgctcgtcgcctaccgccgcagggggccccggcgggacctcgccgtcgacccggccgcggcgcgcgccgcgctcgtcacctgcgggggcctctgcccggggctcaacaccgtgctgagggagctcgtcgtcgggctccaggagctctacggcgtccgccacgtcctccacgctcatcgacgcctggggggagcgcttcgtggcgctggaccggggcagcctccgccacccgcagtggcaggaggtcgccgaggtcgtctcctctcgcgacagctactccaaggcgcccaaatccgacgtccagtgcaagaaccgcatcgacacgctcaagaagaagtacaaggtcaagaaggccaagcacgactccgactggcgctacttcgaccgcctcgacgacctgctcgctcccgtgctgctcaagcccaattcttcttcttcctcggctgctgctgctacggcggcggcggcagcccggagcgccgggcccatggtccctccgcgcatcaacttcccgcagcgcacccgcacgcccctccactcctccgcgggggcaaagtggaggatgccgtcgccgttgccccagccgtcggcgtcgtccgactcctccgacgggttcccgccgtccgcggtggcgaacggcaagaggcagcgcgtggaggagcccgccgccgccgccgcggacaacggcgcggagagcagcgtcagccgcgcgcagggtctgcgcgagctggcgcaagcgatccggcggctaggggaggtgtacgagcgcgtggagagcgccaagagggatcaggagctccggatggagcgggagcgcctggactccgcccggcagctggaggagcagcgcgtgcagttctccactagcatgccccgcagcagtcgcattaccagaacagcacaagccccaccgggggcgatgacaacggcagcgactcggacaaggaagctcaggaggatgcggaagacgaagaggaagagagccagtgattgctctcctcttcagcaatggaatggttttctcagtgatcttttcactgttcgggtgcgggagcgtgatgcgctctcgatggcagtgcgttgggccggctggcctgccgtcccgagacgtcagtggcaggggccatgggataggcacctgcgcgccaggcaagcaccgctgcttcccaaagggctaggctag

SEQ ID NO: 150247 - DNA, 1412 bp, Zea Mays
gtcggatccttgcttcccttgcaattcagcagcgagagcaggagcatttctcccccagcgcgcaggagctccctggctgcccctcacctccagccaccaccgctccttccatggcgcgcaagccccaagctccccacgcgcgttcctttcttccaggcgcgtgagctccctccggcgtcggtcaacaggcaggattgagcaccgagctcatccatggcgcctcccatggcgcgggccctcctctggtccagtgcgcgcgaggagtcccccatggccgacctcccttcttccctctcggcctcctctgccctaggtccggcacccctccccacagcagcaaatcgccggtgccctcccgcagcagcgtgccacgaccctttctgctcgtgcgcaggattgctggcagggtcctgccatggccggacctgcctcctctagctcggcgccctccctgctaccttccagggcgcgccaaggcccctcccatgggcgccaccagcaggagctcctactcccgtggtgcctctgctctcccatctaggcaccccttcccctagcggatccatggttctaggcggatctcctcctcatccgacgctccagcctggcgtcttcccccttctctggccatttcgcacagcagcatccagcatcagcgctccccttcagccatggtcgccgagccccagcgcacccccttggccgtcggcctctgcgcctccctccactcggcacccctcgacgcagcacaccaatcagagacacgacgcccttctctacgttctgcgcccagccatggaggttgtcggtctgcagctcccctctgctcggacgccgagctccctacgccgggtcccctctccagcggcccccatcctccagcagccgccatggccgagctcagtggcgcggcgcccctgctatctcctccccaacgccgatgcctttcctgctcatcaatggagatcttgtcggcggctgactgcctcgcttcgcggtgcccctcctcaccatcgggtactcgccgagccgaccccgctagccaccctctccagctcgccattacccctgtagcagcgcgatggtttcctctgctgccagaggcctcgcccaagtccggccttggtcgctcccatcaccgaccgagctcctcttctgtagcaggccatccgccttgtctccatggtcatgtgcagcgagctctattttttttcccagtgctctcgcctgctcgacggaatgctgcagcgcgaagcggccatggatcctccctgtgtcgcgccctcggcgtgcttgacgtaatgccgcagcaagctgcagcagcgacgcccttcgctgcgacgcgctcgccaggtcggtccactcgccgtcgatctgcgcagcccctgcacgtcgtcgtcgaaacccgcggt

SEQ ID NO: 150248 - DNA, 243 bp, Zea Mays
atgttttttggctgccgacatagagccatacaaagccaaagtttcaaggtccatagcaccggcagcgaaatcacgacccgacctggaaatttcaggagcagtccaaattctggctcatatctttgtctacaaacttcatcgtcccatttttttcttcctcaactcctgctgtattgccttttgccttgccttctctgcaagatcaggccccggattctgatcctcagcagaatcaacttttga

SEQ ID NO: 150249 - DNA, 165 bp, Zea Mays
atggaacactccacaaggtcctaagctcgatctgccaggccttggaatccaatgatcagaacaagaagaaggacgataactggatccagaggctgtcatacgctcaacctgatttctccgggcctccacccccaaagttactgtagctacgcgtcttcttattct

SEQ ID NO: 150250 - DNA, 836 bp, Zea Mays
ctctaaacctctcgctaccttccccgtccctactggcggcagcctagggctttccctaagcttctccatcccaagatcaagatgcctccgggaaagaaggggtcacgatgcatactaaatccccagcgacaagaaaaatataaagatacccaaccaagtgcaataaatcttttcaaggagatgtattgcggcaagaagaaatgatttagtaaaattgttcagaaagctattgatgatatggaagcaatggtggcagcatcagttgaagttagacaacttgtgatgtcttctacccaagttgtttctcatgtcttgcccagctcaagtaaattccttcacaatgttggccttcagcctgcctccaagacaagctctatttcagcaaaggtgcacgagcttcaatctcaattggagaccaagagacaagaaaaagatggacttaggcaagaaatggaatccttaaaggctacatcacaagaatttatgaccactattgctaatcaaacaattgagatcgagaatttaaagaagtcgctagcagaaaataatagccttcttcgtcagatactaagcaccaatcgaggcatgtctcctccttaagattgttgctatagtcgaccatgccaatgttacatccaacaacactggactacttttttattagttgtctatttagtctgatcatattgatactatagtagctgtgtgcagcttgtggcggttgaacatgtcctacttttgcatttaagttatagaaaagttgtgtgtgttcatgttgtttgatgaaattgtatgcacggtttggattgaattcaattatatactgattttattaa

SEQ ID NO: 150251 - DNA, 855 bp, Zea Mays
ctctaaacctctcgctaccttccccgtccctactggcggcagcctagggctttccctaagcttctccatcccaagatcaagatgcctccgggaaagaaggggtcacgatgcatactaaatccccagcgacaagaaaaatataaagatacccaaccaagtgcaataaatcttttcaaggagatgtattgcggcaagaagaaatgatttagtaaaattgttcagaaagctattgtaagtatctatttacctttttgcgttcactttccaacttatgttacactatgctgagttttaatcttaatgctaggatgatatggaagcaatggtggcagcatcagttgaagttagacaacttgtgatgtcttctacccaagttgtttctcatgtcttgcccagctcaagtaaattccttcacaatgttggccttcagcctgcctccaagacaagctctatttcagcaaaggtgcacgagcttcaatctcaattggagaccaagagacaagaaaaagatggacttaggcaagaaatggaatccttaaaggctacatcacaagaatttatgaccactattgctaatcaaacaattgagatcgagaatttaaagaagtcgctagcagaaaataatagccttcttcgtcagatactaagcaccaatcgaggcatgtctcctccttaagattgttgctatagtcgaccatgccaatgttacatccaacaacactggactacttttttattagttgtctatttagtctgatcatattgatactatagtagctgtgtgcagcttgtggcggttgaacatgtcctacttttgcatttaagttatagaaaagttgtgtgtgttcatgttgt

SEQ ID NO: 150252 - DNA, 567 bp, Zea Mays
atggaggcaaagagcaagcacctgggcacttcggaatgcttttttagctttgcagataaaatcttgagcaaaatgggggaaggtacatttgagcgtgttttggaatgctgggaccgtgaaacacgtgaatatgttgccataaaagttgttcgcagtatccgcaagtacaatgacgctgcaatgattgagatagatgtgctcaatcgccttgcagaaaatgaaaaatatagatctctatcattcgtattgtatccttcctcggattgcttcttttgttctactacaaatatgctccacatggtagggagaggtctcgaggtcaagcctggacccactgtcaaggtgtcagttctttcatcgtctacttctagagataacaactttagcatgttggttaaagattctcgacatgattttggtacaatatggaagaaattggttggtgctttactgtatggagagaaggtgaaactggagaatgagcagatgtggctgttcatggacgacaacatcaagaaacctgcaacatgcaacctgattttaagaaatctaccacctgcaacatga

SEQ ID NO: 150253 - DNA, 446 bp, Zea Mays
aacatcttacggaaatttatttgtgctgccccatggaatagtatagctcttgtcaactggatgatggacctagttgcacgtttaagcattttatagtgtagtgatttgtcgttccgtatctatgcttcatacaattttttttgctcccgtcgcaacgcacgggcacatacctagtcacaaactaaagtgtaaactagcagaaagggtaaactcgttgactggtactcttttcttcttccttcttgaaaacattggacatgaagcttttttttctcagttcttaccgatcgtcggaactccaaactatacataaacaggccaggccggagacgaaccccacactatctatttacacaataaatcgaagtagcacacacaccttattaacaacggcgaaagctgcctgaagcggagtcatatcttcataagggagtgaaccggtgacc

SEQ ID NO: 150254 - DNA, 1103 bp, Zea Mays
taaaccatgcatatgtcaatgtgtcctgtttcaatagggtcttattataggacgtgatgccactgaattaggatgtttgttcttttgctacctttgttaaacaacatcagatcattcgtattgtatccttcctcggattgcttcttttgttctactacaaatatgctccacatggcagggagagttaagctcctaaatttcttattttgtgcattgtgaaatgattgttctaacaacatcaagtttgtgctcttcatataatctatctcagattgctctgtgttttgcaggtctcaaggtcaagcctggacccactgtcaagtgtgtgcttggacatgactttatcctgcactttccagtgctgcacttggggaatcaaagaaaagtgaaagtgccatgtcaaagttgatgaccagaagcttgctattggaaccctctctattgaaaaatacccctagatagaaattgatttggttttcaataaagagtgtgagctatcacacacatcgaaaactactagtgtatttttctttggttacaaggttgagcaaccaatcgaggaagatgaatattctttttaacattgattttttattagttttatttcataagaagagaaggagctaaacattccagtaatcaaggaccagagaagtgaagagaaggcagttgctgcagcttcaaaatcaagtcttgggcttgaaaaaaatttcatacaacgcacgtgcgaacgcaccgggagcctaccacctcccgtgctcaccattgccgtgtttgatacctgactgctactgctgttacatcgaatctccagggtgctcatggagtcatggtgcatatgctcatgtttgtagggtgtcagtttttttcatcgtctacttctagagataacaactttagcatgttggttaaagtttctcggtgtgctaagcttttcttttttgtttcatttgaaactcaactatatagatggtgccctactttacattttgcaaacacaaactgctccaaaataaatggaagcttatgttttaatttcatttgttaaacttgcatattcttcatctgtcatgtacttcatctgtgtgcttggaattttagcc

SEQ ID NO: 150255 - DNA, 915 bp, Zea Mays
aaagggcgactcgccgactccgaagcccaaaccctcaacctacagcagcgcgccagcgccgctccgcccgcccatgggctcctcatcccactctctcgccgtctcacggcgcggccgcagcgcgcggcagtcccccttctttcgagacctcgccaccccgatcccgtcccatcgtggcgtgtcccgctttgcctcgggggcttccccctcctccacgccaccacccccgccgcccatcttcaccctcgatgaccgctatgcctccgcagacttctccccggaccccaccgcctccgaccttctccccgtcgcgtcgtctccctccccccgcaccgctgccagccgctcgccgccatgggacctgtcccggggcaaggtggcgctctcggcaccaggatcccccatggctggggtcgtcgagccgacccggaaagagatgctcgctttgccggcccctgcgagccctggcaccccacctcctgccgcgacagcggaggcgcagtcaccggtgtcccccgcgcaggcacctaggacggagccggtggcgaacgcaggggaggtcgaacgggaggagtgggtcactgtatttggattctctattggtgataccaaccttattcttcgggaattcgagaaatgtggagtaatattgagacatcactctggtccaagagatggaaattggatccacatattgtaccagcgttcttatgatgctcgaaaggcccttcagaaaaatgttatccaactaagcagcagtctgatagttggagtaaagcctattgatgcagtgcactggcagcagctggacgagagtttcgctccaagcaacccaggtggatttatggtttcctttgccttcgaagtcacttggcttgaagagcacaggcgcatctaaccagtttaggaggcttt

SEQ ID NO: 150256 - DNA, 1510 bp, Zea Mays
acccactgctccacctccatcctccatggctcctccgccgcggcgaaacccgccgcaccagaaccccacccggaggaagggcgaggagccgtggctcgccgcgagcctccgcccggcgaacttcctcccgggcctcgccatcgggttcctcctaggcctcctcctcgacttgtcctcgtcgtggaggcccaagtccagccccgcgccggctccggccgccgcacccgcgcgggcctccagctccaagcgggcgtcggggacctcgtttgcctcgggcggcgaggagcttaagatggttttagtggtgcgtcaggacctcaagatgggggctggtaaaatagcttcccaatgtgcccatgcagcgactggcttgtacgcagaattgttgtcaaggtgttaatgcgcaatcggggtttacttagacaatgggagcaacttggacaagctaagattgttttgacatgcaagaatcaacaggaaatgaacaggctaaaggaaactgcagaacatagaggtattcctacatttattgtagctgatgcaggccgcacacaggtgctggctggatccaaaacagttcttgcaataggaccagggaggaaagctgacatcgattcagttactgggaaactgcgtttgctgtgatcttcagctgcctctcggagatggtcaacctctgttctactgatttcttcatatggttgttttactgtcttgccaacgccaacatatctggttattaactggacattacaagattcatgatagtcactaatttgagagcccttatttcaaaatcatagtaggaaaaaatacttgattatgcaaatcagcaaatcccatcttaagcaatcagtgtatgttttgcaaccacttaagagcttgttcggttattcccaatacacatggattggatgggattggaaaaaattgagaagaagtttgacttgtttgggattcaaacccatccaatcccactcaatccacatggattgagagctaaccgaacaagccctaatgtggataattactgctaaaataggttgcgttttctctctctacagagtactgtcttcccagttgaagagccctgcgccccgtttagcatcagaaacagttgcctgtcgttgtagccgtttgaaggttaacctgatgtttattcgtgaagttgtaagttttaggtggcccatttgagatgccatggcatacaagagatttcttgttgagacaatcctcattatgccataaaaaattatatcatcccttgtgtgtcactagctctatatatcatacaaccaaaaatatcttgcgttccaactatttatagtaaatttctatatgaaaatccatgagctactataatcttattttattgaaaaccaaacattcaaaaaaaatagaatgaagctactctattctttctcacttcaatcaaacacacccttagttatctatccaagagctactataatcttattttattgaaaaccaaacattcaaaaaaaaaaaa

SEQ ID NO: 150257 - DNA, 1538 bp, Zea Mays
agcaacacgttatcgacaagcacgtctccttccttccccacccactgctccacctccatcctccatggctcctccgccgcggcgaaacccgccgcaccagaaccccacccggaggaagggcgaggagccgtggctcgccgcgagcctccgcccggcgaacttcctcccgggcctcgccatcgggttcctcctaggcctcctcctcgacttgtcctcgtcgtggaggcccaagtccagccccgcgccggctccggccgccgcacccgcgcgggcctccagctccaagcgggcgtcggggacctcgtttgcctcgggcggcgaggagcttaagatggttttagtggtgcgtcaggacctcaagatgggggctggtaaaatagcttcccaatgtgcccatgcagcgactggcttgtacgcagaattgttgtcaagcaatcggggtttacttagacaatgggagcaacttggacaagctaagattgttttgacatgcaagaatcaacaggaaatgaacaggctaaaggaaactgcagaacatagaggtattcctacatttattgtagctgatgcaggccgcacacaggtgctggctggatccaaaacagttcttgcaataggaccagggaggaaagctgacatcgattcagttactgggaaactgcgtttgctgtgatcttcagctgcctctcggagatggtcaacctctgttctactgatttcttcatatggttgttttactgtcttgccaacgccaacatatctggttattaactggacattacaagattcatgatagtcactaatttgagagcccttatttcaaaatcatagtaggaaaaaatacttgattatgcaaatcagcaaatcccatcttaagcaatcagtgtatgttttgcaaccacttaagagcttgttcggttattcccaatacacatggattggatgggattggaaaaaattgagaagaagtttgacttgtttgggattcaaacccatccaatcccactcaatccacatggattgagagctaaccgaacaagccctaatgtggataattactgctaaaataggttgcgttttctctctctacagagtactgtcttcccagttgaagagccctgcgccccgtttagcatcagaaacagttgcctgtcgttgtagccgtttgaaggttaacctgatgtttattcgtgaagttgtaagttttaggtggcccatttgagatgccatggcatacaagagatttcttgttgagacaatcctcattatgccataaaaaattatatcatcccttgtgtgtcactagctctatatatcatacaaccaaaaatatcttgcgttccaactatttatagtaaatttctatatgaaaatccatgagctactataatcttattttattgaaaaccaaacattcaaaaaaaatagaatgaagctactctattctttctcacttcaatcaaacacacccttagttatctatccaagagctactataatcttattttattgaaaaccaaacattcaaaaaaaaaaaa

SEQ ID NO: 150258 - DNA, 892 bp, Zea Mays
agcaacacgttatcgacaagcacgtctccttccttccccacccactgctccacctccatcctccatggctcctccgccgcggcgaaacccgccgcaccagaaccccacccggaggaagggcgaggagccgtggctcgccgcgagcctccgcccggcgaacttcctcccgggcctcgccatcgggttcctcctaggcctcctcctcgacttgtcctcgtcgtggaggcccaagtccagccccgcgccggctccggccgccgcacccgcgcgggcctccagctccaagcgggcgtcggggacctcgtttgcctcgggcggcgaggagcttaagatggttttagtggtgcgtcaggacctcaagatgggggctggtaaaatagcttcccaatgtgcccatgcagcgactggcttgtacgcagaattgttgtcaagcaatcggggtttacttagacaatgggagcaacttggacaagctaagattgttttgacatgcaagaatcaacaggaaatgaacaggctaaaggaaactgcagaacatagaggtattcctacatttattgtagctgatgcaggccgcacacaggtgctggctggatccaaaacagttcttgcaataggaccagggaggaaagctgacatcgattcagttactgggaaactgcgtttgctgtgatcttcagctgcctctcggagatgagtactgtcttcccagttgaagagccctgcgccccgtttagcatcagaaacagttgcctgtcgttgtagccgtttgaaggttaacctgatgtttattcgtgaagttgtaagttttaggtggcccatttgagatgccatggcatacaagagatttcttgttgagacaatcctcattatgccataaaaaattatatca

SEQ ID NO: 150259 - DNA, 726 bp, Zea Mays
aggtagtacgcaccgaaaatgggcccaaacgagaagggtcgatccaacagcgccggaccaacatcgaagtggctagaattggatccaatgctctggccggcctgcgacgacgaccatatccaaagttccaaaaaccccgcacgctgctacaagcacagaatgccagaccattgcgagattccgatgatcacgtgcgcctttttcaccctgctgttatcccgatgagcactagctaccacttacttttgacccgtcctaggggcatgagcatcagccacctccgccaccgcaaccgcaacctcgtgcagctgctgctaggctactgcagaaggaagggcgagctgctgatggtctactactgcatgcccaacggtagcctcgacaagcaccgcctgcacgccgaggacggcaaggcgctgctggagtgagcgcagaggtttcagatcatcaaggatgtggcctccgacctcttctacctccacatgaagtgggggcaggtggtcgtccatcaaccgatcaacgtgggcggtatggtcgcacacctaggtgactttggcctcgccaggcttttatagttggccaaatggcactaacatgacgggccgggccgggcacggcactaaaaagcacggcactggcacggcacgacacggtcctcttagtgccagtgccgggcacggcccgtacatagtgccgtgcccggcccggcccgtcatgttagtgcca

SEQ ID NO: 150260 - DNA, 621 bp, Zea Mays
tgagtagtagtagtatcacaggaaaatcggctccgtctctctagctgcaaatcctgtgtgcggaaaagggagaggggaagaacctcctgacgacgctcgagcaactagggccaggagattgttactctcgccaaaagtgcgtctcttccccacgggatcgaaatatcccctgttcgctttgatttgatctacagatctttgctcctagctttattcgtccgattcatcgatcggctgtcgtctctgccattggcgtgcatacgcgtacagttggggatcgagcagccagctgctggacgaggatggatcggaggatgcatgcatggatcgagcagcggggccgggtgtccaaatcgcgcgcctgtgagcggctcacgggatgcgcatcgccggcgggggcgttgtgccatgacagagctccagggcctaacctcatctcctgccgcaggacggtaagtgacttttccctgttcattcatctctttcctttctttttttcttttcttttcagaccactccatccatcgtcctccttcatctgccctactgtacgcgctgcgtgccactgcacgccgaggcgaagctttcgccgatggcgatgactggctggcctatctacga

SEQ ID NO: 150261 - DNA, 2802 bp, Zea Mays
atgagaaacggcgttgcagattccaaaacccatcagaaaacttctgtcttttctggacaaaaggttcgtgaagttttccaattaaaacgcggatcatattcagatcttactgctgccaagatttcagagatgatgcactctaatagcttagataatgcaccgacacagtcgcttattagtgttgttaatggtattttggatgaaagcatagaaaggaaaaagggagaaataccacatcgtgtagtttacttactgcggaaagtcgttcaagagattgagcaccgtctctgtattcaagcagagcacataagaagtcaaaatgttaccatcaagacaagagaacaaaagtactgttcaaaaattaaagcacttgaaatgttggtaaatggcacaaatgaagaaaaccagatggcaataaacaggcttcagatagtcaagaatgagaagtcacaaatcgaagagaaaaaagaactctgtgagaaagatgttcaacgattaatgaaagagaaagaatattccaaaagcatcataatgaacctaacaaaagatatggaagccatgaatagattgcatgagcagcaacttgagcaaattggaagaaaggcaaaggaaatggaggaacaattaaccaccagggtaaaagaagtagagtatctcttgctacaatcgaataagaaagttgaagaacttgagattgcttctaggctaaaatcacagttatgggatcagaaagagaacatttttcagagttacatggataatcaacaattagttatcaaggacataagaatattgtcacagtcatatgaaaatgatatgtatgcacttcaaatgcagtggagaaatgaaatctctaatttaggatctgggttaaaatgtttggttgatgccgctgaaaattatcataaagtcctgacagagaaccaaaagttatttaatgaagtgcaagaactaaaaggtaatataagagtatattgtcgtgttaggccatttctttccggtcaagataaaaagtccaccacaattgactacatgggggaaaatggtgagcttcttatatcaaatccatttaagcaagggaaggacggacatagaatgttcaagtttaataaagtgtttactccatttgcttcccaagctgaggttttttctgacatacaaccactgatccgatcagttctggatggattcaacgtttgtatttttgcatatggccagactggttctggcaaaacttacactatgagtgggcctaccacatcaaaacaagattggggtgtcaattatcgagctttaaatgatttgtttgatatttcactaagtaggagaaatgccttctcatatgaggtgggggtacaaatggttgagatatacaatgaacaagtccgtgatctgctatcaaatgatattgcacaaagaagacttgggatttggaacacttctcaacccaatgggcttgttgttccagatgcaagcttgcactcagttaagtcgacatctgatgtattagacttgatggagattggacaagcaaatagagcagttggttcaacagcgctaaatgaacgaagtagtcggtcacacagtattctaactgtacatgttcgagggatggatttgaagaatggatcaacctctaggggttgtttgcatcttattgatcttgctggtagtgagagggtagagaagtctgaagtaaccggcgatagattaaaagaagctcaatacattaacaaatcactctctgcgttaggtgatgttatttttgctttgtcacagaaaagtgcccatgtgccttatagaaacagcaagttaacacaagttcttcaaagttctttaggtggacaagcaaaaactctaatgtttgttcagataaatcctgatgttgagtcatattcagaaactataagtactttaaagtttgctgaaagggtgtctggagtagagttaggtgctgctagaagtaacaaggagggaaaagatataaaagagctattggaacaggttgcgtctttgaaagacacaattttgcgcaaagatatggaaatagagcagatccaggtcatcaaagacaaagtaaaatccccaaatttgttgttagatagaaatgtgcctggcttgacgaagactacagcaaaccaacctagccaactattatcaggcgaacgaatgcttaagtctagtgacagagttctatcggatcgtcagagttacggcgaggtgaatgtagatcctaaccaccatgtgatggatactgcaccagtgagcatagatgaagcaggatatgagaacaatgcatcggatgatggtttatcgggtgaaaccgagaatgataattcagctgctgagatgacagcggaacggctgcatagatttccatcaagaataagcaggttcactctcacaaagaacgggcagccatctatgtctagatcgaacccaaaggatgctaagactccaagcaatacgaaagctccatcgagccggttgacaggaggctcttcagccaggtctaaaagacggcagtagagcacgatcatgttgctcgttttgatgtgcattgtagttgaaatgtgaatttgatgggtagttgtaggaccgttttatgattgtaactttagaaaatgtcagacactgatggcagaatatttgaggcatttgtttgatcatttgcttatgccgagcaaaacagcaaacaatgctcgattgtatgtgaaacactctgacctgtgaccatttgaatgtcggtgcgcctccggaagtccggagttgtgtatataccaccaaattgccggcctaaaa

SEQ ID NO: 150262 - DNA, 2318 bp, Zea Mays
atgagaaacggcgttgcagattccaaaacccatcagaaaacttctgtcttttctggacaaaaggttcgtgaagttttccaattaaaacgcggatcatattcagatcttactgctgccaagatttcagagatgatgcactctaatagcttagataatgcaccgacacagtcgcttattagtgttgttaatggtattttggatgaaagcatagaaaggaaaaagggagaaataccacatcgtgtagtttacttactgcggaaagtcgttcaagagattgagcaccgtctctgtattcaagcagagcacataagaagtcaaaatgttaccatcaagacaagagaacaaaagtactgttcaaaaattaaagcacttgaaatgttggtaaatggcacaaatgaagaaaaccagatggcaataaacaggcttcagatagtcaagaatgagaagtcacaaatcgaagagaaaaaagaactctgtgagaaagatgttcaacgattaatgaaagagaaagaatattccaaaagcatcataatgaacctaacaaaagatatggaagccatgaatagattgcatgagcagcaacttgagcaaattggaagaaaggcaaaggaaatggaggaacaattaaccaccagggtaaaagaagtagagtatctcttgctacaatcgaataagaaagttgaagaacttgagattgcttctaggctaaaatcacagttatgggatcagaaagagaacatttttcagagttacatggataatcaacaattagttatcaaggacataagaatattgtcacagtcatatgaaaatgatatgtatgcacttcaaatgcagtggagaaatgaaatctctaatttaggatctgggttaaaatgtttggttgatgccgctgaaaattatcataaagtcctgacagagaaccaaaagttatttaatgaagtgcaagaactaaaaggtaatataagagtatattgtcgtgttaggccatttctttccggtcaagataaaaagtccaccacaattgactacatgggggaaaatggtgagcttcttatatcaaatccatttaagcaagggaaggacggacatagaatgttcaagtttaataaagtgtttactccatttgcttcccaagctgaggttttttctgacatacaaccactgatccgatcagttctggatggattcaacgtttgtatttttgcatatggccagactggttctggcaaaacttacactatgagtgggcctaccacatcaaaacaagattggggtgtcaattatcgagctttaaatgatttgtttgatatttcactaagtaggagaaatgccttctcatatgaggtgggggtacaaatggttgagatatacaatgaacaagtccgtgatctgctatcaaatgatattgcacaaaaaacacttgggatttggaacacttctcaacccaatgggcttgttgttccagatgcaagcttgcactcagttaagtcgacatctgatgtattagacttgatggagattggacaagcaaatagagcagttggttcaacagcgctaaatgaacgaagtagtcggtcacacagtattctaactgtacatgttcgagggatggatttgaagaatggatcaacctctaggggttgtttgcatcttattgatcttgctggtagtgagagggtagagaagtctgaagtaaccggcgatagattaaaagaagctcaatacattaacaaatcactctctgcgttaggtgatgttatttttgctttgtcacagaaaagtgcccatgtgccttatagaaacagcaagttaacacaagttcttcaaagttctttaggtggacaagcaaaaactctaatgtttgttcagataaatcctgatgttgagtcatattcagaaactataagtactttaaagtttgctgaaagggtgtctggagtagagttaggtgctgctagaagtaacaaggagggaaaagatataaaagagctattggaacaggttcttgtacttcttgacttgtcactaactagagtttatttgtttccaattctgtagcaattttggttggaaaaacagtatactgaaaaaagggcaaacttttacatgaatgctatgttagtatttatcaaggttcaactttcgaagcatggtttgcatactactcaaaggtatggcgtgcataaagtgtttttgattaatctttgcacgatgacagtatttgtggaacacatccttcttttgtgaaaccatttgtcatgggcatcatagggagcgagaggcaacagcctgcctctcagccaggctgggataag

SEQ ID NO: 150263 - DNA, 110 bp, Zea Mays
gattatttctgagaatttcagtttcgccctattcaccccctctaggcgactttcaggcggcgactgggcgatggcggagcggatagcggagacggagagaacgagacgag

SEQ ID NO: 150264 - DNA, 1054 bp, Zea Mays
aggctttctggttgtttcactccacatcagattctcttatcaagatgtgaagatggttgaaggtgggaaggccactcgctgtaccaatcaaggcaatcattgagtgaatctgttttagcccttctgctatgtggtccagtttcaagtgatctgagagagttatggttcctaactactgaaagcaactactgagggatacttggatgagcaattttgtcagattgaggacttgcaggatgaagcaagccctaattttacagaagaagttgtttccctgttcttcaagaactcaaccaggctaatgacaaatattgagcaagctatgtaagtgttggcaatgtcttttttctcaaatacgcacaggagagatgcgatgtcataaactagaacaacactttgttatgtttacatgtttagtgacatcaagttttgttggaaatctgacaacactgtgcagggacaggaatcccagagatttctgtagatgggatgtaaacatgcagcaattaaaaggaacctgttctagcatcggtgcttgcaggatgaagaacgagtgcacctcattcagaaatagatgtggagacgagaacgttgaaggttgtatgaggtccttccagaacctgaagagggagcatggagtcctcaggcagaagctggaatcctacttccagctgctgcgacaagccggtcctgccgtgactgcaaccaggcctagaggcatgtaaggaacggctgttggcgtgcagggagcagtgcaagggacagacagcgtcatagcgatgctccactacgccattgttgaggctagctgtaacgatgggccacgaataagaagtttgcctatggcctgtgggggagttccctgcgggttttaaagtgtaacacccttcataatcgatgccttaagctggtgctgccgagtgccgactagctaggccggcatgtaagagcagcctagactgatgttgatgtggtctggcagacgtcctgtgctgtgcctgcctctgtatttcggtcaaataaataaactagatggagtttgcatgtttgcatc

SEQ ID NO: 150265 - DNA, 855 bp, Zea Mays
acaagcaaggtgaccaaccagttgcatatgcattttgtgcctactctacctttaaggcattcatttataaatggagtattctaatttgcagcagcaggcagcgtccttgaaaaagaacctctttgatcagggatacttggatgagcaattttgtcagattgaggacttgcaggatgaagcaagccctaattttacagaagaagttgtttccctgttcttcaagaactcaaccaggctaatgacaaatattgagcaagctatggacaggaatcccagagatttctgtagatgggatgtaaacatgcagcaattaaaaggaacctgttctagcatcggtgcttgcaggatgaagaacgagtgcacctcattcagaaatagatgtggagacgagaacgttgaaggttgtatgaggtccttccagaacctgaagagggagcatggagtcctcaggcagaagctggaatcctacttccagctgctgcgacaagccggtcctgccgtgactgcaaccaggcctagaggcatgtaaggaacggctgttggcgtgcagggagcagtgcaagggacagacagcgtcatagcgatgctccactacgccattgttgaggctagctgtaacgatgggccacgaataagaagtttgcctatggcctgtgggggagttccctgcgggttttaaagtgtaacacccttcataatcgatgccttaagctggtgctgccgagtgccgactagctaggccggcatgtaagagcagcctagactgatgttgatgtggtctggcagacgtcctgtgctgtgcctgcctctgtatttcggtcaaataaataaactagatggagtttgcatgtttgc

SEQ ID NO: 150266 - DNA, 315 bp, Zea Mays
aaaaagcatgtaaaatcgggttggctttggcagttcggctcttcttggctgttggcagtttcacgggctggatgtcatctcgtctgagcaagacctgttaaccagccattactgatacgcctgcctttcgtgttcgcagttgtatgaggtccttccagaacctgaagagggagcatggagtcctcaggcagaagctggaatcctacttccaggtattcattcacgcccagctccatccctaccattcatcgccttgctaatctcgcctgtgtgcagctgctgcgacaagccggtcctgccgtgactgcaaccagg

SEQ ID NO: 150267 - DNA, 244 bp, Zea Mays
atttcttttttaataggatggatttcatcctctttttggagcaaattttaactcattgtattccatatggaataagaggagaagaaaagcattccacgacccccgaggggccccctaaaaaagggaactattccttaaatttactttttttatttatttttattcgttttttgaaccccaacaaaagtggattcaaagttacttcaattatccttttcttttaagttcttcttgtaaagttcca

SEQ ID NO: 150268 - DNA, 2165 bp, Zea Mays
gccttgttgccttgctggctgctacagtgggtttcctctgctcgtctcgatcggtcggatcgaaggtcgttggctcgtgaaaagggctttcttccccaccggtcaccagccttttccccccttccctaccactactactagtactactattccgttcctctcacggcgtctcctgctgccctgagcactgcccctctctgtggttccctgctgccactactacccactcctcctcctcctctcccttggcgctacgcttctactttaaactctgcctgcctctgcgccgagacctttcctgcccttttggcctctctctgttctgttcactccccatgcttcttggcccgcaggcctctggaaaaagcttctgcccttttttccttccggtgaactagttagtgaagcttcttttctcgctctgttcctaaagttccaagttcctcgtcggcctgtgtgttcctgcccttgtattgtatctcagattgcaagccagaccctttcgtttcaaaaatcctgtttccataaagctgcagccctttttgcttcgaccaaggggcttccggtcctctgcatccgcacggcaccggcaccggcaccgtgtgttagctttcaggaaatcccgagctgatctccgcgagttcccattcccacgctgtagctgtagcttgtagtagggctctgtagccctgccctgcccaacccaacgcttgcatcgcagccgttcctgaagcagtgcagctctacgaaaaccacgccatgggccgcgcgatgaggtggctcaagaaggtgctcgccggcagcaagcaccaaggggacagggatcgcaaggcgcaaaacgccgcgtgcgccgccttgccgcccgcggagaagaggcggtggagcttcgccaagccgaggaacagcgtggctgacggcggcgcccggcggccctccgtcgccgccggggagctgtcgcaggtgcgcccgtgcagctgcggccaggagcgcgtggccgccgccgccgtcgtcatccagaaggccttcagaggatacttggctcggaaggcgctccgcgctctcaggtcgctggtgaagctgcaggctctggtgcgtgggtacctggcgaggaagcggaccgccatgacgctgcgcaggctgcaggcgctcatgaggctccaggcgtcatcccggagatccgtcgaacaagtgagggctactaataccagtcacattttaaagcatgaatgaaaacggatttgtttgtttatatctgactccgtttgaaacatactacttgtttgcgcttgcgctcaaaggagcggatcgccgcgcgggtgaagccactggccctgcccgcggcgcaccggcggcggctgtccgacggcggggacgaccgcagcccgaggatcgtggagatggacacgtgccagctccgctgccggtcgtcccggatcacgacgagccgctacttccacgagccggcgtggtgcctcctgcaggggccagagcaggtcgagcctgcgcacccgaagacgacgcacaacacgccccgcctcggcgcgttcccggggtacctcggctccccggcgaagccgcgcgcggccgcgtgccgggacgccgggagcagcccgcggtacatggcggacacggcctcgtccacggcgcgcgcccggttgcagagcgcgcccaggcagcacgcagggcgagagcaggcgacgaggcccagcgttggccgcagcgcgagcgggccgaggaagcagcaggacagcttcagcttccagagctccgaggccagccgcgtggaggtggagggctcggagctgagcgacgaggtcaccagagactactacctggaccgtctctggtgattccgaccgcgcccgaatgcatgcacacccccgtcgccaggaggaggaaggttaacaaatcaaatcagtacataccagtagtaccactattaggatcaaacaaggtctagtcgtctgatcatgcatggtgaaatgtcatgatatcgtgctagctagttcgttcgactactaatctctactgccagccatggagctcaagtacccagaggttgtacggtatcgtcatagagaaggaaataaattaaattgtgtactatacgtacacttctactactacatgtcacatttttttttcaaaaaaaaaggaaaaagaaa

SEQ ID NO: 150269 - DNA, 888 bp, Zea Mays
cacgatacccatatcgtggtgctagaagcaactgaaaacagccgagcgatctcctctccctctccctctccgatccattctccagcgcagcgaagtaaacatgtctgaccgggcaaagatgtcgtggcaggcgtacgtggacgagcacctgatgtgcgagatcgagggccaccacctcgcggcggcggccatcgtcggccacgacggtgccgcctgggcgcagagcacggcgttccccgagttcaagaccgaggacatggccaacatcatgaaggacttcgacgagccagggcacctcgcgccgacaggcctgttcctcggacctaccaagtacatggtcatccaaggcgagcctggtgccgtcatccgtggcaagaagggatcaggaggcatcaccgtgaagaagacagggcaggcactcgtggttggcatctacgacgagccgatgacgcctgggcagtgcaacatggtggtggaaaggctgggcgactacctgcttgaacagggcatgtaactactacgtaccagctggaatgcatgtcgacgacgatggtttcgagtttcgacttccaataatagtaacaacaaagcaaaggccttcctcccggcgtatttgctttggctcttctcctccacgccataagatatctagcaattggtgactcgccttaattagttcgctttgcttttgaggttgactcgaccattttgctgtagcgtgaattgcatggacatgcaacgctccaatggcctttggaatgtggaatttttttttcccgtttctgtatttttcctataaaatgaagtaatgaactggttcttatataattcctctcaaattcctattgttcaaaggagatgaaagcaaatactatatcctgtgctgat

SEQ ID NO: 150270 - DNA, 382 bp, Zea Mays
tcttgtttacactacacatgatttcctgtttgcgcgtagtcggttgggacaatgacttaattttgttggagttgctcggcagacagctaagagcagtttcagacatgcctgatgcttggacctgatcaaactaggagagcacaggaaatcgagagaagagagaagccaggagagggtcttcttacgtgggtattatttgatctttggtttggcaggccatgtattaattcgtagtgattatgttatctttcctactcgatcatttctattttcaaaatagatttgcctatttgatgaatatgaatctacttcctggaggctccatctatcatgtatttgctgcagaatataaggagttattaggcgtttggctgatgatcta

SEQ ID NO: 150271 - DNA, 1588 bp, Zea Mays
ttggggtgctagtcgttgccccctgccggcggataaccagaaaatctttggcctccgatccatgaagaagaccgtggttctctaccccggcctcgccgtcagccacttcatgcccatgatgcagctcgccgacgtcctcctggaagaaggctacgccgtcgtggtcgcgctcatcgacgtcaccaacgagcgcaacaccaccttcgccgcggccatcgaccgcgccatggcatcatcctctaagctggcggccaccttccacacgctcccccgaatccgcgaccctcccaccgtcaccaacgacgtcaacctgctcctcggatacttcgagatcatacggcgctacaacgagcacctccgcgagctgctccgctccatccctcggcagagcgtccacgcggtggtcgtggactcgctctccaacgcggcgctcgacgtcgcggccgagctcggcgtcccggcctacagcttcttcgcctccaacgcctccgcgctcgctgtatgcctccagctcccctgggcccgtgcggaaggccagccgccgagcttcaaggagctaggagacgccactgtcaacttccacggcgtcccacccatgccggcttctcacctcattcccgaagtgctcgaggaccccggcactgagatctacaaggcgatgatgaactcgctgagcaagaatctggaggccggcggcatactggtgaacacgttcgcgtcgctagaggctcgggcggtggcggccctcaaggacccgcactttctcgccgaaagcaggctcaggatgcctcccgtgtactgcgtcgggccactcgtcgagaaggctgctgagacgaaagaggagcacgcgtgtgacgcgtgtctcgcatggctcgacgagcaaccggagctcagcgtcgtgttcctgtgcttcggaagcgtagggtcaagcaaccactcggagacgcagcttaaggagatcgccgtcggcctcgagagatccggccagcggttcctctgggtggtgcgagctcctctcggcgacaacccggagagggagttcggcgacaaggctgacccggacctgcaggcgctcctgcccgaagggttcctggagaggaccagagggcgcggccttgtcgtcaagctatgggcgccgcaggtggcggtgctccagcacaaggcgacgggcgcgttcgtgacgcactgtgggtggaactctgtgctggagggggtcatggccggcgtgccgatgctctgctggccgttgtatgcggagcagaagatgaacaaggtgctcatggtggaggagctacggatcggcgtggagcttgctgggtggcaccagcatgggttggtgaaggccgaagagctggaggccaaggtgaggctggtcatggaggccgaggaaggggagcagcttagggcgcgcgtgagagcacacaaagggcatgccgcggacatggtctggaaggatggtggatcgtcgcgtgtatcgtttcgccagttcttgtcggacgtggtcaacgttagcccggatcggacactcggttgatgcatatgcatcggtcggattgtgaggagttaaaaagactgcagctctagatat

SEQ ID NO: 150272 - DNA, 862 bp, Zea Mays
agccttttcactgctccagcgaaggcacagccgccaccgtttcttgatctcccatcttcatcttcttcgtagcgccggcgctccatcttccgctccctcccttagtcgcgctcggcacgcgggtgacggcggcagtggcggcactcaggatcgggctctcagcgacggcatcagcggtttcccctcccgcttctctccagtcgcctcgcgccctcgcctccggtcctccgcacaccagccgatatagggtgtgagactaccaaaactcgaaaatgaacaagggaaagatttttaagctagccaagggattcagaggaagggcgaaaaattgcataaggatagcaagagagagggtggagaaggcgctgcaatattcatatagggatcgacgcaacaagaagagagacatgcggtctctttggattgagcgcatcaatgctggtacacgcctccatggggtgaactacggcaatttcatgcatgggttaatgaaggagaacatccaactcaacaggaaggtgctctcggagctgtcaatgcacgagccatacagcttcaaggctcttgtcgatgtgtctcggaatgcatttcctggcaacaggcctgttcctgccaaggaggggctagcgagcattctgtaaacgttttcttcccaataattaaacttgatggtttacatctacatctgaaagtgacctgtctgcttgtaacgtgacgaggaggtccgaaattgtcacgggcattgcacgtgttattcctctatttttttcccacctatctaattgcatgctttgtacctcatgcttataagttttctgaagaacgtgttccattcggtcttcaaagcttttagcagaatcaa

SEQ ID NO: 150273 - DNA, 826 bp, Zea Mays
acagccgccaccgtttcttgatctcccatcttcatcttcttcgtagcgccggcgctccatcttccgctccctcccttagtcgcgctcggcacgcgggtgacggcggcagtggcggcactcaggatcgggctctcagcgacggcatcagcggtttcccctcccgcttctctccagtcgcctcgcgccctcgcctccggtcctccgcacaccagccggtgaccctccatatagggtgtgagactaccaaaactcgaaaatgaacaagggaaagatttttaagctagccaagggattcagaggaagggcgaaaaattgcataaggatagcaagagagagggtggagaaggcgctgcaatattcatatagggatcgacgcaacaagaagagagacatgcggtctctttggattgagcgcatcaatgctggtacacgcctccatggggtgaactacggcaatttcatgcatgggttaatgaaggagaacatccaactcaacaggaaggtgctctcggagctgtcaatgcacgagccatacagcttcaaggctcttgtcgatgtgtctcggaatgcatttcctggcaacaggcctgttcctgccaaggaggggctagcgagcattctgtaaacgttttcttcccaataattaaacttgatggtttacatctacatctgaaagtgacctgtctgcttgtaacgtgacgaggaggtccgaaattgtcacgggcattgcacgtgttattcctctatttttttcccacctatctaattgcatgctttgtacctcatgcttataagttttctgaagaacgtgttccattcggtcttc

SEQ ID NO: 150274 - DNA, 772 bp, Zea Mays
aaaaatcaagcccaaaggcccaagcttcttttcttccccgcaaagaaagaagggaagagttctcggcttctcgcgagtcgcgacagagagaggcggagttgcggagaatatgcagagcagcagcatgaagagggagatcagcgaggcccacgacaccattcgcttcggcatcaacgccggcgtcaaagccgacctcgccccgccgcacccgctccagtctaccatccaatcggagaccaagttctgggcggacaagaagaagttcgggacagatgccatatatggatccgccctcaacatccgcaaggatctcgatgcccaaatcctctccaggttccaaaggccccctggtgctttgccgtcatctctgcttggatacgaggcactgacaggttccctggatgattttggatttgaagattatcttaacatgcctcatgattctgacagtttccgtcaacctgacatgcaccatggaatggaggttcgccttggtttgtccaagggacctatctgtcctagcttcaattgaggcagtaatgtaattctgctgcaagttcacctctcagtccagtacttcagtcaatagaccatattaagatggtgaaatatgaaaactggtagcttgcatctgttcaatgttatgttttaatcaacgctgaatttaatatttgtcaagtttgaacttttctggtttccttgccactgcgaggccatggaagcgaccaaatttatatatgtttgatgcgggttgtccatggttgccaaaacg

SEQ ID NO: 150275 - DNA, 622 bp, Zea Mays
aaaaatcaagcccaaaggcccaagcttcttttcttccccgcaaagaaagaagggaagagttctcggcttctcgcgagtcgcgacagagagaggcggagttgcggagaatatgcagagcagcagcatgaagagggagatcagcgaggcccacgacaccattcgcttcggcatcaacgccggcgtcaaagccgacctcgccccgccgcacccgctccagtctaccatccaatcggagaccaagttctgggcggacaagaagaagttcgggacagatgccatatatggatccgccctcaacatccgcaaggatctcgatgcccaaatcctctccaggttcttcactatcccctttgcggttgttcttaccggagaaatagagtttccttccatcaatagttcaatacgttagtggttgatgggagcgctaaaaaaaatgcccatctggatctggcgggaagtttaggtgaattcctgaagctttgttactttcctcatgatatgcatactaggaagattagtgcacttcgccgcacccatgtttgttgccatcgaaataaaattgatttgattacctgcgttgtagaaagatgttgagtattacctagttaaggcagggtagctt

SEQ ID NO: 150276 - DNA, 1073 bp, Zea Mays
ccatggcagtggttgagctgtggttgctgcctgttggctctctcagtcgcagcttctgttcctccgatctggtcgcttccaacgtctctgcgcgtccaacgcttctcaccttccctctcacacgcaccccacccgccagtcacagctaccacgcagctgcacggtgcacccatctgcgatctatatatcccgcggcgcggctcacttatcacgtgacctcgccgccggcgcgctagctctctctgtcgatggaaaattcgacgctccacggaggaagctgccaacaaccaaacactcagctggatacggcttcgtgcctgcttgccccgctgccgccggtggtagccgagccacagccggagcagcagcatgcatgcaccgatgcgccgccgacgtctctcgcccctggcgcggcgatgagttgcccaccgccgccggctgccgtggactgggcgtcgctgcttctaccgcccagcacgtcgggcgcgagcgaggtcggctgcggtgtcagcgctgtgacgacggtggctgccggaagcaaagctggtgcgacggcgggagagggagataatagtaagaccgtaaaagctgggaagcagggcggcgggagagggaagaacaaggtgagccggccacggttcgcgttccagacgcggagcgagaacgacatcctcgacgacggctaccggtggaggaagtacgggcagaaggccgtcaagaacaccgcatttccaaggagctactaccggtgcacgcaccatacgtgcgacgtgaagaagcaggtgcagcggctggccaaggacacgagcatagtggtgaccacgtacgagggcgtgcacaaccacccgtgcgagaagctcatggaggcgctcagccccatcctcaaacagctccagctcctctctcagctccagtcttgcactaatcaactcctctgaatattgatgtgtggcctagccatcatcagtgttaactaatgcaaatttactgctaagtgtacaaaacaaactcacatgatgacttctttcaagtacccataaaatattattagttgttccgtgattaaatgataa

SEQ ID NO: 150277 - DNA, 1174 bp, Zea Mays
aaaaatcaaaaatagaaaaagtctcttgcccccgcggccgtgccgagccggcatcccctcccccagcaacgatcgcgacgacccaaaccggcaagggtgaccagcggctggccgccgccgcggcagacgagtcccatgggagacaacaagtctccgctgagcctgagcccgatgggcgggcgcgaccgggaccgggagctcctcatcccggtctccggcggcggctcggcgcccggcgtcgatgacgaggacgctgacagggcctcctccgcctccgcggcgctctcctcctccggccgcgaggctttccataaggtcgtccgcagttgggcttcaaagaagttcatgactggatgtgtaattctcttccccatagcaataacgttctacatcacctggtggttcattcattttgttgatggattcttctctccaatatatgcacaactaggaatcaacatatttggtcttggcttcatcacatctgttactttcatatttttgatcggagtctttatgtcatcttgggttggggcatctgtccttagccttggcgagtggattattaagcgcatgccccttgttcgtcatatctacaatgcatcgaagcaaattagtgctgcaatatcaccagatcagaacaaacaggcattcaaggaagcggtcatcataaggcatcctcgtgttggagaatatgcgtttggtttcatcacatcgtcagtatctctccagagttattccggtcaagaagatctttactgtgtctatgtcccaacgaaccatctttacattggcgatatcttcatggtgaattcaaaggatgtcataaggccaaacctttccgtgcgtgaaggcatcgaaatcgttgtgtctggtggtatgtcaatgccccagattctgtcaaccctcgacccggagatgatccttggtgacagaaccggaccaagcagaagctgaagctgccacgagccctttgtgtaacttttgtagtggtttgctagtaacattttcatacaggctaccaagagtacggcgaactgaacttggagcacaagtatctctgtattaagggttgagctgtgccttttttttgttttgaaaaagctgctgtgagttatgtgttatacaatagctgttgtgagttgtgaaaggaaaaaaaatcatttggtggaac
